United States Patent Application Publication US 2004/0234960 A1 - sequence listing, part 12

SEQ ID NO: 37164 - DNA, 1086 bp, Artificial Sequence
  chemically treated genomic DNA (Homo sapiens) CpG-island No: 37164
acgatacaacctttcccccatccgcgctccctccaactccaaccgtacgcaaccgaccccgaccaaataaaactaccgccgaatacgccccctcccgaaacgcccaccctcgtaccgaaaaacgatactacgacgacgcgaaacgaaccgcgaaaacgaaaacgctaaacgcaaaaaacgcgaccgaaaacgccgcgcgccgaaaacgaaacgacgaacgccgaaactaacataacgtaaccctatatcaaccgcctatactacctaacgcgacgctaaaaccaactaaaccgctccgacgtaacgataccgctcactctacacgactactcgaacctcgacaacgaaaaaccgaacacgaacgacgccgcctcgcgcaaaaaccaacctcccgcgaacgcccgaaattccgaccgaaacgtaccgctcactcaataccaacgaaacttcgacttataaaccacgcccgccgaacccaaaaatccgccgccgaaacgcgaaccgaaaacgaacgaccgcaaaaacaaatcctccgcgcaatcctccgcgccacctacgcccgacgcccgcgaaatctacgtactacccatcgacgacgcgaacgcgactacaacaataaccacgtcgtacaaatataaactaaataaaaaccgcaacgaatccccaccctataataaaaaaacgcgaaaacccgaaaccaaaaaaataaaataaacgacaaaacgaaaacgcctaaaacccgaatcccacgcgacctcgaaactaccgacgacctcaaaaatcacccccgtttaatccgtaaacactacaaacgacgccttcgctactccatacccgaactcaatactcgaacacccccgtaccgaaaacgcaccgctaccctcgcaaccgccctcctaaaaacaaccgtcaaaataacctaccttcaaccgaattaaaaccgacctccctttaactcccaccgccgaacctaaccgtacgaaaaatacgcgcaaaccatatcccccaactctctccgatcactacctaatatacgaacgttaataataaaaaccgaacgcaaaatcccgtataaataaacccttc

SEQ ID NO: 37165 - DNA, 695 bp, Artificial Sequence
  chemically treated genomic DNA (Homo sapiens) CpG-island No: 37165
cgcggagaagacggttattacgtatacgaaggcgggggtttcgttttgttggaattgtcgtcgcgtcgcgcgttttaggttttcgacgtcgtcgtcgttcgcgttcgcgttttgtaggttggtgttcgattcggcggtagttaggaggttgtatttttcggtcgcgttcgtcgcgttcggtttcggttgttttttgcgtcgttcgtttattaggttgtttaggtttcgtagcgtgtattttatattttcgtttgttttgcgggatatagggtaggggttcggggttgttcggggggacgcggtttcgcgggtcggtagtttcggcgagttagatagttcgagtcggcgggagtaatcgtcgttgtcgtcgttttttttttttcggttttcgtttcggttgttacggtagtagtcgtcgttacggtcgtttcggggagaaagttgttgttcgtcgcgtttcgacgttgcggagttggagttcggcgggttttattttatatttacgtttcgcgtttgtcgagttggcgttgcggagcgggcgggaggcgggatcgcgggttacgtgtaatttcgggtcggcggggcggggttcgggaaacgtttcgttttttttttgggcggggttaggtttagttcgtttcggatttttaaatttcgttttttcggtgggtgcgatttttgatttaggttttttt

SEQ ID NO: 37166 - DNA, 695 bp, Artificial Sequence
  chemically treated genomic DNA (Homo sapiens) CpG-island No: 37166
aaaaaaacctaaatcaaaaatcgcacccaccgaaaaaacgaaatttaaaaatccgaaacgaactaaacctaaccccgcccaaaaaaaaaacgaaacgtttcccgaaccccgccccgccgacccgaaattacacgtaacccgcgatcccgcctcccgcccgctccgcaacgccaactcgacaaacgcgaaacgtaaatataaaataaaacccgccgaactccaactccgcaacgtcgaaacgcgacgaacaacaactttctccccgaaacgaccgtaacgacgactactaccgtaacaaccgaaacgaaaaccgaaaaaaaaaaaacgacgacaacgacgattactcccgccgactcgaactatctaactcgccgaaactaccgacccgcgaaaccgcgtccccccgaacaaccccgaacccctaccctatatcccgcaaaacaaacgaaaatataaaatacacgctacgaaacctaaacaacctaataaacgaacgacgcaaaaaacaaccgaaaccgaacgcgacgaacgcgaccgaaaaatacaacctcctaactaccgccgaatcgaacaccaacctacaaaacgcgaacgcgaacgacgacgacgtcgaaaacctaaaacgcgcgacgcgacgacaattccaacaaaacgaaacccccgccttcgtatacgtaataaccgtcttctccgcg

SEQ ID NO: 37167 - DNA, 695 bp, Artificial Sequence
  chemically treated genomic DNA (Homo sapiens) CpG-island No: 37167
gagggagtttaggttagaggtcgtatttatcgggagggcggggtttaggggttcggggcgggttgagtttggtttcgtttaaggagggggcgggacgtttttcgggtttcgtttcgtcggttcggggttgtacgtgattcgcggtttcgtttttcgttcgtttcgtagcgttagttcggtaggcgcggggcgtgagtgtggagtgagattcgtcgggttttaatttcgtagcgtcggagcgcggcgggtagtaatttttttttcggagcggtcgtggcggcggttgttgtcgtggtagtcggagcggaagtcgggaggaagaaagcggcggtagcggcggttgttttcgtcggttcgggttgtttagttcgtcgagattgtcggttcgcggagtcgcgttttttcgggtagtttcgggtttttgttttatgtttcgtaaggtaagcgagaatgtggagtatacgttgcggagtttgagtagtttgatgggcgagcggcgtaggaagtagtcggagtcggacgcggcgagcgcggtcggggagtgtagttttttggttgtcgtcgaatcgagtattagtttgtagagcgcgggcgcgggcggcggcggcgtcggggatttggagcgcgcggcgcggcggtagttttagtaggacgagattttcgttttcgtgtacgtggtggtcgtttttttcgcg

SEQ ID NO: 37168 - DNA, 695 bp, Artificial Sequence
  chemically treated genomic DNA (Homo sapiens) CpG-island No: 37168
cgcgaaaaaaacgaccaccacgtacacgaaaacgaaaatctcgtcctactaaaactaccgccgcgccgcgcgctccaaatccccgacgccgccgccgcccgcgcccgcgctctacaaactaatactcgattcgacgacaaccaaaaaactacactccccgaccgcgctcgccgcgtccgactccgactacttcctacgccgctcgcccatcaaactactcaaactccgcaacgtatactccacattctcgcttaccttacgaaacataaaacaaaaacccgaaactacccgaaaaaacgcgactccgcgaaccgacaatctcgacgaactaaacaacccgaaccgacgaaaacaaccgccgctaccgccgctttcttcctcccgacttccgctccgactaccacgacaacaaccgccgccacgaccgctccgaaaaaaaaattactacccgccgcgctccgacgctacgaaattaaaacccgacgaatctcactccacactcacgccccgcgcctaccgaactaacgctacgaaacgaacgaaaaacgaaaccgcgaatcacgtacaaccccgaaccgacgaaacgaaacccgaaaaacgtcccgccccctccttaaacgaaaccaaactcaacccgccccgaacccctaaaccccgccctcccgataaatacgacctctaacctaaactccctc

SEQ ID NO: 37169 - DNA, 511 bp, Artificial Sequence
  chemically treated genomic DNA (Homo sapiens) CpG-island No: 37169
cgttcgggtgtcggttataatgtttcgggttacggcgttaggtattggggcggcgggttcgggatttgcgagcgagtgtttcggattttttcgtttcgttagttttagattcgggcgttgttgtcgttaggtcgcgcgtttcgtttcgtttatcgagttcgtagacgggtgttatttacggcgggaggttgagttgtcgcggtcgcggtcgcggtaggcgcggcgggagcggcgggcgcggcgggcgcggcgggcgcggcgggcgcggcgggaacgggggacgcggcggggtgcgttgggttcggttttgtagttttttttttttagagcgttcggtattcgttcgtcgagtagattaggagtcgagggggcggagcggttagtttcgttttaggcgtcggttggaggcgcgttcggttgttcgggacggggttcggggcgttttttgttggagttttttttcggatagtttcggggcgagagtttagtttttcggtcgggtaggggatat

SEQ ID NO: 37170 - DNA, 511 bp, Artificial Sequence
  chemically treated genomic DNA (Homo sapiens) CpG-island No: 37170
atatcccctacccgaccgaaaaactaaactctcgccccgaaactatccgaaaaaaaactccaacaaaaaacgccccgaaccccgtcccgaacaaccgaacgcgcctccaaccgacgcctaaaacgaaactaaccgctccgccccctcgactcctaatctactcgacgaacgaataccgaacgctctaaaaaaaaaaaactacaaaaccgaacccaacgcaccccgccgcgtcccccgttcccgccgcgcccgccgcgcccgccgcgcccgccgcgcccgccgctcccgccgcgcctaccgcgaccgcgaccgcgacaactcaacctcccgccgtaaataacacccgtctacgaactcgataaacgaaacgaaacgcgcgacctaacgacaacaacgcccgaatctaaaactaacgaaacgaaaaaatccgaaacactcgctcgcaaatcccgaacccgccgccccaatacctaacgccgtaacccgaaacattataaccgacacccgaacg

SEQ ID NO: 37171 - DNA, 511 bp, Artificial Sequence
  chemically treated genomic DNA (Homo sapiens) CpG-island No: 37171
gtgttttttattcggtcgggaagttgggttttcgtttcgggattgttcgggagggggttttagtagggggcgtttcgagtttcgtttcgggtagtcgggcgcgtttttagtcggcgtttgggacggggttggtcgtttcgttttttcggtttttagtttgttcggcgggcgggtgtcgggcgttttgggaggagaggattgtagggtcgagtttagcgtatttcgtcgcgtttttcgttttcgtcgcgttcgtcgcgttcgtcgcgttcgtcgcgttcgtcgttttcgtcgcgtttgtcgcggtcgcgatcgcggtagtttagtttttcgtcgtgagtagtattcgtttgcgggttcgatgggcgggacggggcgcgcggtttgacggtagtagcgttcgggtttggggttggcggggcgaagagattcggggtattcgttcgtagatttcgggttcgtcgttttaatgtttgacgtcgtggttcggggtattgtggtcggtattcgagcg

SEQ ID NO: 37172 - DNA, 511 bp, Artificial Sequence
  chemically treated genomic DNA (Homo sapiens) CpG-island No: 37172
cgctcgaataccgaccacaataccccgaaccacgacgtcaaacattaaaacgacgaacccgaaatctacgaacgaataccccgaatctcttcgccccgccaaccccaaacccgaacgctactaccgtcaaaccgcgcgccccgtcccgcccatcgaacccgcaaacgaatactactcacgacgaaaaactaaactaccgcgatcgcgaccgcgacaaacgcgacgaaaacgacgaacgcgacgaacgcgacgaacgcgacgaacgcgacgaaaacgaaaaacgcgacgaaatacgctaaactcgaccctacaatcctctcctcccaaaacgcccgacacccgcccgccgaacaaactaaaaaccgaaaaaacgaaacgaccaaccccgtcccaaacgccgactaaaaacgcgcccgactacccgaaacgaaactcgaaacgccccctactaaaaccccctcccgaacaatcccgaaacgaaaacccaacttcccgaccgaataaaaaacac

SEQ ID NO: 37173 - DNA, 544 bp, Artificial Sequence
  chemically treated genomic DNA (Homo sapiens) CpG-island No: 37173
cgtcgggtaggagtagcgcgtgggtcgatttgttgtagtttaggatgattcgtaggttttgcgaggcggtttcgtttacgaatattgaggggatggcgatttggttttttaagttttcgtagacgtgggttatgtttacgaggtcgtcggagtggacgttgtgtacgatggtcgtttcgaagtcggcgcgttgggcgtttagtattttgaggtcgaaggtgtagtcgtagcggcggattagtacgatggcgtttagagagcggttgtttagtcgcggggtttcgatgggatggtacgcgttggttggtttgatttttattaggtagtttcgtatgttttcgggggttagggggacgtcgaatagcgtcggtagattcgtaaagtttatcgagttcgagttgttttttagtacggttcgtattatcgtttgcgcgggtatttggagtagcgataagattagtaaggttttgattgttacgagggttcggttcggtcgtggttattttatggttattcgtttcgttgtttgtgtgttgttaggttt

SEQ ID NO: 37174 - DNA, 544 bp, Artificial Sequence
  chemically treated genomic DNA (Homo sapiens) CpG-island No: 37174
aaacctaacaacacacaaacaacgaaacgaataaccataaaataaccacgaccgaaccgaaccctcgtaacaatcaaaaccttactaatcttatcgctactccaaatacccgcgcaaacgataatacgaaccgtactaaaaaacaactcgaactcgataaactttacgaatctaccgacgctattcgacgtccccctaacccccgaaaacatacgaaactacctaataaaaatcaaaccaaccaacgcgtaccatcccatcgaaaccccgcgactaaacaaccgctctctaaacgccatcgtactaatccgccgctacgactacaccttcgacctcaaaatactaaacgcccaacgcgccgacttcgaaacgaccatcgtacacaacgtccactccgacgacctcgtaaacataacccacgtctacgaaaacttaaaaaaccaaatcgccatcccctcaatattcgtaaacgaaaccgcctcgcaaaacctacgaatcatcctaaactacaacaaatcgacccacgcgctactcctacccgacg

SEQ ID NO: 37175 - DNA, 544 bp, Artificial Sequence
  chemically treated genomic DNA (Homo sapiens) CpG-island No: 37175
ggatttagtagtatatagatagcgaagcgggtgattatggggtggttacggtcgggtcgagttttcgtggtagttaaagttttgttggttttgtcgttgttttaggtgttcgcgtaggcggtggtacgggtcgtgttggaagataattcgagttcggtggattttgcggatttgtcggcgttgttcggcgtttttttggttttcgagggtatacggggttatttgatggaggttaagttagttaacgcgtgttattttatcgaggtttcgcgattgggtaatcgttttttgggcgttatcgtgttgattcgtcgttacgattgtattttcgattttaaggtgttgaacgtttagcgcgtcggtttcgaggcggttatcgtgtataacgtttatttcgacgatttcgtgagtatgatttacgtttacgaggatttgaggggttagatcgttatttttttagtgttcgtgagcgaggtcgtttcgtaggatttgcgggttattttgggttgtaataagtcggtttacgcgttgtttttgttcgacg

SEQ ID NO: 37176 - DNA, 544 bp, Artificial Sequence
  chemically treated genomic DNA (Homo sapiens) CpG-island No: 37176
cgtcgaacaaaaacaacgcgtaaaccgacttattacaacccaaaataacccgcaaatcctacgaaacgacctcgctcacgaacactaaaaaaataacgatctaacccctcaaatcctcgtaaacgtaaatcatactcacgaaatcgtcgaaataaacgttatacacgataaccgcctcgaaaccgacgcgctaaacgttcaacaccttaaaatcgaaaatacaatcgtaacgacgaatcaacacgataacgcccaaaaaacgattacccaatcgcgaaacctcgataaaataacacgcgttaactaacttaacctccatcaaataaccccgtataccctcgaaaaccaaaaaaacgccgaacaacgccgacaaatccgcaaaatccaccgaactcgaattatcttccaacacgacccgtaccaccgcctacgcgaacacctaaaacaacgacaaaaccaacaaaactttaactaccacgaaaactcgacccgaccgtaaccaccccataatcacccgcttcgctatctatatactactaaatcc

SEQ ID NO: 37177 - DNA, 529 bp, Artificial Sequence
  chemically treated genomic DNA (Homo sapiens) CpG-island No: 37177
gtaggaatgtggagtataggtagtatttcggtatcgtggtgaggttaatcggtataggaacgtggagtataggtagtattttagtatcgtggtgaggttaatcggtgtaggaacgtggagtataggtagtattcgggtatcgcggtgaggttaattggtgtaggaatacggagtagaagtagtattcgggtatcgcggtgaggttaataggtataggaacgtggagtagaggtagaattcgggtatcgcggtgaggttaatcggtgtaggaacgtggagtagaattagtatttgggtatcgcggtgaggttaatcggtgtaggaacgtggagtagaattagtatttgggtattacggtgaggttaatcggtgtaggaacgtggagtagaggtagtatttgggtattatagtgaggttaattggtgcgggaacgtggagtagaagtagtattcgggtatcgtaggaggttaatcggtgtaggaatttgtagtggtcgttttttttgtatagtttttagagtcggtgttta

SEQ ID NO: 37178 - DNA, 529 bp, Artificial Sequence
  chemically treated genomic DNA (Homo sapiens) CpG-island No: 37178
taaacaccgactctaaaaactatacaaaaaaaacgaccactacaaattcctacaccgattaacctcctacgatacccgaatactacttctactccacgttcccgcaccaattaacctcactataatacccaaatactacctctactccacgttcctacaccgattaacctcaccgtaatacccaaatactaattctactccacgttcctacaccgattaacctcaccgcgatacccaaatactaattctactccacgttcctacaccgattaacctcaccgcgatacccgaattctacctctactccacgttcctatacctattaacctcaccgcgatacccgaatactacttctactccgtattcctacaccaattaacctcaccgcgatacccgaatactacctatactccacgttcctacaccgattaacctcaccacgatactaaaatactacctatactccacgttcctataccgattaacctcaccacgataccgaaatactacctatactccacattcctac

SEQ ID NO: 37179 - DNA, 529 bp, Artificial Sequence
  chemically treated genomic DNA (Homo sapiens) CpG-island No: 37179
taagtatcggttttgggggttgtgtaagaagggcgattattgtaagtttttgtatcggttgattttttgcgatgttcgaatgttatttttattttacgttttcgtattagttgattttattgtgatgtttaaatgttgtttttattttacgtttttatatcggttgattttatcgtgatgtttaagtgttaattttattttacgtttttgtatcggttgattttatcgcgatgtttaagtgttaattttattttacgtttttgtatcggttgattttatcgcgatgttcgaattttatttttattttacgtttttgtatttgttgattttatcgcgatgttcgaatgttatttttatttcgtgtttttgtattagttgattttatcgcgatgttcgaatgttatttgtattttacgtttttatatcggttgattttattacgatgttggaatgttatttgtattttacgtttttgtatcggttgattttattacgatgtcggaatgttatttgtattttatatttttgt

SEQ ID NO: 37180 - DNA, 529 bp, Artificial Sequence
  chemically treated genomic DNA (Homo sapiens) CpG-island No: 37180
acaaaaatataaaatacaaataacattccgacatcgtaataaaatcaaccgatacaaaaacgtaaaatacaaataacattccaacatcgtaataaaatcaaccgatataaaaacgtaaaatacaaataacattcgaacatcgcgataaaatcaactaatacaaaaacacgaaataaaaataacattcgaacatcgcgataaaatcaacaaatacaaaaacgtaaaataaaaataaaattcgaacatcgcgataaaatcaaccgatacaaaaacgtaaaataaaattaacacttaaacatcgcgataaaatcaaccgatacaaaaacgtaaaataaaattaacacttaaacatcacgataaaatcaaccgatataaaaacgtaaaataaaaacaacatttaaacatcacaataaaatcaactaatacgaaaacgtaaaataaaaataacattcgaacatcgcaaaaaatcaaccgatacaaaaacttacaataatcgcccttcttacacaacccccaaaaccgatactta

SEQ ID NO: 37181 - DNA, 652 bp, Artificial Sequence
  chemically treated genomic DNA (Homo sapiens) CpG-island No: 37181
atagacgtcgcgttatattttagattttgcgtcgtattttatagattttgcgttttatattatagacgtcgcgttatattttatagacgtcgtgttatattttatagattttgcgttttattttatagacgtcgcgttatattttatagatttcgcgttttattttatagatttcgcgttttattttatagacgtcgcgttatattttatagacgtcgcgttatattttatagacgtcgcgttatattttatagacgtcgtgttatattttatagattttgcgtcgtattttatagattttgcgttttacgttatagacgtcgcgttatattttatagacgtcgcgttatattttatagacgtcgcgttatattttatagacgtcgtgttatattttatagattttgcgtcgtattttatagacgtcgcgtcgtattttatagacgtcgcgttatattttatagacgtcgcgttatattttatagattttgcgtcgtattttatagattttgcgttttacgttatagacgtcgcgtagtattttatatattttgcgtcgtattttatagacgtcgcgttttattttatagatttatagacgttgtatcgtattgtatagatattgtatttttatagatattgtatcgtattt

SEQ ID NO: 37182 - DNA, 652 bp, Artificial Sequence
  chemically treated genomic DNA (Homo sapiens) CpG-island No: 37182
aaatacgatacaatatctataaaaatacaatatctatacaatacgatacaacgtctataaatctataaaataaaacgcgacgtctataaaatacgacgcaaaatatataaaatactacgcgacgtctataacgtaaaacgcaaaatctataaaatacgacgcaaaatctataaaatataacgcgacgtctataaaatataacgcgacgtctataaaatacgacgcgacgtctataaaatacgacgcaaaatctataaaatataacacgacgtctataaaatataacgcgacgtctataaaatataacgcgacgtctataaaatataacgcgacgtctataacgtaaaacgcaaaatctataaaatacgacgcaaaatctataaaatataacacgacgtctataaaatataacgcgacgtctataaaatataacgcgacgtctataaaatataacgcgacgtctataaaataaaacgcgaaatctataaaataaaacgcgaaatctataaaatataacgcgacgtctataaaataaaacgcaaaatctataaaatataacacgacgtctataaaatataacgcgacgtctataatataaaacgcaaaatctataaaatacgacgcaaaatctaaaatataacgcgacgtctat

SEQ ID NO: 37183 - DNA, 652 bp, Artificial Sequence
  chemically treated genomic DNA (Homo sapiens) CpG-island No: 37183
aagtgcgatgtagtatttatgaaaatgtagtgtttgtgtagtgcggtgtagcgtttgtgaatttgtgaggtggggcgcggcgtttgtgagatgcggcgtagggtgtgtgaggtgttacgcggcgtttgtgacgtagggcgtagggtttgtgaggtgcggcgtagggtttgtgaggtgtggcgcggcgtttgtgaggtgtggcgcggcgtttgtgaggtgcggcgcggcgtttgtgaggtgcggcgtagggtttgtgaggtgtggtacggcgtttgtgaggtgtggcgcggcgtttgtgaggtgtggcgcggcgtttgtgaggtgtggcgcggcgtttgtgacgtagggcgtagggtttgtgaggtgcggcgtagggtttgtgaggtgtggtacggcgtttgtgaggtgtggcgcggcgtttgtgaggtgtggcgcggcgtttgtgaggtgtggcgcggcgtttgtgaggtggggcgcggggtttgtgaggtggggcgcggggtttgtgaggtgtggcgcggcgtttgtgaggtggggcgtagggtttgtgaggtgtggtacggcgtttgtgaggtgtggcgcggcgtttgtgatgtagggcgtagggtttgtgaggtgcggcgtagggtttgaggtgtggcgcggcgtttgt

SEQ ID NO: 37184 - DNA, 652 bp, Artificial Sequence
  chemically treated genomic DNA (Homo sapiens) CpG-island No: 37184
acaaacgccgcgccacacctcaaaccctacgccgcacctcacaaaccctacgccctacatcacaaacgccgcgccacacctcacaaacgccgtaccacacctcacaaaccctacgccccacctcacaaacgccgcgccacacctcacaaaccccgcgccccacctcacaaaccccgcgccccacctcacaaacgccgcgccacacctcacaaacgccgcgccacacctcacaaacgccgcgccacacctcacaaacgccgtaccacacctcacaaaccctacgccgcacctcacaaaccctacgccctacgtcacaaacgccgcgccacacctcacaaacgccgcgccacacctcacaaacgccgcgccacacctcacaaacgccgtaccacacctcacaaaccctacgccgcacctcacaaacgccgcgccgcacctcacaaacgccgcgccacacctcacaaacgccgcgccacacctcacaaaccctacgccgcacctcacaaaccctacgccctacgtcacaaacgccgcgtaacacctcacacaccctacgccgcatctcacaaacgccgcgccccacctcacaaattcacaaacgctacaccgcactacacaaacactacattttcataaatactacatcgcactt

SEQ ID NO: 37185 - DNA, 1974 bp, Artificial Sequence
  chemically treated genomic DNA (Homo sapiens) CpG-island No: 37185
ttagtttttttcgttagcgcgcgttcgcgcgttttttagttagttttacgttattttgattgatagtttagtttcgtcgtttttttttttatcgatttttttattattagtgttaattttcgcgaatcgtcgttttttattggttggttttggcgtttcgcggtttttttaggaatagttttttattaagttcgggaggacgcggttggcggaggaggggtcgggatgggaagggagatcgaggagacggcggagatggaagcgagaggagggggggagggagaacgtttcgttcggcgttgcgttgttataggtttcggggaggagcgcgttagcgttttacgttggttgtagcgtacgcgattggttgatgcgggttttttgtttttttttatttttaatttttcgggtttacgtttttcgtcggtttcgcgttcgcgtttttcgttcgaacggggttgggcggggtcggcgttggttagtttcggagtgtgaaatcgcgtgttaatgtaagcggcgcgagaggcgcgggcggcggcggcggtgggagcggcggttgtagaagtagtagtagtagaaatagcggcgggtattttgtgtttcgcgtttcggaggtagtcgattgcgttattttattttcgtacggtcgggcgggattcgcgttattagttcggattttcgtcgtttcgcggcgattaaaattttcgttggttttatcgttgtgattattttggattcgttcgtagagtttgttcgtcggggagggtggtcgattggcggagcgtatttttgttgttttttttattatttcgtggatgtcgtttttcgggtggtgagagaattttgtagtgggttggagcgttttttgcggagaagtatacgaaggtgaaggaaggaaagaaagaagatcgaggaagaaggagttcggaagaagggttcggagcggtcggttcggtcgtgtagggcgagtgcgttcgaggcgcggcgttttgatgtttttcgggttcgaggagtattgggtatttgcgggattgttttcggtggagtagtttcgtcgggttcggagggtttgtgtaatcgcggagaatatcgagtgttggtcgtacggggcgtgtcgagtcgtttttcggcgcgtttttcgtatttttttcgtttcgttattcgtcgtttttcggttaggagttttcgttgcgtttttaatttcgtttttttttgcgtttcgggagtttgcgagtattcggtcgaaggcgtagtcgaattttgcgggagtcgtttcgaaagcgtcgggtttgtgtggggttagcgggggtcgtcgcgttatttgtatttcgttcgtcgtcgtttcggggaaagttcgaagaggaggcggattaggagaagagtaaagaaaagtagttcgtttggatttgtttgtttaggattggcgtcgcgtacgcggatcgtcgaggggagtgcggtcggagttatcgcgttttcgttttttcgttcgggtagttgaggtcgggggttggagcgttgttttcgcgtatagttttcgagcgttcgacgttttcgcgtaggtttttgaagtagttgggtttggggcgtttattaatgtggttttgagggtcggagttcgtatcgacgggagcgggagtcggagtagttgcgggcgtcgagtggtcggtgcgttcggcggagcgcgcgtgcgtggttagcgcgtttttcgtttttgtttggtttttcggtttaatttttttcggcgggattaaagttggaaattgatcggagaattgagttgtcggggaatagagtttcggtcgtcgttagagcgatgttttcgtagagtcggtattcggtgaggcgcggttgggtggtggtggggggttaggatcgttggggaggcgtttttttcgggcggtagggagattggtggtttttgaggttcggcggattttttcgtttttagcggtgtaaggttggggaggtttgggg

SEQ ID NO: 37186 - DNA, 1974 bp, Artificial Sequence
  chemically treated genomic DNA (Homo sapiens) CpG-island No: 37186
ccccaaacctccccaaccttacaccgctaaaaacgaaaaaatccgccgaacctcaaaaaccaccaatctccctaccgcccgaaaaaaacgcctccccaacgatcctaaccccccaccaccacccaaccgcgcctcaccgaataccgactctacgaaaacatcgctctaacgacgaccgaaactctattccccgacaactcaattctccgatcaatttccaactttaatcccgccgaaaaaaattaaaccgaaaaaccaaacaaaaacgaaaaacgcgctaaccacgcacgcgcgctccgccgaacgcaccgaccactcgacgcccgcaactactccgactcccgctcccgtcgatacgaactccgaccctcaaaaccacattaataaacgccccaaacccaactacttcaaaaacctacgcgaaaacgtcgaacgctcgaaaactatacgcgaaaacaacgctccaacccccgacctcaactacccgaacgaaaaaacgaaaacgcgataactccgaccgcactcccctcgacgatccgcgtacgcgacgccaatcctaaacaaacaaatccaaacgaactacttttctttactcttctcctaatccgcctcctcttcgaactttccccgaaacgacgacgaacgaaatacaaataacgcgacgacccccgctaaccccacacaaacccgacgctttcgaaacgactcccgcaaaattcgactacgccttcgaccgaatactcgcaaactcccgaaacgcaaaaaaaaacgaaattaaaaacgcaacgaaaactcctaaccgaaaaacgacgaataacgaaacgaaaaaaatacgaaaaacgcgccgaaaaacgactcgacacgccccgtacgaccaacactcgatattctccgcgattacacaaaccctccgaacccgacgaaactactccaccgaaaacaatcccgcaaatacccaatactcctcgaacccgaaaaacatcaaaacgccgcgcctcgaacgcactcgccctacacgaccgaaccgaccgctccgaacccttcttccgaactccttcttcctcgatcttctttctttccttccttcaccttcgtatacttctccgcaaaaaacgctccaacccactacaaaattctctcaccacccgaaaaacgacatccacgaaataataaaaaaaacaacaaaaatacgctccgccaatcgaccaccctccccgacgaacaaactctacgaacgaatccaaaataatcacaacgataaaaccaacgaaaattttaatcgccgcgaaacgacgaaaatccgaactaataacgcgaatcccgcccgaccgtacgaaaataaaataacgcaatcgactacctccgaaacgcgaaacacaaaatacccgccgctatttctactactactacttctacaaccgccgctcccaccgccgccgccgcccgcgcctctcgcgccgcttacattaacacgcgatttcacactccgaaactaaccaacgccgaccccgcccaaccccgttcgaacgaaaaacgcgaacgcgaaaccgacgaaaaacgtaaacccgaaaaattaaaaataaaaaaaaacaaaaaacccgcatcaaccaatcgcgtacgctacaaccaacgtaaaacgctaacgcgctcctccccgaaacctataacaacgcaacgccgaacgaaacgttctccctccccccctcctctcgcttccatctccgccgtctcctcgatctcccttcccatcccgacccctcctccgccaaccgcgtcctcccgaacttaataaaaaactattcctaaaaaaaccgcgaaacgccaaaaccaaccaataaaaaacgacgattcgcgaaaattaacactaataataaaaaaatcgataaaaaaaaaaacgacgaaactaaactatcaatcaaaataacgtaaaactaactaaaaaacgcgcgaacgcgcgctaacgaaaaaaactaa

SEQ ID NO: 37187 - DNA, 1974 bp, Artificial Sequence
  chemically treated genomic DNA (Homo sapiens) CpG-island No: 37187
ttttagatttttttagttttatatcgttgagggcgagaaggttcgtcgggttttagaagttattagtttttttatcgttcgggagaagcgtttttttaacgattttggttttttattattatttagtcgcgttttatcgggtgtcggttttgcgggaatatcgttttggcggcggtcggggttttgtttttcggtaatttaatttttcggttaatttttaattttaatttcgtcgaggaaaattaagtcggaaagttaagtagaagcggggagcgcgttggttacgtacgcgcgtttcgtcgggcgtatcggttattcggcgttcgtagttgtttcggttttcgttttcgtcggtgcgggtttcggtttttagggttatattagtgggcgttttaggtttagttgttttaagaatttgcgcggagacgtcgggcgttcggggattgtacgcgggggtagcgttttaattttcggttttagttgttcgggcggggaggcgggggcgcggtgatttcgatcgtatttttttcggcgattcgcgtgcgcggcgttagttttgggtaaataaatttagacggattgtttttttttgttttttttttggttcgtttttttttcgggtttttttcgaggcggcggcgggcgaggtgtaggtggcgcggcggttttcgttaattttatataaattcgacgttttcggggcgattttcgtaagattcggttgcgttttcggtcgggtgttcgtaggttttcgggacgtaaaggggagcgaggttgaagacgtagcggaggtttttggtcggggagcgacggatgacgaggcggggaaagtgcggagggcgcgtcgggaggcggttcggtacgtttcgtgcgattagtattcggtgtttttcgcggttgtataaatttttcgggttcgacggggttattttatcgagagtagtttcgtaagtgtttaatgtttttcgagttcggggagtattagggcgtcgcgtttcgggcgtattcgttttgtacggtcggatcggtcgtttcggatttttttttcgagttttttttttttcggtttttttttttttttttttttattttcgtgtgttttttcgtaaagggcgttttagtttattgtaaagtttttttattattcgagggacgatatttacgagatggtggggaaaatagtaggagtgcgtttcgttaatcggttatttttttcggcgggtaaattttgcgggcgagtttagagtagttatagcggtggggttagcgggggttttggtcgtcgcgggacgacggaggttcgggttggtggcgcgggtttcgttcggtcgtgcgagggtggggtggcgtagtcggttgttttcgggacgcggggtatagagtattcgtcgttgtttttgttgttgttgtttttgtagtcgtcgtttttatcgtcgtcgtcgttcgcgtttttcgcgtcgtttatattaatacgcggttttatatttcggagttaattagcgtcggtttcgtttagtttcgttcgggcggggggcgcgagcgcggagtcggcgggggacgtgagttcgggaggttgggggtgggggggggtagaaggttcgtattagttaatcgcgtgcgttgtaattaacgtggggcgttgacgcgttttttttcggagtttatggtagcgtagcgtcggacggggcgtttttttttttttttttttttcgtttttattttcgtcgttttttcggtttttttttttatttcggtttttttttcgttagtcgcgttttttcgggtttggtgaggaattgtttttggaggagtcgcgggacgttaaaattagttaatgggaagcggcgattcgcggagattggtattgatgatgggaaggtcggtgggaaggagagcggcggggttgggttgttaattaaagtaacgtggggttggttagagagcgcgcgggcgcgcgttagcgggagggattgg

SEQ ID NO: 37188 - DNA, 1974 bp, Artificial Sequence
  chemically treated genomic DNA (Homo sapiens) CpG-island No: 37188
ccaatccctcccgctaacgcgcgcccgcgcgctctctaaccaaccccacgttactttaattaacaacccaaccccgccgctctccttcccaccgaccttcccatcatcaataccaatctccgcgaatcgccgcttcccattaactaattttaacgtcccgcgactcctccaaaaacaattcctcaccaaacccgaaaaaacgcgactaacgaaaaaaaaaccgaaataaaaaaaaaaaccgaaaaaacgacgaaaataaaaacgaaaaaaaaaaaaaaaaaaaaacgccccgtccgacgctacgctaccataaactccgaaaaaaaacgcgtcaacgccccacgttaattacaacgcacgcgattaactaatacgaaccttctacccccccccacccccaacctcccgaactcacgtcccccgccgactccgcgctcgcgccccccgcccgaacgaaactaaacgaaaccgacgctaattaactccgaaatataaaaccgcgtattaatataaacgacgcgaaaaacgcgaacgacgacgacgataaaaacgacgactacaaaaacaacaacaacaaaaacaacgacgaatactctataccccgcgtcccgaaaacaaccgactacgccaccccaccctcgcacgaccgaacgaaacccgcgccaccaacccgaacctccgtcgtcccgcgacgaccaaaacccccgctaaccccaccgctataactactctaaactcgcccgcaaaatttacccgccgaaaaaaataaccgattaacgaaacgcactcctactattttccccaccatctcgtaaatatcgtccctcgaataataaaaaaactttacaataaactaaaacgccctttacgaaaaaacacacgaaaataaaaaaaaaaaaaaaaaaaaaccgaaaaaaaaaaaactcgaaaaaaaaatccgaaacgaccgatccgaccgtacaaaacgaatacgcccgaaacgcgacgccctaatactccccgaactcgaaaaacattaaacacttacgaaactactctcgataaaataaccccgtcgaacccgaaaaatttatacaaccgcgaaaaacaccgaatactaatcgcacgaaacgtaccgaaccgcctcccgacgcgccctccgcactttccccgcctcgtcatccgtcgctccccgaccaaaaacctccgctacgtcttcaacctcgctcccctttacgtcccgaaaacctacgaacacccgaccgaaaacgcaaccgaatcttacgaaaatcgccccgaaaacgtcgaatttatataaaattaacgaaaaccgccgcgccacctacacctcgcccgccgccgcctcgaaaaaaacccgaaaaaaaaacgaaccaaaaaaaaaacaaaaaaaaacaatccgtctaaatttatttacccaaaactaacgccgcgcacgcgaatcgccgaaaaaaatacgatcgaaatcaccgcgcccccgcctccccgcccgaacaactaaaaccgaaaattaaaacgctacccccgcgtacaatccccgaacgcccgacgtctccgcgcaaattcttaaaacaactaaacctaaaacgcccactaatataaccctaaaaaccgaaacccgcaccgacgaaaacgaaaaccgaaacaactacgaacgccgaataaccgatacgcccgacgaaacgcgcgtacgtaaccaacgcgctccccgcttctacttaactttccgacttaattttcctcgacgaaattaaaattaaaaattaaccgaaaaattaaattaccgaaaaacaaaaccccgaccgccgccaaaacgatattcccgcaaaaccgacacccgataaaacgcgactaaataataataaaaaaccaaaatcgttaaaaaaacgcttctcccgaacgataaaaaaactaataacttctaaaacccgacgaaccttctcgccctcaacgatataaaactaaaaaaatctaaaa

SEQ ID NO: 37189 - DNA, 565 bp, Artificial Sequence
  chemically treated genomic DNA (Homo sapiens) CpG-island No: 37189
tttttcgtagagtttttagtttataattcggattcgcgttcgtcggaatttacgggggcgttcgcgcgggagttatttcgtttttagttcgtcggcgcgcggtcgacgcgcgagtacgattcgttaattcgacggtcgtcggggtttcggcgtcggttttattcggttttaggttacgttttgcggagagcgcggtattcgagatagcgtattcgggtttttttcgtacggttagcgttcgggcgttagtagtagacggaggggtagagtcgggtcggagcggaaaattacgtagttcggttcgggaatcgatttgtggagatcgttatttttttttgtagttcgacgtagtcgttcgtacgtacgtacgaatcgtcgcgcgttattttcgggagcgcgtcgttttgtacgcgttatagcggatttcgttttcggcgggcgcggggcgattcgagggatagcgcgtacgtgggtcgaggggtcgcggggtttcgttgttgttttcgtaatttttttgtgaatttcgtttttaaaatgaaacgttaaagaataagtttatgagggt

SEQ ID NO: 37190 - DNA, 565 bp, Artificial Sequence
  chemically treated genomic DNA (Homo sapiens) CpG-island No: 37190
accctcataaacttattctttaacgtttcattttaaaaacgaaattcacaaaaaaattacgaaaacaacaacgaaaccccgcgacccctcgacccacgtacgcgctatccctcgaatcgccccgcgcccgccgaaaacgaaatccgctataacgcgtacaaaacgacgcgctcccgaaaataacgcgcgacgattcgtacgtacgtacgaacgactacgtcgaactacaaaaaaaaataacgatctccacaaatcgattcccgaaccgaactacgtaattttccgctccgacccgactctacccctccgtctactactaacgcccgaacgctaaccgtacgaaaaaaacccgaatacgctatctcgaataccgcgctctccgcaaaacgtaacctaaaaccgaataaaaccgacgccgaaaccccgacgaccgtcgaattaacgaatcgtactcgcgcgtcgaccgcgcgccgacgaactaaaaacgaaataactcccgcgcgaacgcccccgtaaattccgacgaacgcgaatccgaattataaactaaaaactctacgaaaaa

SEQ ID NO: 37191 - DNA, 565 bp, Artificial Sequence
  chemically treated genomic DNA (Homo sapiens) CpG-island No: 37191
gtttttatgaatttattttttagcgttttattttgagagcgggatttataagggaattgcggaaatagtagcgaggtttcgcgatttttcggtttacgtgcgcgttgtttttcgggtcgtttcgcgttcgtcgggggcggagttcgttgtgacgcgtgtagggcggcgcgttttcggaagtgacgcgcgacggttcgtgcgtgcgtgcgggcggttgcgtcgggttgtaggagaagatggcggtttttataggtcggttttcgggtcgggttgcgtgatttttcgtttcgattcggttttgttttttcgtttgttgttggcgttcgagcgttgatcgtgcgggagaagttcgagtgcgttgtttcgaatgtcgcgtttttcgtagagcgtagtttgggatcgggtgggatcggcgtcgaggtttcggcggtcgtcgggttggcgggtcgtgttcgcgcgtcggtcgcgcgtcggcgggttgggggcggggtggttttcgcgcgggcgttttcgtaggtttcggcgggcgcgggttcgagttgtaggttgaaggttttacgggagg

SEQ ID NO: 37192 - DNA, 565 bp, Artificial Sequence
  chemically treated genomic DNA (Homo sapiens) CpG-island No: 37192
cctcccgtaaaaccttcaacctacaactcgaacccgcgcccgccgaaacctacgaaaacgcccgcgcgaaaaccaccccgcccccaacccgccgacgcgcgaccgacgcgcgaacacgacccgccaacccgacgaccgccgaaacctcgacgccgatcccacccgatcccaaactacgctctacgaaaaacgcgacattcgaaacaacgcactcgaacttctcccgcacgatcaacgctcgaacgccaacaacaaacgaaaaaacaaaaccgaatcgaaacgaaaaatcacgcaacccgacccgaaaaccgacctataaaaaccgccatcttctcctacaacccgacgcaaccgcccgcacgcacgcacgaaccgtcgcgcgtcacttccgaaaacgcgccgccctacacgcgtcacaacgaactccgcccccgacgaacgcgaaacgacccgaaaaacaacgcgcacgtaaaccgaaaaatcgcgaaacctcgctactatttccgcaattcccttataaatcccgctctcaaaataaaacgctaaaaaataaattcataaaaac

SEQ ID NO: 37193 - DNA, 532 bp, Artificial Sequence
  chemically treated genomic DNA (Homo sapiens) CpG-island No: 37193
taagttcgcgcggtcgcggagtcgtagagttatagttttaaggcgcgcggcggatttcgttcgttttattttttcgtttcgcgtttcgggatagttttcgtttttttcgagcggttttagtttcgttgttagcgttttttttgttcgtttagtcgcggtatgggttgttattttattaatatacgcgcgcgcgtatatatatatatatatatatatatatatatatatattttttgtttcgttaagcgtttatattcgttaacgttttcgtttcgtttttcggttatcgtagtagaggttacgcgtgatatttaggattacgcgtgattatcgcgattaaacgacggttacggtttgtgttcgtagggaagtgaagttagatttttgttggatgtcgtgtgttttttaggattgcgttttttcgcgtagataggtacgtgtttggggtgtgtatatagtttcggtgataagtgttaaagagaattttcgtgtttgtagtttttgttttatagttaagattcgcgttggtgtt

SEQ ID NO: 37194 - DNA, 532 bp, Artificial Sequence
  chemically treated genomic DNA (Homo sapiens) CpG-island No: 37194
aacaccaacgcgaatcttaactataaaacaaaaactacaaacacgaaaattctctttaacacttatcaccgaaactatatacacaccccaaacacgtacctatctacgcgaaaaaacgcaatcctaaaaaacacacgacatccaacaaaaatctaacttcacttccctacgaacacaaaccgtaaccgtcgtttaatcgcgataatcacgcgtaatcctaaatatcacgcgtaacctctactacgataaccgaaaaacgaaacgaaaacgttaacgaatataaacgcttaacgaaacaaaaaatatatatatatatatatatatatatatatatatatacgcgcgcgcgtatattaataaaataacaacccataccgcgactaaacgaacaaaaaaaacgctaacaacgaaactaaaaccgctcgaaaaaaacgaaaactatcccgaaacgcgaaacgaaaaaataaaacgaacgaaatccgccgcgcgccttaaaactataactctacgactccgcgaccgcgcgaactta

SEQ ID NO: 37195 - DNA, 532 bp, Artificial Sequence
  chemically treated genomic DNA (Homo sapiens) CpG-island No: 37195
aatattaacgcgagttttgattgtagaataggggttgtaagtacgaaaattttttttgatatttattatcgaggttatgtgtatattttaggtacgtatttgtttgcgcgggaggacgtagttttaggggatatacgatatttagtagaggtttgattttatttttttacgaatatagatcgtagtcgtcgtttgatcgcggtggttacgcgtggttttaaatgttacgcgtggtttttgttgcggtggtcgaagggcggggcgggggcgttggcgagtgtgggcgtttggcgaggtaaagggtgtgtgtgtgtgtgtgtgtgtgtgtgtgtgtgtatgcgcgcgcgcgtgtgttagtggagtagtagtttatgtcgcggttggacgggtaaagggggcgttggtagcgaagttgaggtcgttcggaggaaacgggagttgtttcgaggcgcgaggcgaggagatggggcgggcgaagttcgtcgcgcgttttggggttgtaattttgcggtttcgcggtcgcgcggatttg

SEQ ID NO: 37196 - DNA, 532 bp, Artificial Sequence
  chemically treated genomic DNA (Homo sapiens) CpG-island No: 37196
caaatccgcgcgaccgcgaaaccgcaaaattacaaccccaaaacgcgcgacgaacttcgcccgccccatctcctcgcctcgcgcctcgaaacaactcccgtttcctccgaacgacctcaacttcgctaccaacgccccctttacccgtccaaccgcgacataaactactactccactaacacacgcgcgcgcgcatacacacacacacacacacacacacacacacacaccctttacctcgccaaacgcccacactcgccaacgcccccgccccgcccttcgaccaccgcaacaaaaaccacgcgtaacatttaaaaccacgcgtaaccaccgcgatcaaacgacgactacgatctatattcgtaaaaaaataaaatcaaacctctactaaatatcgtatatcccctaaaactacgtcctcccgcgcaaacaaatacgtacctaaaatatacacataacctcgataataaatatcaaaaaaaattttcgtacttacaacccctattctacaatcaaaactcgcgttaatatt

SEQ ID NO: 37197 - DNA, 726 bp, Artificial Sequence
  chemically treated genomic DNA (Homo sapiens) CpG-island No: 37197
tagggcgcgttatagtggtttttttcgtttagttacgcgtagtgaaattttcggtaatcgggttagttaagatacgggatttgtatcgtagttttttagtttttggagtcggagtcgagcgttttcggtagtttttttaattttttttttaaagtgcgaagggaaaagtttcgtttgttttacgattgtaaggtcggcggatttgggagtcgcgttcggtttcggaggattcggcgggttcggggtttttcggtagcggtttttttgttaggggttaatagtagttttcgcggtcgggcgggcgcggacgttttttttttattcgttcgggaacgtggatatcgcgttcgtaggatgttcgtcggttgggatcggtagttaggaaatatgagaaggtttcgttatttttgttttcgggcggcgcgcgtcgggttgggtaaataaagtcgagacgacggcggtggcggtggtgagcgcgttggagttcgcgtggagaatatgcggcggggatgggagtgcgtttagtttcgaggcgggagagttagtcgttttgtagtcggtcgtcggtttcgtagttataggtatagttttcgcgtcgtcgagttttagtcggttgcggcggaacgttaggttcgttttggtttttgcgttttgggcgtcggtgttttttcgttttttttttaatttttttttaaggtttggtggagaggcgttcgggtagcggtt

SEQ ID NO: 37198 - DNA, 726 bp, Artificial Sequence
  chemically treated genomic DNA (Homo sapiens) CpG-island No: 37198
aaccgctacccgaacgcctctccaccaaaccttaaaaaaaaattaaaaaaaaaacgaaaaaacaccgacgcccaaaacgcaaaaaccaaaacgaacctaacgttccgccgcaaccgactaaaactcgacgacgcgaaaactatacctataactacgaaaccgacgaccgactacaaaacgactaactctcccgcctcgaaactaaacgcactcccatccccgccgcatattctccacgcgaactccaacgcgctcaccaccgccaccgccgtcgtctcgactttatttacccaacccgacgcgcgccgcccgaaaacaaaaataacgaaaccttctcatatttcctaactaccgatcccaaccgacgaacatcctacgaacgcgatatccacgttcccgaacgaataaaaaaaaaacgtccgcgcccgcccgaccgcgaaaactactattaacccctaacaaaaaaaccgctaccgaaaaaccccgaacccgccgaatcctccgaaaccgaacgcgactcccaaatccgccgaccttacaatcgtaaaacaaacgaaacttttcccttcgcactttaaaaaaaaaattaaaaaaactaccgaaaacgctcgactccgactccaaaaactaaaaaactacgatacaaatcccgtatcttaactaacccgattaccgaaaatttcactacgcgtaactaaacgaaaaaaaccactataacgcgcccta

SEQ ID NO: 37199 - DNA, 726 bp, Artificial Sequence
  chemically treated genomic DNA (Homo sapiens) CpG-island No: 37199
ggtcgttattcgagcgtttttttattagattttggagggaagttgggggaagggcgggagagtatcggcgtttagggcgtaggggttagagcgagtttggcgtttcgtcgtagtcggttgagattcggcgacgcgggggttgtatttgtggttgcggggtcgacggtcggttgtagggcggttggttttttcgtttcgagattaggcgtatttttattttcgtcgtatgttttttacgcgggttttagcgcgtttattatcgttatcgtcgtcgtttcggttttatttatttagttcggcgcgcgtcgttcgggaataggaatagcgaggtttttttatgttttttgattgtcggttttagtcggcgaatattttgcgggcgcggtatttacgttttcgggcgggtggagaggaagcgttcgcgttcgttcggtcgcgggggttgttgttaatttttagtagaggagtcgttgtcggggagtttcgggttcgtcgagtttttcggagtcgggcgcggtttttagattcgtcggttttgtagtcgtggagtagacggggttttttttttcgtattttaggagagaaattggagaagttgtcgggagcgttcggtttcggttttagaagttgagaggttgcggtgtaaatttcgtgttttagttggttcgattgtcggaaattttattgcgcgtggttaggcgggagaggttattgtgacgcgttttg

SEQ ID NO: 37200 - DNA, 726 bp, Artificial Sequence
  chemically treated genomic DNA (Homo sapiens) CpG-island No: 37200
caaaacgcgtcacaataacctctcccgcctaaccacgcgcaataaaatttccgacaatcgaaccaactaaaacacgaaatttacaccgcaacctctcaacttctaaaaccgaaaccgaacgctcccgacaacttctccaatttctctcctaaaatacgaaaaaaaaaaccccgtctactccacgactacaaaaccgacgaatctaaaaaccgcgcccgactccgaaaaactcgacgaacccgaaactccccgacaacgactcctctactaaaaattaacaacaacccccgcgaccgaacgaacgcgaacgcttcctctccacccgcccgaaaacgtaaataccgcgcccgcaaaatattcgccgactaaaaccgacaatcaaaaaacataaaaaaacctcgctattcctattcccgaacgacgcgcgccgaactaaataaataaaaccgaaacgacgacgataacgataataaacgcgctaaaacccgcgtaaaaaacatacgacgaaaataaaaatacgcctaatctcgaaacgaaaaaaccaaccgccctacaaccgaccgtcgaccccgcaaccacaaatacaacccccgcgtcgccgaatctcaaccgactacgacgaaacgccaaactcgctctaacccctacgccctaaacgccgatactctcccgcccttcccccaacttccctccaaaatctaataaaaaaacgctcgaataacgacc

SEQ ID NO: 37201 - DNA, 573 bp, Artificial Sequence
  chemically treated genomic DNA (Homo sapiens) CpG-island No: 37201
agtcgacggttggcgcgttagggattttagtagatagcgtttttcgtcgttttgtcgtttagttcggggttttcggggatgcggtttttacgttatttatcgcgcgtgtaagttcgagaataggtagaggaggagtagtagtttcggggttatggtgtcgtggagttcggggcgtagggttcggggtttcggtcgggcgcggtttttttcggcgcggatttggttttcgtcggttttttttgttttggtttttttcgaggttgttggtcgcggcgggcgggataggtatttattttggcgttggtcgcgttttcgcggggcgtatacgggacgtatacgggacgtcgggttatcgcggcgcgtcgtttttattcgcgtattagcgtcggttcgcgtaatcgggcggcgggagtaatgggcgtcggggattttttggcgcggcgtcgtttatttcgtttggagtcgcgagcgggcgcgggtgtttaggtcggggttgtgtgcgttgtgttgggaggtgggggtagttgggcggttgttttttggtagcgttttcgaggcggtttcggcggggag

SEQ ID NO: 37202 - DNA, 573 bp, Artificial Sequence
  chemically treated genomic DNA (Homo sapiens) CpG-island No: 37202
ctccccgccgaaaccgcctcgaaaacgctaccaaaaaacaaccgcccaactacccccacctcccaacacaacgcacacaaccccgacctaaacacccgcgcccgctcgcgactccaaacgaaataaacgacgccgcgccaaaaaatccccgacgcccattactcccgccgcccgattacgcgaaccgacgctaatacgcgaataaaaacgacgcgccgcgataacccgacgtcccgtatacgtcccgtatacgccccgcgaaaacgcgaccaacgccaaaataaatacctatcccgcccgccgcgaccaacaacctcgaaaaaaaccaaaacaaaaaaaaccgacgaaaaccaaatccgcgccgaaaaaaaccgcgcccgaccgaaaccccgaaccctacgccccgaactccacgacaccataaccccgaaactactactcctcctctacctattctcgaacttacacgcgcgataaataacgtaaaaaccgcatccccgaaaaccccgaactaaacgacaaaacgacgaaaaacgctatctactaaaatccctaacgcgccaaccgtcgact

SEQ ID NO: 37203 - DNA, 573 bp, Artificial Sequence
  chemically treated genomic DNA (Homo sapiens) CpG-island No: 37203
tttttcgtcgggatcgtttcggaggcgttgttaggggatagtcgtttagttgtttttattttttagtatagcgtatatagtttcggtttgggtattcgcgttcgttcgcggttttaggcggggtgggcggcgtcgcgttagggggttttcggcgtttattgttttcgtcgttcggttgcgcggatcggcgttagtgcgcgggtgggggcggcgcgtcgcggtggttcggcgtttcgtgtgcgtttcgtgtgcgtttcgcgggggcgcggttagcgttagagtagatatttgtttcgttcgtcgcggttagtagtttcggaggaagttagggtaaagagggtcggcggagattaggttcgcgtcggaggaagtcgcgttcggtcgaggtttcggattttgcgtttcgagttttacggtattatggtttcgaagttgttgttttttttttgtttgttttcgggtttgtacgcgcggtaagtggcgtgggggtcgtattttcggaggtttcgagttgggcgatagggcggcggggggcgttgtttgttggagtttttggcgcgttagtcgtcggtt

SEQ ID NO: 37204 - DNA, 573 bp, Artificial Sequence
  chemically treated genomic DNA (Homo sapiens) CpG-island No: 37204
aaccgacgactaacgcgccaaaaactccaacaaacaacgccccccgccgccctatcgcccaactcgaaacctccgaaaatacgacccccacgccacttaccgcgcgtacaaacccgaaaacaaacaaaaaaaaaacaacaacttcgaaaccataataccgtaaaactcgaaacgcaaaatccgaaacctcgaccgaacgcgacttcctccgacgcgaacctaatctccgccgaccctctttaccctaacttcctccgaaactactaaccgcgacgaacgaaacaaatatctactctaacgctaaccgcgcccccgcgaaacgcacacgaaacgcacacgaaacgccgaaccaccgcgacgcgccgcccccacccgcgcactaacgccgatccgcgcaaccgaacgacgaaaacaataaacgccgaaaaccccctaacgcgacgccgcccaccccgcctaaaaccgcgaacgaacgcgaatacccaaaccgaaactatatacgctatactaaaaaataaaaacaactaaacgactatcccctaacaacgcctccgaaacgatcccgacgaaaaa

SEQ ID NO: 37205 - DNA, 519 bp, Artificial Sequence
  chemically treated genomic DNA (Homo sapiens) CpG-island No: 37205
tagcggggatagcgtgtagcgtaggcggcgtagcgtcgttttcgaggtgaggttttagagttacgcggagacggcgtcggggtttaatagtatcgtttagagtagcgatagttttaggaagaggagcggtagcgttagtagtatttgtagcgcgtttagtacgtatcgtttgcggggcgaaaggcgggtaggtgggggatcgcggtcgcgtttatcgttcggtttatttgatggttagcgcgcgagggtcgtcgaatagtcgcgttttttgcggggagagagggtcgtatttagttattttcgcgttcgcggcgtcggttcggtttttaggaggagggggaggcggtatcgcgggggggacggggagggttgtttcgttttagtttatttcgttcggattcgcgtaggcgtttattcggttcgttttggttattttttttatgagcgattcggtgttgtattgtatttcgcgaagttgttcgttatatttgcggggataggtatgtaggtgggagttta

SEQ ID NO: 37206 - DNA, 519 bp, Artificial Sequence
  chemically treated genomic DNA (Homo sapiens) CpG-island No: 37206
taaactcccacctacatacctatccccgcaaatataacgaacaacttcgcgaaatacaatacaacaccgaatcgctcataaaaaaaataaccaaaacgaaccgaataaacgcctacgcgaatccgaacgaaataaactaaaacgaaacaaccctccccgtcccccccgcgataccgcctccccctcctcctaaaaaccgaaccgacgccgcgaacgcgaaaataactaaatacgaccctctctccccgcaaaaaacgcgactattcgacgaccctcgcgcgctaaccatcaaataaaccgaacgataaacgcgaccgcgatcccccacctacccgcctttcgccccgcaaacgatacgtactaaacgcgctacaaatactactaacgctaccgctcctcttcctaaaactatcgctactctaaacgatactattaaaccccgacgccgtctccgcgtaactctaaaacctcacctcgaaaacgacgctacgccgcctacgctacacgctatccccgcta

SEQ ID NO: 37207 - DNA, 519 bp, Artificial Sequence
  chemically treated genomic DNA (Homo sapiens) CpG-island No: 37207
tgggtttttatttgtatgtttgttttcgtaggtgtgacgggtagtttcgcggagtgtagtatagtatcgagtcgtttatggaggagatggttagggcggatcgagtgagcgtttgcgcgggttcgggcggggtgggttggagcgggataatttttttcgtttttttcgcggtatcgtttttttttttttttggaaatcgggtcggcgtcgcgggcgcggaggtagttggatgcggtttttttttttcgtaggagacgcggttgttcggcggttttcgcgcgttggttattaggtgagtcgggcggtgggcgcggtcgcggttttttatttgttcgtttttcgtttcgtaggcggtgcgtgttgggcgcgttgtaggtgttgttgacgttgtcgtttttttttttggggttgtcgttgttttggacggtgttgttggatttcggcgtcgttttcgcgtggttttggagttttatttcggagacgacgttgcgtcgtttgcgttatacgttgttttcgttg

SEQ ID NO: 37208 - DNA, 519 bp, Artificial Sequence
  chemically treated genomic DNA (Homo sapiens) CpG-island No: 37208
caacgaaaacaacgtataacgcaaacgacgcaacgtcgtctccgaaataaaactccaaaaccacgcgaaaacgacgccgaaatccaacaacaccgtccaaaacaacgacaaccccaaaaaaaaaaacgacaacgtcaacaacacctacaacgcgcccaacacgcaccgcctacgaaacgaaaaacgaacaaataaaaaaccgcgaccgcgcccaccgcccgactcacctaataaccaacgcgcgaaaaccgccgaacaaccgcgtctcctacgaaaaaaaaaaaccgcatccaactacctccgcgcccgcgacgccgacccgatttccaaaaaaaaaaaaaaacgataccgcgaaaaaaacgaaaaaaattatcccgctccaacccaccccgcccgaacccgcgcaaacgctcactcgatccgccctaaccatctcctccataaacgactcgatactatactacactccgcgaaactacccgtcacacctacgaaaacaaacatacaaataaaaaccca

SEQ ID NO: 37209 - DNA, 908 bp, Artificial Sequence
  chemically treated genomic DNA (Homo sapiens) CpG-island No: 37209
aagcggagaataagtagttgcggcgtgtaggttgtttttattaggtagacgagaaggtgaagcggtttaaggtaaagcgcgcggagttgatcgggttcgcgcggcgtttagttgatcgcgttcgtaagttgtaggagattaattttcgggtcgtgagcgcgtttatattcggcgagagttgcgtcggtttggagttgtgttaagtttttgttcgttagcgcgttcgggatttgtcggagtaggcgagcgcgtcgttggttaaggataagtagatcgaagagttgcggtaggagtgttattttttgtaggcgcgtgtcgtttcgggtttttgtagcgatttgtatattggaaggggcggtttttgtatttagtggtttaacgttagagatttagatcgtttgtagcgcgagttttagcgggaagtgttgcgtttgtagaggtagttgatgttttagtagggtaacggtggcgtttggttcgaggcgggcggttagagcgtaatttgcgaggaggtgcgacggtagatgttggcgttggagcgcgagttggattagcggcggcgcgagtgttaggagttgggcgcgtaggcggtttcggcgcggcgacgtggcgaggaggtcgagatatagttgtaggcggcgttgtttaaaaacgtttggttggcggaggagaatgggcggttgtaggttaagatcgattgggtgcggaaggtggaggttgagaatagcgaagtgcgcggttatttgggtcgcgcgtgttaagagcgcgatgttttcggtttgatcgtcgaatagttgttgtagtaggcggcgcgcgggtaggataggtagtagtagttgtaacgcgattcgtagaaggttttgtgtgatttttattttttttggaaggagatataggcgttttagtgt

SEQ ID NO: 37210 - DNA, 908 bp, Artificial Sequence
  chemically treated genomic DNA (Homo sapiens) CpG-island No: 37210
acactaaaacgcctatatctccttccaaaaaaaataaaaatcacacaaaaccttctacgaatcgcgttacaactactactacctatcctacccgcgcgccgcctactacaacaactattcgacgatcaaaccgaaaacatcgcgctcttaacacgcgcgacccaaataaccgcgcacttcgctattctcaacctccaccttccgcacccaatcgatcttaacctacaaccgcccattctcctccgccaaccaaacgtttttaaacaacgccgcctacaactatatctcgacctcctcgccacgtcgccgcgccgaaaccgcctacgcgcccaactcctaacactcgcgccgccgctaatccaactcgcgctccaacgccaacatctaccgtcgcacctcctcgcaaattacgctctaaccgcccgcctcgaaccaaacgccaccgttaccctactaaaacatcaactacctctacaaacgcaacacttcccgctaaaactcgcgctacaaacgatctaaatctctaacgttaaaccactaaatacaaaaaccgccccttccaatatacaaatcgctacaaaaacccgaaacgacacgcgcctacaaaaaataacactcctaccgcaactcttcgatctacttatccttaaccaacgacgcgctcgcctactccgacaaatcccgaacgcgctaacgaacaaaaacttaacacaactccaaaccgacgcaactctcgccgaatataaacgcgctcacgacccgaaaattaatctcctacaacttacgaacgcgatcaactaaacgccgcgcgaacccgatcaactccgcgcgctttaccttaaaccgcttcaccttctcgtctacctaataaaaacaacctacacgccgcaactacttattctccgctt

SEQ ID NO: 37211 - DNA, 908 bp, Artificial Sequence
  chemically treated genomic DNA (Homo sapiens) CpG-island No: 37211
atattggagcgtttgtatttttttttaggaaggatggaggttatatagggttttttgcgggtcgcgttgtagttgttgttgtttgttttgttcgcgcgtcgtttgttgtagtagttgttcggcgattaagtcggaggtatcgcgtttttgatacgcgcggtttaggtggtcgcgtatttcgttatttttagtttttatttttcgtatttagtcggttttggtttgtagtcgtttattttttttcgttagttaggcgtttttgagtagcgtcgtttgtagttgtgtttcggttttttcgttacgtcgtcgcgtcggggtcgtttgcgcgtttagtttttggtattcgcgtcgtcgttggtttagttcgcgttttagcgttagtatttgtcgtcgtattttttcgtaggttgcgttttggtcgttcgtttcgggttaagcgttatcgttgttttgttgaagtattaattgtttttgtaggcgtagtatttttcgttgggattcgcgttgtaggcggtttaagtttttgacgttgagttattgggtgtaggggtcgttttttttagtatgtaggtcgttgtagggattcgaggcgatacgcgtttgtaggaggtggtatttttgtcgtagtttttcgatttgtttgtttttggttagcggcgcgttcgtttgtttcgataggtttcgagcgcgttggcgggtaaagatttggtatagttttaggtcggcgtaattttcgtcgggtataggcgcgtttacggttcggaggttggttttttgtagtttgcgggcgcggttagttaggcgtcgcgcgagttcggttagtttcgcgcgttttattttgagtcgttttattttttcgtttgtttggtaggggtagtttgtacgtcgtagttgtttgtttttcgttt

SEQ ID NO: 37212 - DNA, 908 bp, Artificial Sequence
  chemically treated genomic DNA (Homo sapiens) CpG-island No: 37212
aaacgaaaaacaaacaactacgacgtacaaactacccctaccaaacaaacgaaaaaataaaacgactcaaaataaaacgcgcgaaactaaccgaactcgcgcgacgcctaactaaccgcgcccgcaaactacaaaaaaccaacctccgaaccgtaaacgcgcctatacccgacgaaaattacgccgacctaaaactataccaaatctttacccgccaacgcgctcgaaacctatcgaaacaaacgaacgcgccgctaaccaaaaacaaacaaatcgaaaaactacgacaaaaataccacctcctacaaacgcgtatcgcctcgaatccctacaacgacctacatactaaaaaaaacgacccctacacccaataactcaacgtcaaaaacttaaaccgcctacaacgcgaatcccaacgaaaaatactacgcctacaaaaacaattaatacttcaacaaaacaacgataacgcttaacccgaaacgaacgaccaaaacgcaacctacgaaaaaatacgacgacaaatactaacgctaaaacgcgaactaaaccaacgacgacgcgaataccaaaaactaaacgcgcaaacgaccccgacgcgacgacgtaacgaaaaaaccgaaacacaactacaaacgacgctactcaaaaacgcctaactaacgaaaaaaaataaacgactacaaaccaaaaccgactaaatacgaaaaataaaaactaaaaataacgaaatacgcgaccacctaaaccgcgcgtatcaaaaacgcgatacctccgacttaatcgccgaacaactactacaacaaacgacgcgcgaacaaaacaaacaacaacaactacaacgcgacccgcaaaaaaccctatataacctccatccttcctaaaaaaaaatacaaacgctccaatat

SEQ ID NO: 37213 - DNA, 522 bp, Artificial Sequence
  chemically treated genomic DNA (Homo sapiens) CpG-island No: 37213
ttttaagttttttcgttcgttcgttttcgttttcgttgggtttcgtagtcggaggaggggcggtttttcgttttcgttcgttggattttagagtcgtcgtttcgggcgtcgggttgtagtcgttacgtttcgggagaggatcgatcgtttagatcgtcggttcggggttttttggttacgtcgattacggggagtttttcgattgttttttagaataaagtgggaaagggaagtttagttcgtcgttgtcgttttcgagtagttcgttaggtgagcgtcgggataggtaggggatttaggtcgggatttaagcgttagtttcgttttcgtttatagttggggcgtttcgggaaggattttcgcgttaggttttgttcggaggggcgggtttttgggagttttataattcgtagcgtcgttttttcgggttttttttcggtttgaggtttttttaaatttaaagttatataaatgtacgttagaaagttttaaatttggaagggttttgttttgaacgtgggt

SEQ ID NO: 37214 - DNA, 522 bp, Artificial Sequence
  chemically treated genomic DNA (Homo sapiens) CpG-island No: 37214
acccacgttcaaaacaaaacccttccaaatttaaaactttctaacgtacatttatataactttaaatttaaaaaaacctcaaaccgaaaaaaaacccgaaaaaacgacgctacgaattataaaactcccaaaaacccgcccctccgaacaaaacctaacgcgaaaatccttcccgaaacgccccaactataaacgaaaacgaaactaacgcttaaatcccgacctaaatcccctacctatcccgacgctcacctaacgaactactcgaaaacgacaacgacgaactaaacttccctttcccactttattctaaaaaacaatcgaaaaactccccgtaatcgacgtaaccaaaaaaccccgaaccgacgatctaaacgatcgatcctctcccgaaacgtaacgactacaacccgacgcccgaaacgacgactctaaaatccaacgaacgaaaacgaaaaaccgcccctcctccgactacgaaacccaacgaaaacgaaaacgaacgaacgaaaaaacttaaaa

SEQ ID NO: 37215 - DNA, 522 bp, Artificial Sequence
  chemically treated genomic DNA (Homo sapiens) CpG-island No: 37215
atttacgtttaaagtaaagtttttttagatttagggttttttaacgtgtatttgtataattttgggtttaaaggagttttaggtcgagggagggttcgggaaagcgacgttgcgggttatgggatttttagggattcgttttttcgggtagggtttggcgcgggaatttttttcggggcgttttagttgtgggcgagaacgggattgacgtttgggtttcgatttgggttttttatttgtttcggcgtttatttggcgggttgttcggaggcggtagcggcgggttaagttttttttttttattttgttttgggaggtagtcgaggggtttttcgtgatcggcgtggttagggggtttcggatcggcggtttgggcggtcggttttttttcggggcgtggcggttgtagttcggcgttcggggcggcgattttgagatttagcgggcgggggcgggaggtcgtttttttttcggttgcggggtttagcgggagcgagggcgggcgggcgggggagtttggag

SEQ ID NO: 37216 - DNA, 522 bp, Artificial Sequence
  chemically treated genomic DNA (Homo sapiens) CpG-island No: 37216
ctccaaactcccccgcccgcccgccctcgctcccgctaaaccccgcaaccgaaaaaaaaacgacctcccgcccccgcccgctaaatctcaaaatcgccgccccgaacgccgaactacaaccgccacgccccgaaaaaaaaccgaccgcccaaaccgccgatccgaaaccccctaaccacgccgatcacgaaaaacccctcgactacctcccaaaacaaaataaaaaaaaaaaacttaacccgccgctaccgcctccgaacaacccgccaaataaacgccgaaacaaataaaaaacccaaatcgaaacccaaacgtcaatcccgttctcgcccacaactaaaacgccccgaaaaaaattcccgcgccaaaccctacccgaaaaaacgaatccctaaaaatcccataacccgcaacgtcgctttcccgaaccctccctcgacctaaaactcctttaaacccaaaattatacaaatacacgttaaaaaaccctaaatctaaaaaaactttactttaaacgtaaat

SEQ ID NO: 37217 - DNA, 638 bp, Artificial Sequence
  chemically treated genomic DNA (Homo sapiens) CpG-island No: 37217
ggttttttcgtcgcgcgcgtaggtgagtattatcgtgacggtggcgaaggtggtagcgttgacggggaaggcgcgtagtagcgtggacgttagttttcgtgtgaagacgcgttagttttcggcgcggtagttttggtgtacgtagtttaggatgtcgcggtagcgcggggcgtttcgtagttcgttcgtttgtagtcgcgatttgattacgtttataggataggtagagagttaggatacgatgtttgacgtatcgttcgttaatagtagtttgggtattagtaggcggtcgttcggttcgtagtttagcgttcgcgtgagagcgttataggtgaggaagtagacgtcgaagttgggcgttttacgtagtaacgtggatattatgtttcggttgacgttacgtagattttcgtgttcgtagatttgcgcgaggtagtttagcgagtttttgtaggtgcgcgttgggttcgcgttttgtagttgtagtcgcgttttggttagttttatggggtagtagatgacgtattggatggcgttcgtcgtcgtatttgttaggaattggttgaggggcgagtcgtggtttagggttcggagggtgttgttttgtatttcgaatattagcgcgttgatgaaggtga

SEQ ID NO: 37218 - DNA, 638 bp, Artificial Sequence
  chemically treated genomic DNA (Homo sapiens) CpG-island No: 37218
tcaccttcatcaacgcgctaatattcgaaatacaaaacaacaccctccgaaccctaaaccacgactcgcccctcaaccaattcctaacaaatacgacgacgaacgccatccaatacgtcatctactaccccataaaactaaccaaaacgcgactacaactacaaaacgcgaacccaacgcgcacctacaaaaactcgctaaactacctcgcgcaaatctacgaacacgaaaatctacgtaacgtcaaccgaaacataatatccacgttactacgtaaaacgcccaacttcgacgtctacttcctcacctataacgctctcacgcgaacgctaaactacgaaccgaacgaccgcctactaatacccaaactactattaacgaacgatacgtcaaacatcgtatcctaactctctacctatcctataaacgtaatcaaatcgcgactacaaacgaacgaactacgaaacgccccgcgctaccgcgacatcctaaactacgtacaccaaaactaccgcgccgaaaactaacgcgtcttcacacgaaaactaacgtccacgctactacgcgccttccccgtcaacgctaccaccttcgccaccgtcacgataatactcacctacgcgcgcgacgaaaaaacc

SEQ ID NO: 37219 - DNA, 638 bp, Artificial Sequence
  chemically treated genomic DNA (Homo sapiens) CpG-island No: 37219
ttatttttattaacgcgttggtgttcggggtgtagggtaatatttttcgggttttgggttacgattcgttttttaattagtttttggtaggtgcggcggcgggcgttatttagtgcgttatttgttgttttatggagttggttaagacgcggttgtagttgtaggacgcgggtttagcgcgtatttataagggttcgttggattgtttcgcgtagatttacgggtacgagggtttgcgtggcgttaatcggggtatggtgtttacgttgttgcgtgagacgtttagtttcggcgtttatttttttatttatgacgtttttacgcgggcgttgggttgcgagtcgggcgatcgtttgttggtgtttaagttgttgttggcgggcggtacgttaggtatcgtgttttggttttttatttattttgtggacgtggttaagtcgcggttgtaggcggacggattgcggggcgtttcgcgttatcgcggtattttggattgcgtgtattagagttatcgcgtcgagggttggcgcgtttttatacgggggttggcgtttacgttgttgcgcgtttttttcgttaacgttgttattttcgttatcgttacggtggtgtttatttacgcgcgcggcgaggaggtt

SEQ ID NO: 37220 - DNA, 638 bp, Artificial Sequence
  chemically treated genomic DNA (Homo sapiens) CpG-island No: 37220
aacctcctcgccgcgcgcgtaaataaacaccaccgtaacgataacgaaaataacaacgttaacgaaaaaaacgcgcaacaacgtaaacgccaacccccgtataaaaacgcgccaaccctcgacgcgataactctaatacacgcaatccaaaataccgcgataacgcgaaacgccccgcaatccgtccgcctacaaccgcgacttaaccacgtccacaaaataaataaaaaaccaaaacacgatacctaacgtaccgcccgccaacaacaacttaaacaccaacaaacgatcgcccgactcgcaacccaacgcccgcgtaaaaacgtcataaataaaaaaataaacgccgaaactaaacgtctcacgcaacaacgtaaacaccataccccgattaacgccacgcaaaccctcgtacccgtaaatctacgcgaaacaatccaacgaacccttataaatacgcgctaaacccgcgtcctacaactacaaccgcgtcttaaccaactccataaaacaacaaataacgcactaaataacgcccgccgccgcacctaccaaaaactaattaaaaaacgaatcgtaacccaaaacccgaaaaatattaccctacaccccgaacaccaacgcgttaataaaaataa

SEQ ID NO: 37221 - DNA, 1185 bp, Artificial Sequence
  chemically treated genomic DNA (Homo sapiens) CpG-island No: 37221
  unsure (279)
gatttttcgttcgagcgtgtttagagagaataaagatatttgttttcgcggatagttcgggtttgaagttaatttacgtttacgagattcgttcgaggtaagagaattgtggtttttatttatagacgcggcgattttcgttagcgggaagtcgcgaggttagggcgtgttggtgggtcgattttttttttcggacgtttcgtttcggttcggttcggttcgtcgtttttttatttttcgcgtatttagttaagaagtttagcgttatggtcgggtttntcggcgaggtcgtttttttttttcgttttttttttgaggtttttcgtcgggttgggcgtcgtcggggttttcgagcgcgcggtgtcggggttgggtttggtcgttttttttggcgcggagttcgggtaggcgcggttagggatggtggggatggcggtagtagttagattcgcgttggtttttcggcggtagttgattcgttggatttttttcggttcgcggttttttatttcgggtcgcgcgtttcgtttttcgtttgtcggtagggttcgggtgggggcgtcgagtgaggttaatgggcgggtacggcgcggataatatttcgggtattgcgtttcgtcgtcgcgttttattggtcgggcgtgcgcgggaggcggggcgcgggggacgtggtgggcgcgcgggcgggcgcgggtattttttagataaagagcgcgttgggtgcgtaggttcggcgggagggtacgcgcggggtagcgggcgtgagtcgaggatttttttattcggagtacgcggggtggttttggtttggatcgggtcgggaatcggattttgggttcggagttcggcgtcgtcgtagaattttagcgttttagtttgtgtcgtgcggattttgtcgcgaaaacggtcgtggagcgtcgggacgtttcgaggttcgtagattgggacgtcgttagttgcgaaatttcgcgagcgggaatcgttcgtggggagtttttgttcgtttcgtttgcgcgttcgcggcggcggtggttttcggggttttcggatttttggtcgaattcgtcgggttttgggggtcggacgcgtacgggcgttttttgcggagtttgaggttgggatttgggcggagagtagggaattttaaaagggaaaggggttatgggtaaagggcgtagtaggttt

SEQ ID NO: 37222 - DNA, 1185 bp, Artificial Sequence
  chemically treated genomic DNA (Homo sapiens) CpG-island No: 37222
  unsure (907)
aaacctactacgccctttacccataacccctttcccttttaaaattccctactctccgcccaaatcccaacctcaaactccgcaaaaaacgcccgtacgcgtccgacccccaaaacccgacgaattcgaccaaaaatccgaaaaccccgaaaaccaccgccgccgcgaacgcgcaaacgaaacgaacaaaaactccccacgaacgattcccgctcgcgaaatttcgcaactaacgacgtcccaatctacgaacctcgaaacgtcccgacgctccacgaccgttttcgcgacaaaatccgcacgacacaaactaaaacgctaaaattctacgacgacgccgaactccgaacccaaaatccgattcccgacccgatccaaaccaaaaccaccccgcgtactccgaataaaaaaatcctcgactcacgcccgctaccccgcgcgtaccctcccgccgaacctacgcacccaacgcgctctttatctaaaaaatacccgcgcccgcccgcgcgcccaccacgtcccccgcgccccgcctcccgcgcacgcccgaccaataaaacgcgacgacgaaacgcaatacccgaaatattatccgcgccgtacccgcccattaacctcactcgacgcccccacccgaaccctaccgacaaacgaaaaacgaaacgcgcgacccgaaataaaaaaccgcgaaccgaaaaaaatccaacgaatcaactaccgccgaaaaaccaacgcgaatctaactactaccgccatccccaccatccctaaccgcgcctacccgaactccgcgccaaaaaaaacgaccaaacccaaccccgacaccgcgcgctcgaaaaccccgacgacgcccaacccgacgaaaaacctcaaaaaaaaaacgaaaaaaaaaaacgacctcgccganaaacccgaccataacgctaaacttcttaactaaatacgcgaaaaataaaaaaacgacgaaccgaaccgaaccgaaacgaaacgtccgaaaaaaaaaatcgacccaccaacacgccctaacctcgcgacttcccgctaacgaaaatcgccgcgtctataaataaaaaccacaattctcttacctcgaacgaatctcgtaaacgtaaattaacttcaaacccgaactatccgcgaaaacaaatatctttattctctctaaacacgctcgaacgaaaaatc

SEQ ID NO: 37223 - DNA, 1185 bp, Artificial Sequence
  chemically treated genomic DNA (Homo sapiens) CpG-island No: 37223
  unsure (907)
aagtttgttgcgttttttgtttatggttttttttttttttaaggttttttgtttttcgtttaaattttagttttaggtttcgtaggaagcgttcgtgcgcgttcgatttttagaattcggcgggttcggttaggagttcggaagtttcggaggttatcgtcgtcgcgggcgcgtaggcgggacgggtagaggttttttacgggcgattttcgttcgcggagtttcgtaattagcggcgttttagtttgcgggtttcggaacgtttcggcgttttacggtcgttttcgcggtagggttcgtacggtatagattagggcgttgaggttttgcggcggcgtcggatttcgaatttagggttcggttttcgattcggtttagattagagttatttcgcgtatttcgggtgggggagttttcggtttacgttcgttatttcgcgcgtgttttttcgtcggatttgcgtatttagcgcgttttttgtttgaagggtattcgcgttcgttcgcgcgtttattacgtttttcgcgtttcgtttttcgcgtacgttcggttaatgaggcgcggcggcgaagcgtagtgttcggggtgttgttcgcgtcgtgttcgtttattggttttattcggcgtttttattcgggttttgtcggtagacgaggggcggggcgcgcggttcgaggtgagggatcgcgggtcggaggggatttagcgagttagttgtcgtcgagggattagcgcgggtttagttgttgtcgttatttttattatttttgatcgcgtttgttcgggtttcgcgttaggaggagcggttaggtttagtttcggtatcgcgcgttcggggatttcgacggcgtttagttcggcgaggggttttagggggaggacgaggaggaaaggcggtttcgtcggnggattcggttatggcgttggattttttggttggatgcgcggggggtaaggaggcggcgggtcgggtcgggtcggggcgaggcgttcggggagggaggtcggtttattagtacgttttggtttcgcggtttttcgttggcgggggtcgtcgcgtttgtgaatggggattatagtttttttgtttcgggcgggtttcgtgggcgtaaattgattttaggttcgggttgttcgcgagggtaggtgtttttattttttttgggtacgttcggacgggaggtt

SEQ ID NO: 37224 - DNA, 1185 bp, Artificial Sequence
  chemically treated genomic DNA (Homo sapiens) CpG-island No: 37224
  unsure (279)
aacctcccgtccgaacgtacccaaaaaaaataaaaacacctaccctcgcgaacaacccgaacctaaaatcaatttacgcccacgaaacccgcccgaaacaaaaaaactataatccccattcacaaacgcgacgacccccgccaacgaaaaaccgcgaaaccaaaacgtactaataaaccgacctccctccccgaacgcctcgccccgacccgacccgacccgccgcctccttaccccccgcgcatccaaccaaaaaatccaacgccataaccgaatccnccgacgaaaccgcctttcctcctcgtcctccccctaaaacccctcgccgaactaaacgccgtcgaaatccccgaacgcgcgataccgaaactaaacctaaccgctcctcctaacgcgaaacccgaacaaacgcgatcaaaaataataaaaataacgacaacaactaaacccgcgctaatccctcgacgacaactaactcgctaaatcccctccgacccgcgatccctcacctcgaaccgcgcgccccgcccctcgtctaccgacaaaacccgaataaaaacgccgaataaaaccaataaacgaacacgacgcgaacaacaccccgaacactacgcttcgccgccgcgcctcattaaccgaacgtacgcgaaaaacgaaacgcgaaaaacgtaataaacgcgcgaacgaacgcgaatacccttcaaacaaaaaacgcgctaaatacgcaaatccgacgaaaaaacacgcgcgaaataacgaacgtaaaccgaaaactcccccacccgaaatacgcgaaataactctaatctaaaccgaatcgaaaaccgaaccctaaattcgaaatccgacgccgccgcaaaacctcaacgccctaatctataccgtacgaaccctaccgcgaaaacgaccgtaaaacgccgaaacgttccgaaacccgcaaactaaaacgccgctaattacgaaactccgcgaacgaaaatcgcccgtaaaaaacctctacccgtcccgcctacgcgcccgcgacgacgataacctccgaaacttccgaactcctaaccgaacccgccgaattctaaaaatcgaacgcgcacgaacgcttcctacgaaacctaaaactaaaatttaaacgaaaaacaaaaaaccttaaaaaaaaaaaaaaccataaacaaaaaacgcaacaaactt

SEQ ID NO: 37225 - DNA, 585 bp, Artificial Sequence
  chemically treated genomic DNA (Homo sapiens) CpG-island No: 37225
gcggttttcgttcggcgtagcgtttgcgttttcgtcgttttttttagtgttacgaggaagttgcggtaggaagaagggcggaggtgtttcgggcgtttgagacgttcggtaatggtttcgttattttcgtcgcgtatacgtaaagtcgttttttaggtagttgcggcgttcggggttttttttcgggtcgggttttcgtcggtcgtttgttcgtataggtgtttttcggtttcgtgattgcgatttttttagcggagagggttttttaggaagtaggggcgaggagttttcgaaggtttcgggcggtagcggttttcggcgtagagggcggagggtacgatcgcgatataggcggggcggtagttagttcgcgaggtgtattcggtataggtttcgtttcgcgttttcggtttttagggttttcgtgtttcgtttcgttttttttttcggggtttttcgtttttcgcgttcgtttagtttcgtttcggttgtgttggattttcgacgtttatcgttaggggtggaattttagtttcgtttaatataggtggaaagaggcgtagagaggtttagtgacgagttggg

SEQ ID NO: 37226 - DNA, 585 bp, Artificial Sequence
  chemically treated genomic DNA (Homo sapiens) CpG-island No: 37226
cccaactcgtcactaaacctctctacgcctctttccacctatattaaacgaaactaaaattccacccctaacgataaacgtcgaaaatccaacacaaccgaaacgaaactaaacgaacgcgaaaaacgaaaaaccccgaaaaaaaaaacgaaacgaaacacgaaaaccctaaaaaccgaaaacgcgaaacgaaacctataccgaatacacctcgcgaactaactaccgccccgcctatatcgcgatcgtaccctccgccctctacgccgaaaaccgctaccgcccgaaaccttcgaaaactcctcgcccctacttcctaaaaaaccctctccgctaaaaaaatcgcaatcacgaaaccgaaaaacacctatacgaacaaacgaccgacgaaaacccgacccgaaaaaaaaccccgaacgccgcaactacctaaaaaacgactttacgtatacgcgacgaaaataacgaaaccattaccgaacgtctcaaacgcccgaaacacctccgcccttcttcctaccgcaacttcctcgtaacactaaaaaaaacgacgaaaacgcaaacgctacgccgaacgaaaaccgc

SEQ ID NO: 37227 - DNA, 585 bp, Artificial Sequence
  chemically treated genomic DNA (Homo sapiens) CpG-island No: 37227
tttagttcgttattaggtttttttgcgtttttttttatttgtgttaggcggggttgggattttatttttggcgatgggcgtcgaggatttagtatagtcggggcggggttaggcgggcgcgggggacgaggggtttcggagaggagggcggggcggggtacgagggttttgagagtcggaagcgcggggcggggtttgtgtcgggtgtatttcgcgagttagttgtcgtttcgtttgtgtcgcggtcgtatttttcgttttttgcgtcgagagtcgttgtcgttcgagattttcgagggtttttcgtttttgttttttgggagatttttttcgttgggagagtcgtagttacggagtcgggggatatttgtacgggtaggcggtcggcgaaggttcggttcgagaggaagtttcgaacgtcgtaattgtttgggaagcggttttgcgtgtgcgcggcgagagtagcggggttattgtcgggcgttttaggcgttcggggtattttcgtttttttttttgtcgtagttttttcgtggtattgggaagggcggcgggaacgtaggcgttgcgtcgggcgaaggtcgt

SEQ ID NO: 37228 - DNA, 585 bp, Artificial Sequence
  chemically treated genomic DNA (Homo sapiens) CpG-island No: 37228
acgaccttcgcccgacgcaacgcctacgttcccgccgcccttcccaataccacgaaaaaactacgacaaaaaaaaaaacgaaaataccccgaacgcctaaaacgcccgacaataaccccgctactctcgccgcgcacacgcaaaaccgcttcccaaacaattacgacgttcgaaacttcctctcgaaccgaaccttcgccgaccgcctacccgtacaaatatcccccgactccgtaactacgactctcccaacgaaaaaaatctcccaaaaaacaaaaacgaaaaaccctcgaaaatctcgaacgacaacgactctcgacgcaaaaaacgaaaaatacgaccgcgacacaaacgaaacgacaactaactcgcgaaatacacccgacacaaaccccgccccgcgcttccgactctcaaaaccctcgtaccccgccccgccctcctctccgaaacccctcgtcccccgcgcccgcctaaccccgccccgactatactaaatcctcgacgcccatcgccaaaaataaaatcccaaccccgcctaacacaaataaaaaaaaacgcaaaaaaacctaataacgaactaaa

SEQ ID NO: 37229 - DNA, 2324 bp, Artificial Sequence
  chemically treated genomic DNA (Homo sapiens) CpG-island No: 37229
  unsure (2107, 2142, 2242, 2291, 2294..)
tttaggttttcgcgggttattaaagaataacggatatttttttaacggtggttttggggtttcgcgggcgttttcgtcgagttcgcgtcgatttcgcgttcggtttcgtatttcgtcgggcgttcgcggcgagatatcggacgttgttcgcgtcgttcgattttgttcgttcggttttttatatttatttcgcggttatcgttcgttcgaagttaggcgataagaataaatatttttcgacgcgaaaaaggaagtataggcgattttcgttaaagtagattttattggggcgatagggtcgtttcgtacgcgttagtcggtttttcgcgtcgttttcgttttttttttttttttttatttcgttttcggtcggttttttttttttttttttttaggttttcgttttcgtggtgttcggggtcgcgcggatcgtttatcggtttttaaggtagcggttgtagcggcgacgtttcgttttcgagtgcggtttcggttcgaggcggcgggttttgtggttgttgtatcgcgaagggcggtagcgcgcgatatcgggaagcgggaggcggtggcggcggcggcggcgcgttgacgttacgcgtcggggttagttagggcgcgtgcgagtcgtttcgttttcggttttatcggttttaattcgggaggagttcggcgagtgggcggggtcgcggaggttagcggatagatcgattggtcgagaggagaatcgagagggcgaacgggcgagtggtagcgaggcggggcgggttgaggttagcgcggaagtttcgcgaggtcgggttcgagtagagtgtggcggcggcggcgagatttgggttcgggttgaggagttggtatttgtgtggaaggaggcggaggcgtaggaggaagggggaagcggagcgtcggttcggagggcgggaggaggcgcggttagggcgggcggttgcggcgaggcgaggcgaggcggggagtcgagacgagtagcggtcgagcgagcgcgggcgcgggcgtatcgaggcgagggaggcggggaagtttcgtcgtcgtcgcggcgttcgttttttttttcgtcgttcgtttttttttttttcgttcgttcgtcgtttttttttttttgttttttttttttacggtcggtcgttttttcgttcgttcgttcgtagtcgaggagtcgaggtcgtcgcggtcgtggcggcggagtttttagttatggtttcgggcgatattttttatatcgttacggacggttcggagatgtcggtcgagatcgtggagttgtacgagatcgaggtggagattatttcggtggagattatcgagattatagtggtgggcgaggaggaggaggaggacgacgacgacgaggacggcggcggtggcgattacggcggcgggggcggttacgggtacgtcggttattattattattattattattattattattattcgtttatgatcgttttgtagtcgttggttatcgacgattcgatttaggtgtattattattaggaggtgattttggtgtagacgcgcgaggaggtggtgggcggcgacgattcggacgggttgcgcgtcgaggacggtttcgaggattagatttttatttcggtgttcgcgtcggtcggcggcgacgacgattatattgaataaacgttggttatcgtggcggcggtcggtaagagcggcggcggcggttcgtcgtcgtcgggaggcggtcgcgttaagaagggcggcggtaagaagagcggtaagaagagttattttagcggcggggtcggcgcggcgggcggcggcggcgtcgattcgggtaataagaagtgggagtagaagtaggtgtagattaagattttggagggcgagttttcggttattatgtggtttttaggtgagcgtcggtcgcgcgtttcggtttcgggatgtttttgttttgaagggaagttatgttttatgtgtgtgatgggcgtcgttatttttttcgttagggtaagtatggcggttttaaaagatggcgggtcgtgcggcggcgggggcgcggcggcggcggcgggcggcgggtcgcgaagatggcggtaggcgcgggggggaggggtcgcgcgttcgttangcgtaatgcgtatttttttagaggggaacgcgttngtgcgatacgtcggggaagggcgttttttttttcgtttttttttcgcgtttattattgtcgtcgcgcgcgtgtgcgagtgttttttcgtcggcggacggnatttttagtggtggttcgtttcggtagtatttgtgcgttttattttttnttnnttttttttatatttaatgttcgtttatcg

SEQ ID NO: 37230 - DNA, 2324 bp, Artificial Sequence
  chemically treated genomic DNA (Homo sapiens) CpG-island No: 37230
  unsure (30..31, 34, 83, 183, 218)
cgataaacgaacattaaatataaaaaaaannaanaaaaaataaaacgcacaaatactaccgaaacgaaccaccactaaaaatnccgtccgccgacgaaaaaacactcgcacacgcgcgcgacgacaataataaacgcgaaaaaaaaacgaaaaaaaaaacgcccttccccgacgtatcgcacnaacgcgttcccctctaaaaaaatacgcattacgcntaacgaacgcgcgacccctcccccccgcgcctaccgccatcttcgcgacccgccgcccgccgccgccgccgcgcccccgccgccgcacgacccgccatcttttaaaaccgccatacttaccctaacgaaaaaaataacgacgcccatcacacacataaaacataacttcccttcaaaacaaaaacatcccgaaaccgaaacgcgcgaccgacgctcacctaaaaaccacataataaccgaaaactcgccctccaaaatcttaatctacacctacttctactcccacttcttattacccgaatcgacgccgccgccgcccgccgcgccgaccccgccgctaaaataactcttcttaccgctcttcttaccgccgcccttcttaacgcgaccgcctcccgacgacgacgaaccgccgccgccgctcttaccgaccgccgccacgataaccaacgtttattcaatataatcgtcgtcgccgccgaccgacgcgaacaccgaaataaaaatctaatcctcgaaaccgtcctcgacgcgcaacccgtccgaatcgtcgccgcccaccacctcctcgcgcgtctacaccaaaatcacctcctaataataatacacctaaatcgaatcgtcgataaccaacgactacaaaacgatcataaacgaataataataataataataataataataataataaccgacgtacccgtaaccgcccccgccgccgtaatcgccaccgccgccgtcctcgtcgtcgtcgtcctcctcctcctcctcgcccaccactataatctcgataatctccaccgaaataatctccacctcgatctcgtacaactccacgatctcgaccgacatctccgaaccgtccgtaacgatataaaaaatatcgcccgaaaccataactaaaaactccgccgccacgaccgcgacgacctcgactcctcgactacgaacgaacgaacgaaaaaacgaccgaccgtaaaaaaaaaaaacaaaaaaaaaaaaacgacgaacgaacgaaaaaaaaaaaaacgaacgacgaaaaaaaaaacgaacgccgcgacgacgacgaaacttccccgcctccctcgcctcgatacgcccgcgcccgcgctcgctcgaccgctactcgtctcgactccccgcctcgcctcgcctcgccgcaaccgcccgccctaaccgcgcctcctcccgccctccgaaccgacgctccgcttcccccttcctcctacgcctccgcctccttccacacaaataccaactcctcaacccgaacccaaatctcgccgccgccgccacactctactcgaacccgacctcgcgaaacttccgcgctaacctcaacccgccccgcctcgctaccactcgcccgttcgccctctcgattctcctctcgaccaatcgatctatccgctaacctccgcgaccccgcccactcgccgaactcctcccgaattaaaaccgataaaaccgaaaacgaaacgactcgcacgcgccctaactaaccccgacgcgtaacgtcaacgcgccgccgccgccgccaccgcctcccgcttcccgatatcgcgcgctaccgcccttcgcgatacaacaaccacaaaacccgccgcctcgaaccgaaaccgcactcgaaaacgaaacgtcgccgctacaaccgctaccttaaaaaccgataaacgatccgcgcgaccccgaacaccacgaaaacgaaaacctaaaaaaaaaaaaaaaaaaaaccgaccgaaaacgaaataaaaaaaaaaaaaaaaaacgaaaacgacgcgaaaaaccgactaacgcgtacgaaacgaccctatcgccccaataaaatctactttaacgaaaatcgcctatacttcctttttcgcgtcgaaaaatatttattcttatcgcctaacttcgaacgaacgataaccgcgaaataaatataaaaaaccgaacgaacaaaatcgaacgacgcgaacaacgtccgatatctcgccgcgaacgcccgacgaaatacgaaaccgaacgcgaaatcgacgcgaactcgacgaaaacgcccgcgaaaccccaaaaccaccgttaaaaaaatatccgttattctttaataacccgcgaaaacctaaa

SEQ ID NO: 37231 - DNA, 2324 bp, Artificial Sequence
  chemically treated genomic DNA (Homo sapiens) CpG-island No: 37231
  unsure (30..31, 34, 83, 183, 218)
cggtaagcgggtattagatatgaaaggagnnggngggaggtgagacgtatagatattgtcggagcgggttattattaagaatntcgttcgtcggcggggaagtattcgtatacgcgcgcggcggtagtgatgggcgcggaggaggagcgggaggaggggcgttttttttcggcgtatcgtatnggcgcgtttttttttagagaaatacgtattgcgtntagcgggcgcgcggtttttttttttcgcgtttgtcgttattttcgcggttcgtcgttcgtcgtcgtcgtcgcgttttcgtcgtcgtacggttcgttattttttggggtcgttatatttgttttggcgaagaagatggcggcgtttattatatatataaaatatggtttttttttaaaataaaaatatttcggggtcggggcgcgcggtcggcgtttatttgaggattatatggtgatcgagaattcgttttttagggttttgatttgtatttgtttttgtttttattttttgttgttcgggtcggcgtcgtcgtcgttcgtcgcgtcggtttcgtcgttgaggtaattttttttgtcgttttttttgtcgtcgttttttttgacgcggtcgtttttcgacgacgacgagtcgtcgtcgtcgtttttgtcggtcgtcgttacggtgattagcgtttgtttaatgtagtcgtcgtcgtcgtcggtcggcgcgggtatcgggatgagaatttgattttcgaagtcgttttcggcgcgtagttcgttcgagtcgtcgtcgtttattattttttcgcgcgtttgtattaggattattttttggtggtggtgtatttgggtcgggtcgtcggtgattagcggttgtagagcgattatgggcgggtggtggtggtggtgatggtggtggtggtggtggtcggcgtgttcgtggtcgttttcgtcgtcgtggtcgttatcgtcgtcgttttcgtcgtcgtcgttttttttttttttttcgtttattattgtggtttcgatggtttttatcgggatggtttttatttcgatttcgtgtagttttacgatttcggtcggtattttcgagtcgttcgtggcgatgtagagggtgtcgttcgaggttatggttgagggtttcgtcgttacggtcgcggcggtttcggtttttcggttgcgggcgggcgggcgaggaggcggtcggtcgtggggaaggaaggtagagggaggaaggcggcgagcgggcggggggagagggggcgggcggcgggggaaggggcgggcgtcgcggcggcggcggggttttttcgtttttttcgtttcggtgcgttcgcgttcgcgttcgttcggtcgttgttcgtttcggtttttcgtttcgtttcgtttcgtcgtaatcgttcgttttggtcgcgttttttttcgtttttcgggtcggcgtttcgttttttttttttttttgcgttttcgtttttttttatataaatattaattttttaattcgagtttagatttcgtcgtcgtcgttatattttgttcgggttcggtttcgcgagattttcgcgttggttttagttcgtttcgtttcgttgttattcgttcgttcgttttttcgatttttttttcggttaatcgatttgttcgttggttttcgcggtttcgtttattcgtcgggtttttttcggattggggtcgatgggatcgggggcggggcggttcgtacgcgttttggttggtttcggcgcgtgacgttagcgcgtcgtcgtcgtcgttatcgtttttcgtttttcggtgtcgcgcgttgtcgtttttcgcggtgtaatagttataaaattcgtcgtttcgggtcggggtcgtattcgggaacggggcgtcgtcgttatagtcgttgttttgggagtcggtgagcggttcgcgcggtttcgggtattacgggggcgggagtttgaggagaagggagggaggggtcggtcgggagcggggtggaggaggggagggagggcgggggcggcgcggggagtcggttggcgcgtgcggggcggttttgtcgttttaataaagtttgttttgacgagaatcgtttgtgttttttttttcgcgtcgggaggtgtttgtttttgtcgtttggtttcgggcgagcgatggtcgcggggtgagtgtggaggatcgaacggataaaatcgggcgacgcgggtagcgttcggtatttcgtcgcgagcgttcggcggggtgcggggtcgagcgcggggtcggcgcgagttcggcggaagcgttcgcggagttttagggttatcgttgggaggatgttcgttattttttagtgattcgcggaaatttgag

SEQ ID NO: 37232 - DNA, 2324 bp, Artificial Sequence
  chemically treated genomic DNA (Homo sapiens) CpG-island No: 37232
  unsure (2107, 2142, 2242, 2291, 2294..)
ctcaaatttccgcgaatcactaaaaaataacgaacatcctcccaacgataaccctaaaactccgcgaacgcttccgccgaactcgcgccgaccccgcgctcgaccccgcaccccgccgaacgctcgcgacgaaataccgaacgctacccgcgtcgcccgattttatccgttcgatcctccacactcaccccgcgaccatcgctcgcccgaaaccaaacgacaaaaacaaacacctcccgacgcgaaaaaaaaaacacaaacgattctcgtcaaaacaaactttattaaaacgacaaaaccgccccgcacgcgccaaccgactccccgcgccgcccccgccctccctcccctcctccaccccgctcccgaccgacccctccctcccttctcctcaaactcccgcccccgtaatacccgaaaccgcgcgaaccgctcaccgactcccaaaacaacgactataacgacgacgccccgttcccgaatacgaccccgacccgaaacgacgaattttataactattacaccgcgaaaaacgacaacgcgcgacaccgaaaaacgaaaaacgataacgacgacgacgacgcgctaacgtcacgcgccgaaaccaaccaaaacgcgtacgaaccgccccgcccccgatcccatcgaccccaatccgaaaaaaacccgacgaataaacgaaaccgcgaaaaccaacgaacaaatcgattaaccgaaaaaaaaatcgaaaaaacgaacgaacgaataacaacgaaacgaaacgaactaaaaccaacgcgaaaatctcgcgaaaccgaacccgaacaaaatataacgacgacgacgaaatctaaactcgaattaaaaaattaatatttatataaaaaaaaacgaaaacgcaaaaaaaaaaaaaaaacgaaacgccgacccgaaaaacgaaaaaaaacgcgaccaaaacgaacgattacgacgaaacgaaacgaaacgaaaaaccgaaacgaacaacgaccgaacgaacgcgaacgcgaacgcaccgaaacgaaaaaaacgaaaaaaccccgccgccgccgcgacgcccgccccttcccccgccgcccgccccctctccccccgcccgctcgccgccttcctccctctaccttccttccccacgaccgaccgcctcctcgcccgcccgcccgcaaccgaaaaaccgaaaccgccgcgaccgtaacgacgaaaccctcaaccataacctcgaacgacaccctctacatcgccacgaacgactcgaaaataccgaccgaaatcgtaaaactacacgaaatcgaaataaaaaccatcccgataaaaaccatcgaaaccacaataataaacgaaaaaaaaaaaaaaaacgacgacgacgaaaacgacgacgataacgaccacgacgacgaaaacgaccacgaacacgccgaccaccaccaccaccaccatcaccaccaccaccacccgcccataatcgctctacaaccgctaatcaccgacgacccgacccaaatacaccaccaccaaaaaataatcctaatacaaacgcgcgaaaaaataataaacgacgacgactcgaacgaactacgcgccgaaaacgacttcgaaaatcaaattctcatcccgatacccgcgccgaccgacgacgacgacgactacattaaacaaacgctaatcaccgtaacgacgaccgacaaaaacgacgacgacgactcgtcgtcgtcgaaaaacgaccgcgtcaaaaaaaacgacgacaaaaaaaacgacaaaaaaaattacctcaacgacgaaaccgacgcgacgaacgacgacgacgccgacccgaacaacaaaaaataaaaacaaaaacaaatacaaatcaaaaccctaaaaaacgaattctcgatcaccatataatcctcaaataaacgccgaccgcgcgccccgaccccgaaatatttttattttaaaaaaaaaccatattttatatatataataaacgccgccatcttcttcgccaaaacaaatataacgaccccaaaaaataacgaaccgtacgacgacgaaaacgcgacgacgacgacgaacgacgaaccgcgaaaataacgacaaacgcgaaaaaaaaaaaccgcgcgcccgctanacgcaatacgtatttctctaaaaaaaaacgcgccnatacgatacgccgaaaaaaaacgcccctcctcccgctcctcctccgcgcccatcactaccgccgcgcgcgtatacgaatacttccccgccgacgaacganattcttaataataacccgctccgacaatatctatacgtctcacctcccnccnnctcctttcatatctaatacccgcttaccg

SEQ ID NO: 37233 - DNA, 528 bp, Artificial Sequence
  chemically treated genomic DNA (Homo sapiens) CpG-island No: 37233
gacggcgattggagggggtgggaggggtaacgacgtttaggtttttttttcggcggtttttttggggcgcgggggcgtatttatcgtcgggattatttggtcgacggtttgtcgaaaggttttttttatagtacgtcgtagagttgtattttggtgttgatatttagggcgttcgagttagtttgttttagggacggcgagggcgatatcgagttggatttggacgtgaatattttgttttagcggggttgtgttcggttcggattttattttttcggggttagtagggattcggggcgagaggcgagggcggagtcgtcggagagcgttttagcgagtagagaagtagagcggttcggttcggagttgtagtattaaagcgcgttgggtattggacgcggtattaagggggcgtagggcgcgtagtcggcggtttgggtttcggattgtagagggtcgggcgggaatttcgcggggagggtggtttagtttcgggtcggtagtatttttttttttttcgttttagtt

SEQ ID NO: 37234 - DNA, 528 bp, Artificial Sequence
  chemically treated genomic DNA (Homo sapiens) CpG-island No: 37234
aactaaaacgaaaaaaaaaaaaatactaccgacccgaaactaaaccaccctccccgcgaaattcccgcccgaccctctacaatccgaaacccaaaccgccgactacgcgccctacgcccccttaataccgcgtccaatacccaacgcgctttaatactacaactccgaaccgaaccgctctacttctctactcgctaaaacgctctccgacgactccgccctcgcctctcgccccgaatccctactaaccccgaaaaaataaaatccgaaccgaacacaaccccgctaaaacaaaatattcacgtccaaatccaactcgatatcgccctcgccgtccctaaaacaaactaactcgaacgccctaaatatcaacaccaaaatacaactctacgacgtactataaaaaaaacctttcgacaaaccgtcgaccaaataatcccgacgataaatacgcccccgcgccccaaaaaaaccgccgaaaaaaaaacctaaacgtcgttacccctcccaccccctccaatcgccgtc

SEQ ID NO: 37235 - DNA, 528 bp, Artificial Sequence
  chemically treated genomic DNA (Homo sapiens) CpG-island No: 37235
ggttagggcgggaggggaggagatgttgtcggttcgaggttgagttatttttttcgcggagttttcgttcggttttttgtaattcggagtttaagtcgtcggttacgcgttttgcgtttttttggtgtcgcgtttagtgtttagcgcgttttgatgttgtagtttcgggtcgggtcgttttgtttttttgttcgttgggacgtttttcgacggtttcgttttcgtttttcgtttcgagtttttgttgatttcggggaggtggggttcgggtcgggtatagtttcgttgaggtaggatgtttacgtttaagtttaattcggtgtcgttttcgtcgtttttggagtaggttgattcggacgttttggatattagtattaaagtgtagttttacggcgtgttgtggaagaggtttttcggtaggtcgtcggttaagtggtttcggcggtgagtgcgttttcgcgttttaaggagatcgtcggggagagagtttgggcgtcgttattttttttattttttttagtcgtcgtt

SEQ ID NO: 37236 - DNA, 528 bp, Artificial Sequence
  chemically treated genomic DNA (Homo sapiens) CpG-island No: 37236
aacgacgactaaaaaaaataaaaaaaataacgacgcccaaactctctccccgacgatctccttaaaacgcgaaaacgcactcaccgccgaaaccacttaaccgacgacctaccgaaaaacctcttccacaacacgccgtaaaactacactttaatactaatatccaaaacgtccgaatcaacctactccaaaaacgacgaaaacgacaccgaattaaacttaaacgtaaacatcctacctcaacgaaactatacccgacccgaaccccacctccccgaaatcaacaaaaactcgaaacgaaaaacgaaaacgaaaccgtcgaaaaacgtcccaacgaacaaaaaaacaaaacgacccgacccgaaactacaacatcaaaacgcgctaaacactaaacgcgacaccaaaaaaacgcaaaacgcgtaaccgacgacttaaactccgaattacaaaaaaccgaacgaaaactccgcgaaaaaaataactcaacctcgaaccgacaacatctcctcccctcccgccctaacc

SEQ ID NO: 37237 - DNA, 540 bp, Artificial Sequence
  chemically treated genomic DNA (Homo sapiens) CpG-island No: 37237
gggcgaagttaggagttgtatcgtttttttttttcgttatggggtaatagtttcgttttattagtttagatgttttcgagcgttcgcgtgttttagcgagagtcgggggtgggtttttaagtattcgcgtttttatcgttttttttcgttttcggtttcggtttcggttcgcgttttagtatcgtcgttttttgggtttttttcggagtgggagggagtcgcggtttcgttttcgcgttcgtttttttttaggtttttcggtcgtcgcgtcgagtttttcgcgcgtggatagattgttcggtcgacggacggacgtaggagtcggttgcggtcgtcgggatttcgcgggtgggaggaggtttcggtcgtgtttcgggaggagaggggagggggcggaggaggaggaaggggaggagatagatttcggttttgcgtatcggcgttgatacgcgagtttcggggcgttttaaattttcggttaggttttttcgagattttaaggggttttttgattttaagtagagcgtgaggtagggagtg

SEQ ID NO: 37238 - DNA, 540 bp, Artificial Sequence
  chemically treated genomic DNA (Homo sapiens) CpG-island No: 37238
cactccctacctcacgctctacttaaaatcaaaaaaccccttaaaatctcgaaaaaacctaaccgaaaatttaaaacgccccgaaactcgcgtatcaacgccgatacgcaaaaccgaaatctatctcctccccttcctcctcctccgccccctcccctctcctcccgaaacacgaccgaaacctcctcccacccgcgaaatcccgacgaccgcaaccgactcctacgtccgtccgtcgaccgaacaatctatccacgcgcgaaaaactcgacgcgacgaccgaaaaacctaaaaaaaaacgaacgcgaaaacgaaaccgcgactccctcccactccgaaaaaaacccaaaaaacgacgatactaaaacgcgaaccgaaaccgaaaccgaaaacgaaaaaaaacgataaaaacgcgaatacttaaaaacccacccccgactctcgctaaaacacgcgaacgctcgaaaacatctaaactaataaaacgaaactattaccccataacgaaaaaaaaaaacgatacaactcctaacttcgccc

SEQ ID NO: 37239 - DNA, 540 bp, Artificial Sequence
  chemically treated genomic DNA (Homo sapiens) CpG-island No: 37239
tattttttgttttacgttttgtttggggttagaaggttttttggggtttcgggagggtttggtcgaggatttggggcgtttcgagattcgcgtgttagcgtcggtgcgtagggtcgagatttgttttttttttttttttttttttcgttttttttttttttttttcggagtacggtcgaggtttttttttattcgcgagatttcggcggtcgtagtcggtttttgcgttcgttcgtcggtcgggtagtttgtttacgcgcggaaagttcggcgcggcggtcgaggggtttgggagggaacgggcgcggaggcgggatcgcggtttttttttatttcggggggagtttaggaggcggcggtgttggagcgcgagtcggagtcggagtcggagacgaagagaggcggtgagaacgcgggtgtttagggatttattttcggttttcgttagggtacgcgagcgttcggagatatttgagttggtgaagcgaggttgttattttatggcgagagggagagacgatgtagtttttggtttcgttt

SEQ ID NO: 37240 - DNA, 540 bp, Artificial Sequence
  chemically treated genomic DNA (Homo sapiens) CpG-island No: 37240
aaacgaaaccaaaaactacatcgtctctccctctcgccataaaataacaacctcgcttcaccaactcaaatatctccgaacgctcgcgtaccctaacgaaaaccgaaaataaatccctaaacacccgcgttctcaccgcctctcttcgtctccgactccgactccgactcgcgctccaacaccgccgcctcctaaactccccccgaaataaaaaaaaaccgcgatcccgcctccgcgcccgttccctcccaaacccctcgaccgccgcgccgaactttccgcgcgtaaacaaactacccgaccgacgaacgaacgcaaaaaccgactacgaccgccgaaatctcgcgaataaaaaaaaacctcgaccgtactccgaaaaaaaaaaaaaaaaaacgaaaaaaaaaaaaaaaaaaaaaacaaatctcgaccctacgcaccgacgctaacacgcgaatctcgaaacgccccaaatcctcgaccaaaccctcccgaaaccccaaaaaaccttctaaccccaaacaaaacgtaaaacaaaaaata

SEQ ID NO: 37241 - DNA, 613 bp, Artificial Sequence
  chemically treated genomic DNA (Homo sapiens) CpG-island No: 37241
gggattcggagtttagcgtaaagtagtcgcggttttttcggatttcgttttttttttttttttatttttcgggggtttcggttttttttgttgcggttcggtttcgtagttgtaaaaaataattttcggttggagataattagttgagaaattcgagtatttgaggcgttcgtttcgtattgtgggttcgcgtcgattggtttaggtaggtacgttttttgagcgtcgcgttcggaaggttacgggtcgtaggattcgtcgttcgagggtttcgagatttgattgggcgcgtaatttttttattttttttcgtttttgtattttttatttacgttgttgattggttttgttattgtatcgttcgttcgcgtcggcgggaggattttgtaatcgtttgttattttcgtttcgtttattacgttttttattggttagagagtgtttcgcgtagggagtacgaggagaaggaggagtttcgtaggttgtttttttttaggaggtcgatttcgtcgagtcggtggcggttgtaggttgggagggagaagtgttacgtttttgtaggttggcgaagtggttttaggttattcggttagtttggtacggtttcgttttt

SEQ ID NO: 37242 - DNA, 613 bp, Artificial Sequence
  chemically treated genomic DNA (Homo sapiens) CpG-island No: 37242
aaaaacgaaaccgtaccaaactaaccgaataacctaaaaccacttcgccaacctacaaaaacgtaacacttctccctcccaacctacaaccgccaccgactcgacgaaatcgacctcctaaaaaaaaacaacctacgaaactcctccttctcctcgtactccctacgcgaaacactctctaaccaataaaaaacgtaataaacgaaacgaaaataacaaacgattacaaaatcctcccgccgacgcgaacgaacgatacaataacaaaaccaatcaacaacgtaaataaaaaatacaaaaacgaaaaaaaataaaaaaattacgcgcccaatcaaatctcgaaaccctcgaacgacgaatcctacgacccgtaaccttccgaacgcgacgctcaaaaaacgtacctacctaaaccaatcgacgcgaacccacaatacgaaacgaacgcctcaaatactcgaatttctcaactaattatctccaaccgaaaattattttttacaactacgaaaccgaaccgcaacaaaaaaaaccgaaacccccgaaaaataaaaaaaaaaaaaaaacgaaatccgaaaaaaccgcgactactttacgctaaactccgaatccc

SEQ ID NO: 37243 - DNA, 613 bp, Artificial Sequence
  chemically treated genomic DNA (Homo sapiens) CpG-island No: 37243
gaagacggggtcgtgttagattagtcgggtagtttggaattatttcgttaatttgtaaaggcgtagtattttttttttttagtttgtagtcgttatcgattcggcggagtcggttttttgggaaaaaataatttgcgaagttttttttttttttcgtgttttttacgcgaggtattttttaattaatgggaaacgtggtgggcggagcgagagtgatagacgattatagagttttttcgtcggcgcgaacgggcggtgtagtagtagggttaattagtagcgtgggtgggaagtataggggcgggagaaagtagggaaattacgcgtttaattagatttcggggttttcgagcgacgggttttgcggttcgtggtttttcgagcgcggcgtttagggggcgtgtttgtttgggttaatcggcgcgagtttatagtgcggagcgagcgttttaaatgttcgggttttttagttgattgtttttagtcgagagttgttttttgtagttacggagtcgagtcgtagtaggaggagtcgagattttcggggggtggggggaaagaggaggcggggttcgggggagtcgcggttgttttgcgttggatttcgggtttt

SEQ ID NO: 37244 - DNA, 613 bp, Artificial Sequence
  chemically treated genomic DNA (Homo sapiens) CpG-island No: 37244
aaaacccgaaatccaacgcaaaacaaccgcgactcccccgaaccccgcctcctctttccccccaccccccgaaaatctcgactcctcctactacgactcgactccgtaactacaaaaaacaactctcgactaaaaacaatcaactaaaaaacccgaacatttaaaacgctcgctccgcactataaactcgcgccgattaacccaaacaaacacgccccctaaacgccgcgctcgaaaaaccacgaaccgcaaaacccgtcgctcgaaaaccccgaaatctaattaaacgcgtaatttccctactttctcccgcccctatacttcccacccacgctactaattaaccctactactacaccgcccgttcgcgccgacgaaaaaactctataatcgtctatcactctcgctccgcccaccacgtttcccattaattaaaaaatacctcgcgtaaaaaacacgaaaaaaaaaaaaaacttcgcaaattattttttcccaaaaaaccgactccgccgaatcgataacgactacaaactaaaaaaaaaaaatactacgcctttacaaattaacgaaataattccaaactacccgactaatctaacacgaccccgtcttc

SEQ ID NO: 37245 - DNA, 611 bp, Artificial Sequence
  chemically treated genomic DNA (Homo sapiens) CpG-island No: 37245
tttcgttttgttgtttttagtttttttttcggattcgagatttggggagttacgtatcgggtttagtttataagtttcgagggtagacgcgttagttcgcggtagtatacgttttgggggaatagggatagttgtcgtgacggtaggagttgggttcgggttcgggttcgcgtttttcgcgggcggcgaagttcgttcgtgtacgagagttgcgcggttattttttttttttagtagttattcgggattcgagtttttcgcggtcgcgttgttttttttaatttttttgttagttttcgggatttcggggtttattttaggttttttgttacgtgaacgtttttcgtagttaatgggcgcgttcgggattttagtcgtcgattaatgggcgcgtagttacggcgttggggagtatcgtttcgttacgtgatcggtagcgcgttcggagtgattcggttgcgggttagggtttgggaagggggtggtgggtcgtcgttttattagaagtcggaggacgggcgttagggggtaattttttataggagggcgtttcgttagaatgatagggtttttgtaaaagtttgatattcgtggtatagagcgttttagat

SEQ ID NO: 37246 - DNA, 611 bp, Artificial Sequence
  chemically treated genomic DNA (Homo sapiens) CpG-island No: 37246
atctaaaacgctctataccacgaatatcaaacttttacaaaaaccctatcattctaacgaaacgccctcctataaaaaattaccccctaacgcccgtcctccgacttctaataaaacgacgacccaccacccccttcccaaaccctaacccgcaaccgaatcactccgaacgcgctaccgatcacgtaacgaaacgatactccccaacgccgtaactacgcgcccattaatcgacgactaaaatcccgaacgcgcccattaactacgaaaaacgttcacgtaacaaaaaacctaaaataaaccccgaaatcccgaaaactaacaaaaaaattaaaaaaaacaacgcgaccgcgaaaaactcgaatcccgaataactactaaaaaaaaaaaataaccgcgcaactctcgtacacgaacgaacttcgccgcccgcgaaaaacgcgaacccgaacccgaacccaactcctaccgtcacgacaactatccctattcccccaaaacgtatactaccgcgaactaacgcgtctaccctcgaaacttataaactaaacccgatacgtaactccccaaatctcgaatccgaaaaaaaaactaaaaacaacaaaacgaaa

SEQ ID NO: 37247 - DNA, 611 bp, Artificial Sequence
  chemically treated genomic DNA (Homo sapiens) CpG-island No: 37247
atttggggcgttttgtgttacgggtgttagatttttgtaaaagttttgttattttaacgggacgtttttttgtaggaagttgttttttggcgttcgtttttcggtttttgatgaaacggcgatttattattttttttttagattttggttcgtagtcggattatttcgggcgcgttgtcgattacgtggcgaagcggtgttttttagcgtcgtggttgcgcgtttattggtcggcggttggagtttcgggcgcgtttattggttgcggggggcgtttacgtggtagggggtttgggatggatttcggggtttcgagagttggtaggaaagttaaagggggtagcgcggtcgcggggagttcgagtttcgggtgattgttggagggaggaggtgatcgcgtagttttcgtgtacggacggatttcgtcgttcgcggggggcgcgaattcgagttcgggtttagtttttgtcgttacggtagttgtttttgtttttttagggcgtatgttgtcgcgggttggcgcgtttgttttcgggatttatgagttgaattcggtacgtagttttttaagtttcgagttcgagggaagggttggggataataaggcgagg

SEQ ID NO: 37248 - DNA, 611 bp, Artificial Sequence
  chemically treated genomic DNA (Homo sapiens) CpG-island No: 37248
cctcgccttattatccccaacccttccctcgaactcgaaacttaaaaaactacgtaccgaattcaactcataaatcccgaaaacaaacgcgccaacccgcgacaacatacgccctaaaaaaacaaaaacaactaccgtaacgacaaaaactaaacccgaactcgaattcgcgccccccgcgaacgacgaaatccgtccgtacacgaaaactacgcgatcacctcctccctccaacaatcacccgaaactcgaactccccgcgaccgcgctaccccctttaactttcctaccaactctcgaaaccccgaaatccatcccaaaccccctaccacgtaaacgccccccgcaaccaataaacgcgcccgaaactccaaccgccgaccaataaacgcgcaaccacgacgctaaaaaacaccgcttcgccacgtaatcgacaacgcgcccgaaataatccgactacgaaccaaaatctaaaaaaaaaataataaatcgccgtttcatcaaaaaccgaaaaacgaacgccaaaaaacaacttcctacaaaaaaacgtcccgttaaaataacaaaacttttacaaaaatctaacacccgtaacacaaaacgccccaaat

SEQ ID NO: 37249 - DNA, 575 bp, Artificial Sequence
  chemically treated genomic DNA (Homo sapiens) CpG-island No: 37249
cgttaagacggtgatgatcgtttgcgttagttttttttttttcgatttcgacgagatttttaatatttttaattacgttagtcgcgtttagaatattcgtaatcgcgttacggttaattggcggttcgaggtcgagcggttattcgaagagacggcgagcggcgcgcggggttcgttacggtatcgtttcgagattcgtattatttatcgcggtcggcgcgttttaggtttagttatcgttttcgcggcggtcgttatgcgtttgggcgtcgagtgcgcgcgttatcgggtttgtatcgacgtcgtttatagttttttgcgcgagttgtaggtcgagttcgggttgttcggcgtcgtcgttcgtaaggtgcgcgattggttgtgcgtcgtcgagggcgagcgtagcgttttgagtttcgttttcgggttcgatagcggtatcgagagcgttttcgtcgaggattaggcggcgtagggggtcggcgggcgaaaggtggtcgagggataggttgtggttgtggttgtgggtagtggggagtggtggagaggaaggaagagggtttttagatagtagt

SEQ ID NO: 37250 - DNA, 575 bp, Artificial Sequence
  chemically treated genomic DNA (Homo sapiens) CpG-island No: 37250
actactatctaaaaaccctcttccttcctctccaccactccccactacccacaaccacaaccacaacctatccctcgaccacctttcgcccgccgaccccctacgccgcctaatcctcgacgaaaacgctctcgataccgctatcgaacccgaaaacgaaactcaaaacgctacgctcgccctcgacgacgcacaaccaatcgcgcaccttacgaacgacgacgccgaacaacccgaactcgacctacaactcgcgcaaaaaactataaacgacgtcgatacaaacccgataacgcgcgcactcgacgcccaaacgcataacgaccgccgcgaaaacgataactaaacctaaaacgcgccgaccgcgataaataatacgaatctcgaaacgataccgtaacgaaccccgcgcgccgctcgccgtctcttcgaataaccgctcgacctcgaaccgccaattaaccgtaacgcgattacgaatattctaaacgcgactaacgtaattaaaaatattaaaaatctcgtcgaaatcgaaaaaaaaaaaactaacgcaaacgatcatcaccgtcttaacg

SEQ ID NO: 37251 - DNA, 575 bp, Artificial Sequence
  chemically treated genomic DNA (Homo sapiens) CpG-island No: 37251
gttgttgtttgaagattttttttttttttttttattattttttattgtttataattataattataatttgtttttcggttatttttcgttcgtcggttttttgcgtcgtttggttttcgacggaggcgttttcgatgtcgttatcgggttcggaggcggagtttagggcgttgcgttcgttttcgacggcgtatagttagtcgcgtattttgcgggcggcggcgtcgggtagttcgggttcggtttgtagttcgcgtaagaggttgtaggcggcgtcggtgtaggttcggtagcgcgcgtattcggcgtttaggcgtatggcggtcgtcgcggaggcggtggttgggtttggggcgcgtcggtcgcggtggatgatgcgggtttcggagcggtgtcgtggcggatttcgcgcgtcgttcgtcgttttttcgggtggtcgttcggtttcgggtcgttagttgatcgtggcgcggttgcggatgttttgggcgcggttggcgtagttgagggtgttgagggtttcgtcgaagtcggaggaggaagggttgacgtaggcgattattatcgttttggcg

SEQ ID NO: 37252 - DNA, 575 bp, Artificial Sequence
  chemically treated genomic DNA (Homo sapiens) CpG-island No: 37252
cgccaaaacgataataatcgcctacgtcaacccttcctcctccgacttcgacgaaaccctcaacaccctcaactacgccaaccgcgcccaaaacatccgcaaccgcgccacgatcaactaacgacccgaaaccgaacgaccacccgaaaaaacgacgaacgacgcgcgaaatccgccacgacaccgctccgaaacccgcatcatccaccgcgaccgacgcgccccaaacccaaccaccgcctccgcgacgaccgccatacgcctaaacgccgaatacgcgcgctaccgaacctacaccgacgccgcctacaacctcttacgcgaactacaaaccgaacccgaactacccgacgccgccgcccgcaaaatacgcgactaactatacgccgtcgaaaacgaacgcaacgccctaaactccgcctccgaacccgataacgacatcgaaaacgcctccgtcgaaaaccaaacgacgcaaaaaaccgacgaacgaaaaataaccgaaaaacaaattataattataattataaacaataaaaaataataaaaaaaaaaaaaaaaaatcttcaaacaacaac

SEQ ID NO: 37253 - DNA, 595 bp, Artificial Sequence
  chemically treated genomic DNA (Homo sapiens) CpG-island No: 37253
tggcgcgggttcggatcggggtttcggggcggcggtacggtcgatatggtatgttgttataaagtaatgttgttgttggatatcgcgggcggcgtcgttcgttatagtcgggttcggcgggtcgttttgcgtttttttatttatttgagttgtcgattcggtttggttagggtttattgggtttttaagttttttgattcgtagggggcgcggagtcggtcgtttcgcgtgtttgattttcgcgagttggggtttcgttcgtgggaggattttgaggaggagttggaggttaggttcgaggatcgcgtttatttgttcggttcggcgtttagggttatttatacgtacggcgttttgatggagacgttgttagattattagtgggatcggttcgagattacgtcgtttacgaagtcgattttgcggagtagcgggaggagattgttggacgtggagagcgaggttaaggaggtcgaggtcgcgttcgggggtttggtgaacgtcgttttttttttggttttttgttcgtattcgtagagggagttgttgtagttcgtgtttgggtgcgaggtttaggtttagcgtttgtcgttta

SEQ ID NO: 37254 - DNA, 595 bp, Artificial Sequence
  chemically treated genomic DNA (Homo sapiens) CpG-island No: 37254
taaacgacaaacgctaaacctaaacctcgcacccaaacacgaactacaacaactccctctacgaatacgaacaaaaaaccaaaaaaaaaacgacgttcaccaaacccccgaacgcgacctcgacctccttaacctcgctctccacgtccaacaatctcctcccgctactccgcaaaatcgacttcgtaaacgacgtaatctcgaaccgatcccactaataatctaacaacgtctccatcaaaacgccgtacgtataaataaccctaaacgccgaaccgaacaaataaacgcgatcctcgaacctaacctccaactcctcctcaaaatcctcccacgaacgaaaccccaactcgcgaaaatcaaacacgcgaaacgaccgactccgcgccccctacgaatcaaaaaacttaaaaacccaataaaccctaaccaaaccgaatcgacaactcaaataaataaaaaaacgcaaaacgacccgccgaacccgactataacgaacgacgccgcccgcgatatccaacaacaacattactttataacaacataccatatcgaccgtaccgccgccccgaaaccccgatccgaacccgcgcca

SEQ ID NO: 37255 - DNA, 595 bp, Artificial Sequence
  chemically treated genomic DNA (Homo sapiens) CpG-island No: 37255
tgggcggtaggcgttgggtttgggtttcgtatttagatacgaattgtagtagttttttttgcgagtgcggatagggggttaggaggaagacggcgtttattaagttttcgagcgcggtttcggtttttttggtttcgttttttacgtttagtagttttttttcgttgtttcgtaggatcggtttcgtgggcgacgtgatttcgggtcggttttattggtagtttagtagcgtttttattagggcgtcgtgcgtgtgggtggttttgggcgtcgggtcgggtaggtgggcgcgattttcgagtttggtttttagtttttttttaaagtttttttacgagcgggattttagttcgcggaagttagatacgcgggacggtcggtttcgcgttttttgcgagttaaagaatttgaaggtttagtggattttggttaggtcgaatcggtaatttagataggtgaggaggcgtagggcggttcgtcggattcggttgtggcgggcggcgtcgttcgcggtgtttagtagtagtattattttgtgatagtatgttatatcggtcgtgtcgtcgtttcggggtttcggttcgggttcgcgtta

SEQ ID NO: 37256 - DNA, 595 bp, Artificial Sequence
  chemically treated genomic DNA (Homo sapiens) CpG-island No: 37256
taacgcgaacccgaaccgaaaccccgaaacgacgacacgaccgatataacatactatcacaaaataatactactactaaacaccgcgaacgacgccgcccgccacaaccgaatccgacgaaccgccctacgcctcctcacctatctaaattaccgattcgacctaaccaaaatccactaaaccttcaaattctttaactcgcaaaaaacgcgaaaccgaccgtcccgcgtatctaacttccgcgaactaaaatcccgctcgtaaaaaaactttaaaaaaaaactaaaaaccaaactcgaaaatcgcgcccacctacccgacccgacgcccaaaaccacccacacgcacgacgccctaataaaaacgctactaaactaccaataaaaccgacccgaaatcacgtcgcccacgaaaccgatcctacgaaacaacgaaaaaaaactactaaacgtaaaaaacgaaaccaaaaaaaccgaaaccgcgctcgaaaacttaataaacgccgtcttcctcctaaccccctatccgcactcgcaaaaaaaactactacaattcgtatctaaatacgaaacccaaacccaacgcctaccgccca

SEQ ID NO: 37257 - DNA, 938 bp, Artificial Sequence
  chemically treated genomic DNA (Homo sapiens) CpG-island No: 37257
tgtcgtcggtttttatttaggtcgaggtggttcggttttatgtatcgcgacgtaacgcggggaggtagataaggtatagggcggcgtttataatttatgttaattcgttttatgtgttcgtcgaggcggtataaatcgtcgtgacgattagcggtttaatgatcgaagttaggttggtaagagtcgcgagcgatttttgaagttgtttttgatggtcgttatttatttgtttggatagtatggtttgtaacgcgggtatttcgatgtcgtcggaagcgagaagaattataatggggaaggttatttagtttcgcgtcgcgaacgttagtaagacgtagtttagcgcgtcggtcgttatgtcggcgataatggtttgtttttcgtcgaaacgtttggtggcgggattagtgacgaaggtttgagcgagggcgtgtaagatttcgaatatcgtaagcgataggtcgattatcgtcgcgttttagcgaaagcggttttcgtcgaaaatgatttagagcgttgtcggtatttgttttacgagttgtatgataaagaagatagttataagtgcggcgacgatagttatgtttcgcgtttatcggaaggagttgattgggttgaaggtttttaagggtatcggtcgacgtttttttttatgcgatttttgtattaggaagtagtttagtagtaggttgaggtcgttgagtatcgtcgtcgtaaggaatggtgtatgtaaggagatggcgtttaatagtttttcggttacggggtttgttattatatttacgtcgaaataagcgtttatgagttcgaagtggcgagttcgattttttttatcggtgatgtcggcgatataggcgttagtaatcgtatttgtggcgtcggtgatgtcggttacgatgcgttcggcgtagaggattaggaaatggagaataagtttt

SEQ ID NO: 37258 - DNA, 938 bp, Artificial Sequence
  chemically treated genomic DNA (Homo sapiens) CpG-island No: 37258
aaaacttattctccatttcctaatcctctacgccgaacgcatcgtaaccgacatcaccgacgccacaaatacgattactaacgcctatatcgccgacatcaccgataaaaaaaatcgaactcgccacttcgaactcataaacgcttatttcgacgtaaatataataacaaaccccgtaaccgaaaaactattaaacgccatctccttacatacaccattccttacgacgacgatactcaacgacctcaacctactactaaactacttcctaatacaaaaatcgcataaaaaaaaacgtcgaccgatacccttaaaaaccttcaacccaatcaactccttccgataaacgcgaaacataactatcgtcgccgcacttataactatcttctttatcatacaactcgtaaaacaaataccgacaacgctctaaatcattttcgacgaaaaccgctttcgctaaaacgcgacgataatcgacctatcgcttacgatattcgaaatcttacacgccctcgctcaaaccttcgtcactaatcccgccaccaaacgtttcgacgaaaaacaaaccattatcgccgacataacgaccgacgcgctaaactacgtcttactaacgttcgcgacgcgaaactaaataaccttccccattataattcttctcgcttccgacgacatcgaaatacccgcgttacaaaccatactatccaaacaaataaataacgaccatcaaaaacaacttcaaaaatcgctcgcgactcttaccaacctaacttcgatcattaaaccgctaatcgtcacgacgatttataccgcctcgacgaacacataaaacgaattaacataaattataaacgccgccctataccttatctacctccccgcgttacgtcgcgatacataaaaccgaaccacctcgacctaaataaaaaccgacgaca

SEQ ID NO: 37259 - DNA, 938 bp, Artificial Sequence
  chemically treated genomic DNA (Homo sapiens) CpG-island No: 37259
agagtttattttttattttttgattttttacgtcggacgtatcgtggtcggtattatcggcgttataggtgcggttgttggcgtttatatcgtcgatattatcgatggggaagatcgggttcgttatttcgggtttatgagcgtttgtttcggcgtgggtatggtggtaggtttcgtggtcgggggattgttgggcgttatttttttgtatgtattattttttgcggcggcggtgtttaacggttttaatttattattgggttgttttttaatgtaggagtcgtataagggagagcgtcgatcgatgtttttgagagtttttaatttagttagtttttttcggtgggcgcggggtatgattatcgtcgtcgtatttatgattgttttttttattatgtaattcgtaggataggtgtcggtagcgttttgggttattttcggcgaggatcgttttcgttggagcgcgacgatgatcggtttgtcgtttgcggtattcggaattttgtacgttttcgtttaagttttcgttattggtttcgttattaaacgtttcggcgagaagtaggttattatcgtcggtatggcggtcgacgcgttgggttacgttttgttggcgttcgcgacgcgaggttggatggttttttttattatgatttttttcgttttcggcggtatcgggatgttcgcgttgtaggttatgttgtttaggtaggtagatgacgattattagggatagttttaaggatcgttcgcggtttttattagtttaatttcgattattggatcgttgatcgttacggcgatttatgtcgtttcggcgagtatatggaacgggttggtatggattgtaggcgtcgttttatattttgtttgttttttcgcgttgcgtcgcggtgtatggagtcgggttatttcgatttgaatggaagtcggcggta

SEQ ID NO: 37260 - DNA, 938 bp, Artificial Sequence
  chemically treated genomic DNA (Homo sapiens) CpG-island No: 37260
taccgccgacttccattcaaatcgaaataacccgactccatacaccgcgacgcaacgcgaaaaaacaaacaaaatataaaacgacgcctacaatccataccaacccgttccatatactcgccgaaacgacataaatcgccgtaacgatcaacgatccaataatcgaaattaaactaataaaaaccgcgaacgatccttaaaactatccctaataatcgtcatctacctacctaaacaacataacctacaacgcgaacatcccgataccgccgaaaacgaaaaaaatcataataaaaaaaaccatccaacctcgcgtcgcgaacgccaacaaaacgtaacccaacgcgtcgaccgccataccgacgataataacctacttctcgccgaaacgtttaataacgaaaccaataacgaaaacttaaacgaaaacgtacaaaattccgaataccgcaaacgacaaaccgatcatcgtcgcgctccaacgaaaacgatcctcgccgaaaataacccaaaacgctaccgacacctatcctacgaattacataataaaaaaaacaatcataaatacgacgacgataatcataccccgcgcccaccgaaaaaaactaactaaattaaaaactctcaaaaacatcgatcgacgctctcccttatacgactcctacattaaaaaacaacccaataataaattaaaaccgttaaacaccgccgccgcaaaaaataatacatacaaaaaaataacgcccaacaatcccccgaccacgaaacctaccaccatacccacgccgaaacaaacgctcataaacccgaaataacgaacccgatcttccccatcgataatatcgacgatataaacgccaacaaccgcacctataacgccgataataccgaccacgatacgtccgacgtaaaaaatcaaaaaataaaaaataaactct

SEQ ID NO: 37261 - DNA, 530 bp, Artificial Sequence
  chemically treated genomic DNA (Homo sapiens) CpG-island No: 37261
  unsure (521)
ttagcgtaagtcgatttttgcgagggagatatacgagggcgatattcgcgagggagatacgcggggtcgattttcgcgaggtttcgcgtcggggaggtatcgagcggtagtttcggcgcggggagcgataggggtcggaggagtcgtttgttgggttcgggttttcgtagggttttcgagtatagttttagtttttttaattgtgaaatgggcgtcgttatttcgttcgttttttttatagggatttgggagattaatgaatgataaacgcgcggttaacgatttggtcgcgttcgtcgttcgtttcgtcgcgtttggtttttagcggcgcggtttagtatcggttcgaagattataaatgttttagtatcgcgtttgttgtttcgtttcggtaatgagcgttcgtagtagtcgtttattttggttattagttgaataatggtgatattatgggtcgggcggggtttttcgttcgcggttattatttatttattgcgatcgtcgttgtatgcggtagtcgngggtagggt

SEQ ID NO: 37262 - DNA, 530 bp, Artificial Sequence
  chemically treated genomic DNA (Homo sapiens) CpG-island No: 37262
  unsure (10)
accctacccncgactaccgcatacaacgacgatcgcaataaataaataataaccgcgaacgaaaaaccccgcccgacccataatatcaccattattcaactaataaccaaaataaacgactactacgaacgctcattaccgaaacgaaacaacaaacgcgatactaaaacatttataatcttcgaaccgatactaaaccgcgccgctaaaaaccaaacgcgacgaaacgaacgacgaacgcgaccaaatcgttaaccgcgcgtttatcattcattaatctcccaaatccctataaaaaaaacgaacgaaataacgacgcccatttcacaattaaaaaaactaaaactatactcgaaaaccctacgaaaacccgaacccaacaaacgactcctccgacccctatcgctccccgcgccgaaactaccgctcgatacctccccgacgcgaaacctcgcgaaaatcgaccccgcgtatctccctcgcgaatatcgccctcgtatatctccctcgcaaaaatcgacttacgctaa

SEQ ID NO: 37263 - DNA, 530 bp, Artificial Sequence
  chemically treated genomic DNA (Homo sapiens) CpG-island No: 37263
  unsure (10)
gttttgtttncggttgtcgtatgtaacggcggtcgtagtaagtgagtggtagtcgcggacgaagagtttcgttcggtttatgatattattattgtttagttggtgattaaggtaggcggttgttgcgggcgtttattatcggagcggagtagtaggcgcggtgttagaatatttataattttcgggtcggtgttgagtcgcgtcgttggagattaggcgcggcggggcgagcggcgggcgcgattaggtcgttagtcgcgcgtttattatttattagttttttagatttttgtggggaggacgggcgaggtagcggcgtttattttatagttggggagattgaggttgtattcggggattttgcgggagttcgaatttagtaggcggttttttcggtttttgtcgtttttcgcgtcggagttgtcgttcggtgttttttcggcgcgggatttcgcggaagtcgatttcgcgtgtttttttcgcgggtgtcgttttcgtgtgtttttttcgtagaagtcggtttgcgttgg

SEQ ID NO: 37264 - DNA, 530 bp, Artificial Sequence
  chemically treated genomic DNA (Homo sapiens) CpG-island No: 37264
  unsure (521)
ccaacgcaaaccgacttctacgaaaaaaacacacgaaaacgacacccgcgaaaaaaacacgcgaaatcgacttccgcgaaatcccgcgccgaaaaaacaccgaacgacaactccgacgcgaaaaacgacaaaaaccgaaaaaaccgcctactaaattcgaactcccgcaaaatccccgaatacaacctcaatctccccaactataaaataaacgccgctacctcgcccgtcctccccacaaaaatctaaaaaactaataaataataaacgcgcgactaacgacctaatcgcgcccgccgctcgccccgccgcgcctaatctccaacgacgcgactcaacaccgacccgaaaattataaatattctaacaccgcgcctactactccgctccgataataaacgcccgcaacaaccgcctaccttaatcaccaactaaacaataataatatcataaaccgaacgaaactcttcgtccgcgactaccactcacttactacgaccgccgttacatacgacaaccgnaaacaaaac

SEQ ID NO: 37265 - DNA, 883 bp, Artificial Sequence
  chemically treated genomic DNA (Homo sapiens) CpG-island No: 37265
cgtcgtcgtcgcgttatggagttcgagtgagcgcggcgcgggttcgttcggtcgtcggataatatggaggaagcgtcgttcgggtcgtcgtggtcgttgttgttgttgttgttgttgttgttggcgttgtgcggttgttcggttttcgtcgcgggtaggtgggcgtaggtcggtcgggggtcgcgggttgttcggataatggttcgggcggtttcgcggttaagtgcgcgggcgtcgtcgtcgtttcggaagcgatttggcgagttgggagcgagttggggcgcgcgttcgggatttttttgtcgttttcggcgttttcgttacgcgcgggttttttgtttttttattcgggtttttttcggggacgttgcgtttcgggttggcgaggagggcgttcgtttcgttaggtgcggcgcgggcgggtttttatttgttcgagttcgcgggaagtcgggagtcgagtcgagttcgcgttgggttcgtgtggttcgggtcgggtatcgagcggggatttggggcgcggaggcgggtttggttcggggagtcggttcgtaagtttgtttttagcggtcgcgcggtcgtttcgcgtgtttcgaggacgggttgaagttgtagcgagaaagttttgagttcgggcgcggggcggtttggtcggtggcgttgtttttgtgagtcgcgtggttgtgggtttttaagcggattgatatttgttaggtgttcgggcgattcgaatgtttcgtgtggtcgtcgggtttttagatagtgtttattttcgggtcggttacgcggaggtgacgtggttttagatcgcggggtagtgggggaggtaggtttgtgttttagttgtatattttcgtggggagaggtagggcgggggaatttt

SEQ ID NO: 37266 - DNA, 883 bp, Artificial Sequence
  chemically treated genomic DNA (Homo sapiens) CpG-island No: 37266
aaaattcccccgccctacctctccccacgaaaatatacaactaaaacacaaacctacctcccccactaccccgcgatctaaaaccacgtcacctccgcgtaaccgacccgaaaataaacactatctaaaaacccgacgaccacacgaaacattcgaatcgcccgaacacctaacaaatatcaatccgcttaaaaacccacaaccacgcgactcacaaaaacaacgccaccgaccaaaccgccccgcgcccgaactcaaaactttctcgctacaacttcaacccgtcctcgaaacacgcgaaacgaccgcgcgaccgctaaaaacaaacttacgaaccgactccccgaaccaaacccgcctccgcgccccaaatccccgctcgatacccgacccgaaccacacgaacccaacgcgaactcgactcgactcccgacttcccgcgaactcgaacaaataaaaacccgcccgcgccgcacctaacgaaacgaacgccctcctcgccaacccgaaacgcaacgtccccgaaaaaaacccgaataaaaaaacaaaaaacccgcgcgtaacgaaaacgccgaaaacgacaaaaaaatcccgaacgcgcgccccaactcgctcccaactcgccaaatcgcttccgaaacgacgacgacgcccgcgcacttaaccgcgaaaccgcccgaaccattatccgaacaacccgcgacccccgaccgacctacgcccacctacccgcgacgaaaaccgaacaaccgcacaacgccaacaacaacaacaacaacaacaacaacgaccacgacgacccgaacgacgcttcctccatattatccgacgaccgaacgaacccgcgccgcgctcactcgaactccataacgcgacgacgacg

SEQ ID NO: 37267 - DNA, 883 bp, Artificial Sequence
  chemically treated genomic DNA (Homo sapiens) CpG-island No: 37267
aaagttttttcgttttatttttttttacgggagtgtataattgaggtataagtttgttttttttattgtttcgcgatttgggattacgttattttcgcgtagtcgattcggggatggatattatttggggattcggcggttatacggggtattcgggtcgttcgggtatttggtaggtgttagttcgtttggaaatttatagttacgcggtttataggagtagcgttatcggttaggtcgtttcgcgttcgggtttagaattttttcgttgtaattttagttcgttttcggagtacgcggggcggtcgcgcggtcgttggaaataggtttgcgaatcggtttttcgggttaggttcgttttcgcgttttaagttttcgttcggtgttcggttcgggttatacgggtttagcgcgggttcggttcggttttcggtttttcgcgggttcgggtaggtgaggattcgttcgcgtcgtatttggcggagcgggcgtttttttcgttagttcgggacgtagcgttttcggggagggttcgggtggggagataaagggttcgcgcgtggcggggacgtcggggacggtagggggatttcgggcgcgcgttttaattcgtttttaattcgttaagtcgttttcgagacggcggcggcgttcgcgtatttggtcgcggggtcgttcgggttattgttcgagtaattcgcggttttcggtcggtttgcgtttatttattcgcggcgggggtcgggtagtcgtatagcgttagtagtagtagtagtagtagtagtagcggttacggcggttcgggcggcgttttttttatgttgttcggcggtcggacgggttcgcgtcgcgtttattcgggttttatggcgcggcggcggcg

SEQ ID NO: 37268 - DNA, 883 bp, Artificial Sequence
  chemically treated genomic DNA (Homo sapiens) CpG-island No: 37268
cgccgccgccgcgccataaaacccgaataaacgcgacgcgaacccgtccgaccgccgaacaacataaaaaaaacgccgcccgaaccgccgtaaccgctactactactactactactactactaacgctatacgactacccgacccccgccgcgaataaataaacgcaaaccgaccgaaaaccgcgaattactcgaacaataacccgaacgaccccgcgaccaaatacgcgaacgccgccgccgtctcgaaaacgacttaacgaattaaaaacgaattaaaacgcgcgcccgaaatccccctaccgtccccgacgtccccgccacgcgcgaaccctttatctccccacccgaaccctccccgaaaacgctacgtcccgaactaacgaaaaaaacgcccgctccgccaaatacgacgcgaacgaatcctcacctacccgaacccgcgaaaaaccgaaaaccgaaccgaacccgcgctaaacccgtataacccgaaccgaacaccgaacgaaaacttaaaacgcgaaaacgaacctaacccgaaaaaccgattcgcaaacctatttccaacgaccgcgcgaccgccccgcgtactccgaaaacgaactaaaattacaacgaaaaaattctaaacccgaacgcgaaacgacctaaccgataacgctactcctataaaccgcgtaactataaatttccaaacgaactaacacctaccaaatacccgaacgacccgaataccccgtataaccgccgaatccccaaataatatccatccccgaatcgactacgcgaaaataacgtaatcccaaatcgcgaaacaataaaaaaaacaaacttatacctcaattatacactcccgtaaaaaaaaataaaacgaaaaaacttt

SEQ ID NO: 37269 - DNA, 684 bp, Artificial Sequence
  chemically treated genomic DNA (Homo sapiens) CpG-island No: 37269
ggacgttttatttttaattcgttatttttaaagagatttttaaatatcgttcggttttttttagaattgagttttttttcggttatcggatcggttttttttattttagcggttgttttttagtcgttcgtttttatatattttattttaagtttggttcgggtttcgtatatgtttatttcgcgtttagacgtttcgtattcggtgtttaggtcgtttagtcgttcgcgttttttgtgtttagggtcgtttagggggttatcgtgggaagagggagcggtggttgaggacgcggcggtagcgttgttgtcggttgcgtcggatgcgaaggagaagttggaggataaggatgaggatgagacgggcgcgttttttagtttttatggaattttcgtttcggttcgttgttaggagttttcgaggttcggatttcgttttttttgttttgttgtttcgggtgcgaggcggtcgtagttttttcgcgataataaatagattagacgttggggagtatagagatagtgcgcgagggttagagcgtcgtcggatagggcgtttttgggtgtttcgttagttatttattttcggtttttattgttttcgttatttttttcgtttttcgtttttatttttttttttttttttttggtttttaaattaggttttttttgtttattcgttggg

SEQ ID NO: 37270 - DNA, 684 bp, Artificial Sequence
  chemically treated genomic DNA (Homo sapiens) CpG-island No: 37270
cccaacgaataaacaaaaaaaacctaatttaaaaaccaaaaaaaaaaaaaaaaaaataaaaacgaaaaacgaaaaaaataacgaaaacaataaaaaccgaaaataaataactaacgaaacacccaaaaacgccctatccgacgacgctctaaccctcgcgcactatctctatactccccaacgtctaatctatttattatcgcgaaaaaactacgaccgcctcgcacccgaaacaacaaaacaaaaaaaacgaaatccgaacctcgaaaactcctaacaacgaaccgaaacgaaaattccataaaaactaaaaaacgcgcccgtctcatcctcatccttatcctccaacttctccttcgcatccgacgcaaccgacaacaacgctaccgccgcgtcctcaaccaccgctccctcttcccacgataaccccctaaacgaccctaaacacaaaaaacgcgaacgactaaacgacctaaacaccgaatacgaaacgtctaaacgcgaaataaacatatacgaaacccgaaccaaacttaaaataaaatatataaaaacgaacgactaaaaaacaaccgctaaaataaaaaaaaccgatccgataaccgaaaaaaaactcaattctaaaaaaaaccgaacgatatttaaaaatctctttaaaaataacgaattaaaaataaaacgtcc

SEQ ID NO: 37271 - DNA, 684 bp, Artificial Sequence
  chemically treated genomic DNA (Homo sapiens) CpG-island No: 37271
tttagcgggtgggtaggaggggtttgatttggggattaggaaggaggaaggaagggtgggggcgggggacggggaaagtgacgggagtagtgagagtcggaaatgagtggttagcgaggtatttaggagcgttttgttcggcggcgttttagttttcgcgtattgtttttatgttttttagcgtttagtttatttattgtcgcggggaagttgcggtcgtttcgtattcggaataataaagtaaggaagacggagttcgagtttcgggggtttttagtaacgggtcggggcgggagttttatggagattggggagcgcgttcgttttatttttatttttgttttttagtttttttttcgtattcgacgtaatcggtagtagcgttgtcgtcgcgtttttagttatcgttttttttttttacggtaattttttaggcgattttgggtatagggagcgcgggcggttgagcggtttgagtatcgggtgcggggcgtttgggcgcggggtgggtatgtgcggagttcgggttagatttggggtgggatgtgtgggggcgggcgattggagggtagtcgttgaggtgggggaaatcggttcggtggtcgagggagggtttagttttgaagaggatcgggcgatatttggggatttttttagggataacgggttgggggtggggcgttt

SEQ ID NO: 37272 - DNA, 684 bp, Artificial Sequence
  chemically treated genomic DNA (Homo sapiens) CpG-island No: 37272
aaacgccccacccccaacccgttatccctaaaaaaatccccaaatatcgcccgatcctcttcaaaactaaaccctccctcgaccaccgaaccgatttcccccacctcaacgactaccctccaatcgcccgcccccacacatcccaccccaaatctaacccgaactccgcacatacccaccccgcgcccaaacgccccgcacccgatactcaaaccgctcaaccgcccgcgctccctatacccaaaatcgcctaaaaaattaccgtaaaaaaaaaaaacgataactaaaaacgcgacgacaacgctactaccgattacgtcgaatacgaaaaaaaaactaaaaaacaaaaataaaaataaaacgaacgcgctccccaatctccataaaactcccgccccgacccgttactaaaaacccccgaaactcgaactccgtcttccttactttattattccgaatacgaaacgaccgcaacttccccgcgacaataaataaactaaacgctaaaaaacataaaaacaatacgcgaaaactaaaacgccgccgaacaaaacgctcctaaatacctcgctaaccactcatttccgactctcactactcccgtcactttccccgtcccccgcccccacccttccttcctccttcctaatccccaaatcaaacccctcctacccacccgctaaa

SEQ ID NO: 37273 - DNA, 566 bp, Artificial Sequence
  chemically treated genomic DNA (Homo sapiens) CpG-island No: 37273
agtacgtcgggagagttagtcgtgttatttgggggggcgttaggcgggagtggtttagttagtcggacgggtttttgtcgggagtcgcgagtcggtgttagcggcgttcgggttgggtcgtttagcgtttgtgcgcgtttcggttcgtatttcggttttcgattcggaattttcggttttagagagtcgagggtagagcgacggtggtcggggagcgtacggtgtttttgttcgaggaaagtttaagaggaggtcgaggagaggattagtgtagcgagcgggtcggtttcgggtagggcgtcgggttatggaggagtcgcgtagtagcgggtagtcgagtttcgagttttagattcggttgcgaagcggcggagttcgcggttagatagggtcgggaagcgtttgtcgcgtcgagagttttacgagcgttcggacgcggttttaagtagtttttattcgttacgtacgattttcgttgtatttcgaggtttgttttagttttttaggtttgattgttttcgttcgttttttttttttttttttttttttcgcggttttttttttcg

SEQ ID NO: 37274 - DNA, 566 bp, Artificial Sequence
  chemically treated genomic DNA (Homo sapiens) CpG-island No: 37274
cgaaaaaaaaaaccgcgaaaaaaaaaaaaaaaaaaaaaaaacgaacgaaaacaatcaaacctaaaaaactaaaacaaacctcgaaatacaacgaaaatcgtacgtaacgaataaaaactacttaaaaccgcgtccgaacgctcgtaaaactctcgacgcgacaaacgcttcccgaccctatctaaccgcgaactccgccgcttcgcaaccgaatctaaaactcgaaactcgactacccgctactacgcgactcctccataacccgacgccctacccgaaaccgacccgctcgctacactaatcctctcctcgacctcctcttaaactttcctcgaacaaaaacaccgtacgctccccgaccaccgtcgctctaccctcgactctctaaaaccgaaaattccgaatcgaaaaccgaaatacgaaccgaaacgcgcacaaacgctaaacgacccaacccgaacgccgctaacaccgactcgcgactcccgacaaaaacccgtccgactaactaaaccactcccgcctaacgcccccccaaataacacgactaactctcccgacgtact

SEQ ID NO: 37275 - DNA, 566 bp, Artificial Sequence
  chemically treated genomic DNA (Homo sapiens) CpG-island No: 37275
cggagggggaggtcgcgggggagggggaaggggagaggaagcgagcgaggataattagatttaaaaggttggggtagatttcgggatgtagcgggggtcgtgcgtagcgggtaggagttgtttgggatcgcgttcgggcgttcgtggggttttcggcgcggtaggcgtttttcggttttgtttggtcgcgggtttcgtcgtttcgtagtcgagtttgggattcgggattcggttgttcgttgttgcgcggtttttttatgattcggcgttttgttcgggatcggttcgttcgttgtattggtttttttttcggtttttttttgagtttttttcggataggggtatcgtgcgtttttcggttatcgtcgttttgttttcggttttttggggtcggggatttcggatcgggagtcgggatgcgggtcggggcgcgtatagacgttaggcggtttagttcgggcgtcgttggtatcggttcgcggttttcggtaaaaattcgttcgattggttgggttattttcgtttgacgtttttttagatgatacgattagttttttcggcgtgtt

SEQ ID NO: 37276 - DNA, 566 bp, Artificial Sequence
  chemically treated genomic DNA (Homo sapiens) CpG-island No: 37276
aacacgccgaaaaaactaatcgtatcatctaaaaaaacgtcaaacgaaaataacccaaccaatcgaacgaatttttaccgaaaaccgcgaaccgataccaacgacgcccgaactaaaccgcctaacgtctatacgcgccccgacccgcatcccgactcccgatccgaaatccccgaccccaaaaaaccgaaaacaaaacgacgataaccgaaaaacgcacgatacccctatccgaaaaaaactcaaaaaaaaaccgaaaaaaaaaccaatacaacgaacgaaccgatcccgaacaaaacgccgaatcataaaaaaaccgcgcaacaacgaacaaccgaatcccgaatcccaaactcgactacgaaacgacgaaacccgcgaccaaacaaaaccgaaaaacgcctaccgcgccgaaaaccccacgaacgcccgaacgcgatcccaaacaactcctacccgctacgcacgacccccgctacatcccgaaatctaccccaaccttttaaatctaattatcctcgctcgcttcctctccccttccccctcccccgcgacctccccctccg

SEQ ID NO: 37277 - DNA, 813 bp, Artificial Sequence
  chemically treated genomic DNA (Homo sapiens) CpG-island No: 37277
gagtcggacggaaaagcggggattgtggtttaaagtttgggattcggttttggtcgggatgagggtcggggtcgggtaggatttgggggtgatttacgacgtttaatacgcggttttttttttgttttcgtaggtttcgtgtttttgtttaagtttaatagtaatgtcgttttcgttatttttattaataaggataattttttcggcggcgtggtgaattttaacgaagttttttgtttagtttcgggtcgtttttcgttttttagttttatttcgaagtataaggttacggtggcggaagtgtagcggcggtttttattattcgagtgttttaacgcgtcgttgttgggcggagtgtttcggaggtgaggttcggtacggtttcgttcgtttcgtttcgcggtcgggggaattattgcgtttgcgtcggggcggtggcggcgacgtaaataggtttcgcgtcgcggttttttttacgcgggaaaggaaagggggcggggagaagagcgtagagttaagtgggcgggatttgggggcgggggagcgggcgatgcggcgcgcgtttgcgtttttcgttgttttttcgcgagcgagttttggtgcgcgtttcgttcgttgtcgcgcgttcgcggagtttttcgtttcgttttttttttcgcgtaagcgtagttcgtttcgtcgcgggtttaatttcggttattgtagtcgcggggcgtcgtatagttatttttttttttttcgcgtatattttgtaagtttaggaaaagttttttttaggtttttcgttttgttttatttttttgagtagggttt

SEQ ID NO: 37278 - DNA, 813 bp, Artificial Sequence
  chemically treated genomic DNA (Homo sapiens) CpG-island No: 37278
aaaccctactcaaaaaaataaaacaaaacgaaaaacctaaaaaaaacttttcctaaacttacaaaatatacgcgaaaaaaaaaaaaataactatacgacgccccgcgactacaataaccgaaattaaacccgcgacgaaacgaactacgcttacgcgaaaaaaaaaacgaaacgaaaaactccgcgaacgcgcgacaacgaacgaaacgcgcaccaaaactcgctcgcgaaaaaacaacgaaaaacgcaaacgcgcgccgcatcgcccgctcccccgcccccaaatcccgcccacttaactctacgctcttctccccgccccctttcctttcccgcgtaaaaaaaaccgcgacgcgaaacctatttacgtcgccgccaccgccccgacgcaaacgcaataattcccccgaccgcgaaacgaaacgaacgaaaccgtaccgaacctcacctccgaaacactccgcccaacaacgacgcgttaaaacactcgaataataaaaaccgccgctacacttccgccaccgtaaccttatacttcgaaataaaactaaaaaacgaaaaacgacccgaaactaaacaaaaaacttcgttaaaattcaccacgccgccgaaaaaattatccttattaataaaaataacgaaaacgacattactattaaacttaaacaaaaacacgaaacctacgaaaacaaaaaaaaaaccgcgtattaaacgtcgtaaatcacccccaaatcctacccgaccccgaccctcatcccgaccaaaaccgaatcccaaactttaaaccacaatccccgcttttccgtccgactc

SEQ ID NO: 37279 - DNA, 813 bp, Artificial Sequence
  chemically treated genomic DNA (Homo sapiens) CpG-island No: 37279
agattttatttagagaggtaaggtaaagcgaggagtttgagaggaattttttttgggtttgtaaggtgtgcgcgaagagggaaaaggtggttgtacggcgtttcgcggttgtagtggtcgggattgagttcgcggcggagcgagttgcgtttgcgcgaggaggagggcggagcggaggatttcgcgagcgcgcggtagcgaacgaagcgcgtattagaattcgttcgcgggaaagtagcggagagcgtaggcgcgcgtcgtatcgttcgttttttcgtttttagatttcgtttatttggttttacgttttttttttcgtttttttttttttttcgcgtagggagggtcgcggcgcgaggtttgtttgcgtcgtcgttatcgtttcggcgtaagcgtagtggttttttcggtcgcggggcggggcgggcggggtcgtgtcgggttttattttcggagtatttcgtttagtagcgacgcgttgagatattcgggtggtgagagtcgtcgttgtattttcgttatcgtgattttgtatttcgaggtggagttgaggagcgagaggcgattcggaattgaatagaagatttcgttggggtttattacgtcgtcgaagaggttgtttttgttaatagggatggcggagacggtattgttgttggatttggatagggatacggggtttgcggagatagaggggaggtcgcgtgttgggcgtcgtggattatttttaaattttgttcgatttcggtttttatttcggttagggtcggattttaggttttgggttatagttttcgttttttcgttcggttt

SEQ ID NO: 37280 - DNA, 813 bp, Artificial Sequence
  chemically treated genomic DNA (Homo sapiens) CpG-island No: 37280
aaaccgaacgaaaaaacgaaaactataacccaaaacctaaaatccgaccctaaccgaaataaaaaccgaaatcgaacaaaatttaaaaataatccacgacgcccaacacgcgacctcccctctatctccgcaaaccccgtatccctatccaaatccaacaacaataccgtctccgccatccctattaacaaaaacaacctcttcgacgacgtaataaaccccaacgaaatcttctattcaattccgaatcgcctctcgctcctcaactccacctcgaaatacaaaatcacgataacgaaaatacaacgacgactctcaccacccgaatatctcaacgcgtcgctactaaacgaaatactccgaaaataaaacccgacacgaccccgcccgccccgccccgcgaccgaaaaaaccactacgcttacgccgaaacgataacgacgacgcaaacaaacctcgcgccgcgaccctccctacgcgaaaaaaaaaaaaaaacgaaaaaaaaaacgtaaaaccaaataaacgaaatctaaaaacgaaaaaacgaacgatacgacgcgcgcctacgctctccgctactttcccgcgaacgaattctaatacgcgcttcgttcgctaccgcgcgctcgcgaaatcctccgctccgccctcctcctcgcgcaaacgcaactcgctccgccgcgaactcaatcccgaccactacaaccgcgaaacgccgtacaaccaccttttccctcttcgcgcacaccttacaaacccaaaaaaaattcctctcaaactcctcgctttaccttacctctctaaataaaatct

SEQ ID NO: 37281 - DNA, 503 bp, Artificial Sequence
  chemically treated genomic DNA (Homo sapiens) CpG-island No: 37281
gcggatggtagcggattatttagtttcgaacgtcgtaaagcgagtttattatgatggcgttttttgttcggttaggttcggaaagagagaacgggttggggtgggcggggaaagttttaagcgagtggcgtcgtcgtgacgttatatgggtgcgacgcggcgttttattacgattcggatttttttgtggtgagttggacgattgattagtcgggcgataacggtagagagtatagagcgtaggaataagcgtaacgtttaagagggaagggttagtacgtcgggggtttttttggttttatttaggtcgtgttttcgatagtttttcggaagaaagggatttgggagcgagatgcgtgtagttagtacgatgcgtcgcgcggtgacgttttggttcgacgtcgacggttttttagtggttttcggaggattcggcgggtttagtgttggaggtgaggaggcggggttggtagggttagtcggggtatttggaaattttcgat

SEQ ID NO: 37282 - DNA, 503 bp, Artificial Sequence
  chemically treated genomic DNA (Homo sapiens) CpG-island No: 37282
atcgaaaatttccaaataccccgactaaccctaccaaccccgcctcctcacctccaacactaaacccgccgaatcctccgaaaaccactaaaaaaccgtcgacgtcgaaccaaaacgtcaccgcgcgacgcatcgtactaactacacgcatctcgctcccaaatccctttcttccgaaaaactatcgaaaacacgacctaaataaaaccaaaaaaacccccgacgtactaacccttccctcttaaacgttacgcttattcctacgctctatactctctaccgttatcgcccgactaatcaatcgtccaactcaccacaaaaaaatccgaatcgtaataaaacgccgcgtcgcacccatataacgtcacgacgacgccactcgcttaaaactttccccgcccaccccaacccgttctctctttccgaacctaaccgaacaaaaaacgccatcataataaactcgctttacgacgttcgaaactaaataatccgctaccatccgc

SEQ ID NO: 37283 - DNA, 503 bp, Artificial Sequence
  chemically treated genomic DNA (Homo sapiens) CpG-island No: 37283
gtcggaaatttttagatgtttcgattagttttgttagtttcgtttttttatttttaatattgggttcgtcgggtttttcgggagttattgagaggtcgtcggcgtcgggttagagcgttatcgcgcgacgtatcgtgttagttatacgtatttcgtttttagatttttttttttcggaaagttatcgagaatacggtttgggtagggttagagaggttttcgacgtgttggttttttttttttggacgttgcgtttgtttttgcgttttatgttttttgtcgttatcgttcggttagttagtcgtttaatttattatagagaagttcggatcgtggtagagcgtcgcgtcgtatttatgtgacgttacggcggcgttattcgtttgaggtttttttcgtttattttagttcgtttttttttttcggatttggtcgagtaggaggcgttattatggtgagttcgttttgcggcgttcggggttggataattcgttgttattcgt

SEQ ID NO: 37284 - DNA, 503 bp, Artificial Sequence
  chemically treated genomic DNA (Homo sapiens) CpG-island No: 37284
acgaataacaacgaattatccaaccccgaacgccgcaaaacgaactcaccataataacgcctcctactcgaccaaatccgaaaaaaaaaaacgaactaaaataaacgaaaaaaacctcaaacgaataacgccgccgtaacgtcacataaatacgacgcgacgctctaccacgatccgaacttctctataataaattaaacgactaactaaccgaacgataacgacaaaaaacataaaacgcaaaaacaaacgcaacgtccaaaaaaaaaaaaccaacacgtcgaaaacctctctaaccctacccaaaccgtattctcgataactttccgaaaaaaaaaaatctaaaaacgaaatacgtataactaacacgatacgtcgcgcgataacgctctaacccgacgccgacgacctctcaataactcccgaaaaacccgacgaacccaatattaaaaataaaaaaacgaaactaacaaaactaatcgaaacatctaaaaatttccgac

SEQ ID NO: 37285 - DNA, 882 bp, Artificial Sequence
  chemically treated genomic DNA (Homo sapiens) CpG-island No: 37285
cgggttcgcgattacgttttttttatttatagtcgagtttgacgcggcggtggtttatgcgttttttcgttttagtttttagttacggattatacgttttattttaggcgtttcgtttttttttcgtttttcgttttcggcgcgttttttttaggttgtcggtttcggtgtttgagcggtcgcgttcgcgagtcgtgagcgatgattggttgcgttacggcggcgggcggttcgtgggcgtatatatttttttcgcgtagttaatgggcgtgcgtacgttattgattcggaggttcgcgggtcggtagttttttaataagttatattgttgtatgaaatttcggcgtaggagtttcgggttgtcgttggtaatatcgtgttatttagttaagaaaattcgcgggttcgagttacgcgtttgtgaatcggagaggttttattgttcgagtggagtcgggttgagattttttttaagttgagttttagtgattttgtggtcgaagttagcgttttgacgtgggataatcggatacgtcgttaggagagaattgaggcgttttttagtagttgtgacgttaaaattacgttttcggagattcgcgtttttcgttagtcgggcgtattttcgtcggtagttttttttgtgcgtcgttcggatttttagttttcggttcggtagtcgagttttagtataaagtagtcggatcgcgtcgttcgttttttttttcgcgttttcgtttcggttttttaattttgcgtcgtcgggtcgcggtaggatgattgtttcgtatttgtttgtttatttttttacggagtttaattatgattaagtgtagaaggtaagttagcgcgggcggggcggtaggttgggttttggtaaag

SEQ ID NO: 37286 - DNA, 882 bp, Artificial Sequence
  chemically treated genomic DNA (Homo sapiens) CpG-island No: 37286
ctttaccaaaacccaacctaccgccccgcccgcgctaacttaccttctacacttaatcataattaaactccgtaaaaaaataaacaaacaaatacgaaacaatcatcctaccgcgacccgacgacgcaaaattaaaaaaccgaaacgaaaacgcgaaaaaaaaaacgaacgacgcgatccgactactttatactaaaactcgactaccgaaccgaaaactaaaaatccgaacgacgcacaaaaaaaactaccgacgaaaatacgcccgactaacgaaaaacgcgaatctccgaaaacgtaattttaacgtcacaactactaaaaaacgcctcaattctctcctaacgacgtatccgattatcccacgtcaaaacgctaacttcgaccacaaaatcactaaaactcaacttaaaaaaaatctcaacccgactccactcgaacaataaaacctctccgattcacaaacgcgtaactcgaacccgcgaattttcttaactaaataacacgatattaccaacgacaacccgaaactcctacgccgaaatttcatacaacaatataacttattaaaaaactaccgacccgcgaacctccgaatcaataacgtacgcacgcccattaactacgcgaaaaaaatatatacgcccacgaaccgcccgccgccgtaacgcaaccaatcatcgctcacgactcgcgaacgcgaccgctcaaacaccgaaaccgacaacctaaaaaaaacgcgccgaaaacgaaaaacgaaaaaaaaacgaaacgcctaaaataaaacgtataatccgtaactaaaaactaaaacgaaaaaacgcataaaccaccgccgcgtcaaactcgactataaataaaaaaaacgtaatcgcgaacccg

SEQ ID NO: 37287 - DNA, 882 bp, Artificial Sequence
  chemically treated genomic DNA (Homo sapiens) CpG-island No: 37287
ttttgttagagtttagtttgtcgtttcgttcgcgttgatttattttttgtatttggttatggttgagtttcgtgaagaagtaggtaagtagatgcgaggtaattattttgtcgcggttcgacggcgtagagttgggaaatcgaggcggagacgcgagaggggaggcgggcggcgcggttcgattgttttgtgttggggttcggttgtcgggtcgggagttgggagttcggacggcgtataaagaaggttatcggcgagggtgcgttcggttggcggagggcgcgggttttcggagacgtgattttggcgttataattgttagaaggcgttttagtttttttttggcgacgtgttcggttgttttacgttaaggcgttaatttcggttataggattattgaggtttaatttgagaagaattttagttcggttttattcgggtagtgggattttttcgatttataggcgcgtggttcgggttcgcggatttttttagttgggtgatacgatgttgttagcggtagttcgggatttttgcgtcggagttttatgtaataatgtggtttattgaggggttgtcggttcgcgggttttcggattagtgacgtgcgtacgtttattggttgcgcggggagggtgtgtgcgtttacggatcgttcgtcgtcgtggcgtagttaattatcgtttacggttcgcgggcgcggtcgtttagatatcggagtcggtagtttggggaggacgcgtcgggggcggggggcgggggaggggcggggcgtttgagatgggacgtgtggttcgtggttaaaggttgggacggaaaggcgtatgagttatcgtcgcgttaggttcggttatgggtggggggagcgtgatcgcggattcg

SEQ ID NO: 37288 - DNA, 882 bp, Artificial Sequence
  chemically treated genomic DNA (Homo sapiens) CpG-island No: 37288
cgaatccgcgatcacgctccccccacccataaccgaacctaacgcgacgataactcatacgcctttccgtcccaacctttaaccacgaaccacacgtcccatctcaaacgccccgcccctcccccgccccccgcccccgacgcgtcctccccaaactaccgactccgatatctaaacgaccgcgcccgcgaaccgtaaacgataattaactacgccacgacgacgaacgatccgtaaacgcacacaccctccccgcgcaaccaataaacgtacgcacgtcactaatccgaaaacccgcgaaccgacaacccctcaataaaccacattattacataaaactccgacgcaaaaatcccgaactaccgctaacaacatcgtatcacccaactaaaaaaatccgcgaacccgaaccacgcgcctataaatcgaaaaaatcccactacccgaataaaaccgaactaaaattcttctcaaattaaacctcaataatcctataaccgaaattaacgccttaacgtaaaacaaccgaacacgtcgccaaaaaaaaactaaaacgccttctaacaattataacgccaaaatcacgtctccgaaaacccgcgccctccgccaaccgaacgcaccctcgccgataaccttctttatacgccgtccgaactcccaactcccgacccgacaaccgaaccccaacacaaaacaatcgaaccgcgccgcccgcctcccctctcgcgtctccgcctcgatttcccaactctacgccgtcgaaccgcgacaaaataattacctcgcatctacttacctacttcttcacgaaactcaaccataaccaaatacaaaaaataaatcaacgcgaacgaaacgacaaactaaactctaacaaaa

SEQ ID NO: 37289 - DNA, 539 bp, Artificial Sequence
  chemically treated genomic DNA (Homo sapiens) CpG-island No: 37289
  unsure (454)
gatcgcgttttttttaaatttttgtgagcgttgcggaagtacgcggggttcgggtcgttgagcgttgtaagataggggagggagtcgggcgggagagggaggggcggcgtcggggcgggttttgatatagagtaggcgtcgcgggtcgtagtatagtgcggagatcgtattttcggagttcgggttagggtttatttgtattcgtagcgtcggttcgcgtttttttgtcgtagttatcggtgagtgtcgcggatttgagattttcgggtcggatgcgcggcggttttagttttcgagcgtttgtttttttcgatttgggttgttcggtttttttgggtttttcggcggttgcgcggagttaaggcgtttcgttttgggcgttcgtcgcgggtgtcgatttatgttgttcggagttttgagtcgatataggagagatatagttgcggagtttgtntatcgcggatatttgttttgcgatgtattcgtttttttgggttgttttgtggttttttcgattgttgtattgattggtttttatt

SEQ ID NO: 37290 - DNA, 539 bp, Artificial Sequence
  chemically treated genomic DNA (Homo sapiens) CpG-island No: 37290
  unsure (86)
aataaaaaccaatcaatacaacaatcgaaaaaaccacaaaacaacccaaaaaaacgaatacatcgcaaaacaaatatccgcgatanacaaactccgcaactatatctctcctatatcgactcaaaactccgaacaacataaatcgacacccgcgacgaacgcccaaaacgaaacgccttaactccgcgcaaccgccgaaaaacccaaaaaaaccgaacaacccaaatcgaaaaaaacaaacgctcgaaaactaaaaccgccgcgcatccgacccgaaaatctcaaatccgcgacactcaccgataactacgacaaaaaaacgcgaaccgacgctacgaatacaaataaaccctaacccgaactccgaaaatacgatctccgcactatactacgacccgcgacgcctactctatatcaaaacccgccccgacgccgcccctccctctcccgcccgactccctcccctatcttacaacgctcaacgacccgaaccccgcgtacttccgcaacgctcacaaaaatttaaaaaaaacgcgatc

SEQ ID NO: 37291 - DNA, 539 bp, Artificial Sequence
  chemically treated genomic DNA (Homo sapiens) CpG-island No: 37291
  unsure (86)
agtaaggattagttagtgtaatagtcggagggattataaggtagtttaggaaggcgagtgtatcgtagggtagatgttcgcggtgngtagatttcgtagttgtattttttttatgtcggtttaggatttcgggtagtatggatcggtattcgcggcggacgtttagaacggggcgttttgatttcgcgtagtcgtcggggagtttagggagatcgggtagtttaggtcgggggaggtagacgttcgggagttggggtcgtcgcgtattcggttcggggattttaggttcgcggtatttatcggtggttgcggtaggagggcgcgagtcggcgttgcgggtataggtggattttggttcgggtttcgggggtgcggttttcgtattgtgttgcgattcgcggcgtttgttttatattagggttcgtttcggcgtcgtttttttttttttcgttcggtttttttttttgttttgtagcgtttagcgattcggatttcgcgtgttttcgtaacgtttataaagatttgggggaagcgcgatt

SEQ ID NO: 37292 - DNA, 539 bp, Artificial Sequence
  chemically treated genomic DNA (Homo sapiens) CpG-island No: 37292
  unsure (454)
aatcgcgcttcccccaaatctttataaacgttacgaaaacacgcgaaatccgaatcgctaaacgctacaaaacaaaaaaaaaaaccgaacgaaaaaaaaaaaaacgacgccgaaacgaaccctaatataaaacaaacgccgcgaatcgcaacacaatacgaaaaccgcacccccgaaacccgaaccaaaatccacctatacccgcaacgccgactcgcgccctcctaccgcaaccaccgataaataccgcgaacctaaaatccccgaaccgaatacgcgacgaccccaactcccgaacgtctacctcccccgacctaaactacccgatctccctaaactccccgacgactacgcgaaatcaaaacgccccgttctaaacgtccgccgcgaataccgatccatactacccgaaatcctaaaccgacataaaaaaaatacaactacgaaatctacncaccgcgaacatctaccctacgatacactcgccttcctaaactaccttataatccctccgactattacactaactaatccttact

SEQ ID NO: 37293 - DNA, 614 bp, Artificial Sequence
  chemically treated genomic DNA (Homo sapiens) CpG-island No: 37293
tttcgcgtacgggtttttttttttttgggcgtcgtagttcggagtaggtcgagggggtcgggttgtagggtcgcgtcgggttagaagggcgcgttttgggtagcgcggacgtacgtagtcggtttttttcgcgtttcgttgtatttcggtagggagttcgttttcgttaatgtttaatttttcgaatcgttgatttttcggattttagttaagttatttattcgtttcgttttcgggacgaatttttggtatagttttttcgcgcggttcgtttatcgtggggttttttggagtcggggacggcgggaagacgtttcgaggtggcggtttttatattcgttttacgtttcgtttttagatttgttttatcgttttagatagtttagagatggttttcggaatgtttatcgttcgtcgttttcgggatgtttttttagttttacgtagttcgggcgttttttgcggcggaggtagagtttgttcggtttattttagtgtcgttaatttgcgggatcgcggatagagagtttttcggtgcgtcggttagttcgtggtttggggtttttggtgtttttagtttttattatagtcgtttcgttttattttaagaagag

SEQ ID NO: 37294 - DNA, 614 bp, Artificial Sequence
  chemically treated genomic DNA (Homo sapiens) CpG-island No: 37294
ctcttcttaaaataaaacgaaacgactataataaaaactaaaaacaccaaaaaccccaaaccacgaactaaccgacgcaccgaaaaactctctatccgcgatcccgcaaattaacgacactaaaataaaccgaacaaactctacctccgccgcaaaaaacgcccgaactacgtaaaactaaaaaaacatcccgaaaacgacgaacgataaacattccgaaaaccatctctaaactatctaaaacgataaaacaaatctaaaaacgaaacgtaaaacgaatataaaaaccgccacctcgaaacgtcttcccgccgtccccgactccaaaaaaccccacgataaacgaaccgcgcgaaaaaactataccaaaaattcgtcccgaaaacgaaacgaataaataacttaactaaaatccgaaaaatcaacgattcgaaaaattaaacattaacgaaaacgaactccctaccgaaatacaacgaaacgcgaaaaaaaccgactacgtacgtccgcgctacccaaaacgcgcccttctaacccgacgcgaccctacaacccgaccccctcgacctactccgaactacgacgcccaaaaaaaaaaaaacccgtacgcgaaa

SEQ ID NO: 37295 - DNA, 614 bp, Artificial Sequence
  chemically treated genomic DNA (Homo sapiens) CpG-island No: 37295
ttttttttgaggtggggcggggcggttgtagtaggagttggaggtattagagattttaagttacgagttgatcgacgtatcgaggagttttttgttcgcggtttcgtaggttggcggtattggagtgggtcgggtaggttttgttttcgtcgtagagagcgttcggattgcgtggggttggggaagtatttcgggaacggcgggcggtgagtatttcgggaattatttttgggttgtttggggcggtggagtaagtttggaggcgggacgtggggcgagtatgggagtcgttatttcgagacgttttttcgtcgttttcggttttaggagattttacggtgagcgggtcgcgcgggaaaattatgttaggaattcgtttcgggagcggggcgggtgggtagtttggttggagttcgagggattagcgattcgggaggttaaatattagcgggggcgaattttttgtcggggtgtagcggggcgcgggaggagtcggttgcgtgcgttcgcgttgtttagggcgcgtttttttggttcggcgcggttttgtagttcggttttttcggtttgtttcgaattgcggcgtttagggagggaaggattcgtgcgcgggg

SEQ ID NO: 37296 - DNA, 614 bp, Artificial Sequence
  chemically treated genomic DNA (Homo sapiens) CpG-island No: 37296
ccccgcgcacgaatccttccctccctaaacgccgcaattcgaaacaaaccgaaaaaaccgaactacaaaaccgcgccgaaccaaaaaaacgcgccctaaacaacgcgaacgcacgcaaccgactcctcccgcgccccgctacaccccgacaaaaaattcgcccccgctaatatttaacctcccgaatcgctaatccctcgaactccaaccaaactacccacccgccccgctcccgaaacgaattcctaacataattttcccgcgcgacccgctcaccgtaaaatctcctaaaaccgaaaacgacgaaaaaacgtctcgaaataacgactcccatactcgccccacgtcccgcctccaaacttactccaccgccccaaacaacccaaaaataattcccgaaatactcaccgcccgccgttcccgaaatacttccccaaccccacgcaatccgaacgctctctacgacgaaaacaaaacctacccgacccactccaataccgccaacctacgaaaccgcgaacaaaaaactcctcgatacgtcgatcaactcgtaacttaaaatctctaatacctccaactcctactacaaccgccccgccccacctcaaaaaaaa

SEQ ID NO: 37297 - DNA, 533 bp, Artificial Sequence
  chemically treated genomic DNA (Homo sapiens) CpG-island No: 37297
gggatcggggcggcggggcgagaggagaatttcgttttttttagggatcgggcgttgggttcgggaagttgggattgaggtcgtcgggaggaggtcgcgcggggtcgggggtggacggggtttcgtcgttttaacgcgcgtcgtttcggagttatttcggggtttaggggttcgttttcggcgagggtttttggttcggatcgacgcgattaaaagagtcgcggagttgttcgggttagggaagtcgtatttggagggattcggatagttagaggtatcgttatttttcgcgtagcgcgcgtcgtttttcgcgcgtcgtaggtttcgttttcgtatgggcgggattttatagacgtttcgtttttttagcggtttttaggtttcgttcgacgtgggcggtattttagggaagtttcgtttatttatagacgttaaggcgagttttgttttggttttggggtcggaatttcggtcggaatttatgtttgttagatttacgatcgaaggaagaatggatttattattatttatta

SEQ ID NO: 37298 - DNA, 533 bp, Artificial Sequence
  chemically treated genomic DNA (Homo sapiens) CpG-island No: 37298
taataaataataataaatccattcttccttcgatcgtaaatctaacaaacataaattccgaccgaaattccgaccccaaaaccaaaacaaaactcgccttaacgtctataaataaacgaaacttccctaaaataccgcccacgtcgaacgaaacctaaaaaccgctaaaaaaacgaaacgtctataaaatcccgcccatacgaaaacgaaacctacgacgcgcgaaaaacgacgcgcgctacgcgaaaaataacgatacctctaactatccgaatccctccaaatacgacttccctaacccgaacaactccgcgactcttttaatcgcgtcgatccgaaccaaaaaccctcgccgaaaacgaacccctaaaccccgaaataactccgaaacgacgcgcgttaaaacgacgaaaccccgtccacccccgaccccgcgcgacctcctcccgacgacctcaatcccaacttcccgaacccaacgcccgatccctaaaaaaaacgaaattctcctctcgccccgccgccccgatccc

SEQ ID NO: 37299 - DNA, 533 bp, Artificial Sequence
  chemically treated genomic DNA (Homo sapiens) CpG-island No: 37299
taataaataataatgaatttatttttttttcggtcgtgggtttggtaggtataaatttcggtcgggatttcgattttagggttagagtaggattcgttttggcgtttatgagtgggcggggtttttttggggtatcgtttacgtcgggcgggatttgagggtcgttggaggggcggggcgtttatgaggtttcgtttatgcgggggcggggtttgcggcgcgcgggaagcggcgcgcgttgcgcgggaggtgacggtgtttttgattgttcgggtttttttaggtacggtttttttggttcgggtagtttcgcggtttttttggtcgcgtcggttcgggttagaggttttcgtcgagggcgggtttttgggtttcgggatagtttcggagcggcgcgcgttggggcggcggggtttcgtttattttcggtttcgcgcggttttttttcggcggttttagttttagtttttcgggtttagcgttcggtttttgggaaaggcggggtttttttttcgtttcgtcgtttcggtttt

SEQ ID NO: 37300 - DNA, 533 bp, Artificial Sequence
  chemically treated genomic DNA (Homo sapiens) CpG-island No: 37300
aaaaccgaaacgacgaaacgaaaaaaaaaccccgcctttcccaaaaaccgaacgctaaacccgaaaaactaaaactaaaaccgccgaaaaaaaaccgcgcgaaaccgaaaataaacgaaaccccgccgccccaacgcgcgccgctccgaaactatcccgaaacccaaaaacccgccctcgacgaaaacctctaacccgaaccgacgcgaccaaaaaaaccgcgaaactacccgaaccaaaaaaaccgtacctaaaaaaacccgaacaatcaaaaacaccgtcacctcccgcgcaacgcgcgccgcttcccgcgcgccgcaaaccccgcccccgcataaacgaaacctcataaacgccccgcccctccaacgaccctcaaatcccgcccgacgtaaacgataccccaaaaaaaccccgcccactcataaacgccaaaacgaatcctactctaaccctaaaatcgaaatcccgaccgaaatttatacctaccaaacccacgaccgaaaaaaaaataaattcattattatttatta

SEQ ID NO: 37301 - DNA, 595 bp, Artificial Sequence
  chemically treated genomic DNA (Homo sapiens) CpG-island No: 37301
gacgtcgaggtcgtcggcgtttttggacgcggaattcgtttttttttattacgacgtttagcggatagaagagggttaggggtttcgcggtttcgagagtagatcgatttttcgtcgaggtttcgttcgcggacgatagttgttgggagattaggagggagttgggaggaggagtcgcgattttggttcgtttcgaagtaaaatagaaatataatgtagaggcgacggaacgtagttcggttcgtagtcgagttgtttcgtcgacgggagcgagatggtcgtttttttttcgggtttcgtcgtagttttcgtcgtcgcgtcggttttataagtcgttatcgtttattgtcggttttttttcgtttgttcgttcgtttttttgggatacggttcgttttatttttcgcggttgtttatcgcgttgaggcgtatttcgcggggtggttgcgtcgttattttgagcgagttataaagttaggaacggttttcgtcgtaattcgattgggaggtggcggaacgattgtggagttttatgggtatcgtttattttcggggaggggcgtacgtttggttttttttatttattttcgttttt

SEQ ID NO: 37302 - DNA, 595 bp, Artificial Sequence
  chemically treated genomic DNA (Homo sapiens) CpG-island No: 37302
aaaaacgaaaataaataaaaaaaaccaaacgtacgcccctccccgaaaataaacgatacccataaaactccacaatcgttccgccacctcccaatcgaattacgacgaaaaccgttcctaactttataactcgctcaaaataacgacgcaaccaccccgcgaaatacgcctcaacgcgataaacaaccgcgaaaaataaaacgaaccgtatcccaaaaaaacgaacgaacaaacgaaaaaaaaccgacaataaacgataacgacttataaaaccgacgcgacgacgaaaactacgacgaaacccgaaaaaaaaacgaccatctcgctcccgtcgacgaaacaactcgactacgaaccgaactacgttccgtcgcctctacattatatttctattttacttcgaaacgaaccaaaatcgcgactcctcctcccaactccctcctaatctcccaacaactatcgtccgcgaacgaaacctcgacgaaaaatcgatctactctcgaaaccgcgaaacccctaaccctcttctatccgctaaacgtcgtaataaaaaaaaacgaattccgcgtccaaaaacgccgacgacctcgacgtc

SEQ ID NO: 37303 - DNA, 595 bp, Artificial Sequence
  chemically treated genomic DNA (Homo sapiens) CpG-island No: 37303
ggaggcggaagtgggtgggaggggttagacgtgcgttttttttcggaagtgggcggtatttatagggttttatagtcgtttcgttattttttagtcgggttgcggcggaggtcgtttttggttttgtagttcgtttaagatggcggcgtagttatttcgcgggatacgttttagcgcggtgagtagtcgcgaggggtggagcgggtcgtgttttaggagggcgggcgggtaagcgaaggggggtcggtagtgggcggtggcggtttgtggggtcgacgcggcggcgggggttgcggcggggttcggggagggggcggttatttcgttttcgtcggcggaatagttcggttgcgggtcgggttgcgtttcgtcgtttttgtattgtgtttttgttttgtttcggggcgggttagggtcgcggtttttttttttagtttttttttagttttttagtagttgtcgttcgcgggcgaggtttcggcgggagatcggtttgttttcggggtcgcggggtttttgatttttttttgttcgttgggcgtcgtggtgggagggagcgggtttcgcgtttagaaacgtcggcggtttcgacgtt

SEQ ID NO: 37304 - DNA, 595 bp, Artificial Sequence
  chemically treated genomic DNA (Homo sapiens) CpG-island No: 37304
aacgtcgaaaccgccgacgtttctaaacgcgaaacccgctccctcccaccacgacgcccaacgaacaaaaaaaaatcaaaaaccccgcgaccccgaaaacaaaccgatctcccgccgaaacctcgcccgcgaacgacaactactaaaaaactaaaaaaaaactaaaaaaaaaaaccgcgaccctaacccgccccgaaacaaaacaaaaacacaatacaaaaacgacgaaacgcaacccgacccgcaaccgaactattccgccgacgaaaacgaaataaccgccccctccccgaaccccgccgcaacccccgccgccgcgtcgaccccacaaaccgccaccgcccactaccgaccccccttcgcttacccgcccgccctcctaaaacacgacccgctccacccctcgcgactactcaccgcgctaaaacgtatcccgcgaaataactacgccgccatcttaaacgaactacaaaaccaaaaacgacctccgccgcaacccgactaaaaaataacgaaacgactataaaaccctataaataccgcccacttccgaaaaaaaacgcacgtctaacccctcccacccacttccgcctcc

SEQ ID NO: 37305 - DNA, 802 bp, Artificial Sequence
  chemically treated genomic DNA (Homo sapiens) CpG-island No: 37305
gtttcgggtttttcgtttggtttcgtatttgggcgttttttatttgcggtggcgtcgagtgagttttttagtcggcgaggagcgaggtttttgtagttttgttgtttcgtagataatgtagtttcgtagtcgtcgtagtttcgtagtttcgtagtttcgtagttttcgtagtttcgtagtttagcgttagagttgcgcggagattttttgtcgtcgtacgttttgggtcggtaagaagtattcgttttaaatttcgtagtcgggtaagcgtaaagcgagcggtttggggaaatgtcgaagggatcgggaaaaataaattttaagtcgagtttaatagtcgaaacgtttcgtgtttaggtcggcggataagaaggagatagaatagattttttggttttttcgtagcgatcgatttcgtttatcgattagagttattatttcgtttttagttcgttaatttatatttttcgtaagttattagttttaagggatgcggaagttaagtatttcgtggtttttagcgattaggtgattcgtacgtgtatttatcgtagtagggaatttgtaaggtcgcgttgtggtcgttgttgtttttttggagtttgaggttgtcgttcgggggcgttttgtaggcgtttcgttgtaagtaaagatgcggttgcgcgggcggttggggttgcggttgttgttgttgcggttgcggttgcggcgaagttggggttagaggtcgacgattggggttggaatttgttaaaggagtttcgcgttttagttttattttttaggggtgtcgttaggtttt

SEQ ID NO: 37306 - DNA, 802 bp, Artificial Sequence
  chemically treated genomic DNA (Homo sapiens) CpG-island No: 37306
aaaacctaacgacacccctaaaaaataaaactaaaacgcgaaactcctttaacaaattccaaccccaatcgtcgacctctaaccccaacttcgccgcaaccgcaaccgcaacaacaacaaccgcaaccccaaccgcccgcgcaaccgcatctttacttacaacgaaacgcctacaaaacgcccccgaacgacaacctcaaactccaaaaaaacaacaacgaccacaacgcgaccttacaaattccctactacgataaatacacgtacgaatcacctaatcgctaaaaaccacgaaatacttaacttccgcatcccttaaaactaataacttacgaaaaatataaattaacgaactaaaaacgaaataataactctaatcgataaacgaaatcgatcgctacgaaaaaaccaaaaaatctattctatctccttcttatccgccgacctaaacacgaaacgtttcgactattaaactcgacttaaaatttatttttcccgatcccttcgacatttccccaaaccgctcgctttacgcttacccgactacgaaatttaaaacgaatacttcttaccgacccaaaacgtacgacgacaaaaaatctccgcgcaactctaacgctaaactacgaaactacgaaaactacgaaactacgaaactacgaaactacgacgactacgaaactacattatctacgaaacaacaaaactacaaaaacctcgctcctcgccgactaaaaaactcactcgacgccaccgcaaataaaaaacgcccaaatacgaaaccaaacgaaaaacccgaaac

SEQ ID NO: 37307 - DNA, 802 bp, Artificial Sequence
  chemically treated genomic DNA (Homo sapiens) CpG-island No: 37307
aggatttggcgatatttttggagagtggagttggagcgcggggtttttttaataagttttagttttagtcgtcgatttttagttttagtttcgtcgtagtcgtagtcgtagtagtagtagtcgtagttttagtcgttcgcgtaatcgtatttttatttgtagcgaggcgtttgtaagacgttttcggacggtagttttaaattttaggaaggtagtagcggttataacgcggttttgtaggttttttgttacggtgagtgtacgtgcgggttatttggtcgttggggattacggggtgtttggttttcgtattttttgaaattggtggtttgcgggaggtatgagttggcgggttgggggcggggtggtgattttggtcggtaaacgggatcgatcgttgcgagggagttaagggatttgttttgttttttttttgttcgtcggtttaggtacggagcgtttcggttgttaaattcgatttggagtttgtttttttcggttttttcggtatttttttaaatcgttcgttttgcgtttgttcggttgcgggatttgaagcggatgttttttatcggtttagggcgtgcggcggtaaggagttttcgcgtagttttggcgttgggttgcggggttgcggaggttgcggggttgcggggttgcggggttgcggcggttgcggggttgtattgtttgcgggatagtaggattgtagaggtttcgtttttcgtcggttgggaggtttattcggcgttatcgtaggtgagagacgtttaggtgcggagttaggcgggaagttcggagt

SEQ ID NO: 37308 - DNA, 802 bp, Artificial Sequence
  chemically treated genomic DNA (Homo sapiens) CpG-island No: 37308
actccgaacttcccgcctaactccgcacctaaacgtctctcacctacgataacgccgaataaacctcccaaccgacgaaaaacgaaacctctacaatcctactatcccgcaaacaatacaaccccgcaaccgccgcaaccccgcaaccccgcaaccccgcaacctccgcaaccccgcaacccaacgccaaaactacgcgaaaactccttaccgccgcacgccctaaaccgataaaaaacatccgcttcaaatcccgcaaccgaacaaacgcaaaacgaacgatttaaaaaaataccgaaaaaaccgaaaaaaacaaactccaaatcgaatttaacaaccgaaacgctccgtacctaaaccgacgaacaaaaaaaaaacaaaacaaatcccttaactccctcgcaacgatcgatcccgtttaccgaccaaaatcaccaccccgcccccaacccgccaactcatacctcccgcaaaccaccaatttcaaaaaatacgaaaaccaaacaccccgtaatccccaacgaccaaataacccgcacgtacactcaccgtaacaaaaaacctacaaaaccgcgttataaccgctactaccttcctaaaatttaaaactaccgtccgaaaacgtcttacaaacgcctcgctacaaataaaaatacgattacgcgaacgactaaaactacgactactactactacgactacgactacgacgaaactaaaactaaaaatcgacgactaaaactaaaacttattaaaaaaaccccgcgctccaactccactctccaaaaatatcgccaaatcct

SEQ ID NO: 37309 - DNA, 787 bp, Artificial Sequence
  chemically treated genomic DNA (Homo sapiens) CpG-island No: 37309
ggaacgggcgtttcgcgtgggtgggtttcgtgagggacgggtttttagaataggtagttttttagtttttttcgttttgtacgggtgtttcgtatttcgtttcgttgggcggaacggggtagcgatggtaggagggttaacgtttgggacgttcgatcgtttagttgcgttcgtggtgttgggcgtttttattatttgtttcggggtgggtcgtcgttttttttttttcgcgggggtcgggtttgggtggcgtttggcgggcggggcgggtttagttgcgggggcgtagtcgtcgggtcgcgggcggcgggacggacgaggtcggggtttcgggtggtattcggtaggcgggtaggcgggcgttatggagttgttttcggcgttgagtttgggcgaattggcgtttagtttttcgcgggtgtcgttttttttcgttttcgattttagttattttatcgtttttattttttatttttaagtatgagttaggtgagtcggggcggggggttggaggggatcggtagcgggtggcgcgggtcggggtagttcgggggtcgtagagaggggaagttcgtgcgtggtggagggagcgagggataggtttaaggattgtatcgtgggagtaggtaggcgttagaatcgtggggtttttttacgtcggggtgagttcgggggagaagtttttaggacgatgaagttgggggaggggaaggagaggcgtgcgcgggtttagaggagggggaataggtgtttggggtcggggtttttggttgggttagagttgtag

SEQ ID NO: 37310 - DNA, 787 bp, Artificial Sequence
  chemically treated genomic DNA (Homo sapiens) CpG-island No: 37310
ctacaactctaacccaaccaaaaaccccgaccccaaacacctattccccctcctctaaacccgcgcacgcctctccttcccctcccccaacttcatcgtcctaaaaacttctcccccgaactcaccccgacgtaaaaaaaccccacgattctaacgcctacctactcccacgatacaatccttaaacctatccctcgctccctccaccacgcacgaacttcccctctctacgacccccgaactaccccgacccgcgccacccgctaccgatcccctccaaccccccgccccgactcacctaactcatacttaaaaataaaaaataaaaacgataaaataactaaaatcgaaaacgaaaaaaaacgacacccgcgaaaaactaaacgccaattcgcccaaactcaacgccgaaaacaactccataacgcccgcctacccgcctaccgaataccacccgaaaccccgacctcgtccgtcccgccgcccgcgacccgacgactacgcccccgcaactaaacccgccccgcccgccaaacgccacccaaacccgacccccgcgaaaaaaaaaaaacgacgacccaccccgaaacaaataataaaaacgcccaacaccacgaacgcaactaaacgatcgaacgtcccaaacgttaaccctcctaccatcgctaccccgttccgcccaacgaaacgaaatacgaaacacccgtacaaaacgaaaaaaactaaaaaactacctattctaaaaacccgtccctcacgaaacccacccacgcgaaacgcccgttcc

SEQ ID NO: 37311 - DNA, 787 bp, Artificial Sequence
  chemically treated genomic DNA (Homo sapiens) CpG-island No: 37311
ttgtagttttgatttaattaggagtttcgattttaagtatttgtttttttttttttaaattcgcgtacgtttttttttttttttttttagttttatcgttttgggggtttttttttcgggtttatttcggcgtgagagaattttacgattttagcgtttgtttatttttacgatgtaatttttgaatttgtttttcgttttttttattacgtacgggttttttttttttgcgattttcgagttgtttcggttcgcgttattcgttgtcggttttttttagtttttcgtttcggtttatttggtttatatttgagagtagaggatggagacgatgaagtaattgaggtcgaagacggggaagagcggtattcgcgagaagttgagcgttagttcgtttaggtttagcgtcgagagtagttttatggcgttcgtttgttcgtttgtcgggtgttattcggggtttcggtttcgttcgtttcgtcgttcgcggttcggcgattgcgttttcgtagttgggttcgtttcgttcgttaggcgttatttaggttcggttttcgcgggagaggaggggcgacggtttatttcgggataggtggtggggacgtttagtattacggacgtagttggacggtcgggcgttttaggcgttgatttttttgttatcgttatttcgtttcgtttagcgaggcggggtgcggggtattcgtgtaaggcgagggaggttggggagttgtttgttttgggggttcgttttttacggagtttatttacgcgggacgttcgtttt

SEQ ID NO: 37312 - DNA, 787 bp, Artificial Sequence
  chemically treated genomic DNA (Homo sapiens) CpG-island No: 37312
aaaacgaacgtcccgcgtaaataaactccgtaaaaaacgaacccccaaaacaaacaactccccaacctccctcgccttacacgaataccccgcaccccgcctcgctaaacgaaacgaaataacgataacaaaaaaatcaacgcctaaaacgcccgaccgtccaactacgtccgtaatactaaacgtccccaccacctatcccgaaataaaccgtcgcccctcctctcccgcgaaaaccgaacctaaataacgcctaacgaacgaaacgaacccaactacgaaaacgcaatcgccgaaccgcgaacgacgaaacgaacgaaaccgaaaccccgaataacacccgacaaacgaacaaacgaacgccataaaactactctcgacgctaaacctaaacgaactaacgctcaacttctcgcgaataccgctcttccccgtcttcgacctcaattacttcatcgtctccatcctctactctcaaatataaaccaaataaaccgaaacgaaaaactaaaaaaaaccgacaacgaataacgcgaaccgaaacaactcgaaaatcgcaaaaaaaaaaaacccgtacgtaataaaaaaaacgaaaaacaaattcaaaaattacatcgtaaaaataaacaaacgctaaaatcgtaaaattctctcacgccgaaataaacccgaaaaaaaaacccccaaaacgataaaactaaaaaaaaaaaaaaaaaaacgtacgcgaatttaaaaaaaaaaaaacaaatacttaaaatcgaaactcctaattaaatcaaaactacaa

SEQ ID NO: 37313 - DNA, 1223 bp, Artificial Sequence
  chemically treated genomic DNA (Homo sapiens) CpG-island No: 37313
ggttttacgtatcgagcgttgtcgggttgttcgatttgttttcggttcgggttcgagaagcgagaggtagggatggtagcggttttcgaggggaggtgggcgttagacgggtttttcgaagttcggtgggcgaggggtataggagagggggagggtttcgggtttatgcggttttcgttttagttcgcgcggcgggtatttacgttgttttgggggtcgatggtttgtagtagtcggtttttgatttgttgcggagacgtcggagtcgttgttattgtttgggcgaggcggggggttgcggtcgggttagcgggcgggcgggttgaggcgggggacgggggttatttattcgtcggttttcgggagtcggagtcgtatgtttttcgcggcgttcgggggttgggggcgcgcggggtggcggagaggggagtcggggtcgggtttcggtttcgggtcgtcgtcgttattaaaggaggaggaggagtcgtcggagtcgtcgtcgttcgttgtcgtcgtttcgagaattaaattttagtgagttgttttcgcgcggagtattttgggtagttcgcgtcgtacgtagcgtcggcgttacgttgaggaggttgggagatggggcgggcggagacgttaggtttgggcggggttgttcgtgtgttacgtttcgcgttttcgcgtaagcgcgcgtaggcgtattcgttcgttcgtgacgtttcgtttagtcgttcggtttaggtagtcgttgggaggaggttgggcggggtaacggttttcgtttaggttacggggcggggttttttgacggaagcgcgcgcgtaaagagtttttgaattcggacgttcgtagcggttatttcggggcggggagggcggcgggaaaattttttttttgggagagttttttcggcgcgtgattgggggacgggagtcgtaggttgagtagttgtcgagttttttgtgagggcgagggaattagacgtttacgttgtgattttgcgcgtagaagggttatcggagttcgggggtgtcgtcgcggttttttcgttttttagagggtgtgggaatgggtgtggtggtagggcgggggtttgtatcgttacgcgcgatttcgatcgcgaaaacgtgaggcggtaaagcgtttttggtagaagtcgttcgtcgtagttgggaaagtcggaggttgtaaatttgcgtttacgcggcggtttttttatttcggtatta

SEQ ID NO: 37314 - DNA, 1223 bp, Artificial Sequence
  chemically treated genomic DNA (Homo sapiens) CpG-island No: 37314
taataccgaaataaaaaaaccgccgcgtaaacgcaaatttacaacctccgactttcccaactacgacgaacgacttctaccaaaaacgctttaccgcctcacgttttcgcgatcgaaatcgcgcgtaacgatacaaacccccgccctaccaccacacccattcccacaccctctaaaaaacgaaaaaaccgcgacgacacccccgaactccgataacccttctacgcgcaaaatcacaacgtaaacgtctaattccctcgccctcacaaaaaactcgacaactactcaacctacgactcccgtcccccaatcacgcgccgaaaaaactctcccaaaaaaaaaattttcccgccgccctccccgccccgaaataaccgctacgaacgtccgaattcaaaaactctttacgcgcgcgcttccgtcaaaaaaccccgccccgtaacctaaacgaaaaccgttaccccgcccaacctcctcccaacgactacctaaaccgaacgactaaacgaaacgtcacgaacgaacgaatacgcctacgcgcgcttacgcgaaaacgcgaaacgtaacacacgaacaaccccgcccaaacctaacgtctccgcccgccccatctcccaacctcctcaacgtaacgccgacgctacgtacgacgcgaactacccaaaatactccgcgcgaaaacaactcactaaaatttaattctcgaaacgacgacaacgaacgacgacgactccgacgactcctcctcctcctttaataacgacgacgacccgaaaccgaaacccgaccccgactcccctctccgccaccccgcgcgcccccaacccccgaacgccgcgaaaaacatacgactccgactcccgaaaaccgacgaataaataacccccgtcccccgcctcaacccgcccgcccgctaacccgaccgcaaccccccgcctcgcccaaacaataacaacgactccgacgtctccgcaacaaatcaaaaaccgactactacaaaccatcgacccccaaaacaacgtaaatacccgccgcgcgaactaaaacgaaaaccgcataaacccgaaaccctccccctctcctatacccctcgcccaccgaacttcgaaaaacccgtctaacgcccacctcccctcgaaaaccgctaccatccctacctctcgcttctcgaacccgaaccgaaaacaaatcgaacaacccgacaacgctcgatacgtaaaacc

SEQ ID NO: 37315 - DNA, 1223 bp, Artificial Sequence
  chemically treated genomic DNA (Homo sapiens) CpG-island No: 37315
tggtgtcgaggtggagaagtcgtcgcgtagacgtagatttgtaattttcggtttttttagttacggcgggcggtttttgttagaggcgttttgtcgttttacgttttcgcgatcggggtcgcgcgtggcggtgtagattttcgttttgttattatatttatttttatattttttgaggggcgggggggtcgcggcgatattttcggatttcgatgatttttttgcgcgtagaattataacgtggacgtttggttttttcgtttttataaaaaattcggtagttgtttagtttgcgattttcgttttttagttacgcgtcgggaaggtttttttagaggaaggattttttcgtcgtttttttcgtttcgaggtagtcgttgcgagcgttcgggtttaaggattttttgcgcgcgcgttttcgttagaaagtttcgtttcgtgatttggacgggggtcgttgtttcgtttaatttttttttaacggttgtttaggtcgggcggttgggcggggcgttacgggcggacgagtgcgtttgcgcgcgtttgcgcggaggcgcggggcgtggtatacgggtagtttcgtttaggtttggcgttttcgttcgttttattttttaatttttttagcgtggcgtcgacgttgcgtgcggcgcggattatttagagtatttcgcgcgggggtagtttattggagtttggttttcgaggcggcggtagcgagcggcggcggtttcggcggttttttttttttttttggtggcggcggcggttcgggatcgagattcggtttcggttttttttttcgttatttcgcgcgtttttaattttcgggcgtcgcggggaatatgcggtttcggttttcggaggtcggcgagtgagtgattttcgtttttcgttttagttcgttcgttcgttggttcggtcgtaatttttcgtttcgtttaggtaatgatagcggtttcggcgttttcgtagtagattagggatcggttgttgtaggttatcgatttttagagtaacgtaagtattcgtcgcgcgagttgggacggaggtcgtatgggttcgggatttttttttttttttgtatttttcgtttatcgggtttcgggggattcgtttggcgtttattttttttcgagggtcgttgttatttttgtttttcgtttttcgggttcgggtcgggggtaggtcgggtagttcggtagcgttcggtacgtgaggtt

SEQ ID NO: 37316 - DNA, 1223 bp, Artificial Sequence
  chemically treated genomic DNA (Homo sapiens) CpG-island No: 37316
aacctcacgtaccgaacgctaccgaactacccgacctacccccgacccgaacccgaaaaacgaaaaacaaaaataacaacgaccctcgaaaaaaaataaacgccaaacgaatcccccgaaacccgataaacgaaaaatacaaaaaaaaaaaaaaatcccgaacccatacgacctccgtcccaactcgcgcgacgaatacttacgttactctaaaaatcgataacctacaacaaccgatccctaatctactacgaaaacgccgaaaccgctatcattacctaaacgaaacgaaaaattacgaccgaaccaacgaacgaacgaactaaaacgaaaaacgaaaatcactcactcgccgacctccgaaaaccgaaaccgcatattccccgcgacgcccgaaaattaaaaacgcgcgaaataacgaaaaaaaaaaccgaaaccgaatctcgatcccgaaccgccgccgccaccaaaaaaaaaaaaaaaaccgccgaaaccgccgccgctcgctaccgccgcctcgaaaaccaaactccaataaactacccccgcgcgaaatactctaaataatccgcgccgcacgcaacgtcgacgccacgctaaaaaaattaaaaaataaaacgaacgaaaacgccaaacctaaacgaaactacccgtataccacgccccgcgcctccgcgcaaacgcgcgcaaacgcactcgtccgcccgtaacgccccgcccaaccgcccgacctaaacaaccgttaaaaaaaaattaaacgaaacaacgacccccgtccaaatcacgaaacgaaactttctaacgaaaacgcgcgcgcaaaaaatccttaaacccgaacgctcgcaacgactacctcgaaacgaaaaaaacgacgaaaaaatccttcctctaaaaaaaccttcccgacgcgtaactaaaaaacgaaaatcgcaaactaaacaactaccgaattttttataaaaacgaaaaaaccaaacgtccacgttataattctacgcgcaaaaaaatcatcgaaatccgaaaatatcgccgcgacccccccgcccctcaaaaaatataaaaataaatataataacaaaacgaaaatctacaccgccacgcgcgaccccgatcgcgaaaacgtaaaacgacaaaacgcctctaacaaaaaccgcccgccgtaactaaaaaaaccgaaaattacaaatctacgtctacgcgacgacttctccacctcgacacca

SEQ ID NO: 37317 - DNA, 743 bp, Artificial Sequence
  chemically treated genomic DNA (Homo sapiens) CpG-island No: 37317
cgcgcgtttcggattattcgttgttttttttcgttcgttgtttttttttttcgcgttttacggggtttcgtattgattttaggcgttttcgggggcgtcgcgtcgcgatcggttcggggcggggtttcgtgtagggcgtttcggattggttgtggggagagggggcggggtcggtcgcggagaaaatagtcgggcgcgcgcgagtgtagtttgggtttggagtttgagttttgcggaatttcggcgttcggttttatttcgttcgtatttgtatttatttattgttgttattttttatcgcgggagtttcgtagtcgggttttttcgttcgttttcgcgtagcgttagtattttttagttttttagttttttttcgcggtgcgtcgtagtcgaggcgatgcgttttatttagaatatgtgtattatcgtcgagtatttcgcgtcggtaacgtcgcggttttcgattgttgtgtgggcgtcgcggcgtcgtttggttaagatcgtcgtggtggggttagcggcgtgggtaagatcggtgagtcgtcgcgtttagttttgggtttggttttggacgatttttgacgggagttgaggttgaataaggcgtggggagcggtgggagttgtagttcgatcgtttttcgttttcgcgtagggagtcgttgttttttgggagtgggtttagtcgttgtttacgttattcgtttgtttttatagacgggggaaataaggattaagaatggt

SEQ ID NO: 37318 - DNA, 743 bp, Artificial Sequence
  chemically treated genomic DNA (Homo sapiens) CpG-island No: 37318
accattcttaatccttatttcccccgtctataaaaacaaacgaataacgtaaacaacgactaaacccactcccaaaaaacaacgactccctacgcgaaaacgaaaaacgatcgaactacaactcccaccgctccccacgccttattcaacctcaactcccgtcaaaaatcgtccaaaaccaaacccaaaactaaacgcgacgactcaccgatcttacccacgccgctaaccccaccacgacgatcttaaccaaacgacgccgcgacgcccacacaacaatcgaaaaccgcgacgttaccgacgcgaaatactcgacgataatacacatattctaaataaaacgcatcgcctcgactacgacgcaccgcgaaaaaaaactaaaaaactaaaaaatactaacgctacgcgaaaacgaacgaaaaaacccgactacgaaactcccgcgataaaaaataacaacaataaataaatacaaatacgaacgaaataaaaccgaacgccgaaattccgcaaaactcaaactccaaacccaaactacactcgcgcgcgcccgactattttctccgcgaccgaccccgccccctctccccacaaccaatccgaaacgccctacacgaaaccccgccccgaaccgatcgcgacgcgacgcccccgaaaacgcctaaaatcaatacgaaaccccgtaaaacgcgaaaaaaaaaaacaacgaacgaaaaaaaacaacgaataatccgaaacgcgcg

SEQ ID NO: 37319 - DNA, 743 bp, Artificial Sequence
  chemically treated genomic DNA (Homo sapiens) CpG-island No: 37319
gttatttttgatttttgtttttttcgtttgtggaagtaggcgggtggcgtagataacggttaagtttatttttaaggggtagcggttttttgcgcggggacggagagcggtcgggttgtagtttttatcgttttttacgttttgtttagttttaattttcgttaggggtcgtttaagattagatttagggttaagcgcgacgatttatcggttttgtttacgtcgttggttttattacggcgattttgattaggcggcgtcgcggcgtttatatagtagtcggaggtcgcggcgttgtcggcgcggggtattcggcgatggtgtatatgttttgaatgaggcgtatcgtttcggttgcggcgtatcgcgggaagggattgagggattggagaatgttagcgttgcgcgggagcgggcgggaggattcgattgcggggttttcgcggtaagaaataataataataaataagtgtaggtacgggcggggtggggtcgagcgtcgaggtttcgtagggtttaggttttagatttagattgtattcgcgcgcgttcggttgtttttttcgcggtcggtttcgttttttttttttatagttaattcggggcgttttatacgaggtttcgtttcggatcggtcgcggcgcgacgttttcggaggcgtttggagttagtgcggagtttcgtgaggcgcggggagaagaggtagcgggcggaggggagtagcgggtggttcgaggcgcgcg

SEQ ID NO: 37320 - DNA, 743 bp, Artificial Sequence
  chemically treated genomic DNA (Homo sapiens) CpG-island No: 37320
cgcgcgcctcgaaccacccgctactcccctccgcccgctacctcttctccccgcgcctcacgaaactccgcactaactccaaacgcctccgaaaacgtcgcgccgcgaccgatccgaaacgaaacctcgtataaaacgccccgaattaactataaaaaaaaaaaacgaaaccgaccgcgaaaaaaacaaccgaacgcgcgcgaatacaatctaaatctaaaacctaaaccctacgaaacctcgacgctcgaccccaccccgcccgtacctacacttatttattattattatttcttaccgcgaaaaccccgcaatcgaatcctcccgcccgctcccgcgcaacgctaacattctccaatccctcaatcccttcccgcgatacgccgcaaccgaaacgatacgcctcattcaaaacatatacaccatcgccgaataccccgcgccgacaacgccgcgacctccgactactatataaacgccgcgacgccgcctaatcaaaatcgccgtaataaaaccaacgacgtaaacaaaaccgataaatcgtcgcgcttaaccctaaatctaatcttaaacgacccctaacgaaaattaaaactaaacaaaacgtaaaaaacgataaaaactacaacccgaccgctctccgtccccgcgcaaaaaaccgctaccccttaaaaataaacttaaccgttatctacgccacccgcctacttccacaaacgaaaaaaacaaaaatcaaaaataac

SEQ ID NO: 37321 - DNA, 500 bp, Artificial Sequence
  chemically treated genomic DNA (Homo sapiens) CpG-island No: 37321
agcggaataagttagatgacgttatttcgttcgttaaagtatattacgtggttttcgtagtacgtgattcgtgttttcgtcgtaggtaaaagaatgacgtacgttagttttagatcgtgcgttttatatttttttcggtaacgaagttcgttgtttgggtttaaatttttttagagtgtggtatcgtcggtgttggaagttatttgtttttagagtcggtttaacgtagtcgtacggggtcgttgtaggtcgaggttttcgatttttttaagtcgcgtatggttattggttgttgaggtgtttattcgacgtatttaatttttcgttttcgttttttatgtttgacgtatgcgtagtggtttcgtcggcgaggtttcgcgaatttaggagaatgtgcgcgcgtagggtggcgttgagggaagttttgagttttttatggggtttcgaattttatttcgggcgtgtgttttttcgggatttttattttgtttatttttttt

SEQ ID NO: 37322 - DNA, 500 bp, Artificial Sequence
  chemically treated genomic DNA (Homo sapiens) CpG-island No: 37322
aaaaaaaataaacaaaataaaaatcccgaaaaaacacacgcccgaaataaaattcgaaaccccataaaaaactcaaaacttccctcaacgccaccctacgcgcgcacattctcctaaattcgcgaaacctcgccgacgaaaccactacgcatacgtcaaacataaaaaacgaaaacgaaaaattaaatacgtcgaataaacacctcaacaaccaataaccatacgcgacttaaaaaaatcgaaaacctcgacctacaacgaccccgtacgactacgttaaaccgactctaaaaacaaataacttccaacaccgacgataccacactctaaaaaaatttaaacccaaacaacgaacttcgttaccgaaaaaaatataaaacgcacgatctaaaactaacgtacgtcattcttttacctacgacgaaaacacgaatcacgtactacgaaaaccacgtaatatactttaacgaacgaaataacgtcatctaacttattccgct

SEQ ID NO: 37323 - DNA, 500 bp, Artificial Sequence
  chemically treated genomic DNA (Homo sapiens) CpG-island No: 37323
gggaaaaataaataaaatgggggtttcggaggggtatacgttcgggatagggttcgaagttttatggagaatttaaagttttttttaacgttattttgcgcgcgtatatttttttgggttcgcgggatttcgtcggcgaggttattgcgtatgcgttaggtatggagagcggaagcggaaggttgaatgcgtcgggtgggtattttagtaattagtagttatgcgcggtttggaggagtcgggggtttcggtttatagcgatttcgtgcggttgcgttaagtcggttttggagataggtaatttttaatatcggcggtgttatattttggagaggtttaggtttaggtagcggatttcgttgtcgagaggggtgtaaaacgtacgatttggaattgacgtgcgttatttttttatttacggcgaaggtacgggttacgtgttgcggagattacgtgatgtgttttggcgagcgggatgacgttatttggtttgtttcgtt

SEQ ID NO: 37324 - DNA, 500 bp, Artificial Sequence
  chemically treated genomic DNA (Homo sapiens) CpG-island No: 37324
aacgaaacaaaccaaataacgtcatcccgctcgccaaaacacatcacgtaatctccgcaacacgtaacccgtaccttcgccgtaaataaaaaaataacgcacgtcaattccaaatcgtacgttttacacccctctcgacaacgaaatccgctacctaaacctaaacctctccaaaatataacaccgccgatattaaaaattacctatctccaaaaccgacttaacgcaaccgcacgaaatcgctataaaccgaaacccccgactcctccaaaccgcgcataactactaattactaaaatacccacccgacgcattcaaccttccgcttccgctctccatacctaacgcatacgcaataacctcgccgacgaaatcccgcgaacccaaaaaaatatacgcgcgcaaaataacgttaaaaaaaactttaaattctccataaaacttcgaaccctatcccgaacgtatacccctccgaaacccccattttatttatttttccc

SEQ ID NO: 37325 - DNA, 588 bp, Artificial Sequence
  chemically treated genomic DNA (Homo sapiens) CpG-island No: 37325
tcgagttcgggcgttgaggtttttcgagtcggtttttgaatttttcgggttttagtcgatcggggtgcggagggggtcgattcgggggatttttaagcgtttttttcgttttgacgttgtggggtttttatcgcgtcgttatagttgtttttatttggggaggtgcgttcgggtttcggggggcgggtagtcggggggcgggtagggaatcggtgtcgttttacgtttcgtggtttttttaaggaggggaagtcggcggagggaggagtcggttcggtgtgtgtaggggagcgtttcgttagcggttcgtagggttggagatttacgtcgtggagaggattagttttaggtcgtttcgtttgggttcgcgtttcgatttcgttgttttcgtttcgtttttttgttcgtggcgtttacggttattttggtttcgggggtagggtatgggcggttttcgttagatcgtttagcgttagtattaattgttttcgttttggttttcgagttcgaagttttttttgcgcgtataatttaggtagtaattttaaattagcgggtattatagattagttgtagttattttaattt

SEQ ID NO: 37326 - DNA, 588 bp, Artificial Sequence
  chemically treated genomic DNA (Homo sapiens) CpG-island No: 37326
aaattaaaataactacaactaatctataatacccgctaatttaaaattactacctaaattatacgcgcaaaaaaaacttcgaactcgaaaaccaaaacgaaaacaattaatactaacgctaaacgatctaacgaaaaccgcccataccctacccccgaaaccaaaataaccgtaaacgccacgaacaaaaaaacgaaacgaaaacaacgaaatcgaaacgcgaacccaaacgaaacgacctaaaactaatcctctccacgacgtaaatctccaaccctacgaaccgctaacgaaacgctcccctacacacaccgaaccgactcctccctccgccgacttcccctccttaaaaaaaccacgaaacgtaaaacgacaccgattccctacccgccccccgactacccgccccccgaaacccgaacgcacctccccaaataaaaacaactataacgacgcgataaaaaccccacaacgtcaaaacgaaaaaaacgcttaaaaatcccccgaatcgaccccctccgcaccccgatcgactaaaacccgaaaaattcaaaaaccgactcgaaaaacctcaacgcccgaactcga

SEQ ID NO: 37327 - DNA, 588 bp, Artificial Sequence
  chemically treated genomic DNA (Homo sapiens) CpG-island No: 37327
gggttggggtggttgtagttggtttgtggtgttcgttagtttaggattattgtttaggttgtgcgcgtagaagaggtttcgggttcgaaggttagagcgagggtagttagtattggcgttgggcgatttggcgggggtcgtttatgttttgttttcgaggttaaggtggtcgtaagcgttacgggtagagaggcgaggcgggggtagcgaggtcggggcgcgggtttaggcggggcgatttgaggttggttttttttacggcgtgggtttttagttttgcggatcgttggcgaggcgtttttttgtatatatcggatcggttttttttttcgtcggttttttttttttaaaggggttacgaagcgtggggcggtatcggttttttgttcgtttttcgattgttcgtttttcggggttcgggcgtatttttttaggtaggagtagttgtggcggcgcggtaggagttttatagcgttagggcggggagggcgtttggagatttttcgggtcggtttttttcgtatttcgatcgattgaggttcggagagtttaggaatcggttcgggagattttagcgttcgaattcgg

SEQ ID NO: 37328 - DNA, 588 bp, Artificial Sequence
  chemically treated genomic DNA (Homo sapiens) CpG-island No: 37328
ccgaattcgaacgctaaaatctcccgaaccgattcctaaactctccgaacctcaatcgatcgaaatacgaaaaaaaccgacccgaaaaatctccaaacgccctccccgccctaacgctataaaactcctaccgcgccgccacaactactcctacctaaaaaaatacgcccgaaccccgaaaaacgaacaatcgaaaaacgaacaaaaaaccgataccgccccacgcttcgtaacccctttaaaaaaaaaaaaccgacgaaaaaaaaaaccgatccgatatatacaaaaaaacgcctcgccaacgatccgcaaaactaaaaacccacgccgtaaaaaaaaccaacctcaaatcgccccgcctaaacccgcgccccgacctcgctacccccgcctcgcctctctacccgtaacgcttacgaccaccttaacctcgaaaacaaaacataaacgacccccgccaaatcgcccaacgccaatactaactaccctcgctctaaccttcgaacccgaaacctcttctacgcgcacaacctaaacaataatcctaaactaacgaacaccacaaaccaactacaaccaccccaaccc

SEQ ID NO: 37329 - DNA, 1711 bp, Artificial Sequence
  chemically treated genomic DNA (Homo sapiens) CpG-island No: 37329
tttcgatcgttcggtattagcgcgtaagggattttttagtcggagattagagtttagtttcggttacgaggttatcgtcgttgttcgtttcgagaagtattacgcgggttgagtcgtcggttagcgggttattttcgagtttttgtttgtatcgcgttagttttagattacggacgttgagtttttagcgcgtgttagtttgggtcgttgggttttcggggttagttcgcgacgattttttgagtttttcgtagaagggtcgagcgttcgtttcggggacgttaggttcgttttcgtttttcgatagtcgcggggatttagagttcgggggtgcgggacgttcgcgttatgattgtcgagagcgggtcgtcgtcgtcgtagtcggaggtgttggttatcgtgaaggaagagcgcggcgagacggtagtaggggtcggggttttaggggaggttacgggtcgcggggcgggcgggcggcgtcgtaagcgttttttgtagcgcgggaagtcgttttatagttatatcgcgtttatcgttatggttatcgcgtacgcgttcgagcgtcgttttacgttgggcggtatttataagtttattatcgagcgtttttttttttatcgcgataattttaaaaagtggtagaatagtattcgttataattttatatttaacgattgtttttttaagatttcgcgcgaggtcggtcgttcgggtaagggtaattattgggcgtttgattttaacgcggaggatatgttcgagagcggtagttttttgcgtcgtcgtaagcgttttaagcgttcggatttttttatttattcggtttatatgtacgacgcggcggttgtcgtagtcgtcgtcgtcgtcgtcgtcgtcgtcgtcgttatttttttaggcgcggtgttcgtcgcgcgttttttttattcgggcgtcgtttatgtaggttacgcgtcgtcgtcgttggtcgcgtcgtttttagtttattatttcgcggcgtcgttcggtttttgtcgcgttttcggtttggtttttgagcggtcgtttagtttagagttggggttcgtatcgtcggggttcggcggtttttgcgtttttgttttcgtcggcgttttcgttattattatcggttattagttcgtaggttgtatcggggttcggtcggttaattttttcgtttatgcggttgtttacgcgggtttcgacggcgcgtattcgtagggcgtcggtagtgcgatttttgtcgttgttggtcgtttggcgggattcgtttcgtttttagcgggcggtagtagtggcggcgtggagattacggtggatttttacgggcgtacgtcgttcggttagttcggagcgttgggagtttgttataattttggcgggtagttcggaggggttagtgtaggcgtttattatgttcgttatgttgtcgtttatttcggtgggatagatcggttcgtgttcgttatgtgagttagcgtagggacgaaaatttatagatatatcggttgtttatacgtttttcgtaatttgagaacgaataggaatggagagaggatttaattgggatttacgtggaaaagatcgagtaggttatagaggttcggttttttcgcgtatagcgtaggtattcggtgtattttgtaaacgggaggaggtggggcgaggtagttagagtttttggattggtatagggattttcgatggagcgaag

SEQ ID NO: 37330 - DNA, 1711 bp, Artificial Sequence
  chemically treated genomic DNA (Homo sapiens) CpG-island No: 37330
cttcgctccatcgaaaatccctataccaatccaaaaactctaactacctcgccccacctcctcccgtttacaaaatacaccgaatacctacgctatacgcgaaaaaaccgaacctctataacctactcgatcttttccacgtaaatcccaattaaatcctctctccattcctattcgttctcaaattacgaaaaacgtataaacaaccgatatatctataaattttcgtccctacgctaactcacataacgaacacgaaccgatctatcccaccgaaataaacgacaacataacgaacataataaacgcctacactaacccctccgaactacccgccaaaattataacaaactcccaacgctccgaactaaccgaacgacgtacgcccgtaaaaatccaccgtaatctccacgccgccactactaccgcccgctaaaaacgaaacgaatcccgccaaacgaccaacaacgacaaaaatcgcactaccgacgccctacgaatacgcgccgtcgaaacccgcgtaaacaaccgcataaacgaaaaaattaaccgaccgaaccccgatacaacctacgaactaataaccgataataataacgaaaacgccgacgaaaacaaaaacgcaaaaaccgccgaaccccgacgatacgaaccccaactctaaactaaacgaccgctcaaaaaccaaaccgaaaacgcgacaaaaaccgaacgacgccgcgaaataataaactaaaaacgacgcgaccaacgacgacgacgcgtaacctacataaacgacgcccgaataaaaaaaacgcgcgacgaacaccgcgcctaaaaaaataacgacgacgacgacgacgacgacgacgacgactacgacaaccgccgcgtcgtacatataaaccgaataaataaaaaaatccgaacgcttaaaacgcttacgacgacgcaaaaaactaccgctctcgaacatatcctccgcgttaaaatcaaacgcccaataattacccttacccgaacgaccgacctcgcgcgaaatcttaaaaaaacaatcgttaaatataaaattataacgaatactattctaccactttttaaaattatcgcgataaaaaaaaaaacgctcgataataaacttataaataccgcccaacgtaaaacgacgctcgaacgcgtacgcgataaccataacgataaacgcgatataactataaaacgacttcccgcgctacaaaaaacgcttacgacgccgcccgcccgccccgcgacccgtaacctcccctaaaaccccgacccctactaccgtctcgccgcgctcttccttcacgataaccaacacctccgactacgacgacgacgacccgctctcgacaatcataacgcgaacgtcccgcacccccgaactctaaatccccgcgactatcgaaaaacgaaaacgaacctaacgtccccgaaacgaacgctcgacccttctacgaaaaactcaaaaaatcgtcgcgaactaaccccgaaaacccaacgacccaaactaacacgcgctaaaaactcaacgtccgtaatctaaaactaacgcgatacaaacaaaaactcgaaaataacccgctaaccgacgactcaacccgcgtaatacttctcgaaacgaacaacgacgataacctcgtaaccgaaactaaactctaatctccgactaaaaaatcccttacgcgctaataccgaacgatcgaaa

SEQ ID NO: 37331 - DNA, 1711 bp, Artificial Sequence
  chemically treated genomic DNA (Homo sapiens) CpG-island No: 37331
tttcgttttatcgagggtttttgtgttagtttaagggttttggttgtttcgttttattttttttcgtttatagagtatatcgggtgtttacgttgtgcgcggggagatcgagtttttgtggtttgttcggttttttttacgtgggttttagttgagttttttttttatttttgttcgtttttagattgcggggaacgtgtgaatagtcgatgtgtttatgagttttcgtttttacgttggtttatatggcggatacgaatcgatttattttatcgggataagcggtagtatggcgagtatggtaggcgtttgtattggttttttcgagttgttcgttagggttgtagtaggtttttagcgtttcgaattggtcgggcgacgtgcgttcgtagaagtttatcgtggtttttacgtcgttattgttgtcgttcgttgggggcgaagcgggtttcgttaggcggttagtagcggtaaagatcgtattgtcggcgttttgcgggtacgcgtcgtcggggttcgcgtaggtagtcgtataggcggaggggttggtcggtcgggtttcggtgtagtttgcgggttggtagtcggtggtggtagcgggggcgtcggcggaggtaaaggcgtaagagtcgtcgggtttcgacggtgcgggttttagttttgggttgagcggtcgtttaggaattaggtcgaagacgcggtaagggtcgggcgacgtcgcggggtagtagattggaggcggcgcggttagcgacggcggcgcgtagtttgtatagacggcgttcgggtagggggggcgcgcggcgggtatcgcgtttgggaagatggcggcggcggcggcggcggcggcggcggcggttgcggtagtcgtcgcgtcgtgtatgtaagtcgggtaggtggagaggttcgagcgtttgaagcgtttgcggcggcgtaggaagttgtcgttttcgaatatgtttttcgcgttggggttaagcgtttagtagttgtttttattcgggcggtcggtttcgcgcgggattttgaggaagtagtcgttgagtgtgaggttgtggcggatgttgttttgttattttttggggttgtcgcggtagaaggggaagcgttcggtgatgaatttgtagatgtcgtttagcgtgaggcggcgttcgggcgcgtgcgcgatggttatggcgatgagcgcgatgtagttgtagggcggtttttcgcgttgtagggggcgtttgcggcgtcgttcgttcgtttcgcggttcgtggttttttttgggatttcggtttttgttgtcgtttcgtcgcgttttttttttacggtagttagtattttcggttgcggcggcggcggttcgttttcggtagttatggcgcgggcgtttcgtattttcgggttttggattttcgcggttgtcggggggcgggggcgggtttggcgttttcggaacggacgttcggtttttttgcggagagtttaggggatcgtcgcgggttggtttcgagagtttagcggtttaggttggtacgcgttggaggtttagcgttcgtggtttggggttggcgcggtgtagatagaggttcgggagtgattcgttagtcgacggtttagttcgcgtggtgtttttcgaggcgggtagcggcggtggtttcgtgatcgggattggattttggttttcggttgaagggttttttgcgcgttggtgtcgggcggtcgagg

SEQ ID NO: 37332 - DNA, 1711 bp, Artificial Sequence
  chemically treated genomic DNA (Homo sapiens) CpG-island No: 37332
cctcgaccgcccgacaccaacgcgcaaaaaacccttcaaccgaaaaccaaaatccaatcccgatcacgaaaccaccgccgctacccgcctcgaaaaacaccacgcgaactaaaccgtcgactaacgaatcactcccgaacctctatctacaccgcgccaaccccaaaccacgaacgctaaacctccaacgcgtaccaacctaaaccgctaaactctcgaaaccaacccgcgacgatcccctaaactctccgcaaaaaaaccgaacgtccgttccgaaaacgccaaacccgcccccgccccccgacaaccgcgaaaatccaaaacccgaaaatacgaaacgcccgcgccataactaccgaaaacgaaccgccgccgccgcaaccgaaaatactaactaccgtaaaaaaaaaacgcgacgaaacgacaacaaaaaccgaaatcccaaaaaaaaccacgaaccgcgaaacgaacgaacgacgccgcaaacgccccctacaacgcgaaaaaccgccctacaactacatcgcgctcatcgccataaccatcgcgcacgcgcccgaacgccgcctcacgctaaacgacatctacaaattcatcaccgaacgcttccccttctaccgcgacaaccccaaaaaataacaaaacaacatccgccacaacctcacactcaacgactacttcctcaaaatcccgcgcgaaaccgaccgcccgaataaaaacaactactaaacgcttaaccccaacgcgaaaaacatattcgaaaacgacaacttcctacgccgccgcaaacgcttcaaacgctcgaacctctccacctacccgacttacatacacgacgcgacgactaccgcaaccgccgccgccgccgccgccgccgccgccgccatcttcccaaacgcgatacccgccgcgcgccccccctacccgaacgccgtctatacaaactacgcgccgccgtcgctaaccgcgccgcctccaatctactaccccgcgacgtcgcccgacccttaccgcgtcttcgacctaattcctaaacgaccgctcaacccaaaactaaaacccgcaccgtcgaaacccgacgactcttacgcctttacctccgccgacgcccccgctaccaccaccgactaccaacccgcaaactacaccgaaacccgaccgaccaacccctccgcctatacgactacctacgcgaaccccgacgacgcgtacccgcaaaacgccgacaatacgatctttaccgctactaaccgcctaacgaaacccgcttcgcccccaacgaacgacaacaataacgacgtaaaaaccacgataaacttctacgaacgcacgtcgcccgaccaattcgaaacgctaaaaacctactacaaccctaacgaacaactcgaaaaaaccaatacaaacgcctaccatactcgccatactaccgcttatcccgataaaataaatcgattcgtatccgccatataaaccaacgtaaaaacgaaaactcataaacacatcgactattcacacgttccccgcaatctaaaaacgaacaaaaataaaaaaaaaactcaactaaaacccacgtaaaaaaaaccgaacaaaccacaaaaactcgatctccccgcgcacaacgtaaacacccgatatactctataaacgaaaaaaaataaaacgaaacaaccaaaacccttaaactaacacaaaaaccctcgataaaacgaaa

SEQ ID NO: 37333 - DNA, 624 bp, Artificial Sequence
  chemically treated genomic DNA (Homo sapiens) CpG-island No: 37333
cgtagggatcgggggttagtagtggtcgtaaatacgggtttcggcgtgttcggtcgtattcggtagttcgtatggttgtttagcggttagtatcgtatgtttgcgagtttaattcgcgtttagagggtatataatggggtgtaggttaacgcggggagtcggttaggttttcgcgcggcgtttattttggatattggtagtgggttacgtggtgttgcgtgcgtacggaggttagggcggttcggttattgagtgcgtaggcgtcgtgggtttcgttttgtttcgcggcgggaacgcggtcgtgagggtgtggggtgtaggttcgttaggtttgtaacggttgtcgagggtcgtgggatgcgttcgtcgcgtttttgtttaggcggagggagttcgttcgtcgttagggtttcgagttcgggtttaggtaggcgtggaggtggcgggaacggcgtattcgtcgggtgggcgttgttttaaggtcgtagggtttgggaggtttgtgttgagttaaaggtcggttcgtagattttcggaagcgtttttggttgttagtaggtgtcggcgagggtttttagtggttatttttttggtggtgatgttttcgtttttttttaataggag

SEQ ID NO: 37334 - DNA, 624 bp, Artificial Sequence
  chemically treated genomic DNA (Homo sapiens) CpG-island No: 37334
ctcctattaaaaaaaaacgaaaacatcaccaccaaaaaaataaccactaaaaaccctcgccgacacctactaacaaccaaaaacgcttccgaaaatctacgaaccgacctttaactcaacacaaacctcccaaaccctacgaccttaaaacaacgcccacccgacgaatacgccgttcccgccacctccacgcctacctaaacccgaactcgaaaccctaacgacgaacgaactccctccgcctaaacaaaaacgcgacgaacgcatcccacgaccctcgacaaccgttacaaacctaacgaacctacaccccacaccctcacgaccgcgttcccgccgcgaaacaaaacgaaacccacgacgcctacgcactcaataaccgaaccgccctaacctccgtacgcacgcaacaccacgtaacccactaccaatatccaaaataaacgccgcgcgaaaacctaaccgactccccgcgttaacctacaccccattatataccctctaaacgcgaattaaactcgcaaacatacgatactaaccgctaaacaaccatacgaactaccgaatacgaccgaacacgccgaaacccgtatttacgaccactactaacccccgatccctacg

SEQ ID NO: 37335 - DNA, 624 bp, Artificial Sequence
  chemically treated genomic DNA (Homo sapiens) CpG-island No: 37335
tttttgttggaaagaaacggaaatattattattaggagggtggttattgaagattttcgtcgatatttgttggtaattaaaggcgttttcggggatttacgggtcgatttttaatttaatataagttttttaagttttgcggttttaaaataacgtttattcggcgggtgcgtcgttttcgttatttttacgtttgtttggattcggattcgagattttggcggcgggcgggtttttttcgtttgagtagggacgcggcgagcgtattttacgattttcggtagtcgttgtaggtttggcggatttatattttatatttttacggtcgcgttttcgtcgcggggtagggcgaggtttacggcgtttgcgtatttagtgatcgggtcgttttggttttcgtgcgtacgtagtattacgtgatttattgttagtatttaagatggacgtcgcgcggaggtttggtcggtttttcgcgttagtttgtattttattgtatgttttttaagcgcgaattaggttcgtagatatgcggtgttgatcgttaggtagttatgcgggttatcgagtgcgatcggatacgtcggggttcgtgtttacggttattattggttttcggtttttgcg

SEQ ID NO: 37336 - DNA, 624 bp, Artificial Sequence
  chemically treated genomic DNA (Homo sapiens) CpG-island No: 37336
cgcaaaaaccgaaaaccaataataaccgtaaacacgaaccccgacgtatccgatcgcactcgataacccgcataactacctaacgatcaacaccgcatatctacgaacctaattcgcgcttaaaaaacatacaataaaatacaaactaacgcgaaaaaccgaccaaacctccgcgcgacgtccatcttaaatactaacaataaatcacgtaatactacgtacgcacgaaaaccaaaacgacccgatcactaaatacgcaaacgccgtaaacctcgccctaccccgcgacgaaaacgcgaccgtaaaaatataaaatataaatccgccaaacctacaacgactaccgaaaatcgtaaaatacgctcgccgcgtccctactcaaacgaaaaaaacccgcccgccgccaaaatctcgaatccgaatccaaacaaacgtaaaaataacgaaaacgacgcacccgccgaataaacgttattttaaaaccgcaaaacttaaaaaacttatattaaattaaaaatcgacccgtaaatccccgaaaacgcctttaattaccaacaaatatcgacgaaaatcttcaataaccaccctcctaataataatatttccgtttctttccaacaaaaa

SEQ ID NO: 37337 - DNA, 521 bp, Artificial Sequence
  chemically treated genomic DNA (Homo sapiens) CpG-island No: 37337
  unsure (28..29, 31, 49..50, 363..)
ttgcgtttattgtcgtcgtttaggtcgnnnnttagcgtgttgtgtgcgnntatggcgaagtgttcgttagcgcggtagtatgtttcgggcgcgcgtaggaaggtttcgagcgaggcgttgggtacgcgtcggaaggtcgggtagtattggttgtagtagttgaagagcgattcgaatatggcggtcggttcgcgtaggatggtgatatagacggtgttgggcggtatgaggcgttttagtttcgtacggtcgaagcgtaggtggttggttagtacgtgcggcggtcgcgtggtcgggtgtacgaagtgcgtcgagaagttgcgggggtagtagaattggtgttcgtagttcgggtgcggtagnnttatcgttaggttgtggcgttcggtaaagcgaaataggatgttttgtatcgtcgtgtttgtcgttttgtgagtttttaggaaggttatagttatgtgtttggggcgcggcggcgagtttcgtagaggagggtagtttaaggggaatagtttggggta

SEQ ID NO: 37338 - DNA, 521 bp, Artificial Sequence
  chemically treated genomic DNA (Homo sapiens) CpG-island No: 37338
  unsure (158..159, 472..473, 491..492, 494)
taccccaaactattccccttaaactaccctcctctacgaaactcgccgccgcgccccaaacacataactataaccttcctaaaaactcacaaaacgacaaacacgacgatacaaaacatcctatttcgctttaccgaacgccacaacctaacgataannctaccgcacccgaactacgaacaccaattctactacccccgcaacttctcgacgcacttcgtacacccgaccacgcgaccgccgcacgtactaaccaaccacctacgcttcgaccgtacgaaactaaaacgcctcataccgcccaacaccgtctatatcaccatcctacgcgaaccgaccgccatattcgaatcgctcttcaactactacaaccaatactacccgaccttccgacgcgtacccaacgcctcgctcgaaaccttcctacgcgcgcccgaaacatactaccgcgctaacgaacacttcgccatanncgcacacaacacgctaannnncgacctaaacgacgacaataaacgcaa

SEQ ID NO: 37339 - DNA, 521 bp, Artificial Sequence
  chemically treated genomic DNA (Homo sapiens) CpG-island No: 37339
  unsure (158..159, 472..473, 491..492, 494)
tattttaagttgttttttttgagttgtttttttttgcggaattcgtcgtcgcgttttaagtatatgattgtggtttttttgaagatttataagacggtaggtacgacggtgtagaatattttgtttcgttttgtcgagcgttataatttgacggtggnnttgtcgtattcgagttgcgagtattagttttgttattttcgtaatttttcggcgtatttcgtgtattcggttacgcggtcgtcgtacgtgttggttagttatttgcgtttcgatcgtgcggagttggagcgttttatgtcgtttagtatcgtttatgttattattttgcgcgagtcggtcgttatgttcgagtcgttttttagttattataattagtattgttcggtttttcggcgcgtgtttaacgtttcgttcgaggtttttttgcgcgcgttcgaggtatattatcgcgttggcgagtatttcgttatgnncgtatataatacgttggnnnncgatttgggcggcgataatgagcgtag

SEQ ID NO: 37340 - DNA, 521 bp, Artificial Sequence
  chemically treated genomic DNA (Homo sapiens) CpG-island No: 37340
  unsure (28..29, 31, 49..50, 363..)
ctacgctcattatcgccgcccaaatcgnnnnccaacgtattatatacgnncataacgaaatactcgccaacgcgataatatacctcgaacgcgcgcaaaaaaacctcgaacgaaacgttaaacacgcgccgaaaaaccgaacaatactaattataataactaaaaaacgactcgaacataacgaccgactcgcgcaaaataataacataaacgatactaaacgacataaaacgctccaactccgcacgatcgaaacgcaaataactaaccaacacgtacgacgaccgcgtaaccgaatacacgaaatacgccgaaaaattacgaaaataacaaaactaatactcgcaactcgaatacgacaannccaccgtcaaattataacgctcgacaaaacgaaacaaaatattctacaccgtcgtacctaccgtcttataaatcttcaaaaaaaccacaatcatatacttaaaacgcgacgacgaattccgcaaaaaaaaacaactcaaaaaaaacaacttaaaata

SEQ ID NO: 37341 - DNA, 528 bp, Artificial Sequence
  chemically treated genomic DNA (Homo sapiens) CpG-island No: 37341
tggtaggtcgcgttgtttttatatatagcgtatagtttttcgttggagggggagtttcgcgacggcggtgagggtatttgcgtgtcgagtagttgagacgcgtggtcgatttgtaggttcgggaagtttatggacgcgggtttgcgaatggggttgggtatagcgaaggtttgttcgtttattacgtggtggttgtcggcgggtttcgggtttatggggacgtgtaggggttcgtcgaagcgtatttggtaattagatatcggggtgttagggggcgattgtttaaaggagaagagggagaggcgggagattggcgtttttttttgttcgattatgtgcgtagtggttacgtagttttggtggaagttgtggagagatttcgggtcgttttatatggggttgtgttgtatttggaagttcggggtggtgggcgtcgggggcgaggagggtttgtagtaaatcgattcggagtgcggtattatttttttagattgggggggtaggtggttgtgttgttggtagttgtgt

SEQ ID NO: 37342 - DNA, 528 bp, Artificial Sequence
  chemically treated genomic DNA (Homo sapiens) CpG-island No: 37342
acacaactaccaacaacacaaccacctacccccccaatctaaaaaaataataccgcactccgaatcgatttactacaaaccctcctcgcccccgacgcccaccaccccgaacttccaaatacaacacaaccccatataaaacgacccgaaatctctccacaacttccaccaaaactacgtaaccactacgcacataatcgaacaaaaaaaaacgccaatctcccgcctctccctcttctcctttaaacaatcgccccctaacaccccgatatctaattaccaaatacgcttcgacgaacccctacacgtccccataaacccgaaacccgccgacaaccaccacgtaataaacgaacaaaccttcgctatacccaaccccattcgcaaacccgcgtccataaacttcccgaacctacaaatcgaccacgcgtctcaactactcgacacgcaaataccctcaccgccgtcgcgaaactccccctccaacgaaaaactatacgctatatataaaaacaacgcgacctacca

SEQ ID NO: 37343 - DNA, 528 bp, Artificial Sequence
  chemically treated genomic DNA (Homo sapiens) CpG-island No: 37343
gtataattattagtaatatagttatttgtttttttagtttgaggagatgatgtcgtatttcgggtcggtttattataagtttttttcgttttcgacgtttattatttcgggtttttaggtgtagtatagttttatgtgggacgattcgggatttttttataatttttattagaattacgtggttattacgtatatgatcgagtagaggaaaacgttagtttttcgtttttttttttttttttttaagtaatcgttttttggtatttcggtgtttagttgttagatgcgtttcgacgggtttttgtacgtttttatgaattcggagttcgtcggtagttattacgtggtggacgggtagattttcgttgtgtttaattttattcgtaagttcgcgtttatgggtttttcgggtttgtagatcggttacgcgttttagttgttcgatacgtaggtgtttttatcgtcgtcgcggggttttttttttaacgaggggttgtgcgttgtgtgtggggataacgcggtttgtta

SEQ ID NO: 37344 - DNA, 528 bp, Artificial Sequence
  chemically treated genomic DNA (Homo sapiens) CpG-island No: 37344
taacaaaccgcgttatccccacacacaacgcacaacccctcgttaaaaaaaaaaccccgcgacgacgataaaaacacctacgtatcgaacaactaaaacgcgtaaccgatctacaaacccgaaaaacccataaacgcgaacttacgaataaaattaaacacaacgaaaatctacccgtccaccacgtaataactaccgacgaactccgaattcataaaaacgtacaaaaacccgtcgaaacgcatctaacaactaaacaccgaaataccaaaaaacgattacttaaaaaaaaaaaaaaaaaaacgaaaaactaacgttttcctctactcgatcatatacgtaataaccacgtaattctaataaaaattataaaaaaatcccgaatcgtcccacataaaactatactacacctaaaaacccgaaataataaacgtcgaaaacgaaaaaaacttataataaaccgacccgaaatacgacatcatctcctcaaactaaaaaaacaaataactatattactaataattatac

SEQ ID NO: 37345 - DNA, 561 bp, Artificial Sequence
  chemically treated genomic DNA (Homo sapiens) CpG-island No: 37345
cgattttcgtattttaggaagtttttaaaattcgcgttagttttttttttcgtagggcgggggcgtttacggcgcgaattcgttagaggtgtagggggaagtgtggggggttggttcgtagttttcgaggggtggggcgataggagcgagcggtcgggggaggagaaaaaggcgggcggcgggagagggggtttttattatttcggtttttcgggaggagttttatttagttagttacgtagaagtttttttttcgtttttcgcgttatatatttagattggtttttagcgcgtaggcgagtggggcgaaggaggggggataggagtttcggaagggtcgttcggcgtttatatttatttttgtttcgtttttttcgttttaaataaagtttttcgattttaggtttaggatacgttatttgttcggcgttttcggtttttcggttatcgtatttttcgttgggcgcgtttggtacgggtttcgtttttcggggtttataaagtggtcgtttttggttgggcggttgggtagatgtttttttttggatatgttggggcggt

SEQ ID NO: 37346 - DNA, 561 bp, Artificial Sequence
  chemically treated genomic DNA (Homo sapiens) CpG-island No: 37346
accgccccaacatatccaaaaaaaaacatctacccaaccgcccaaccaaaaacgaccactttataaaccccgaaaaacgaaacccgtaccaaacgcgcccaacgaaaaatacgataaccgaaaaaccgaaaacgccgaacaaataacgtatcctaaacctaaaatcgaaaaactttatttaaaacgaaaaaaacgaaacaaaaataaatataaacgccgaacgacccttccgaaactcctatcccccctccttcgccccactcgcctacgcgctaaaaaccaatctaaatatataacgcgaaaaacgaaaaaaaaacttctacgtaactaactaaataaaactcctcccgaaaaaccgaaataataaaaaccccctctcccgccgcccgcctttttctcctcccccgaccgctcgctcctatcgccccacccctcgaaaactacgaaccaaccccccacacttccccctacacctctaacgaattcgcgccgtaaacgcccccgccctacgaaaaaaaaaactaacgcgaattttaaaaacttcctaaaatacgaaaatcg

SEQ ID NO: 37347 - DNA, 561 bp, Artificial Sequence
  chemically treated genomic DNA (Homo sapiens) CpG-island No: 37347
atcgttttaatatgtttagagaggggtatttatttagtcgtttagttaggggcgattattttgtgagtttcggggagcgggattcgtattaggcgcgtttagcgggggatgcggtgatcgaggggtcgggagcgtcgggtaggtaacgtattttggatttagagtcgggggattttgtttggggcgggaggagcggaataggggtgggtgtgaacgtcggacggttttttcgggatttttgttttttttttttcgttttattcgtttgcgcgttggaagttaatttgggtgtgtagcgcgaagagcgaaagagaaatttttgcgtgattgattagatgaggtttttttcgagaagtcgagataatagaggttttttttttcgtcgttcgttttttttttttttttcggtcgttcgtttttgtcgttttatttttcgaaggttgcggattagttttttatatttttttttatatttttggcgggttcgcgtcgtggacgttttcgttttgcgggaggaggggttggcgcggattttagggattttttgggatgcggagatcg

SEQ ID NO: 37348 - DNA, 561 bp, Artificial Sequence
  chemically treated genomic DNA (Homo sapiens) CpG-island No: 37348
cgatctccgcatcccaaaaaatccctaaaatccgcgccaacccctcctcccgcaaaacgaaaacgtccacgacgcgaacccgccaaaaatataaaaaaaaatataaaaaactaatccgcaaccttcgaaaaataaaacgacaaaaacgaacgaccgaaaaaaaaaaaaaaaacgaacgacgaaaaaaaaaacctctattatctcgacttctcgaaaaaaacctcatctaatcaatcacgcaaaaatttctctttcgctcttcgcgctacacacccaaattaacttccaacgcgcaaacgaataaaacgaaaaaaaaaaaacaaaaatcccgaaaaaaccgtccgacgttcacacccacccctattccgctcctcccgccccaaacaaaatcccccgactctaaatccaaaatacgttacctacccgacgctcccgacccctcgatcaccgcatcccccgctaaacgcgcctaatacgaatcccgctccccgaaactcacaaaataatcgcccctaactaaacgactaaataaatacccctctctaaacatattaaaacgat

SEQ ID NO: 37349 - DNA, 598 bp, Artificial Sequence
  chemically treated genomic DNA (Homo sapiens) CpG-island No: 37349
tcgcggtcgattaagaagggagtcggggagtcgttcgtttttttttttcggttttcggttttcggttttcggcggttgcggtagttgtatatagaagtttattgtcgtcggcgttcggcgcgtagtttcgcggattcggtttcgcggttaagcgcgttagcggtttcgttagtcgggtcgggtttcgtgacgcgcgcgtagttcgcgttataaataatttgtcgtcgggcggttcgggcggttttttagtgacgttggggcggaggcgcggtaggaggagggcgaaaggaaataataaaatcgttcggtagttttttaagttttttttttttttttttaggtcgttcgcggtttttcgcgtcgagttttttttttttcgtttcggttcgttttgcggggagcgcggttcgcgggtgggaaggagttcggcgtgttggcgttttcgagtgttgtcggggtttcggggcgggagggggtttttttcgtattttgggatggcgaggagggaatttggcgataagtttagtgaggggatcgttgtgtttttttttagtttagttaaaatgattcgagtttttttcgtttttttatatattta

SEQ ID NO: 37350 - DNA, 598 bp, Artificial Sequence
  chemically treated genomic DNA (Homo sapiens) CpG-island No: 37350
taaatatataaaaaaacgaaaaaaactcgaatcattttaactaaactaaaaaaaaacacaacgatcccctcactaaacttatcgccaaattccctcctcgccatcccaaaatacgaaaaaaaccccctcccgccccgaaaccccgacaacactcgaaaacgccaacacgccgaactccttcccacccgcgaaccgcgctccccgcaaaacgaaccgaaacgaaaaaaaaaaaactcgacgcgaaaaaccgcgaacgacctaaaaaaaaaaaaaaaaaacttaaaaaactaccgaacgattttattatttcctttcgccctcctcctaccgcgcctccgccccaacgtcactaaaaaaccgcccgaaccgcccgacgacaaattatttataacgcgaactacgcgcgcgtcacgaaacccgacccgactaacgaaaccgctaacgcgcttaaccgcgaaaccgaatccgcgaaactacgcgccgaacgccgacgacaataaacttctatatacaactaccgcaaccgccgaaaaccgaaaaccgaaaaccgaaaaaaaaaaacgaacgactccccgactcccttcttaatcgaccgcga

SEQ ID NO: 37351 - DNA, 598 bp, Artificial Sequence
  chemically treated genomic DNA (Homo sapiens) CpG-island No: 37351
taggtgtgtgagggagcgggaaaagttcgggttattttaattggattagaaaggaatatagcgatttttttattaaatttgtcgttaagtttttttttcgttattttagggtgcgggaaaaattttttttcgtttcggggtttcggtagtattcggggacgttagtacgtcgggtttttttttattcgcgaatcgcgtttttcgtagggcgggtcggggcggggaaaaaggagttcgacgcgaagggtcgcgggcggtttgggaagggaggagggagatttgggaggttgtcgggcggttttattgttttttttcgttttttttttatcgcgttttcgttttagcgttattggaaagtcgttcgagtcgttcggcggtaggttatttatagcgcgggttgcgcgcgcgttacggagttcggttcggttgacggggtcgttgacgcgtttggtcgcggggtcgagttcgcggggttgcgcgtcggacgtcggcgataatgggtttttgtgtgtagttgtcgtagtcgtcgggggtcgggggtcgggggtcgggggaggggggcgggcgatttttcggttttttttttggtcggtcgcga

SEQ ID NO: 37352 - DNA, 598 bp, Artificial Sequence
  chemically treated genomic DNA (Homo sapiens) CpG-island No: 37352
tcgcgaccgaccaaaaaaaaaaccgaaaaatcgcccgcccccctcccccgacccccgacccccgacccccgacgactacgacaactacacacaaaaacccattatcgccgacgtccgacgcgcaaccccgcgaactcgaccccgcgaccaaacgcgtcaacgaccccgtcaaccgaaccgaactccgtaacgcgcgcgcaacccgcgctataaataacctaccgccgaacgactcgaacgactttccaataacgctaaaacgaaaacgcgataaaaaaaaaacgaaaaaaaacaataaaaccgcccgacaacctcccaaatctccctcctcccttcccaaaccgcccgcgacccttcgcgtcgaactcctttttccccgccccgacccgccctacgaaaaacgcgattcgcgaataaaaaaaaacccgacgtactaacgtccccgaatactaccgaaaccccgaaacgaaaaaaaatttttcccgcaccctaaaataacgaaaaaaaaacttaacgacaaatttaataaaaaaatcgctatattcctttctaatccaattaaaataacccgaacttttcccgctccctcacacaccta

SEQ ID NO: 37353 - DNA, 979 bp, Artificial Sequence
  chemically treated genomic DNA (Homo sapiens) CpG-island No: 37353
  unsure (451..)
ttggtaggcgtttaatttaggttgggtgatattttcgttcgttagtttttggtattagtgagtgtttcgttaatgtttgataaacggttgattttattgttttcgttgtgggcgtattagatttcgggggcgcgtttaggtttcgtttaattttttaggtttaggattcgcggcgtaagggaacgtcgggcggggtgttttgggggcggggtttggggtggggttgcggatcgaggggcggagtcggtcgtttcggggtttttagttcgtttcgggagagttagggtttcgagtcgagcgcgcggagtagttggggtcggggcgcggatgttggaagtttatatttcgtcggtggggtcgagtcgaggggtttagtagagttcggagaaaagttatatggtgagcgcggtttttggatggggaggggcgtcgggattcgtaggattttttnntcggcgtttagtggggatcggggtttcgggtttgggtgaacgagcgttgcgggttggatcgtcgggggaaattttgtcgagggtttgggggtcgtttggatttgttagttcgcggattatggttcgagtttttgagggattttagggtttcgaggggtaggttcgttagtcggtttttttaggtgtgcgggagcggagagttttcgggtagtcgcggcgtcgtaaggtcgttttgtgtttttgagagcgggagggtgggtacgtcgttaggcgtaggtgttgcggcgttttttcgcggggttttacgcgtagattcgttgttcgttcgcgtcgttaggtgtttcgagtggaggtgttgtgtagcgggcgtagatatacggtgttaaggcgttatagcgagttttacgcgttgtataagcgggtgaggcggcgtcgattttttatcggtttcggtttagtttttgtttagttttcgtttaggttttgtgaggcgggcgggcgagttttagttttcgttatttttatta

SEQ ID NO: 37354 - DNA, 979 bp, Artificial Sequence
  chemically treated genomic DNA (Homo sapiens) CpG-island No: 37354
  unsure (528..)
taataaaaataacgaaaactaaaactcgcccgcccgcctcacaaaacctaaacgaaaactaaacaaaaactaaaccgaaaccgataaaaaatcgacgccgcctcacccgcttatacaacgcgtaaaactcgctataacgccttaacaccgtatatctacgcccgctacacaacacctccactcgaaacacctaacgacgcgaacgaacaacgaatctacgcgtaaaaccccgcgaaaaaacgccgcaacacctacgcctaacgacgtacccaccctcccgctctcaaaaacacaaaacgaccttacgacgccgcgactacccgaaaactctccgctcccgcacacctaaaaaaaccgactaacgaacctacccctcgaaaccctaaaatccctcaaaaactcgaaccataatccgcgaactaacaaatccaaacgacccccaaaccctcgacaaaatttcccccgacgatccaacccgcaacgctcgttcacccaaacccgaaaccccgatccccactaaacgccgannaaaaaatcctacgaatcccgacgcccctccccatccaaaaaccgcgctcaccatataacttttctccgaactctactaaacccctcgactcgaccccaccgacgaaatataaacttccaacatccgcgccccgaccccaactactccgcgcgctcgactcgaaaccctaactctcccgaaacgaactaaaaaccccgaaacgaccgactccgcccctcgatccgcaaccccaccccaaaccccgcccccaaaacaccccgcccgacgttcccttacgccgcgaatcctaaacctaaaaaattaaacgaaacctaaacgcgcccccgaaatctaatacgcccacaacgaaaacaataaaatcaaccgtttatcaaacattaacgaaacactcactaataccaaaaactaacgaacgaaaatatcacccaacctaaattaaacgcctaccaa

SEQ ID NO: 37355 - DNA, 979 bp, Artificial Sequence
  chemically treated genomic DNA (Homo sapiens) CpG-island No: 37355
  unsure (528..)
taatgggggtggcggaggttggggttcgttcgttcgttttatagggtttgggcgggggttggatagaggttgggtcggggtcggtgggaggtcggcgtcgttttattcgtttgtgtagcgcgtggaattcgttgtagcgttttggtatcgtgtgtttgcgttcgttgtatagtatttttattcggaatatttggcggcgcgggcgggtagcgggtttgcgcgtgaggtttcgcgggaggacgtcgtagtatttgcgtttggcgacgtgtttattttttcgtttttaaaggtataaagcggttttgcggcgtcgcggttgttcggggatttttcgttttcgtatatttgggagaatcggttggcggatttgtttttcggagttttggggttttttaagagttcgaattatggttcgcgagttggtaaatttaagcggtttttaaattttcgataaggtttttttcgacggtttagttcgtagcgttcgtttatttaggttcggggtttcggtttttattgagcgtcggnngggaaattttgcgggtttcggcgtttttttttatttaggggtcgcgtttattatgtggttttttttcgggttttgttgggtttttcggttcggttttatcgacgggatgtgaatttttagtattcgcgtttcggttttagttgtttcgcgcgttcggttcggagttttaattttttcggagcggattgaggatttcggggcggtcggtttcgtttttcggttcgtagttttattttaggtttcgtttttagggtatttcgttcggcgtttttttgcgtcgcgggttttgagtttagaagattaggcgggatttggacgcgttttcgaagtttagtgcgtttatagcgggggtagtggagttaatcgtttgttaaatattgacggagtatttattgatgttaggaattggcgagcgaaaatgttatttaatttgagttaagcgtttattaa

SEQ ID NO: 37356 - DNA, 979 bp, Artificial Sequence
  chemically treated genomic DNA (Homo sapiens) CpG-island No: 37356
  unsure (451..)
ttaataaacgcttaactcaaattaaataacattttcgctcgccaattcctaacatcaataaatactccgtcaatatttaacaaacgattaactccactacccccgctataaacgcactaaacttcgaaaacgcgtccaaatcccgcctaatcttctaaactcaaaacccgcgacgcaaaaaaacgccgaacgaaataccctaaaaacgaaacctaaaataaaactacgaaccgaaaaacgaaaccgaccgccccgaaatcctcaatccgctccgaaaaaattaaaactccgaaccgaacgcgcgaaacaactaaaaccgaaacgcgaatactaaaaattcacatcccgtcgataaaaccgaaccgaaaaacccaacaaaacccgaaaaaaaaccacataataaacgcgacccctaaataaaaaaaaacgccgaaacccgcaaaatttcccnnccgacgctcaataaaaaccgaaaccccgaacctaaataaacgaacgctacgaactaaaccgtcgaaaaaaaccttatcgaaaatttaaaaaccgcttaaatttaccaactcgcgaaccataattcgaactcttaaaaaaccccaaaactccgaaaaacaaatccgccaaccgattctcccaaatatacgaaaacgaaaaatccccgaacaaccgcgacgccgcaaaaccgctttatacctttaaaaacgaaaaaataaacacgtcgccaaacgcaaatactacgacgtcctcccgcgaaacctcacgcgcaaacccgctacccgcccgcgccgccaaatattccgaataaaaatactatacaacgaacgcaaacacacgataccaaaacgctacaacgaattccacgcgctacacaaacgaataaaacgacgccgacctcccaccgaccccgacccaacctctatccaacccccgcccaaaccctataaaacgaacgaacgaaccccaacctccgccacccccatta

SEQ ID NO: 37357 - DNA, 520 bp, Artificial Sequence
  chemically treated genomic DNA (Homo sapiens) CpG-island No: 37357
atttgttgcgtagttttagttggtcgggtgttttttcgtttttagcgtttaagtttcgtttttaggttttcgtttttcggattttacggggttttttgcggtttttttatttttcgtatcgttggatcgttttgtttacggcgttatttttcgataaagttgttgttgcggttttcgtcgcgggtggaagaagatggcgtcgggtggtggtggttgtagcgtttcggagagattgttttcgttttttttcggtttggagtcggagttcgagggggcggtcgggggattagaattcgaggttggggatagcgatatcgagggggaggatatttttatcggcgtcgcggtggtcgtgagtttgtatttttcggggtagtaggcgggagggtatttcgaaagggaagagaggttaagcgagaatcggggaggttgggtagagtgggttcggtgagattttgtttcggtgttagtagttcgggtttcggggattttggatgtgttcgaagcggtagagtttggt

SEQ ID NO: 37358 - DNA, 520 bp, Artificial Sequence
  chemically treated genomic DNA (Homo sapiens) CpG-island No: 37358
accaaactctaccgcttcgaacacatccaaaatccccgaaacccgaactactaacaccgaaacaaaatctcaccgaacccactctacccaacctccccgattctcgcttaacctctcttccctttcgaaataccctcccgcctactaccccgaaaaatacaaactcacgaccaccgcgacgccgataaaaatatcctccccctcgatatcgctatccccaacctcgaattctaatcccccgaccgccccctcgaactccgactccaaaccgaaaaaaaacgaaaacaatctctccgaaacgctacaaccaccaccacccgacgccatcttcttccacccgcgacgaaaaccgcaacaacaactttatcgaaaaataacgccgtaaacaaaacgatccaacgatacgaaaaataaaaaaaccgcaaaaaaccccgtaaaatccgaaaaacgaaaacctaaaaacgaaacttaaacgctaaaaacgaaaaaacacccgaccaactaaaactacgcaacaaat

SEQ ID NO: 37359 - DNA, 520 bp, Artificial Sequence
  chemically treated genomic DNA (Homo sapiens) CpG-island No: 37359
gttaagttttatcgtttcgagtatatttagggttttcggggttcggattgttgatatcgaggtaaggttttatcgggtttattttgtttaattttttcgattttcgtttagttttttttttttttcggggtgttttttcgtttgttatttcgaggggtgtaaatttacgattatcgcggcgtcggtgaaaatgttttttttttcggtgtcgttgtttttagtttcgggttttgatttttcggtcgttttttcggatttcggttttaggtcggggaagggcggaggtagttttttcgaagcgttatagttattattattcgacgttatttttttttattcgcggcggaagtcgtaataataattttatcgagagatagcgtcgtgagtaaagcgatttaacggtgcgaggagtgggagggtcgtaagggatttcgtgggattcgaggggcggagatttaggggcggggtttaggcgttgggggcgggggggtattcggttagttgaggttgcgtagtaaat

SEQ ID NO: 37360 - DNA, 520 bp, Artificial Sequence
  chemically treated genomic DNA (Homo sapiens) CpG-island No: 37360
atttactacgcaacctcaactaaccgaatacccccccgcccccaacgcctaaaccccgcccctaaatctccgcccctcgaatcccacgaaatcccttacgaccctcccactcctcgcaccgttaaatcgctttactcacgacgctatctctcgataaaattattattacgacttccgccgcgaataaaaaaaaataacgtcgaataataataactataacgcttcgaaaaaactacctccgcccttccccgacctaaaaccgaaatccgaaaaaacgaccgaaaaatcaaaacccgaaactaaaaacaacgacaccgaaaaaaaaaacattttcaccgacgccgcgataatcgtaaatttacacccctcgaaataacaaacgaaaaaacaccccgaaaaaaaaaaaaaactaaacgaaaatcgaaaaaattaaacaaaataaacccgataaaaccttacctcgatatcaacaatccgaaccccgaaaaccctaaatatactcgaaacgataaaacttaac

SEQ ID NO: 37361 - DNA, 616 bp, Artificial Sequence
  chemically treated genomic DNA (Homo sapiens) CpG-island No: 37361
  unsure (532, 570..)
tcggtatcgtaaatgtcgcggattttatcggattttgacggtgattttgggtttttttttttttttatcggtcgtagaaggtttcggtagtagtaggaagaagacggatttcgcgatgagggcggcggtaaggagtatttttatgttgcgttcggagaggcgtagtatttataggcggaggcgaaagtagttcggatagttgaggtcggaagagggtggggtcgcggtggttagggagtcggcgtttacgcgcgggtgggggggattggggttgttcgcgggtttcgggcgggcggcgggtcgtttttttttttcggttcggcgtcggatagtaggtttttttgcggggcgggtatcgacgcgggttcgtgggtggttgttacgttattgtttttttattgggttttcggtcgttttttttcgtttataggaaggttatcggcggaaggcggtttcgtagagtacgggttcgggtttcgagaagattataagtttcggtatgtttcgcggttcgtttcgttcggagcgttgntttattggtttgcggtagttggcgtttggggttagtannttcgtgggtttggataaggggtacgggaagtttgttattgttttg

SEQ ID NO: 37362 - DNA, 616 bp, Artificial Sequence
  chemically treated genomic DNA (Homo sapiens) CpG-island No: 37362
  unsure (46..47, 85)
caaaacaataacaaacttcccgtaccccttatccaaacccacgaanntactaaccccaaacgccaactaccgcaaaccaataaancaacgctccgaacgaaacgaaccgcgaaacataccgaaacttataatcttctcgaaacccgaacccgtactctacgaaaccgccttccgccgataaccttcctataaacgaaaaaaaacgaccgaaaacccaataaaaaaacaataacgtaacaaccacccacgaacccgcgtcgatacccgccccgcaaaaaaacctactatccgacgccgaaccgaaaaaaaaaaacgacccgccgcccgcccgaaacccgcgaacaaccccaatcccccccacccgcgcgtaaacgccgactccctaaccaccgcgaccccaccctcttccgacctcaactatccgaactactttcgcctccgcctataaatactacgcctctccgaacgcaacataaaaatactccttaccgccgccctcatcgcgaaatccgtcttcttcctactactaccgaaaccttctacgaccgataaaaaaaaaaaaaaacccaaaatcaccgtcaaaatccgataaaatccgcgacatttacgataccga

SEQ ID NO: 37363 - DNA, 616 bp, Artificial Sequence
  chemically treated genomic DNA (Homo sapiens) CpG-island No: 37363
  unsure (46..47, 85)
taaaatagtgataagtttttcgtgttttttgtttaggtttacgganntgttaattttaagcgttagttatcgtaggttagtggantagcgtttcgggcggggcgggtcgcggagtatgtcggggtttgtggttttttcggagttcgggttcgtgttttgcgaggtcgtttttcgtcggtggtttttttgtgggcgggagagggcggtcgggagtttaatgagggagtaataacgtggtaattatttacgagttcgcgtcggtgttcgtttcgtagggggatttattattcggcgtcgagtcggaggggggaaacggttcgtcgttcgttcggagttcgcgagtaattttagttttttttattcgcgcgtgggcgtcggttttttagttatcgcggttttattttttttcggttttagttgttcgggttgttttcgttttcgtttgtggatgttgcgttttttcgaacgtaatatgaaggtgttttttgtcgtcgtttttatcgcggggttcgttttttttttgttgttgtcgggattttttgcggtcgatgagaagaagaaggggtttaaagttatcgttaaggttcggtggagttcgcggtatttacggtgtcgg

SEQ ID NO: 37364 - DNA, 616 bp, Artificial Sequence
  chemically treated genomic DNA (Homo sapiens) CpG-island No: 37364
  unsure (532, 570..)
ccgacaccgtaaataccgcgaactccaccgaaccttaacgataactttaaaccccttcttcttctcatcgaccgcaaaaaatcccgacaacaacaaaaaaaaaacgaaccccgcgataaaaacgacgacaaaaaacaccttcatattacgttcgaaaaaacgcaacatccacaaacgaaaacgaaaacaacccgaacaactaaaaccgaaaaaaaataaaaccgcgataactaaaaaaccgacgcccacgcgcgaataaaaaaaactaaaattactcgcgaactccgaacgaacgacgaaccgtttcccccctccgactcgacgccgaataataaatccccctacgaaacgaacaccgacgcgaactcgtaaataattaccacgttattactccctcattaaactcccgaccgccctctcccgcccacaaaaaaaccaccgacgaaaaacgacctcgcaaaacacgaacccgaactccgaaaaaaccacaaaccccgacatactccgcgacccgccccgcccgaaacgctantccactaacctacgataactaacgcttaaaattaacanntccgtaaacctaaacaaaaaacacgaaaaacttatcactatttta

SEQ ID NO: 37365 - DNA, 603 bp, Artificial Sequence
  chemically treated genomic DNA (Homo sapiens) CpG-island No: 37365
gggcgaatattgcgtttgcgtatttttcgtagtcggatttatttatagcgtttgcgttacgtgatttcgatttattttcgaggttttagtggaataatttttttttgaaaaatggttttattcgtttcgtttttagaacgggtcgggtcgttattattgttcggttcggaggggaattgtttttttcggaagtgataatacgttgattaggaaaaggaggaggcggggtagtggggttttcggcggcgattatggaaggagtcggttatagggtaagtattgaggacgtattttttcgttttagtgtatgcgaaacgtttcgtttagtgattagttttttttttaggttttggttttcgagaattcggtacggttttggtaaatatcgattttttataaacgcgtcgttattttttcgtttatcgttttagggaagaattttttatggtttcgttttttcggtttaggcgattttttgagttttgttttttgtggaacgtacgttagtattcgaacgcgggttggattatttttttcgttttggtttcggggtaatggttttttcggtttcgttttttgagggtggtttttttttgggttcgt

SEQ ID NO: 37366 - DNA, 603 bp, Artificial Sequence
  chemically treated genomic DNA (Homo sapiens) CpG-island No: 37366
acgaacccaaaaaaaaaccaccctcaaaaaacgaaaccgaaaaaaccattaccccgaaaccaaaacgaaaaaaataatccaacccgcgttcgaatactaacgtacgttccacaaaaaacaaaactcaaaaaatcgcctaaaccgaaaaaacgaaaccataaaaaattcttccctaaaacgataaacgaaaaaataacgacgcgtttataaaaaatcgatatttaccaaaaccgtaccgaattctcgaaaaccaaaacctaaaaaaaaaactaatcactaaacgaaacgtttcgcatacactaaaacgaaaaaatacgtcctcaatacttaccctataaccgactccttccataatcgccgccgaaaaccccactaccccgcctcctccttttcctaatcaacgtattatcacttccgaaaaaaacaattcccctccgaaccgaacaataataacgacccgacccgttctaaaaacgaaacgaataaaaccatttttcaaaaaaaaattattccactaaaacctcgaaaataaatcgaaatcacgtaacgcaaacgctataaataaatccgactacgaaaaatacgcaaacgcaatattcgccc

SEQ ID NO: 37367 - DNA, 603 bp, Artificial Sequence
  chemically treated genomic DNA (Homo sapiens) CpG-island No: 37367
acgggtttagggaggagttatttttagggggcggggtcgggagggttattgtttcgggattaaggcggggagaatggtttagttcgcgttcggatgttgacgtgcgttttatagggggtagggtttaaggagtcgtttgagtcgggggggcggggttatgggaggtttttttttggggcggtggacgggagggtgacggcgcgtttataagagatcggtgtttgttaaggtcgtgtcggattttcgagagttaaggtttgagagaagagttgattattagacggggcgtttcgtatatattgaagcgagggaatgcgtttttagtgtttattttgtagtcggttttttttatagtcgtcgtcgaaggttttattgtttcgtttttttttttttttagttagcgtgttgttattttcggagaaaatagttttttttcgggtcggatagtggtagcggttcgattcgttttagagacggagcgggtgaaattattttttagaagggggttattttattggaatttcgagggtggatcggagttacgtggcgtagacgttgtaggtggattcggttacggagagtgcgtaggcgtagtgttcgttt

SEQ ID NO: 37368 - DNA, 603 bp, Artificial Sequence
  chemically treated genomic DNA (Homo sapiens) CpG-island No: 37368
aaacgaacactacgcctacgcactctccgtaaccgaatccacctacaacgtctacgccacgtaactccgatccaccctcgaaattccaataaaataacccccttctaaaaaataatttcacccgctccgtctctaaaacgaatcgaaccgctaccactatccgacccgaaaaaaaactattttctccgaaaataacaacacgctaactaaaaaaaaaaaaaaacgaaacaataaaaccttcgacgacgactataaaaaaaaccgactacaaaataaacactaaaaacgcattccctcgcttcaatatatacgaaacgccccgtctaataatcaactcttctctcaaaccttaactctcgaaaatccgacacgaccttaacaaacaccgatctcttataaacgcgccgtcaccctcccgtccaccgccccaaaaaaaaacctcccataaccccgcccccccgactcaaacgactccttaaaccctaccccctataaaacgcacgtcaacatccgaacgcgaactaaaccattctccccgccttaatcccgaaacaataaccctcccgaccccgccccctaaaaataactcctccctaaacccgt

SEQ ID NO: 37369 - DNA, 785 bp, Artificial Sequence
  chemically treated genomic DNA (Homo sapiens) CpG-island No: 37369
tcgcgcgcgttgttgagttcgttgttcgggtttgtgttgttgaacgcgttcgtggtggcgatgatttagggatcgtacgatgtgtacgtgtagatcgagatttttttttcggcgcggaatttgaaggtgttgaaggtcgacgtggtgttgttgacggcgagcggatcggcggtgaagcgtattattttttcgtcgtcgttgtttcgttatatgtaggaggcgttgcggaggttgtattacgtgtcggttattaaggtgtttttaagttttcgtaggtttttttggcgcgaggagtatattgaaggcggttatttaaatatcgatcgttcgtcgcgtatgattttttattcgtcgtcgcgcgagggcgcgttgttgttggtttcgtatacgtggtcggacgcggcggtagcgttcgtcggtttgagtcgggaagaggcgttgcgtttggcgttcgacgacgtggcggtattgtacgggtttgtcgtgcgttagttttgggacggtatcggcgtcgttaagcgttgggcggaggattagtatagttagggtggttttgtggtatagtcgtcggcgttttggtaaatcgaaaaggatgattggacggttttttatggtcgtatttattttgtcggcgagtatatcgtttattcgtacggttgggtggagacggcggttaagtcggcgttgcgcgtcgttattaagattaatagtcggaaggggtttgtatcggatacggttagtttcgaggggtacgtatttgatatggaggggtaggggtatgtgta

SEQ ID NO: 37370 - DNA, 785 bp, Artificial Sequence
  chemically treated genomic DNA (Homo sapiens) CpG-island No: 37370
tacacatacccctacccctccatatcaaatacgtacccctcgaaactaaccgtatccgatacaaaccccttccgactattaatcttaataacgacgcgcaacgccgacttaaccgccgtctccacccaaccgtacgaataaacgatatactcgccgacaaaataaatacgaccataaaaaaccgtccaatcatccttttcgatttaccaaaacgccgacgactataccacaaaaccaccctaactatactaatcctccgcccaacgcttaacgacgccgataccgtcccaaaactaacgcacgacaaacccgtacaataccgccacgtcgtcgaacgccaaacgcaacgcctcttcccgactcaaaccgacgaacgctaccgccgcgtccgaccacgtatacgaaaccaacaacaacgcgccctcgcgcgacgacgaataaaaaatcatacgcgacgaacgatcgatatttaaataaccgccttcaatatactcctcgcgccaaaaaaacctacgaaaacttaaaaacaccttaataaccgacacgtaatacaacctccgcaacgcctcctacatataacgaaacaacgacgacgaaaaaataatacgcttcaccgccgatccgctcgccgtcaacaacaccacgtcgaccttcaacaccttcaaattccgcgccgaaaaaaaaatctcgatctacacgtacacatcgtacgatccctaaatcatcgccaccacgaacgcgttcaacaacacaaacccgaacaacgaactcaacaacgcgcgcga

SEQ ID NO: 37371 - DNA, 785 bp, Artificial Sequence
  chemically treated genomic DNA (Homo sapiens) CpG-island No: 37371
tgtatatgtttttgtttttttatgttagatgcgtgtttttcggggttggtcgtgttcgatgtaggtttttttcggttgttgattttgatggcggcgcgtagcgtcgatttgatcgtcgtttttatttagtcgtgcgggtaggcggtgtgttcgtcggtaaagtagatgcggttataagggatcgtttagttatttttttcggtttgttagagcgtcggcggttgtattataaagttattttggttgtgttggtttttcgtttaacgtttgacgacgtcggtgtcgttttagagttggcgtacgataggttcgtgtaatgtcgttacgtcgtcgagcgttaagcgtaacgttttttttcggtttaagtcggcgaacgttgtcgtcgcgttcgattacgtgtacgaggttagtagtagcgcgttttcgcgcggcggcgggtagaaaattatgcgcgacgggcgatcggtgtttgagtggtcgtttttaatgtgtttttcgcgttagaagggtttgcggaagtttaggaatattttggtggtcggtacgtagtgtagttttcgtagcgttttttgtatgtggcggggtagcggcggcgagaaggtgatgcgttttatcgtcggttcgttcgtcgttagtagtattacgtcggtttttagtatttttagatttcgcgtcgggggagaggtttcgatttgtacgtgtatatcgtgcggtttttgggttatcgttattacgggcgcgtttaatagtataagttcggatagcgagtttagtagcgcgcgcgg

SEQ ID NO: 37372 - DNA, 785 bp, Artificial Sequence
  chemically treated genomic DNA (Homo sapiens) CpG-island No: 37372
ccgcgcgcgctactaaactcgctatccgaacttatactattaaacgcgcccgtaataacgataacccaaaaaccgcacgatatacacgtacaaatcgaaacctctcccccgacgcgaaatctaaaaatactaaaaaccgacgtaatactactaacgacgaacgaaccgacgataaaacgcatcaccttctcgccgccgctaccccgccacatacaaaaaacgctacgaaaactacactacgtaccgaccaccaaaatattcctaaacttccgcaaacccttctaacgcgaaaaacacattaaaaacgaccactcaaacaccgatcgcccgtcgcgcataattttctacccgccgccgcgcgaaaacgcgctactactaacctcgtacacgtaatcgaacgcgacgacaacgttcgccgacttaaaccgaaaaaaaacgttacgcttaacgctcgacgacgtaacgacattacacgaacctatcgtacgccaactctaaaacgacaccgacgtcgtcaaacgttaaacgaaaaaccaacacaaccaaaataactttataatacaaccgccgacgctctaacaaaccgaaaaaaataactaaacgatcccttataaccgcatctactttaccgacgaacacaccgcctacccgcacgactaaataaaaacgacgatcaaatcgacgctacgcgccgccatcaaaatcaacaaccgaaaaaaacctacatcgaacacgaccaaccccgaaaaacacgcatctaacataaaaaaacaaaaacatataca

SEQ ID NO: 37373 - DNA, 566 bp, Artificial Sequence
  chemically treated genomic DNA (Homo sapiens) CpG-island No: 37373
aggggggcggggagtgggcgcggacggttttacgcgtcgggggagggggcgtttcgcgggtcggggggcgggcgtttggttttgcgtggggcggggcggtttttatttgttcgcgcgttggttttcgtttttttcgcgcggttttagtttttcgtgcgttcgtttttttttttttttttttttttcgcggggtttcggcggcggcgtttagcgtaggtaggtttttttgttgtcgggttttatttgttgtcggttttgattcggggcggtcgcggcgcgcggagtttcggggagttaggcggagtagtcgcgtagttacgacggagtagtagcgggattggtcgtttcgcgtttttttcgtcgtcgtgttttttttcggcgcgtttatttcgttttcgggatgggattgtagcggcggcgcggattcggcggggatcgcggcggaggcggcggcgtcggcggcggcgtcggcggtcgagcggggttttatgtttttttttggttaggaggaatattgcgtttttaataaggagttagtgaaatacggggagttggtggtgttcggg

SEQ ID NO: 37374 - DNA, 566 bp, Artificial Sequence
  chemically treated genomic DNA (Homo sapiens) CpG-island No: 37374
cccgaacaccaccaactccccgtatttcactaactccttattaaaaacgcaatattcctcctaaccaaaaaaaaacataaaaccccgctcgaccgccgacgccgccgccgacgccgccgcctccgccgcgatccccgccgaatccgcgccgccgctacaatcccatcccgaaaacgaaataaacgcgccgaaaaaaaacacgacgacgaaaaaaacgcgaaacgaccaatcccgctactactccgtcgtaactacgcgactactccgcctaactccccgaaactccgcgcgccgcgaccgccccgaatcaaaaccgacaacaaataaaacccgacaacaaaaaaacctacctacgctaaacgccgccgccgaaaccccgcgaaaaaaaaaaaaaaaaaaaaaaacgaacgcacgaaaaactaaaaccgcgcgaaaaaaacgaaaaccaacgcgcgaacaaataaaaaccgccccgccccacgcaaaaccaaacgcccgccccccgacccgcgaaacgccccctcccccgacgcgtaaaaccgtccgcgcccactccccgcccccct

SEQ ID NO: 37375 - DNA, 566 bp, Artificial Sequence
  chemically treated genomic DNA (Homo sapiens) CpG-island No: 37375
ttcgagtattattagtttttcgtattttattggttttttattgggggcgtagtgttttttttggttaggggaaaatatggagtttcgttcggtcgtcgacgtcgtcgtcgacgtcgtcgttttcgtcgcgattttcgtcgagttcgcgtcgtcgttataattttatttcgagaacggggtgagcgcgtcggggaagggtacggcggcgaagggggcgcggggcggttagtttcgttgttgtttcgtcgtggttgcgcggttgtttcgtttgatttttcggagtttcgcgcgtcgcggtcgtttcgagttagagtcggtaataaatgggattcggtagtagggggatttgtttgcgttgagcgtcgtcgtcgaagtttcgcgggagggagggaaggaggagggagcgggcgtacgagaggttggggtcgcgcgggggaggcgggggttagcgcgcgggtaggtgggagtcgtttcgttttacgtagagttaggcgttcgtttttcggttcgcggggcgttttttttttcggcgcgtggggtcgttcgcgtttatttttcgttttttt

SEQ ID NO: 37376 - DNA, 566 bp, Artificial Sequence
  chemically treated genomic DNA (Homo sapiens) CpG-island No: 37376
aaaaaaacgaaaaataaacgcgaacgaccccacgcgccgaaaaaaaaaacgccccgcgaaccgaaaaacgaacgcctaactctacgtaaaacgaaacgactcccacctacccgcgcgctaacccccgcctcccccgcgcgaccccaacctctcgtacgcccgctccctcctccttccctccctcccgcgaaacttcgacgacgacgctcaacgcaaacaaatccccctactaccgaatcccatttattaccgactctaactcgaaacgaccgcgacgcgcgaaactccgaaaaatcaaacgaaacaaccgcgcaaccacgacgaaacaacaacgaaactaaccgccccgcgcccccttcgccgccgtacccttccccgacgcgctcaccccgttctcgaaataaaattataacgacgacgcgaactcgacgaaaatcgcgacgaaaacgacgacgtcgacgacgacgtcgacgaccgaacgaaactccatattttcccctaaccaaaaaaaacactacgcccccaataaaaaaccaataaaatacgaaaaactaataatactcgaa

SEQ ID NO: 37377 - DNA, 653 bp, Artificial Sequence
  chemically treated genomic DNA (Homo sapiens) CpG-island No: 37377
cgcgggcggggagcgttcgtattttggagcggggttggcggggtggttcggtgttttttggggatcgtcggggcgttcggggcggtaggagaggtttttagggttcggacggcggcgcgggggcgggatgcgttttatcggcgcgcgttcggggtgttgcggcggacgtcgggttgcgttgttcgcgcggaggacgcggcggaggaagtggttagaattcgggcgatttagcgggggtagcgtcgggtatcgggttcgcggtcgtatcgtgggggcgggggtaggggttttatttttcgcgcgtcgcgttcgggtcggggagggcgggtagggattttatgtgaggcgtcgcggtcgcgggcgtttcgcggggtcgtttttcgaagttgagaggtcggtcggcgcggagtttcgtttttttatttttttcgcggatcgtggtattcgcgttttcgaatttcgagcgcggcgtcgtgagtttgggtcgtcgcgggttgtgggattttcggttgcgttttgtaaattgtttcgatgatcgtcgcgggtcgtcgtagttcgagagtagtgaattgtgtgtgattcgggtcggtcggtttttcgttttttttcgtttggagtgttttggaggggagggataggatgcggttgttcgg

SEQ ID NO: 37378 - DNA, 653 bp, Artificial Sequence
  chemically treated genomic DNA (Homo sapiens) CpG-island No: 37378
ccgaacaaccgcatcctatccctcccctccaaaacactccaaacgaaaaaaaacgaaaaaccgaccgacccgaatcacacacaattcactactctcgaactacgacgacccgcgacgatcatcgaaacaatttacaaaacgcaaccgaaaatcccacaacccgcgacgacccaaactcacgacgccgcgctcgaaattcgaaaacgcgaataccacgatccgcgaaaaaaataaaaaaacgaaactccgcgccgaccgacctctcaacttcgaaaaacgaccccgcgaaacgcccgcgaccgcgacgcctcacataaaatccctacccgccctccccgacccgaacgcgacgcgcgaaaaataaaacccctacccccgcccccacgatacgaccgcgaacccgatacccgacgctacccccgctaaatcgcccgaattctaaccacttcctccgccgcgtcctccgcgcgaacaacgcaacccgacgtccgccgcaacaccccgaacgcgcgccgataaaacgcatcccgcccccgcgccgccgtccgaaccctaaaaacctctcctaccgccccgaacgccccgacgatccccaaaaaacaccgaaccaccccgccaaccccgctccaaaatacgaacgctccccgcccgcg

SEQ ID NO: 37379 - DNA, 653 bp, Artificial Sequence
  chemically treated genomic DNA (Homo sapiens) CpG-island No: 37379
tcgagtagtcgtattttgttttttttttttagagtattttaagcggggagaagcggagggtcggtcggttcgggttatatatagtttattgttttcgggttgcggcggttcgcggcggttatcggaataatttgtaaagcgtagtcggggattttatagttcgcggcggtttaagtttacggcgtcgcgttcggagttcgggggcgcgggtattacggttcgcgagggaggtgggaagacggggtttcgcgtcggtcggttttttagtttcgggaagcgatttcgcgaagcgttcgcgatcgcggcgttttatatggagtttttgttcgtttttttcggttcggacgcggcgcgcgggaagtggagtttttgttttcgtttttacgatacggtcgcggattcggtgttcggcgttgttttcgttgggtcgttcgagttttggttatttttttcgtcgcgtttttcgcgcggatagcgtagttcggcgttcgtcgtagtatttcgagcgcgcgtcgatggggcgtatttcgttttcgcgtcgtcgttcgggttttgagagttttttttgtcgtttcgagcgtttcggcggtttttaaagagtatcgagttatttcgttagtttcgttttaggatgcgggcgtttttcgttcgcg

SEQ ID NO: 37380 - DNA, 653 bp, Artificial Sequence
  chemically treated genomic DNA (Homo sapiens) CpG-island No: 37380
cgcgaacgaaaaacgcccgcatcctaaaacgaaactaacgaaataactcgatactctttaaaaaccgccgaaacgctcgaaacgacaaaaaaaactctcaaaacccgaacgacgacgcgaaaacgaaatacgccccatcgacgcgcgctcgaaatactacgacgaacgccgaactacgctatccgcgcgaaaaacgcgacgaaaaaaataaccaaaactcgaacgacccaacgaaaacaacgccgaacaccgaatccgcgaccgtatcgtaaaaacgaaaacaaaaactccacttcccgcgcgccgcgtccgaaccgaaaaaaacgaacaaaaactccatataaaacgccgcgatcgcgaacgcttcgcgaaatcgcttcccgaaactaaaaaaccgaccgacgcgaaaccccgtcttcccacctccctcgcgaaccgtaatacccgcgcccccgaactccgaacgcgacgccgtaaacttaaaccgccgcgaactataaaatccccgactacgctttacaaattattccgataaccgccgcgaaccgccgcaacccgaaaacaataaactatatataacccgaaccgaccgaccctccgcttctccccgcttaaaatactctaaaaaaaaaaaacaaaatacgactactcga

SEQ ID NO: 37381 - DNA, 519 bp, Artificial Sequence
  chemically treated genomic DNA (Homo sapiens) CpG-island No: 37381
tcggtagaaagatcgtttggagtttttagaaggttgcggttgtttcggacgttgttgttattgtcgtttttggtcgtcggtttttttttttttttttgttttgattcgagtgattacgttatttttagttataagattcggatttgtcggttttcgcgggcggcggcgtaatagattgtagcgtttggagattttagttgtttcgtttgtcgagtatgcgtatgtttagcgtttgttttgtgcgtttcgggaagtcgggcgggagtttgcggtttcggacgtttacgatacgttgtgcgtgggggcgcggagtgcgggggatgtagtttcggttgggaggggcgtggttgaggattgtgaagtaatcggggcgaggtcgggtgtttgtttaattttttcgcgtatcgtttgttttttcggcggcggatagtgttttgtaatgtgtttttcgttgttcgagttaaaggtttttttcgacggagtttttagaatatcgtggtagaggtagacgcggttata

SEQ ID NO: 37382 - DNA, 519 bp, Artificial Sequence
  chemically treated genomic DNA (Homo sapiens) CpG-island No: 37382
tataaccgcgtctacctctaccacgatattctaaaaactccgtcgaaaaaaacctttaactcgaacaacgaaaaacacattacaaaacactatccgccgccgaaaaaacaaacgatacgcgaaaaaattaaacaaacacccgacctcgccccgattacttcacaatcctcaaccacgcccctcccaaccgaaactacatcccccgcactccgcgcccccacgcacaacgtatcgtaaacgtccgaaaccgcaaactcccgcccgacttcccgaaacgcacaaaacaaacgctaaacatacgcatactcgacaaacgaaacaactaaaatctccaaacgctacaatctattacgccgccgcccgcgaaaaccgacaaatccgaatcttataactaaaaataacgtaatcactcgaatcaaaacaaaaaaaaaaaaaaaaaccgacgaccaaaaacgacaataacaacaacgtccgaaacaaccgcaaccttctaaaaactccaaacgatctttctaccga

SEQ ID NO: 37383 - DNA, 519 bp, Artificial Sequence
  chemically treated genomic DNA (Homo sapiens) CpG-island No: 37383
tgtaatcgcgtttatttttattacggtattttaaagatttcgtcgaggaaaatttttagttcgggtaacgggagatatattatagaatattgttcgtcgtcgaagaaatagacgatacgcgggagagttgaatagatattcggtttcgtttcgattgttttatagtttttagttacgttttttttaatcggaattatatttttcgtatttcgcgtttttacgtatagcgtgtcgtaggcgttcgaagtcgtaggttttcgttcggtttttcgggacgtatagggtaggcgttgggtatgcgtatgttcggtaggcggggtagttggagtttttaggcgttgtaatttgttgcgtcgtcgttcgcgggagtcggtagattcgggttttgtggttaagagtgacgtggttattcgaattaaaatagaggagggggaggaagtcggcggttagaaacggtagtggtagtagcgttcggagtagtcgtagttttttggaagttttaggcggtttttttgtcga

SEQ ID NO: 37384 - DNA, 519 bp, Artificial Sequence
  chemically treated genomic DNA (Homo sapiens) CpG-island No: 37384
tcgacaaaaaaaccgcctaaaacttccaaaaaactacgactactccgaacgctactaccactaccgtttctaaccgccgacttcctccccctcctctattttaattcgaataaccacgtcactcttaaccacaaaacccgaatctaccgactcccgcgaacgacgacgcaacaaattacaacgcctaaaaactccaactaccccgcctaccgaacatacgcatacccaacgcctaccctatacgtcccgaaaaaccgaacgaaaacctacgacttcgaacgcctacgacacgctatacgtaaaaacgcgaaatacgaaaaatataattccgattaaaaaaaacgtaactaaaaactataaaacaatcgaaacgaaaccgaatatctattcaactctcccgcgtatcgtctatttcttcgacgacgaacaatattctataatatatctcccgttacccgaactaaaaattttcctcgacgaaatctttaaaataccgtaataaaaataaacgcgattaca

SEQ ID NO: 37385 - DNA, 514 bp, Artificial Sequence
  chemically treated genomic DNA (Homo sapiens) CpG-island No: 37385
tcgatttgtagttagttttcgcgagagtttagggcgcgaggtgttgggattttttttaggtggagagatgttgttcgtagacgtgattttcggttggtttgtttcgggtaatattttgtatcgtttaaattatatgtgcgattcggttattggtcggagttgggcgattagttttttatttttgttattttagattttagtttagggatgagtttacgcgaaacgaaatcgttttttttgtttttttttttttttttttcgttttttttatttattatttttttgacgtagattttaagttaaattttcggtttggaggacgattttcggagcgaggtatgaaggcgttcgttgggaggtagaggggtgcgtgaagcggggtttcgtggtttttttgtttcggtgtcggagggagacggagaaaaaatgggaggaaggcggattcggggtcgttgagcggtgggttttgtcgtagtgttttttcgttttttgttttagtagtttttgttttatg

SEQ ID NO: 37386 - DNA, 514 bp, Artificial Sequence
  chemically treated genomic DNA (Homo sapiens) CpG-island No: 37386
cataaaacaaaaactactaaaacaaaaaacgaaaaaacactacgacaaaacccaccgctcaacgaccccgaatccgccttcctcccattttttctccgtctccctccgacaccgaaacaaaaaaaccacgaaaccccgcttcacgcacccctctacctcccaacgaacgccttcatacctcgctccgaaaatcgtcctccaaaccgaaaatttaacttaaaatctacgtcaaaaaaataataaataaaaaaaacgaaaaaaaaaaaaaaaaaaacaaaaaaaacgatttcgtttcgcgtaaactcatccctaaactaaaatctaaaataacaaaaataaaaaactaatcgcccaactccgaccaataaccgaatcgcacatataatttaaacgatacaaaatattacccgaaacaaaccaaccgaaaatcacgtctacgaacaacatctctccacctaaaaaaaatcccaacacctcgcgccctaaactctcgcgaaaactaactacaaatcga

SEQ ID NO: 37387 - DNA, 514 bp, Artificial Sequence
  chemically treated genomic DNA (Homo sapiens) CpG-island No: 37387
tatggggtagaggttgttggagtaggaggcgagagaatattgcggtagaatttatcgtttagcggtttcggattcgttttttttttatttttttttcgttttttttcggtatcggagtaggaggattacggggtttcgttttacgtatttttttgttttttaacgggcgtttttatgtttcgtttcgggaatcgttttttaagtcgaggatttggtttggggtttgcgttagggagatagtgggtgaggggggcgggggggaggagggaggaggtagggagagcgatttcgtttcgcgtgagtttatttttgggttgaggtttgaagtggtaggagtggaaagttgatcgtttagtttcggttagtggtcggatcgtatatgtaatttagacggtgtaaaatattgttcggagtaaattaatcgggggttacgtttgcgggtagtatttttttatttgaggaaggttttagtatttcgcgttttgggttttcgcggaggttggttataggtcgg

SEQ ID NO: 37388 - DNA, 514 bp, Artificial Sequence
  chemically treated genomic DNA (Homo sapiens) CpG-island No: 37388
ccgacctataaccaacctccgcgaaaacccaaaacgcgaaatactaaaaccttcctcaaataaaaaaatactacccgcaaacgtaacccccgattaatttactccgaacaatattttacaccgtctaaattacatatacgatccgaccactaaccgaaactaaacgatcaactttccactcctaccacttcaaacctcaacccaaaaataaactcacgcgaaacgaaatcgctctccctacctcctccctcctcccccccgcccccctcacccactatctccctaacgcaaaccccaaaccaaatcctcgacttaaaaaacgattcccgaaacgaaacataaaaacgcccgttaaaaaacaaaaaaatacgtaaaacgaaaccccgtaatcctcctactccgataccgaaaaaaaacgaaaaaaaaataaaaaaaaaacgaatccgaaaccgctaaacgataaattctaccgcaatattctctcgcctcctactccaacaacctctaccccata

SEQ ID NO: 37389 - DNA, 560 bp, Artificial Sequence
  chemically treated genomic DNA (Homo sapiens) CpG-island No: 37389
  unsure (421)
aggttgtcggatgcggcgtaaacgttttattcggtttacggagggtgcgggaatttgtaggtttgataagacgcgtttttttcgtattaggtagtcggtattattgtcggatgcggcgtaaacgttttattcggtttacggagggtgcgggaatttgtaggtttgataagacgcgtaagcgtcgtattaggtagtcggtatcgttgtcggatgcggcgtaaacgttttattcggtttacggatggtgcgggaatttgtaggtttgataagacgcgtaagcgtcgtattaggtagttggtattgttgtcggatgcggcgtaaacgttttattcggtttacggagggtgcgggaatttgtaggtttgataagacgcgtaagcgtcgtattaggtagtcggtatcgttgtcggatgcggcgtanacgttttattcggtttacggagggtgcgggaatttgtaggtttgataagacgcgtaagcgtcgtattaggtatttggtatcgttgtcggatgcggcgcgagcgtttttattcgtttatcgattataatataattagttt

SEQ ID NO: 37390 - DNA, 560 bp, Artificial Sequence
  chemically treated genomic DNA (Homo sapiens) CpG-island No: 37390
  unsure (140)
aaactaattatattataatcgataaacgaataaaaacgctcgcgccgcatccgacaacgataccaaatacctaatacgacgcttacgcgtcttatcaaacctacaaattcccgcaccctccgtaaaccgaataaaacgtntacgccgcatccgacaacgataccgactacctaatacgacgcttacgcgtcttatcaaacctacaaattcccgcaccctccgtaaaccgaataaaacgtttacgccgcatccgacaacaataccaactacctaatacgacgcttacgcgtcttatcaaacctacaaattcccgcaccatccgtaaaccgaataaaacgtttacgccgcatccgacaacgataccgactacctaatacgacgcttacgcgtcttatcaaacctacaaattcccgcaccctccgtaaaccgaataaaacgtttacgccgcatccgacaataataccgactacctaatacgaaaaaaacgcgtcttatcaaacctacaaattcccgcaccctccgtaaaccgaataaaacgtttacgccgcatccgacaacct

SEQ ID NO: 37391 - DNA, 560 bp, Artificial Sequence
  chemically treated genomic DNA (Homo sapiens) CpG-island No: 37391
  unsure (140)
gaattgattgtattgtgatcggtaagcggataaaggcgttcgcgtcgtattcggtaacggtgttagatgtttgatgcgacgtttgcgcgttttattaggtttataaattttcgtatttttcgtaggtcggataaggcgtntacgtcgtattcggtaacggtgtcgattgtttgatgcgacgtttgcgcgttttattaggtttataaattttcgtatttttcgtaggtcggataaggcgtttacgtcgtattcggtaatagtgttaattgtttgatgcgacgtttgcgcgttttattaggtttataaattttcgtattattcgtaggtcggataaggcgtttacgtcgtattcggtaacggtgtcgattgtttgatgcgacgtttgcgcgttttattaggtttataaattttcgtatttttcgtaggtcggataaggcgtttacgtcgtattcggtaatggtgtcgattgtttgatgcgaagaaagcgcgttttattaggtttataaattttcgtatttttcgtaggtcggataaggcgtttacgtcgtattcggtaattt

SEQ ID NO: 37392 - DNA, 560 bp, Artificial Sequence
  chemically treated genomic DNA (Homo sapiens) CpG-island No: 37392
  unsure (421)
aaattaccgaatacgacgtaaacgccttatccgacctacgaaaaatacgaaaatttataaacctaataaaacgcgctttcttcgcatcaaacaatcgacaccattaccgaatacgacgtaaacgccttatccgacctacgaaaaatacgaaaatttataaacctaataaaacgcgcaaacgtcgcatcaaacaatcgacaccgttaccgaatacgacgtaaacgccttatccgacctacgaataatacgaaaatttataaacctaataaaacgcgcaaacgtcgcatcaaacaattaacactattaccgaatacgacgtaaacgccttatccgacctacgaaaaatacgaaaatttataaacctaataaaacgcgcaaacgtcgcatcaaacaatcgacaccgttaccgaatacgacgtanacgccttatccgacctacgaaaaatacgaaaatttataaacctaataaaacgcgcaaacgtcgcatcaaacatctaacaccgttaccgaatacgacgcgaacgcctttatccgcttaccgatcacaatacaatcaattc

SEQ ID NO: 37393 - DNA, 617 bp, Artificial Sequence
  chemically treated genomic DNA (Homo sapiens) CpG-island No: 37393
gtcgtatttagggtatggaaaaatggttggcgaattttgagttgttggaagtcgatgtagatgcggaatacgcggtagtgatcgatatcgatttggcggatattaaagagttaattttgtgtgtttcgaacgattcggatgtacgcgcgttcgttgtttgcggtataggtgagaagatcgacgaagtgttatcggtttttgtatgattaatatcggttattttcgtgttgcgggtaaattgttggatgcgtataaaggttagttgtcgattcgtttgtgggtggtatcgttaattcgtatggacgtcgtatagttgatcgaagaaggttattatagcgttttcggtaagagtggtgcgcgtatcgagatttttggttgttttttgtgtatgggtaattaggcgcgtgtggcggacggtgtaacggtggtttttatttttattcgtaatttttcgaatcgtttgggtattggcgcgaatgtttttttggtttttgcggaattggcggttgttgcggcgttgattggtaaattgtcgacgtcggaagagtattagatttacgtggcgtaggtagataaaatagtcgttgatatttatcgttatttgaattttaattagt

SEQ ID NO: 37394 - DNA, 617 bp, Artificial Sequence
  chemically treated genomic DNA (Homo sapiens) CpG-island No: 37394
actaattaaaattcaaataacgataaatatcaacgactattttatctacctacgccacgtaaatctaatactcttccgacgtcgacaatttaccaatcaacgccgcaacaaccgccaattccgcaaaaaccaaaaaaacattcgcgccaatacccaaacgattcgaaaaattacgaataaaaataaaaaccaccgttacaccgtccgccacacgcgcctaattacccatacacaaaaaacaaccaaaaatctcgatacgcgcaccactcttaccgaaaacgctataataaccttcttcgatcaactatacgacgtccatacgaattaacgataccacccacaaacgaatcgacaactaacctttatacgcatccaacaatttacccgcaacacgaaaataaccgatattaatcatacaaaaaccgataacacttcgtcgatcttctcacctataccgcaaacaacgaacgcgcgtacatccgaatcgttcgaaacacacaaaattaactctttaatatccgccaaatcgatatcgatcactaccgcgtattccgcatctacatcgacttccaacaactcaaaattcgccaaccatttttccataccctaaatacgac

SEQ ID NO: 37395 - DNA, 617 bp, Artificial Sequence
  chemically treated genomic DNA (Homo sapiens) CpG-island No: 37395
gttggttgaagtttagataacggtaagtattaacggttgttttatttatttgcgttacgtaggtttggtattttttcggcgtcggtagtttgttaattagcgtcgtaatagtcgttagtttcgtagaagttaggaagatattcgcgttagtatttagacggttcgggaagttacgggtagaggtggaaattatcgttgtatcgttcgttatacgcgtttggttatttatatatagggaatagttagggatttcgatacgcgtattatttttatcgaagacgttgtagtagtttttttcggttaattgtgcggcgtttatacgggttggcggtgttatttataggcgggtcggtaattgatttttatgcgtatttagtagtttattcgtagtacggaagtgatcgatgttggttatgtaggaatcgataatatttcgtcgatttttttatttgtatcgtagatagcggacgcgcgtatattcgggtcgttcggagtatataggattggttttttaatattcgttagatcgatgtcgattattgtcgcgtatttcgtatttgtatcggtttttagtagtttaggattcgttagttatttttttatgttttgaatacgat

SEQ ID NO: 37396 - DNA, 617 bp, Artificial Sequence
  chemically treated genomic DNA (Homo sapiens) CpG-island No: 37396
atcgtattcaaaacataaaaaaataactaacgaatcctaaactactaaaaaccgatacaaatacgaaatacgcgacaataatcgacatcgatctaacgaatattaaaaaaccaatcctatatactccgaacgacccgaatatacgcgcgtccgctatctacgatacaaataaaaaaatcgacgaaatattatcgattcctacataaccaacatcgatcacttccgtactacgaataaactactaaatacgcataaaaatcaattaccgacccgcctataaataacaccgccaacccgtataaacgccgcacaattaaccgaaaaaaactactacaacgtcttcgataaaaataatacgcgtatcgaaatccctaactattccctatatataaataaccaaacgcgtataacgaacgatacaacgataatttccacctctacccgtaacttcccgaaccgtctaaatactaacgcgaatatcttcctaacttctacgaaactaacgactattacgacgctaattaacaaactaccgacgccgaaaaaataccaaacctacgtaacgcaaataaataaaacaaccgttaatacttaccgttatctaaacttcaaccaac

SEQ ID NO: 37397 - DNA, 828 bp, Artificial Sequence
  chemically treated genomic DNA (Homo sapiens) CpG-island No: 37397
  unsure (825)
attattcgcgatcgtttgatagattcggtaaggtattgtcgcgcggtgtaatcggagcgtttttattgcgtatcgttttcgtttgcggcgttagttggattattgttttttttagtattatttgtttaacgtttagttgatgatttagtagtggtaaaagcgttacgtttagacgtatgttgtcggcgcgaattagtggttggtttgcgttttgggcggtgagagatattcgttcggagaggatattaagttgcggttagacgtgttaacgtagtggttcgtcgagttgtaattgataatcgttacgtgtagtaatttgtttgattatatagtcgcggaaattattcggatttattagtaatattaacgtagatattcggttattagtacgattaggagtattattagcgtcgttagaaatcgttttatggtatttttaatgggtttgaattagtttttatcgattcggttggttatcgcgttttgttggttgcgatatttcgtatttttacggcggttgtaaggtcgtatcgtcgggtcggaaagcggtttaaagtttagcgtattaattaatatgttcggacgtagcgttagcggtagtttatcggagttgtagaattttagtataatgtaattagattagttcggatcgatgcggtgcgcggtgacgtgtattattagttttagacgcgttagtgaggaacgttcgtttagttagtttattagatcggttggtagcgttatcgattttagcgttatcgttagcgttagtttttttggggtgaagatagaacgtttttgtttcgtcgagaacgattttatcgntta

SEQ ID NO: 37398 - DNA, 828 bp, Artificial Sequence
  chemically treated genomic DNA (Homo sapiens) CpG-island No: 37398
  unsure (4)
taancgataaaatcgttctcgacgaaacaaaaacgttctatcttcaccccaaaaaaactaacgctaacgataacgctaaaatcgataacgctaccaaccgatctaataaactaactaaacgaacgttcctcactaacgcgtctaaaactaataatacacgtcaccgcgcaccgcatcgatccgaactaatctaattacattatactaaaattctacaactccgataaactaccgctaacgctacgtccgaacatattaattaatacgctaaactttaaaccgctttccgacccgacgatacgaccttacaaccgccgtaaaaatacgaaatatcgcaaccaacaaaacgcgataaccaaccgaatcgataaaaactaattcaaacccattaaaaataccataaaacgatttctaacgacgctaataatactcctaatcgtactaataaccgaatatctacgttaatattactaataaatccgaataatttccgcgactatataatcaaacaaattactacacgtaacgattatcaattacaactcgacgaaccactacgttaacacgtctaaccgcaacttaatatcctctccgaacgaatatctctcaccgcccaaaacgcaaaccaaccactaattcgcgccgacaacatacgtctaaacgtaacgcttttaccactactaaatcatcaactaaacgttaaacaaataatactaaaaaaaacaataatccaactaacgccgcaaacgaaaacgatacgcaataaaaacgctccgattacaccgcgcgacaataccttaccgaatctatcaaacgatcgcgaataat

SEQ ID NO: 37399 - DNA, 828 bp, Artificial Sequence
  chemically treated genomic DNA (Homo sapiens) CpG-island No: 37399
  unsure (4)
tgancgatgagatcgttttcgacgaggtagaggcgttttatttttattttaggagagttggcgttggcggtgacgttggagtcggtgacgttgttagtcgatttggtgggttggttggacgggcgttttttattggcgcgtttggggttgatggtgtacgttatcgcgtatcgtatcgattcgggttggtttggttgtattgtgttggagttttataatttcggtaagttgtcgttggcgttgcgttcgggtatgttaattggtgcgttgagttttgagtcgtttttcggttcggcggtgcgattttataatcgtcgtgaagatgcgaaatatcgtaattagtagggcgcggtagttagtcgaatcgataaagattaatttaggtttattgaggatattatgagacgatttttgacgacgttgatgatatttttggtcgtgttggtggtcgggtatttgcgttagtgttgttggtgaattcgaatgattttcgcgattatatggttaagtaagttgttgtacgtagcggttattaattgtagttcgacgggttattgcgttggtacgtttggtcgtagtttagtatttttttcgggcgaatgttttttatcgtttagggcgtaagttagttattggttcgcgtcgataatatgcgtttggacgtggcgtttttattattattgagttattaattgagcgttaagtaggtgatgttaaaaggggtagtgatttaattgacgtcgtagacggaagcggtgcgtagtgaagacgtttcggttgtatcgcgcgataatattttgtcggatttgttagacgatcgcggatggt

SEQ ID NO: 37400 - DNA, 828 bp, Artificial Sequence
  chemically treated genomic DNA (Homo sapiens) CpG-island No: 37400
  unsure (825)
accatccgcgatcgtctaacaaatccgacaaaatattatcgcgcgatacaaccgaaacgtcttcactacgcaccgcttccgtctacgacgtcaattaaatcactaccccttttaacatcacctacttaacgctcaattaataactcaataataataaaaacgccacgtccaaacgcatattatcgacgcgaaccaataactaacttacgccctaaacgataaaaaacattcgcccgaaaaaaatactaaactacgaccaaacgtaccaacgcaataacccgtcgaactacaattaataaccgctacgtacaacaacttacttaaccatataatcgcgaaaatcattcgaattcaccaacaacactaacgcaaatacccgaccaccaacacgaccaaaaatatcatcaacgtcgtcaaaaatcgtctcataatatcctcaataaacctaaattaatctttatcgattcgactaactaccgcgccctactaattacgatatttcgcatcttcacgacgattataaaatcgcaccgccgaaccgaaaaacgactcaaaactcaacgcaccaattaacatacccgaacgcaacgccaacgacaacttaccgaaattataaaactccaacacaatacaaccaaaccaacccgaatcgatacgatacgcgataacgtacaccatcaaccccaaacgcgccaataaaaaacgcccgtccaaccaacccaccaaatcgactaacaacgtcaccgactccaacgtcaccgccaacgccaactctcctaaaataaaaataaaacgcctctacctcgtcgaaaacgatctcatcgntca

SEQ ID NO: 37401 - DNA, 629 bp, Artificial Sequence
  chemically treated genomic DNA (Homo sapiens) CpG-island No: 37401
ggcggcgcggaataaacgatataatttaggaaattagagaagttagtatacggaatatgttttttatcgaagaaggcgtaaatttcgttagatggcggtagttacggaagtcgagttttagaatatttagtagattttttagcggtttatttttcgggtagttgttttgttagagcgtttatgtattcgtacgggtaaacgtatattgtataaaatcgatatgttgttgggtggtgagcggtattaattttagtttaattttattatttattacgcgcgttatttgggtcgggaagacgtatttttgttgatcgcgtttaagtaatagatttattttttggttttttagaatttgcgtttgatcgttgattttgatttttacgatagcgtcggagaaatttgaacggtatcgagaagaggtggtttttcgggggtaatgtcggggtattgtattttaaggggggaacgggaatcgtgggttaacgatacggatggtgcgtaaaaaagggtgttatttttttttgtgttcgggaattatattggggtcgaaagtgtagttacgagttttattatgagaaattgtcgatataagattttattcgggggaaatgtgttagtttaggtaatat

SEQ ID NO: 37402 - DNA, 629 bp, Artificial Sequence
  chemically treated genomic DNA (Homo sapiens) CpG-island No: 37402
atattacctaaactaacacatttcccccgaataaaatcttatatcgacaatttctcataataaaactcgtaactacactttcgaccccaatataattcccgaacacaaaaaaaaataacacccttttttacgcaccatccgtatcgttaacccacgattcccgttccccccttaaaatacaataccccgacattacccccgaaaaaccacctcttctcgataccgttcaaatttctccgacgctatcgtaaaaatcaaaatcaacgatcaaacgcaaattctaaaaaaccaaaaaataaatctattacttaaacgcgatcaacaaaaatacgtcttcccgacccaaataacgcgcgtaataaataataaaattaaactaaaattaataccgctcaccacccaacaacatatcgattttatacaatatacgtttacccgtacgaatacataaacgctctaacaaaacaactacccgaaaaataaaccgctaaaaaatctactaaatattctaaaactcgacttccgtaactaccgccatctaacgaaatttacgccttcttcgataaaaaacatattccgtatactaacttctctaatttcctaaattatatcgtttattccgcgccgcc

SEQ ID NO: 37403 - DNA, 629 bp, Artificial Sequence
  chemically treated genomic DNA (Homo sapiens) CpG-island No: 37403
gtgttatttgggttaatatatttttttcgggtgaaattttgtgtcggtaattttttataatggggttcgtaattgtattttcggttttagtatggttttcgggtataaggaggggtgatatttttttttgcgtattattcgtatcgttaatttacggttttcgttttttttttgaaatataatgtttcggtattgttttcgagaggttattttttttcggtatcgtttagattttttcgacgttgtcgtggggattaagattaacggttaggcgtagattttgaaaggttagaaagtgaatttgttgtttaaacgcggttagtaggaatacgttttttcgatttaggtggcgcgcgtgatgggtaatgaagttgggttgaaattaatgtcgtttattatttagtaatatatcgattttgtgtagtgtacgtttgttcgtgcggatatatgggcgttttggtaggatagttattcggaagataagtcgttggaaagtttgttggatattttgaagttcggttttcgtggttatcgttatttggcggagtttgcgtttttttcggtgaagggtatatttcgtgtgttgatttttttggttttttgggttgtatcgtttatttcgcgtcgtt

SEQ ID NO: 37404 - DNA, 629 bp, Artificial Sequence
  chemically treated genomic DNA (Homo sapiens) CpG-island No: 37404
aacgacgcgaaataaacgatacaacccaaaaaaccaaaaaaatcaacacacgaaatatacccttcaccgaaaaaaacgcaaactccgccaaataacgataaccacgaaaaccgaacttcaaaatatccaacaaactttccaacgacttatcttccgaataactatcctaccaaaacgcccatatatccgcacgaacaaacgtacactacacaaaatcgatatattactaaataataaacgacattaatttcaacccaacttcattacccatcacgcgcgccacctaaatcgaaaaaacgtattcctactaaccgcgtttaaacaacaaattcactttctaacctttcaaaatctacgcctaaccgttaatcttaatccccacgacaacgtcgaaaaaatctaaacgataccgaaaaaaaataacctctcgaaaacaataccgaaacattatatttcaaaaaaaaaacgaaaaccgtaaattaacgatacgaataatacgcaaaaaaaaatatcacccctccttatacccgaaaaccatactaaaaccgaaaatacaattacgaaccccattataaaaaattaccgacacaaaatttcacccgaaaaaaatatattaacccaaataacac

SEQ ID NO: 37405 - DNA, 581 bp, Artificial Sequence
  chemically treated genomic DNA (Homo sapiens) CpG-island No: 37405
  unsure (274, 374, 389)
tagaacgggcgtggagtaattgggttagacgttatgggttagcgtcggaagaggtgttggtttttatttacggtaaataggcgattatttttttgcgttattttatggcgggtaaattcgaggttgatattgtcgtcgagtttacgcgtttggagtatatcgaggttacggaaatcgaaggtattatcgcgttttcgggggtaatcgttttatttagttatttgaataaagtaggtatttcgtgggttattgtgatttttggttttatgtcggntgcgcgagcgcgttataaaatagttgggtttttcgtattagaggtgtttgtaatcgttgagcgagtgaagcgcggaaaattagaatttgatgcgtatttnttaggcgcgtagttnttggggtttgcgtcgtaggagtgtgtggtggtggaagatgttttcgttggcgtgttttttggtttggcggcgggttgttatgttattgcggttaacgtttcggtagatatttcgcgtttgaatgaggtcgatttggttttttatagtttggagtaaattattgtgattaaatagttaatggcgaatttttat

SEQ ID NO: 37406 - DNA, 581 bp, Artificial Sequence
  chemically treated genomic DNA (Homo sapiens) CpG-island No: 37406
  unsure (193, 208, 308)
ataaaaattcgccattaactatttaatcacaataatttactccaaactataaaaaaccaaatcgacctcattcaaacgcgaaatatctaccgaaacgttaaccgcaataacataacaacccgccgccaaaccaaaaaacacgccaacgaaaacatcttccaccaccacacactcctacgacgcaaaccccaanaactacgcgcctaanaaatacgcatcaaattctaattttccgcgcttcactcgctcaacgattacaaacacctctaatacgaaaaacccaactattttataacgcgctcgcgcanccgacataaaaccaaaaatcacaataacccacgaaatacctactttattcaaataactaaataaaacgattacccccgaaaacgcgataataccttcgatttccgtaacctcgatatactccaaacgcgtaaactcgacgacaatatcaacctcgaatttacccgccataaaataacgcaaaaaaataatcgcctatttaccgtaaataaaaaccaacacctcttccgacgctaacccataacgtctaacccaattactccacgcccgttcta

SEQ ID NO: 37407 - DNA, 581 bp, Artificial Sequence
  chemically treated genomic DNA (Homo sapiens) CpG-island No: 37407
  unsure (193, 208, 308)
ataaaaattcgttattggttgtttggttatagtaatttgttttagattgtggaggattaaatcgattttatttaggcgcggggtatttgtcggagcgttaatcgtaatgatatgataattcgtcgttaggttagaaagtacgttagcgggagtattttttattattatatatttttgcggcgtaagttttagnagttgcgcgtttaanagatacgtattaggttttggtttttcgcgttttattcgtttagcggttataaatatttttggtgcgggaagtttagttattttatggcgcgttcgcgtantcggtatggagttagaagttataatggtttacggaatatttgttttatttaaatgattgagtaaggcgattgttttcggaagcgcggtaatattttcggttttcgtggtttcgatgtgttttagacgcgtaaattcggcggtaatattagtttcggatttgttcgttataaaatggcgtagagaggtgatcgtttgtttatcgtgaatgaaagttagtatttttttcggcgttaatttatgacgtttggtttagttgttttacgttcgtttta

SEQ ID NO: 37408 - DNA, 581 bp, Artificial Sequence
  chemically treated genomic DNA (Homo sapiens) CpG-island No: 37408
  unsure (274, 374, 389)
taaaacgaacgtaaaacaactaaaccaaacgtcataaattaacgccgaaaaaaatactaactttcattcacgataaacaaacgatcacctctctacgccattttataacgaacaaatccgaaactaatattaccgccgaatttacgcgtctaaaacacatcgaaaccacgaaaaccgaaaatattaccgcgcttccgaaaacaatcgccttactcaatcatttaaataaaacaaatattccgtaaaccattataacttctaactccataccgantacgcgaacgcgccataaaataactaaacttcccgcaccaaaaatatttataaccgctaaacgaataaaacgcgaaaaaccaaaacctaatacgtatctnttaaacgcgcaactnctaaaacttacgccgcaaaaatatataataataaaaaatactcccgctaacgtactttctaacctaacgacgaattatcatatcattacgattaacgctccgacaaataccccgcgcctaaataaaatcgatttaatcctccacaatctaaaacaaattactataaccaaacaaccaataacgaatttttat

SEQ ID NO: 37409 - DNA, 533 bp, Artificial Sequence
  chemically treated genomic DNA (Homo sapiens) CpG-island No: 37409
  unsure (232)
gcgtcgttacgcgtatcgttaggtagacgtttataggttttatgtgttttttgtatttgtttttagtttagttttacgtttagatcgggcgtattaggaacggtaattttttcgtttttaatttttagcggattttggggttaggcgataatcgtttttttgttaaatttagtgggtatcgatagcggtaggattattcggtgtcgtcgcgtttatatgggttaatatcgtncgagagatatcgaaatggttattagaatggtagttttaggttagtttttagtcgtcgtaaagttgcgttatacggattgtatcggaaagcgtttagaagtgcggatcggtaagtggaatatttatcgtattgagtattatcgtatgatttatttcgcgttagttggtggcgattatgttagtcgcgacgggtaagtcggtcgttcgtcgaaatttcgttattattttacgttcggagaagttttgttttgcgtcgtatggattttcggtatatgttagaatatttatttagttttttgtat

SEQ ID NO: 37410 - DNA, 533 bp, Artificial Sequence
  chemically treated genomic DNA (Homo sapiens) CpG-island No: 37410
  unsure (302)
atacaaaaaactaaataaatattctaacatataccgaaaatccatacgacgcaaaacaaaacttctccgaacgtaaaataataacgaaatttcgacgaacgaccgacttacccgtcgcgactaacataatcgccaccaactaacgcgaaataaatcatacgataatactcaatacgataaatattccacttaccgatccgcacttctaaacgctttccgatacaatccgtataacgcaactttacgacgactaaaaactaacctaaaactaccattctaataaccatttcgatatctctcgnacgatattaacccatataaacgcgacgacaccgaataatcctaccgctatcgatacccactaaatttaacaaaaaaacgattatcgcctaaccccaaaatccgctaaaaattaaaaacgaaaaaattaccgttcctaatacgcccgatctaaacgtaaaactaaactaaaaacaaatacaaaaaacacataaaacctataaacgtctacctaacgatacgcgtaacgacgc

SEQ ID NO: 37411 - DNA, 533 bp, Artificial Sequence
  chemically treated genomic DNA (Homo sapiens) CpG-island No: 37411
  unsure (302)
atgtaaagggttgaatagatgttttaatatatgtcgaagatttatgcggcgtagaatagggttttttcggacgtgaagtgatggcggaatttcgacgggcgatcggtttgttcgtcgcgattaatatgatcgttattaattggcgcgaaatgggttatgcggtgatgtttaatgcggtagatattttatttgtcgattcgtatttttggacgtttttcggtgtagttcgtgtggcgtagttttgcgacgattgggggttgatttggggttgttattttaataattatttcgatatttttcgngcgatgttaatttatgtgggcgcggcggtatcgggtaattttatcgttatcgatatttattggatttggtaggagggcgattgtcgtttgattttaaaattcgttggagattaaaaacggaaaaattgtcgtttttgatgcgttcggtttgggcgtggaattggattgggaataggtataaaaggtatatgaggtttataaacgtttgtttggcggtgcgcgtaacgacgt

SEQ ID NO: 37412 - DNA, 533 bp, Artificial Sequence
  chemically treated genomic DNA (Homo sapiens) CpG-island No: 37412
  unsure (232)
acgtcgttacgcgcaccgccaaacaaacgtttataaacctcatataccttttatacctattcccaatccaattccacgcccaaaccgaacgcatcaaaaacgacaatttttccgtttttaatctccaacgaattttaaaatcaaacgacaatcgccctcctaccaaatccaataaatatcgataacgataaaattacccgataccgccgcgcccacataaattaacatcgcncgaaaaatatcgaaataattattaaaataacaaccccaaatcaacccccaatcgtcgcaaaactacgccacacgaactacaccgaaaaacgtccaaaaatacgaatcgacaaataaaatatctaccgcattaaacatcaccgcataacccatttcgcgccaattaataacgatcatattaatcgcgacgaacaaaccgatcgcccgtcgaaattccgccatcacttcacgtccgaaaaaaccctattctacgccgcataaatcttcgacatatattaaaacatctattcaaccctttacat

SEQ ID NO: 37413 - DNA, 642 bp, Artificial Sequence
  chemically treated genomic DNA (Homo sapiens) CpG-island No: 37413
aacgtcgtttttgtttatcgaaaacgacgattttttagttttgattttgtcgattaagatgtagcggttggtagacgtcgcgtattttttttttagatatcgggcgatggtgtgttgtattaagttttgtgtttattatatattgttcgtcgcgggttattataaattcggttatcgattttagcgttttcgttagcgtcgtcgacgcgtcgttatgtagtaaatcgaacggttgatgagtacgggtattaatcggtatttcggtttttagtatattatcgtttagacgggtatatataatttttagatgcgttattattgtgttatcgttggtggcgtttagttcgtcgagcgttaaatggcgtttttagattatgtttatgtttttagcgttgagtcgttatcgattataatattttgtagggtaatatggttggcgaggttagaggcgaggaataaaatcgtgttggcgattttttgtggacgggcgattttttttagcggaatgtcgagtttaaattgttcgttaaagtcgcgaatacgttgtttttcggcgttatcgtttatttatagcgtgcgttgtatatcggtgtcggtggagttaggcgaaatatattatagcgtacgtcgtatcggtcgttt

SEQ ID NO: 37414 - DNA, 642 bp, Artificial Sequence
  chemically treated genomic DNA (Homo sapiens) CpG-island No: 37414
aaacgaccgatacgacgtacgctataatatatttcgcctaactccaccgacaccgatatacaacgcacgctataaataaacgataacgccgaaaaacaacgtattcgcgactttaacgaacaatttaaactcgacattccgctaaaaaaaatcgcccgtccacaaaaaatcgccaacacgattttattcctcgcctctaacctcgccaaccatattaccctacaaaatattataatcgataacgactcaacgctaaaaacataaacataatctaaaaacgccatttaacgctcgacgaactaaacgccaccaacgataacacaataataacgcatctaaaaattatatatacccgtctaaacgataatatactaaaaaccgaaataccgattaatacccgtactcatcaaccgttcgatttactacataacgacgcgtcgacgacgctaacgaaaacgctaaaatcgataaccgaatttataataacccgcgacgaacaatatataataaacacaaaacttaatacaacacaccatcgcccgatatctaaaaaaaaaatacgcgacgtctaccaaccgctacatcttaatcgacaaaatcaaaactaaaaaatcgtcgttttcgataaacaaaaacgacgtt

SEQ ID NO: 37415 - DNA, 642 bp, Artificial Sequence
  chemically treated genomic DNA (Homo sapiens) CpG-island No: 37415
gaacggtcggtacggcgtgcgttgtaatgtgtttcgtttggttttatcgatatcgatatgtaacgtacgttgtgggtgagcgatgacgtcgaagaatagcgtattcgcggttttggcgagtagtttaaattcggtatttcgttggggaaaatcgttcgtttataagagatcgttaatacgattttgtttttcgtttttgatttcgttagttatattattttataggatattgtggtcgatggcggtttaacgttgggggtataagtatgatttggaaacgttatttaacgttcgacgaattgaacgttattagcgataatataatggtggcgtatttgggaattgtgtatattcgtttgggcgatgatgtgttggaagtcgaaatgtcggttgatattcgtatttattagtcgttcggtttattatatggcggcgcgtcggcggcgttggcggaaacgttgggatcgatggtcggatttatgatgattcgcgacggatagtgtgtggtaggtatagaatttaatgtaatatattatcgttcggtgtttgagggaaaggtacgcggcgtttgttagtcgttgtattttggtcggtaaaattagagttgggaaatcgtcgttttcgatgaataggggcggcgtt

SEQ ID NO: 37416 - DNA, 642 bp, Artificial Sequence
  chemically treated genomic DNA (Homo sapiens) CpG-island No: 37416
aacgccgcccctattcatcgaaaacgacgatttcccaactctaattttaccgaccaaaatacaacgactaacaaacgccgcgtacctttccctcaaacaccgaacgataatatattacattaaattctatacctaccacacactatccgtcgcgaatcatcataaatccgaccatcgatcccaacgtttccgccaacgccgccgacgcgccgccatataataaaccgaacgactaataaatacgaatatcaaccgacatttcgacttccaacacatcatcgcccaaacgaatatacacaattcccaaatacgccaccattatattatcgctaataacgttcaattcgtcgaacgttaaataacgtttccaaatcatacttatacccccaacgttaaaccgccatcgaccacaatatcctataaaataatataactaacgaaatcaaaaacgaaaaacaaaatcgtattaacgatctcttataaacgaacgattttccccaacgaaataccgaatttaaactactcgccaaaaccgcgaatacgctattcttcgacgtcatcgctcacccacaacgtacgttacatatcgatatcgataaaaccaaacgaaacacattacaacgcacgccgtaccgaccgttc

SEQ ID NO: 37417 - DNA, 1113 bp, Artificial Sequence
  chemically treated genomic DNA (Homo sapiens) CpG-island No: 37417
gcgttggcgcgattcgtatgattattaattcgcgcgaattgtttattgttcgtagcgttgcggatgtgattgttaattttggttattttaaagaaggtttttttatgtaaatcggtatcggcggcgtatcgttggcggtaattcgttttttggaagataaaatgcgtagtcgcgatattcgcgtcgatttcgtttttggcggtattatcgcgacgatggttgatttgtacgaaaaaggtttgattcgtaaattgttggatgtgtagagttttgatagttatgttgcgtaatcgttggttcgtaattttaattatatcgaaattagcgttaattagtacgttattggggttcgaaaggcgtatcggttgatcgtttcgacgtggtggtattgagcgcgttggaaattgatatttagtttaacgttaacgtgttgatcggttttgacggcgtattgcgtggtgttttcggtggttattgcgatatcgcgattgtttttgcgttttttattatcgtcgcgtcgttggtacgcggtcgtatttcgattttggtggatacgtattgatttgtattattttaggttttagtgtcgatattttggttatagattacggtatcgtagttaattcggtacgttcggaattggtagaacgtttgtaggaagcgggtattaaagtggtttttattgagtggttgcgcgaacgtgcgcgtttgttgatcggtgaattatagtcgattgaatttatagatcgcgtcgttgtcgttgtgcgttatcgcgatggttcggtgatcgatgttgtgtattaggtgaaggaataagttatgtatttgttttttgaattcgttagttattatgcggtattaattttcgagttgttcgttagtcgggatgaaaggtaagtacggtaatacgtttggtttaagcgttattttgttttattggttttttttatcgtggttgcgtttgggtcgattaaagatagcgaggttatacgtcgaatttttaattatggcgtgatagttttgcgtgttttagtcgtaaaatagggttggtaaatttaggagtaggttgtattggttttcgttagcgggtcggagggtatgttgagtattggt

SEQ ID NO: 37418 - DNA, 1113 bp, Artificial Sequence
  chemically treated genomic DNA (Homo sapiens) CpG-island No: 37418
accaatactcaacataccctccgacccgctaacgaaaaccaatacaacctactcctaaatttaccaaccctattttacgactaaaacacgcaaaactatcacgccataattaaaaattcgacgtataacctcgctatctttaatcgacccaaacgcaaccacgataaaaaaaaccaataaaacaaaataacgcttaaaccaaacgtattaccgtacttacctttcatcccgactaacgaacaactcgaaaattaataccgcataataactaacgaattcaaaaaacaaatacataacttattccttcacctaatacacaacatcgatcaccgaaccatcgcgataacgcacaacgacaacgacgcgatctataaattcaatcgactataattcaccgatcaacaaacgcgcacgttcgcgcaaccactcaataaaaaccactttaatacccgcttcctacaaacgttctaccaattccgaacgtaccgaattaactacgataccgtaatctataaccaaaatatcgacactaaaacctaaaataatacaaatcaatacgtatccaccaaaatcgaaatacgaccgcgtaccaacgacgcgacgataataaaaaacgcaaaaacaatcgcgatatcgcaataaccaccgaaaacaccacgcaatacgccgtcaaaaccgatcaacacgttaacgttaaactaaatatcaatttccaacgcgctcaataccaccacgtcgaaacgatcaaccgatacgcctttcgaaccccaataacgtactaattaacgctaatttcgatataattaaaattacgaaccaacgattacgcaacataactatcaaaactctacacatccaacaatttacgaatcaaacctttttcgtacaaatcaaccatcgtcgcgataataccgccaaaaacgaaatcgacgcgaatatcgcgactacgcattttatcttccaaaaaacgaattaccgccaacgatacgccgccgataccgatttacataaaaaaaccttctttaaaataaccaaaattaacaatcacatccgcaacgctacgaacaataaacaattcgcgcgaattaataatcatacgaatcgcgccaacgc

SEQ ID NO: 37419 - DNA, 1113 bp, Artificial Sequence
  chemically treated genomic DNA (Homo sapiens) CpG-island No: 37419
gttaatgtttaatatgtttttcggttcgttggcggaaattagtgtagtttgtttttgaatttgttagttttgttttgcggttaaggtacgtaaggttgttacgttatgattaaaaattcggcgtgtgatttcgttgtttttaatcggtttaggcgtaattacggtaaaggagattagtggaataggatggcgtttgagttagacgtgttgtcgtgtttgttttttatttcggttgacgagtagttcgggaattgatatcgtatggtggttggcgagtttaggaagtaggtgtatggtttatttttttatttgatgtataatatcgattatcgagttatcgcggtaacgtataacggtaacgacgcggtttgtgaatttaatcggttgtggtttatcggttagtagacgcgtacgttcgcgtagttatttaatggaaattattttaatgttcgttttttgtagacgttttgttagtttcggacgtgtcgggttaattgcgatatcgtggtttgtgattagaatatcgatattggagtttggggtgatgtaggttagtacgtatttattagagtcggaatacgatcgcgtattagcggcgcgacgatgatggaaagcgtagaggtaatcgcggtatcgtagtgattatcggaagtattacgtagtacgtcgttagagtcggttagtacgttaacgttgaattgggtgttaatttttagcgcgtttagtattattacgtcgagacgattaatcgatgcgtttttcgaattttagtagcgtattggttggcgttgatttcgatgtgattggggttacgggttagcgattgcgtagtatggttgttaaagttttgtatatttagtagtttgcggattagatttttttcgtgtaggttaattatcgtcgcggtaatatcgttaagggcgaagtcggcgcgaatatcgcggttacgtattttgttttttaggaaacgggttatcgttagcgatgcgtcgtcggtgtcggtttgtatggagaaattttttttgaagtagttagagttgataattatattcgtagcgttacgggtaataagtagttcgcgcgggttagtggttatacgggtcgcgttagcgt

SEQ ID NO: 37420 - DNA, 1113 bp, Artificial Sequence
  chemically treated genomic DNA (Homo sapiens) CpG-island No: 37420
acgctaacgcgacccgtataaccactaacccgcgcgaactacttattacccgtaacgctacgaatataattatcaactctaactacttcaaaaaaaatttctccatacaaaccgacaccgacgacgcatcgctaacgataacccgtttcctaaaaaacaaaatacgtaaccgcgatattcgcgccgacttcgcccttaacgatattaccgcgacgataattaacctacacgaaaaaaatctaatccgcaaactactaaatatacaaaactttaacaaccatactacgcaatcgctaacccgtaaccccaatcacatcgaaatcaacgccaaccaatacgctactaaaattcgaaaaacgcatcgattaatcgtctcgacgtaataatactaaacgcgctaaaaattaacacccaattcaacgttaacgtactaaccgactctaacgacgtactacgtaatacttccgataatcactacgataccgcgattacctctacgctttccatcatcgtcgcgccgctaatacgcgatcgtattccgactctaataaatacgtactaacctacatcaccccaaactccaatatcgatattctaatcacaaaccacgatatcgcaattaacccgacacgtccgaaactaacaaaacgtctacaaaaaacgaacattaaaataatttccattaaataactacgcgaacgtacgcgtctactaaccgataaaccacaaccgattaaattcacaaaccgcgtcgttaccgttatacgttaccgcgataactcgataatcgatattatacatcaaataaaaaaataaaccatacacctacttcctaaactcgccaaccaccatacgatatcaattcccgaactactcgtcaaccgaaataaaaaacaaacacgacaacacgtctaactcaaacgccatcctattccactaatctcctttaccgtaattacgcctaaaccgattaaaaacaacgaaatcacacgccgaatttttaatcataacgtaacaaccttacgtaccttaaccgcaaaacaaaactaacaaattcaaaaacaaactacactaatttccgccaacgaaccgaaaaacatattaaacattaac

SEQ ID NO: 37421 - DNA, 749 bp, Artificial Sequence
  chemically treated genomic DNA (Homo sapiens) CpG-island No: 37421
attagtatcggaggttagtacgcgtttaatgcgcgtggaattttgattcggcgtgtagttatagcgtagttgtaggtcgatttcgttgttagaaatcggttgtaaagtacgggcgtgaagaacgggagtcgttaggcgcgttagttcgttggttttatttagacgtagtaacggtagtaggtaggtattttttattttacgcgggtcggtattgtatatttcggcgacgtcgttttagatggttacgcgagaaatattcgttagcgtatcgatttgtgtcgcggaatagtcggaatcgttacgttttagtagtatcgttttatcggcgttgttgcggttgataaattcggttattattagacgtttgttcggatgttgtattagtagttgttgtagtaacgggtaagaaagttttttattaatttgcggttgtgcggcgcgtttagcgcgtaaaaattcgcgggtattaagttaggtcgttggtagtttttgttgattaagtatcgtagatattagacgtgtcgattatattttttcgtggtttattattttcgtatatattgcgtcgttaatatcgttgtcgagtagcgtcgttaggcgtttaaggtcgttgataaaagcgttaatgaggttatcggtttttttagcgggtagtagatcgttaattagatcgtattgatagcgacgtagcgtttgttgaatttgatgcgtagagagacgatcggtttggtttagttttaattagttaa

SEQ ID NO: 37422 - DNA, 749 bp, Artificial Sequence
  chemically treated genomic DNA (Homo sapiens) CpG-island No: 37422
ttaactaattaaaactaaaccaaaccgatcgtctctctacgcatcaaattcaacaaacgctacgtcgctatcaatacgatctaattaacgatctactacccgctaaaaaaaccgataacctcattaacgcttttatcaacgaccttaaacgcctaacgacgctactcgacaacgatattaacgacgcaatatatacgaaaataataaaccacgaaaaaatataatcgacacgtctaatatctacgatacttaatcaacaaaaactaccaacgacctaacttaatacccgcgaatttttacgcgctaaacgcgccgcacaaccgcaaattaataaaaaactttcttacccgttactacaacaactactaatacaacatccgaacaaacgtctaataataaccgaatttatcaaccgcaacaacgccgataaaacgatactactaaaacgtaacgattccgactattccgcgacacaaatcgatacgctaacgaatatttctcgcgtaaccatctaaaacgacgtcgccgaaatatacaataccgacccgcgtaaaataaaaaatacctacctactaccgttactacgtctaaataaaaccaacgaactaacgcgcctaacgactcccgttcttcacgcccgtactttacaaccgatttctaacaacgaaatcgacctacaactacgctataactacacgccgaatcaaaattccacgcgcattaaacgcgtactaacctccgatactaat

SEQ ID NO: 37423 - DNA, 749 bp, Artificial Sequence
  chemically treated genomic DNA (Homo sapiens) CpG-island No: 37423
ttaattggttgaaattaagttagatcgatcgtttttttgcgtattaggtttaataaacgttgcgtcgttattagtgcgatttgattagcggtttgttattcgttgaagaagtcgatagttttattagcgtttttgttagcgattttgagcgtttggcggcgttgttcgatagcggtattaacgacgtagtgtatgcggaagtggtgggttacggggaagtatggtcggtacgtttgatgtttgcggtatttaattaataagggttgttagcggtttggtttgatgttcgcgagtttttacgcgttgaacgcgtcgtataatcgtaggttgatgaagggtttttttattcgttgttgtaatagttgttggtgtaatattcgggtaaacgtttggtggtgatcggatttattagtcgtaataacgtcggtgaaacggtgttgttggggcgtaacggtttcgattatttcgcgatataaatcggtgcgttggcgggtgtttttcgcgtaattatttggagcgacgtcgtcggggtatatagtgtcgattcgcgtaaagtgaaagatgtttgtttgttgtcgttgttgcgtttggatgaggttagcgaattggcgcgtttggcggttttcgttttttacgttcgtattttatagtcggtttttggtagcgaaatcgatttgtaattgcgttgtagttatacgtcggattaaggttttacgcgtattgaacgcgtgttggttttcggtattggt

SEQ ID NO: 37424 - DNA, 749 bp, Artificial Sequence
  chemically treated genomic DNA (Homo sapiens) CpG-island No: 37424
accaataccgaaaaccaacacgcgttcaatacgcgtaaaaccttaatccgacgtataactacaacgcaattacaaatcgatttcgctaccaaaaaccgactataaaatacgaacgtaaaaaacgaaaaccgccaaacgcgccaattcgctaacctcatccaaacgcaacaacgacaacaaacaaacatctttcactttacgcgaatcgacactatataccccgacgacgtcgctccaaataattacgcgaaaaacacccgccaacgcaccgatttatatcgcgaaataatcgaaaccgttacgccccaacaacaccgtttcaccgacgttattacgactaataaatccgatcaccaccaaacgtttacccgaatattacaccaacaactattacaacaacgaataaaaaaacccttcatcaacctacgattatacgacgcgttcaacgcgtaaaaactcgcgaacatcaaaccaaaccgctaacaacccttattaattaaataccgcaaacatcaaacgtaccgaccatacttccccgtaacccaccacttccgcatacactacgtcgttaataccgctatcgaacaacgccgccaaacgctcaaaatcgctaacaaaaacgctaataaaactatcgacttcttcaacgaataacaaaccgctaatcaaatcgcactaataacgacgcaacgtttattaaacctaatacgcaaaaaaacgatcgatctaacttaatttcaaccaattaa

SEQ ID NO: 37425 - DNA, 558 bp, Artificial Sequence
  chemically treated genomic DNA (Homo sapiens) CpG-island No: 37425
  unsure (315)
tattattattcgtaaagtgtagtaggtcgcgtagtaggcggtacgtaataacgtgttggattacgatatgcgttacggttatcgcggttcggtaaatgtgttgtggaaagtgggcgagtcggcgtgggataataataagattatcgatacgttgaaggcgttgttaatttatggttcgttgttgtttgtcgtagttattagcgttaatttttagtaagcgacggcgatgttgcggacgggtcgatcgtcgtattgagtatggaaggcgttcgttgggcgcgtttttatcgttcggatatttagtaaggacgacgntcgcgtaaagtgatcgatgttttgtaaacggggttagtaaatttggggttcgttaggttggcgatgtatggtggttggtattagtgtcggaagtgaattcgggcgttgggtgtcgattaattcgtaaaacggtgtcgttatggcgttggtcggtggttttgatttttattagagtagttaatcggcgttattaggtattgcgtttaggttgttttattattatcggtttttttaacgggggat

SEQ ID NO: 37426 - DNA, 558 bp, Artificial Sequence
  chemically treated genomic DNA (Homo sapiens) CpG-island No: 37426
  unsure (244)
atcccccgttaaaaaaaccgataataataaaacaacctaaacgcaatacctaataacgccgattaactactctaataaaaatcaaaaccaccgaccaacgccataacgacaccgttttacgaattaatcgacacccaacgcccgaattcacttccgacactaataccaaccaccatacatcgccaacctaacgaaccccaaatttactaaccccgtttacaaaacatcgatcactttacgcgancgtcgtccttactaaatatccgaacgataaaaacgcgcccaacgaacgccttccatactcaatacgacgatcgacccgtccgcaacatcgccgtcgcttactaaaaattaacgctaataactacgacaaacaacaacgaaccataaattaacaacgccttcaacgtatcgataatcttattattatcccacgccgactcgcccactttccacaacacatttaccgaaccgcgataaccgtaacgcatatcgtaatccaacacgttattacgtaccgcctactacgcgacctactacactttacgaataataata

SEQ ID NO: 37427 - DNA, 558 bp, Artificial Sequence
  chemically treated genomic DNA (Homo sapiens) CpG-island No: 37427
  unsure (244)
atttttcgttaagaggatcggtaatggtggaataatttggacgtagtgtttggtggcgtcggttaattgttttgatggaaattaaagttatcgattagcgttataacggtatcgttttgcggattgatcgatatttagcgttcgagtttattttcggtattggtgttagttattatgtatcgttaatttgacgaattttagatttgttgatttcgtttgtagaatatcggttattttacgcggncgtcgtttttgttgagtattcgaacggtaaggacgcgtttagcgaacgttttttatatttaatgcgacggtcgattcgttcgtagtatcgtcgtcgtttgttgaggattggcgttggtgattgcggtaggtagtagcggattataggttggtagcgtttttagcgtatcggtaattttgttgttattttacgtcgattcgtttattttttatagtatatttgtcgggtcgcgatagtcgtggcgtatgtcgtagtttagtacgttattacgtatcgtttgttgcgcggtttgttgtattttgcgggtgatggtg

SEQ ID NO: 37428 - DNA, 558 bp, Artificial Sequence
  chemically treated genomic DNA (Homo sapiens) CpG-island No: 37428
  unsure (315)
caccatcacccgcaaaatacaacaaaccgcgcaacaaacgatacgtaataacgtactaaactacgacatacgccacgactatcgcgacccgacaaatatactataaaaaataaacgaatcgacgtaaaataacaacaaaattaccgatacgctaaaaacgctaccaacctataatccgctactacctaccgcaatcaccaacgccaatcctcaacaaacgacgacgatactacgaacgaatcgaccgtcgcattaaatataaaaaacgttcgctaaacgcgtccttaccgttcgaatactcaacaaaaacgacgnccgcgtaaaataaccgatattctacaaacgaaatcaacaaatctaaaattcgtcaaattaacgatacataataactaacaccaataccgaaaataaactcgaacgctaaatatcgatcaatccgcaaaacgataccgttataacgctaatcgataactttaatttccatcaaaacaattaaccgacgccaccaaacactacgtccaaattattccaccattaccgatcctcttaacgaaaaat

SEQ ID NO: 37429 - DNA, 805 bp, Artificial Sequence
  chemically treated genomic DNA (Homo sapiens) CpG-island No: 37429
  unsure (264)
acgtaggtcgtagcggttggttgttgtatgttcgtgggttggataaataacgtttgatttaatattagagtaaattgggtgcggcgatggtgattgttgtcgtttggtgcgtggaagattattaggtgattcgtttggtaggtttatttatcgtacgggttatacgtttggtttacgaagcgtagttggatgtcgtttcgttggggaaaatttcgtatttgcgtacgtcgggtttgttggtgatggatatggattttatcgtantttagattgaatgtattgatgaaattgttaaattggtcggaacgggcgagatggtggcggaagtaatcgaacgggcgatgcgcggcgaattcgattttatcgttagtttgcgtagtcgtgtggcgacgttgaaaggcgttgacgttaatattttgtaataggtgcgtgaaaatttgtcgttgatgttaggtttaacgtaattggtgtttaagttggaaacgttgggttggaaagtggcgattgttttcggcggttttattttttttgttgaatatttgcgcgataagttgcgtttgatcgtcgtggtagttaatgaattggagattatggacggtaaatttatcggtaatgtgatcggcgatatcgtagacgcgtagtataaagcgaaaattttgattcgtttcgcgtaggagtatgaaatttcgttggcgtagatcgtggcgattggcgatggagttaatgatttgtcgatgattaaagcggtagggttggggattgtttattatgttaagttaaaagtgaatgaaaaggcggaagttat

SEQ ID NO: 37430 - DNA, 805 bp, Artificial Sequence
  chemically treated genomic DNA (Homo sapiens) CpG-island No: 37430
  unsure (542)
ataacttccgccttttcattcacttttaacttaacataataaacaatccccaaccctaccgctttaatcatcgacaaatcattaactccatcgccaatcgccacgatctacgccaacgaaatttcatactcctacgcgaaacgaatcaaaattttcgctttatactacgcgtctacgatatcgccgatcacattaccgataaatttaccgtccataatctccaattcattaactaccacgacgatcaaacgcaacttatcgcgcaaatattcaacaaaaaaaataaaaccgccgaaaacaatcgccactttccaacccaacgtttccaacttaaacaccaattacgttaaacctaacatcaacgacaaattttcacgcacctattacaaaatattaacgtcaacgcctttcaacgtcgccacacgactacgcaaactaacgataaaatcgaattcgccgcgcatcgcccgttcgattacttccgccaccatctcgcccgttccgaccaatttaacaatttcatcaatacattcaatctaaantacgataaaatccatatccatcaccaacaaacccgacgtacgcaaatacgaaattttccccaacgaaacgacatccaactacgcttcgtaaaccaaacgtataacccgtacgataaataaacctaccaaacgaatcacctaataatcttccacgcaccaaacgacaacaatcaccatcgccgcacccaatttactctaatattaaatcaaacgttatttatccaacccacgaacatacaacaaccaaccgctacgacctacgt

SEQ ID NO: 37431 - DNA, 805 bp, Artificial Sequence
  chemically treated genomic DNA (Homo sapiens) CpG-island No: 37431
  unsure (542)
gtgattttcgtttttttatttatttttggtttggtatggtaggtaatttttagttttgtcgttttgattatcggtaggttattggttttatcgttaatcgttacggtttgcgttagcgggattttatatttttgcgcgaggcgagttagagttttcgttttgtattgcgcgtttacgatgtcgtcgattatattgtcggtaaatttatcgtttatgatttttagtttattggttattacggcggttaggcgtagtttgtcgcgtaggtatttagtaaagaaagtaaagtcgtcggaggtaatcgttattttttagtttagcgtttttagtttgagtattagttgcgttaagtttggtattagcggtagatttttacgtatttgttgtagaatattggcgttagcgttttttagcgtcgttatacggttgcgtaggttggcggtaaaatcgagttcgtcgcgtatcgttcgttcggttattttcgttattatttcgttcgtttcggttagtttggtaattttattaatatatttaatttggantgcggtggagtttatatttattattagtaaattcggcgtgcgtaggtgcgggattttttttagcggggcgatatttagttgcgtttcgtgggttaggcgtgtagttcgtgcggtgagtgaatttgttagacgaattatttgataattttttacgtattaggcggtaataattattatcgtcgtatttagtttgttttggtattgggttagacgttgtttatttagtttacgaatatatagtagttagtcgttacgatttgcgt

SEQ ID NO: 37432 - DNA, 805 bp, Artificial Sequence
  chemically treated genomic DNA (Homo sapiens) CpG-island No: 37432
  unsure (264)
acgcaaatcgtaacgactaactactatatattcgtaaactaaataaacaacgtctaacccaataccaaaacaaactaaatacgacgataataattattaccgcctaatacgtaaaaaattatcaaataattcgtctaacaaattcactcaccgcacgaactacacgcctaacccacgaaacgcaactaaatatcgccccgctaaaaaaaatcccgcacctacgcacgccgaatttactaataataaatataaactccaccgcantccaaattaaatatattaataaaattaccaaactaaccgaaacgaacgaaataataacgaaaataaccgaacgaacgatacgcgacgaactcgattttaccgccaacctacgcaaccgtataacgacgctaaaaaacgctaacgccaatattctacaacaaatacgtaaaaatctaccgctaataccaaacttaacgcaactaatactcaaactaaaaacgctaaactaaaaaataacgattacctccgacgactttactttctttactaaatacctacgcgacaaactacgcctaaccgccgtaataaccaataaactaaaaatcataaacgataaatttaccgacaatataatcgacgacatcgtaaacgcgcaatacaaaacgaaaactctaactcgcctcgcgcaaaaatataaaatcccgctaacgcaaaccgtaacgattaacgataaaaccaataacctaccgataatcaaaacgacaaaactaaaaattacctaccataccaaaccaaaaataaataaaaaaacgaaaatcac

SEQ ID NO: 37433 - DNA, 757 bp, Artificial Sequence
  chemically treated genomic DNA (Homo sapiens) CpG-island No: 37433
gcgtatttttgaaggcgagttaatgtaggagtttagcgatcgcgttaatgcggtattggaattttgtcgggatttatcgtagggaagtcgatcgttgttggtgagttatggtattgtattgggatgtttggtgagtacgattttcggattattagtatgggtagagcgtcgtttacgtttgcgtaattgttttatttcgcgcgtggattattaggaaagtttgtggttggcgtttggttgggtcgttgaaatcgtaggggatatttcgtatttggacgtttttgtattagattgagttgtagcgttacgacggatcggaattagtagtttatagcggtaattaattgggcgatttttcgttttggtattttttgtcgggtagtatcgtttaatattttgatttttacggcgcgttaggttgagtattggtatgtacgtttcgtatatcgttaggataaatttttgtacgtcggtttttagatttttataggtaaatattatatattcgtcgttttgtagtattatcggatgtttcgttagtatatagttatttgtttgattttgggttaacgcggtggtatagaatattttttgttcgtcgtttttattttgattcggacgcgttttatttaggtcgtagagtatcggcggaatggtcggcgcgttgtcgagaaaatcgtgttagaattgataacgtattttatggcggaaattagagatttgttttagcgaataggagtagttttgggtaatatta

SEQ ID NO: 37434 - DNA, 757 bp, Artificial Sequence
  chemically treated genomic DNA (Homo sapiens) CpG-island No: 37434
taatattacccaaaactactcctattcgctaaaacaaatctctaatttccgccataaaatacgttatcaattctaacacgattttctcgacaacgcgccgaccattccgccgatactctacgacctaaataaaacgcgtccgaatcaaaataaaaacgacgaacaaaaaatattctataccaccgcgttaacccaaaatcaaacaaataactatatactaacgaaacatccgataatactacaaaacgacgaatatataatatttacctataaaaatctaaaaaccgacgtacaaaaatttatcctaacgatatacgaaacgtacataccaatactcaacctaacgcgccgtaaaaatcaaaatattaaacgatactacccgacaaaaaataccaaaacgaaaaatcgcccaattaattaccgctataaactactaattccgatccgtcgtaacgctacaactcaatctaatacaaaaacgtccaaatacgaaatatcccctacgatttcaacgacccaaccaaacgccaaccacaaactttcctaataatccacgcgcgaaataaaacaattacgcaaacgtaaacgacgctctacccatactaataatccgaaaatcgtactcaccaaacatcccaatacaataccataactcaccaacaacgatcgacttccctacgataaatcccgacaaaattccaataccgcattaacgcgatcgctaaactcctacattaactcgccttcaaaaatacgc

SEQ ID NO: 37435 - DNA, 757 bp, Artificial Sequence
  chemically treated genomic DNA (Homo sapiens) CpG-island No: 37435
tggtgttatttagagttatttttgttcgttggagtaaatttttgattttcgttatgaaatgcgttattagttttggtacgattttttcggtaacgcgtcgattatttcgtcggtgttttacggtttgaatgaaacgcgttcgagttaggataaagacgacgagtaagaggtattttatattatcgcgttagtttaggattaggtagatggttatgtattgacggggtattcggtgatgttgtagggcggcgaatatgtgatgtttatttatgaaggtttgggaatcggcgtgtaggagtttattttgacggtatacggaacgtgtatgttaatgtttaatttgacgcgtcgtaaaggttaggatattgagcgatattattcggtagaagatgttaaagcgggagatcgtttaattaattatcgttgtgaattgttgatttcgattcgtcgtaacgttgtagtttaatttaatgtaggggcgtttagatgcgagatgttttttgcggttttaacgatttagttagacgttagttataggtttttttgataatttacgcgcgaaatagaatagttacgtagacgtaagcggcgttttgtttatgttggtaattcgagaatcgtatttattaggtattttagtgtaatattatgatttattagtagcggtcggtttttttgcggtaagtttcggtaagattttagtgtcgtattgacgcgatcgttgagtttttgtattgattcgtttttaggaatacgt

SEQ ID NO: 37436 - DNA, 757 bp, Artificial Sequence
  chemically treated genomic DNA (Homo sapiens) CpG-island No: 37436
acgtattcctaaaaacgaatcaatacaaaaactcaacgatcgcgtcaatacgacactaaaatcttaccgaaacttaccgcaaaaaaaccgaccgctactaataaatcataatattacactaaaatacctaataaatacgattctcgaattaccaacataaacaaaacgccgcttacgtctacgtaactattctatttcgcgcgtaaattatcaaaaaaacctataactaacgtctaactaaatcgttaaaaccgcaaaaaacatctcgcatctaaacgcccctacattaaattaaactacaacgttacgacgaatcgaaatcaacaattcacaacgataattaattaaacgatctcccgctttaacatcttctaccgaataatatcgctcaatatcctaacctttacgacgcgtcaaattaaacattaacatacacgttccgtataccgtcaaaataaactcctacacgccgattcccaaaccttcataaataaacatcacatattcgccgccctacaacatcaccgaataccccgtcaatacataaccatctacctaatcctaaactaacgcgataatataaaatacctcttactcgtcgtctttatcctaactcgaacgcgtttcattcaaaccgtaaaacaccgacgaaataatcgacgcgttaccgaaaaaatcgtaccaaaactaataacgcatttcataacgaaaatcaaaaatttactccaacgaacaaaaataactctaaataacacca

SEQ ID NO: 37437 - DNA, 646 bp, Artificial Sequence
  chemically treated genomic DNA (Homo sapiens) CpG-island No: 37437
  unsure (624)
aattgtcggacgcgtattttttgttcgacgggttaggcgtagtaggcggtattttttttgttggacgttgtataacgtttttagcgcgggcgttgcggagttaagaataatcgggatttgttcgttgtgcgtacgatatatcgttaggtcgcgggtatgatagcgttagtttttttgttgtttgtaggagttgtcgtgttttttattaatgataattacgtcgagatttttaaacggcgtaaatagcgcggagcgggtgtcgattataatcgtcgttttattatttttcgtttttagttacgtcgaaagacgttcgttgtcgtttaggtcggaatgtagaatttttacgggggtattaaaacgtttacgaaaacgggcgatagtttgcggtgttaggtcgattttcggtattattattagcgtttgtttgttttgagcgagtacgttttttagtacgttgagataaattttcgttttatcggaatcggtaacgttcgttagtagttaggtagaaaaagtatttgtcgcgttatgaattgcgttaacggcggtggtttgttcggtatttaatcgtaatcgtttattagaaacggtatagttcgttcgttagtcgttaaattttgngtgttttatttggttaaattat

SEQ ID NO: 37438 - DNA, 646 bp, Artificial Sequence
  chemically treated genomic DNA (Homo sapiens) CpG-island No: 37438
  unsure (23)
ataatttaaccaaataaaacacncaaaatttaacgactaacgaacgaactataccgtttctaataaacgattacgattaaataccgaacaaaccaccgccgttaacgcaattcataacgcgacaaatactttttctacctaactactaacgaacgttaccgattccgataaaacgaaaatttatctcaacgtactaaaaaacgtactcgctcaaaacaaacaaacgctaataataataccgaaaatcgacctaacaccgcaaactatcgcccgttttcgtaaacgttttaatacccccgtaaaaattctacattccgacctaaacgacaacgaacgtctttcgacgtaactaaaaacgaaaaataataaaacgacgattataatcgacacccgctccgcgctatttacgccgtttaaaaatctcgacgtaattatcattaataaaaaacacgacaactcctacaaacaacaaaaaaactaacgctatcatacccgcgacctaacgatatatcgtacgcacaacgaacaaatcccgattattcttaactccgcaacgcccgcgctaaaaacgttatacaacgtccaacaaaaaaaataccgcctactacgcctaacccgtcgaacaaaaaatacgcgtccgacaatt

SEQ ID NO: 37439 - DNA, 646 bp, Artificial Sequence
  chemically treated genomic DNA (Homo sapiens) CpG-island No: 37439
  unsure (23)
gtgatttagttaagtgaaatatntagagtttagcgattggcgaacgaattatgtcgtttttggtgagcggttgcgattgaatatcgaataggttatcgtcgttggcgtaatttatagcgcggtagatattttttttgtttggttgttggcgggcgttatcggtttcggtaaaacggaggtttattttagcgtattggaaaacgtgttcgtttagggtaaataggcgttggtgatggtgtcggaaatcggtttgatatcgtaaattatcgttcgttttcgtgaacgttttaatgttttcgtggaagttttgtatttcggtttgaacgatagcgagcgtttttcggcgtggttgaaagcgaaaaatggtgaggcggcgattgtgatcggtattcgtttcgcgttgtttacgtcgtttaaaaatttcggcgtgattgttattgatgaagagtacgatagtttttataagtagtaggaaggttggcgttattatgttcgcgatttggcggtgtatcgtgcgtatagcgagtaaatttcgattatttttggtttcgtaacgttcgcgttggaaacgttatgtaacgtttagtagaaaaaatatcgtttgttgcgtttgattcgtcgggtagggaatgcgcgttcggtaatt

SEQ ID NO: 37440 - DNA, 646 bp, Artificial Sequence
  chemically treated genomic DNA (Homo sapiens) CpG-island No: 37440
  unsure (624)
aattaccgaacgcgcattccctacccgacgaatcaaacgcaacaaacgatattttttctactaaacgttacataacgtttccaacgcgaacgttacgaaaccaaaaataatcgaaatttactcgctatacgcacgatacaccgccaaatcgcgaacataataacgccaaccttcctactacttataaaaactatcgtactcttcatcaataacaatcacgccgaaatttttaaacgacgtaaacaacgcgaaacgaataccgatcacaatcgccgcctcaccatttttcgctttcaaccacgccgaaaaacgctcgctatcgttcaaaccgaaatacaaaacttccacgaaaacattaaaacgttcacgaaaacgaacgataatttacgatatcaaaccgatttccgacaccatcaccaacgcctatttaccctaaacgaacacgttttccaatacgctaaaataaacctccgttttaccgaaaccgataacgcccgccaacaaccaaacaaaaaaaatatctaccgcgctataaattacgccaacgacgataacctattcgatattcaatcgcaaccgctcaccaaaaacgacataattcgttcgccaatcgctaaactctanatatttcacttaactaaatcac

SEQ ID NO: 37441 - DNA, 537 bp, Artificial Sequence
  chemically treated genomic DNA (Homo sapiens) CpG-island No: 37441
  unsure (365)
tggcgaacggtagcgttagtttggagtaaagtggtggcgaagtgtagaatttattgaattagatgtagtaggcgagtattaagtatattgagtttcgtgacgatcgttttgtggcggcggttgtcgttgatgaatattaatcggtaacgttggtgtatttggcgcgggcggtgacgtcgggaacgtattaggtatcgtaatcgatggtggaattaatgtatgttttttaatggcgggcgatcggcgcggttgaagatttgttgattgttagatcgtaaatgtttcgtttgttaattaaacgcggttgttggataacgttggtagtcgcgttttttttttttttttttgtagcgtggggagtagantaattttggtttttatcgttgtatgaagttaatttcgtacgagtggtcgtggcgtagatggtacgtcgttttggcgtttcgtcgatgttgacggtatttggcgttattcggtaataatcgaagatgttttttttacgttattttgaagcgttgattaattatgaagatcgtt

SEQ ID NO: 37442 - DNA, 537 bp, Artificial Sequence
  chemically treated genomic DNA (Homo sapiens) CpG-island No: 37442
  unsure (173)
aacgatcttcataattaatcaacgcttcaaaataacgtaaaaaaaacatcttcgattattaccgaataacgccaaataccgtcaacatcgacgaaacgccaaaacgacgtaccatctacgccacgaccactcgtacgaaattaacttcatacaacgataaaaaccaaaattantctactccccacgctacaaaaaaaaaaaaaaaaaacgcgactaccaacgttatccaacaaccgcgtttaattaacaaacgaaacatttacgatctaacaatcaacaaatcttcaaccgcgccgatcgcccgccattaaaaaacatacattaattccaccatcgattacgatacctaatacgttcccgacgtcaccgcccgcgccaaatacaccaacgttaccgattaatattcatcaacgacaaccgccgccacaaaacgatcgtcacgaaactcaatatacttaatactcgcctactacatctaattcaataaattctacacttcgccaccactttactccaaactaacgctaccgttcgcca

SEQ ID NO: 37443 - DNA, 537 bp, Artificial Sequence
  chemically treated genomic DNA (Homo sapiens) CpG-island No: 37443
  unsure (173)
agcgatttttataattgattagcgttttaaggtaacgtgggagaaatattttcgattgttatcggataacgttagatgtcgttagtatcggcgaagcgttagagcggcgtattatttgcgttacgattattcgtgcgggattgattttatgtagcggtagaggttagagttantttgttttttacgttgtaagaaaaaggagaaagggcgcggttgttaacgttatttagtagtcgcgtttggttaataagcgaggtatttacggtttgataattagtagatttttagtcgcgtcggtcgttcgttattggggaatatatattgattttattatcggttgcggtatttgatacgttttcggcgttatcgttcgcgttagatatattagcgttatcggttggtatttattaacggtaatcgtcgttataaagcgatcgttacggaatttaatgtgtttaatgttcgtttgttgtatttggtttagtaagttttgtatttcgttattattttgttttaggttggcgttatcgttcgtta

SEQ ID NO: 37444 - DNA, 537 bp, Artificial Sequence
  chemically treated genomic DNA (Homo sapiens) CpG-island No: 37444
  unsure (365)
taacgaacgataacgccaacctaaaacaaaataataacgaaatacaaaacttactaaaccaaatacaacaaacgaacattaaacacattaaattccgtaacgatcgctttataacgacgattaccgttaataaataccaaccgataacgctaatatatctaacgcgaacgataacgccgaaaacgtatcaaataccgcaaccgataataaaatcaatatatattccccaataacgaacgaccgacgcgactaaaaatctactaattatcaaaccgtaaatacctcgcttattaaccaaacgcgactactaaataacgttaacaaccgcgccctttctcctttttcttacaacgtaaaaaacaaantaactctaacctctaccgctacataaaatcaatcccgcacgaataatcgtaacgcaaataatacgccgctctaacgcttcgccgatactaacgacatctaacgttatccgataacaatcgaaaatatttctcccacgttaccttaaaacgctaatcaattataaaaatcgct

SEQ ID NO: 37445 - DNA, 754 bp, Artificial Sequence
  chemically treated genomic DNA (Homo sapiens) CpG-island No: 37445
cgtcgtcgtattggcggtaggtaatagcgtgttggtaaaatcggtagaataaacgtcgttgattgtcgcgtaagggatcgttattttgttggaagcgggtgtatcgttaggcgtggtgtaattgttgttaggtcggggtgaaatcgtgggcgcgtaattgacgggtgatgatcgcgtgcgcggggtgatgtttatcggtttaatcgaagtcgttacgttattgtagcgtaatatcgttagtcgtttggacgtttagggtcgttttatttcgtttatcgttgaaatcggcggtatgaacgcgatgattgtcgattttttagtattgatcgaataggtcgtcgtggatgtattggtttcggcgttcgatagtgcgggttagcgttgttcggcgttgcgcgtgttgtgtttgtaagatgagattgtcgattatacgttgaaaatgttgcgcggcgtaatggtcgaatgtcggatgggtaattcgggtcgtttgatatcgatatcggtttagtgattgatagcgaagcgaaagttaatattgagcgttatatttagattatgcgtagtaaaggtcgttcggtgttttaggcggtgcgggaaaatagcgaagatgttcgtgaatggtaaagcggtatttttgtcgtttcgacgttgatcgaattggatgattttgtcgaattgtaaaaagaggtttttggttcggtgttgtatgtggtgcgttataatcgtaattagttattagagttgatcgagtaga

SEQ ID NO: 37446 - DNA, 754 bp, Artificial Sequence
  chemically treated genomic DNA (Homo sapiens) CpG-island No: 37446
tctactcgatcaactctaataactaattacgattataacgcaccacatacaacaccgaaccaaaaacctctttttacaattcgacaaaatcatccaattcgatcaacgtcgaaacgacaaaaataccgctttaccattcacgaacatcttcgctattttcccgcaccgcctaaaacaccgaacgacctttactacgcataatctaaatataacgctcaatattaactttcgcttcgctatcaatcactaaaccgatatcgatatcaaacgacccgaattacccatccgacattcgaccattacgccgcgcaacattttcaacgtataatcgacaatctcatcttacaaacacaacacgcgcaacgccgaacaacgctaacccgcactatcgaacgccgaaaccaatacatccacgacgacctattcgatcaatactaaaaaatcgacaatcatcgcgttcataccgccgatttcaacgataaacgaaataaaacgaccctaaacgtccaaacgactaacgatattacgctacaataacgtaacgacttcgattaaaccgataaacatcaccccgcgcacgcgatcatcacccgtcaattacgcgcccacgatttcaccccgacctaacaacaattacaccacgcctaacgatacacccgcttccaacaaaataacgatcccttacgcgacaatcaacgacgtttattctaccgattttaccaacacgctattacctaccgccaatacgacgacg

SEQ ID NO: 37447 - DNA, 754 bp, Artificial Sequence
  chemically treated genomic DNA (Homo sapiens) CpG-island No: 37447
tttgttcgattagttttggtagttggttacggttgtaacgtattatatgtagtatcggattaaagatttttttttgtaattcggtaaagttatttagttcgattagcgtcggggcgataaaggtgtcgttttgttatttacgggtattttcgttgttttttcgtatcgtttggaatatcggacggtttttgttacgtatggtttgaatatggcgtttaatattggttttcgtttcgttattaattattggatcgatatcggtgttaggcgattcggattatttattcggtattcggttattgcgtcgcgtagtatttttaacgtgtggtcggtaattttattttgtaggtatagtacgcgtagcgtcgaataacgttgattcgtattgtcgaacgtcgaggttagtatatttacgacgatttgttcggttagtgttgaagaatcgataattatcgcgtttatgtcgtcggttttagcgatgagcggaatagggcgattttgagcgtttaggcggttggcgatattgcgttgtagtaacgtagcgatttcggttgaatcggtaaatattatttcgcgtacgcgattattattcgttagttgcgcgtttacggttttatttcgatttggtagtaattgtattacgtttggcggtatattcgtttttagtaaaatggcgattttttgcgcggtaattagcggcgtttgttttgtcggttttgttagtacgttgttatttgtcgttagtgcggcggcg

SEQ ID NO: 37448 - DNA, 754 bp, Artificial Sequence
  chemically treated genomic DNA (Homo sapiens) CpG-island No: 37448
cgccgccgcactaacgacaaataacaacgtactaacaaaaccgacaaaacaaacgccgctaattaccgcgcaaaaaatcgccattttactaaaaacgaatataccgccaaacgtaatacaattactaccaaatcgaaataaaaccgtaaacgcgcaactaacgaataataatcgcgtacgcgaaataatatttaccgattcaaccgaaatcgctacgttactacaacgcaatatcgccaaccgcctaaacgctcaaaatcgccctattccgctcatcgctaaaaccgacgacataaacgcgataattatcgattcttcaacactaaccgaacaaatcgtcgtaaatatactaacctcgacgttcgacaatacgaatcaacgttattcgacgctacgcgtactatacctacaaaataaaattaccgaccacacgttaaaaatactacgcgacgcaataaccgaataccgaataaataatccgaatcgcctaacaccgatatcgatccaataattaataacgaaacgaaaaccaatattaaacgccatattcaaaccatacgtaacaaaaaccgtccgatattccaaacgatacgaaaaaacaacgaaaatacccgtaaataacaaaacgacacctttatcgccccgacgctaatcgaactaaataactttaccgaattacaaaaaaaaatctttaatccgatactacatataatacgttacaaccgtaaccaactaccaaaactaatcgaacaaa

SEQ ID NO: 37449 - DNA, 797 bp, Artificial Sequence
  chemically treated genomic DNA (Homo sapiens) CpG-island No: 37449
cgtggtcgtaatcgtatatttaggtcgtatcgcgggaacgcgatggtaaacgatcgtttttgtaaatcgttataatgatgaatggtagtagcgggtaggtaattagtagtaacgtgattatcggttgagaaacggtggtgttagtaggttttagcggtagaggtatagtagtagagagtatcggtagtagttacggcgtagtaatatcgttaattacgtagtaaatcgttagtgttattacgtttacgtttattaggagcggcgtataggtggcgttttcggtttttttggtgcgcggcgcgtcgaggaacgtgacgttatagattttcgttatatatattatcgttagcgtatcggtaattgttagttttatagcgagtagcggttttagtagacgggtaataaacgcgttattattgtttagtttgaaaaatgattgatagataatttatttttcggtaaaattatttagcggcggtagcgtagttattgttattagttcgattaatatggcgatggagataatcggtatttttttgttaatattatcgagtttttcgatatcgcgatgatcggtacggaattagacgtttttcgtttcgaggaatagtacgtttttgaataggttatggttaagtagatggtatagattatcgattaggttaagagtaattagcgtcggttgttcgagcgcgatattcgttacgttagcgtttagttttagtaggatgatgtcgatattttttagggtgtggtaagttagtaggcgttggatgttgtgttttattagcgtatat

SEQ ID NO: 37450 - DNA, 797 bp, Artificial Sequence
  chemically treated genomic DNA (Homo sapiens) CpG-island No: 37450
atatacgctaataaaacacaacatccaacgcctactaacttaccacaccctaaaaaatatcgacatcatcctactaaaactaaacgctaacgtaacgaatatcgcgctcgaacaaccgacgctaattactcttaacctaatcgataatctataccatctacttaaccataacctattcaaaaacgtactattcctcgaaacgaaaaacgtctaattccgtaccgatcatcgcgatatcgaaaaactcgataatattaacaaaaaaataccgattatctccatcgccatattaatcgaactaataacaataactacgctaccgccgctaaataattttaccgaaaaataaattatctatcaatcatttttcaaactaaacaataataacgcgtttattacccgtctactaaaaccgctactcgctataaaactaacaattaccgatacgctaacgataatatatataacgaaaatctataacgtcacgttcctcgacgcgccgcgcaccaaaaaaaccgaaaacgccacctatacgccgctcctaataaacgtaaacgtaataacactaacgatttactacgtaattaacgatattactacgccgtaactactaccgatactctctactactatacctctaccgctaaaacctactaacaccaccgtttctcaaccgataatcacgttactactaattacctacccgctactaccattcatcattataacgatttacaaaaacgatcgtttaccatcgcgttcccgcgatacgacctaaatatacgattacgaccacg

SEQ ID NO: 37451 - DNA, 797 bp, Artificial Sequence
  chemically treated genomic DNA (Homo sapiens) CpG-island No: 37451
gtatgcgttggtggagtataatatttagcgtttgttggtttattatattttggaaaatatcggtattattttgttggggttgggcgttggcgtaacgggtatcgcgttcgaataatcggcgttgattgtttttggtttggtcggtggtttgtattatttgtttaattatagtttgtttaaaagcgtattgtttttcggggcggggagcgtttggtttcgtatcggttatcgcgatatcgaaaaattcggtggtattggtaagaaaatgtcggttatttttatcgttatgttagtcgggttgatggtaatggttgcgttgtcgtcgttgaatggttttgtcggggaatgggttatttattaattattttttaaattgagtaatagtggcgcgtttgttgttcgtttgttggggtcgttgttcgttgtggggttggtaattatcggtgcgttggcggtgatgtgtatggcgaaagtttatggcgttacgtttttcggcgcgtcgcgtattaaagaagtcgaaaacgttatttgtgcgtcgtttttgatgagcgtaagcgtagtggtattggcgatttgttgcgtaattggcggtgttgttgcgtcgtggttattgtcgatgttttttgttgttgtatttttgtcgttggagtttgttaatattatcgttttttaatcgatgattacgttgttgttgattgtttgttcgttgttgttatttattattatggcgatttgtaaaggcgatcgtttgttatcgcgttttcgcggtgcggtttgggtgtgcggttacgattacg

SEQ ID NO: 37452 - DNA, 797 bp, Artificial Sequence
  chemically treated genomic DNA (Homo sapiens) CpG-island No: 37452
cgtaatcgtaaccgcacacccaaaccgcaccgcgaaaacgcgataacaaacgatcgcctttacaaatcgccataataataaataacaacaacgaacaaacaatcaacaacaacgtaatcatcgattaaaaaacgataatattaacaaactccaacgacaaaaatacaacaacaaaaaacatcgacaataaccacgacgcaacaacaccgccaattacgcaacaaatcgccaataccactacgcttacgctcatcaaaaacgacgcacaaataacgttttcgacttctttaatacgcgacgcgccgaaaaacgtaacgccataaactttcgccatacacatcaccgccaacgcaccgataattaccaaccccacaacgaacaacgaccccaacaaacgaacaacaaacgcgccactattactcaatttaaaaaataattaataaataacccattccccgacaaaaccattcaacgacgacaacgcaaccattaccatcaacccgactaacataacgataaaaataaccgacattttcttaccaataccaccgaatttttcgatatcgcgataaccgatacgaaaccaaacgctccccgccccgaaaaacaatacgcttttaaacaaactataattaaacaaataatacaaaccaccgaccaaaccaaaaacaatcaacgccgattattcgaacgcgatacccgttacgccaacgcccaaccccaacaaaataataccgatattttccaaaatataataaaccaacaaacgctaaatattatactccaccaacgcatac

SEQ ID NO: 37453 - DNA, 674 bp, Artificial Sequence
  chemically treated genomic DNA (Homo sapiens) CpG-island No: 37453
ggggcgatggcgaaattgaaagttatttgatgggcgtttttaacgttagtaatttgttgttcgcgttggcgatattgttggtattcggttatttattggttgatttgttgaaaatcgtcgcgcgtttgtaatcggtttgcggacgtatggaagtgtttattgcgttaggtaaatcgacggtggtggtggattacgcgtatacgtcggatgtattggaaaaagttttataggtagcgcgtttgtattgtgcgggtaagttgtggtgtgtttttggttgtggtggcgatcgcgataaaggtaagcgtttattgatgggcgtaattgtcgaagagtttgttgacgtggcggtggtgacggacgataattcgcgtatcgaagaatcgcgtgttattattaacgatattttggcgggaatgttagatgtcggatatgttaaagtgatggaaggtcgtgttgaagcggtgatttgcgtcgttatgtaggttaaagagaatgatgtggtattggtcgcgggtaaaggttatgaagattattagattgttggtaattagcgtttggattatttcgatcgcgttacggtggcgcgtttgttgggggtgattgtatgattagcgtaatttttagttaatttatcgatatttttaacggtgaattgtaaggtgtagatttatttt

SEQ ID NO: 37454 - DNA, 674 bp, Artificial Sequence
  chemically treated genomic DNA (Homo sapiens) CpG-island No: 37454
aaaataaatctacaccttacaattcaccgttaaaaatatcgataaattaactaaaaattacgctaatcatacaatcacccccaacaaacgcgccaccgtaacgcgatcgaaataatccaaacgctaattaccaacaatctaataatcttcataacctttacccgcgaccaataccacatcattctctttaacctacataacgacgcaaatcaccgcttcaacacgaccttccatcactttaacatatccgacatctaacattcccgccaaaatatcgttaataataacacgcgattcttcgatacgcgaattatcgtccgtcaccaccgccacgtcaacaaactcttcgacaattacgcccatcaataaacgcttacctttatcgcgatcgccaccacaaccaaaaacacaccacaacttacccgcacaatacaaacgcgctacctataaaactttttccaatacatccgacgtatacgcgtaatccaccaccaccgtcgatttacctaacgcaataaacacttccatacgtccgcaaaccgattacaaacgcgcgacgattttcaacaaatcaaccaataaataaccgaataccaacaatatcgccaacgcgaacaacaaattactaacgttaaaaacgcccatcaaataactttcaatttcgccatcgcccc

SEQ ID NO: 37455 - DNA, 674 bp, Artificial Sequence
  chemically treated genomic DNA (Homo sapiens) CpG-island No: 37455
agggtgaatttgtattttgtagtttatcgttgagaatgtcggtaagttggttaagggttacgttaattatgtaattatttttagtagacgcgttatcgtgacgcgatcggagtagtttagacgttgattgttaataatttggtaatttttatggtttttgttcgcgattagtattatattattttttttagtttgtataacggcgtaagttatcgttttagtacggttttttattattttggtatgttcggtatttaatattttcgttagaatatcgttgatgatggtacgcggtttttcggtacgcgggttatcgttcgttattatcgttacgttagtaaatttttcggtaattgcgtttattagtggacgtttatttttatcgcgatcgttattatagttaaagatatattatagtttgttcgtatagtgtagacgcgttgtttgtaaggttttttttagtgtattcggcgtatgcgcgtaatttattattatcgtcggtttgtttggcgtagtgaatatttttatacgttcgtaaatcggttgtagacgcgcggcggtttttagtagattagttagtggatagtcgagtgttaatagtgtcgttagcgcgagtagtaggttgttgacgttaaaagcgtttattagatggtttttaatttcgttatcgtttt

SEQ ID NO: 37456 - DNA, 674 bp, Artificial Sequence
  chemically treated genomic DNA (Homo sapiens) CpG-island No: 37456
aaaacgataacgaaattaaaaaccatctaataaacgcttttaacgtcaacaacctactactcgcgctaacgacactattaacactcgactatccactaactaatctactaaaaaccgccgcgcgtctacaaccgatttacgaacgtataaaaatattcactacgccaaacaaaccgacgataataataaattacgcgcatacgccgaatacactaaaaaaaaccttacaaacaacgcgtctacactatacgaacaaactataatatatctttaactataataacgatcgcgataaaaataaacgtccactaataaacgcaattaccgaaaaatttactaacgtaacgataataacgaacgataacccgcgtaccgaaaaaccgcgtaccatcatcaacgatattctaacgaaaatattaaataccgaacataccaaaataataaaaaaccgtactaaaacgataacttacgccgttatacaaactaaaaaaaataatataatactaatcgcgaacaaaaaccataaaaattaccaaattattaacaatcaacgtctaaactactccgatcgcgtcacgataacgcgtctactaaaaataattacataattaacgtaacccttaaccaacttaccgacattctcaacgataaactacaaaatacaaattcaccct

SEQ ID NO: 37457 - DNA, 766 bp, Artificial Sequence
  chemically treated genomic DNA (Homo sapiens) CpG-island No: 37457
taagcgcgtatttatatcggacgcgttagtgaaacggtaaatatcgtgttatttttattgaggatcgtgtttggttttatcgcgcgcgttaatagcgtgttattagacggggttattaacgttgagttttgtaaatttaatttcgtttgcgttagttgcgtttgcgtttgttcgaggttggttttcgtttgagcgatgttttgtttacggttatcggaacggtattgacgtaatttattttgtgttgattttagcgttgtttgcgtttggtcgcgcgaggagcgggtattttttaggttatttgtcgaaatagtgcggtttttttataatttttgttggcggttatagaagttttgcgtatagttataggcggtttgcgtttgttttatcgttgcggcggtttgagcgatttttttattgcgatattcggtaagtattaggttatattgcgtttgtgttatcgaaatattcgttttcgtttgtattagggtaattttatacggtttgtgatttagttcgtttagtatttggttcgttttgatagtattattttcgtttatcgttagcgatttaacgcgttttttaatacggaaattaagatttatcgtacgaatatttacgttgttatatagcgttaggtcgttattttggcggttttgatattattagtagttttcggtaattacggcggtaagtattattatcgttaattcgattacgataggtttttttattattataaatttttttgcgataatttttgtaa

SEQ ID NO: 37458 - DNA, 766 bp, Artificial Sequence
  chemically treated genomic DNA (Homo sapiens) CpG-island No: 37458
ttacaaaaattatcgcaaaaaaatttataataataaaaaaacctatcgtaatcgaattaacgataataatacttaccgccgtaattaccgaaaactactaataatatcaaaaccgccaaaataacgacctaacgctatataacaacgtaaatattcgtacgataaatcttaatttccgtattaaaaaacgcgttaaatcgctaacgataaacgaaaataatactatcaaaacgaaccaaatactaaacgaactaaatcacaaaccgtataaaattaccctaatacaaacgaaaacgaatatttcgataacacaaacgcaatataacctaatacttaccgaatatcgcaataaaaaaatcgctcaaaccgccgcaacgataaaacaaacgcaaaccgcctataactatacgcaaaacttctataaccgccaacaaaaattataaaaaaaccgcactatttcgacaaataacctaaaaaatacccgctcctcgcgcgaccaaacgcaaacaacgctaaaatcaacacaaaataaattacgtcaataccgttccgataaccgtaaacaaaacatcgctcaaacgaaaaccaacctcgaacaaacgcaaacgcaactaacgcaaacgaaattaaatttacaaaactcaacgttaataaccccgtctaataacacgctattaacgcgcgcgataaaaccaaacacgatcctcaataaaaataacacgatatttaccgtttcactaacgcgtccgatataaatacgcgctta

SEQ ID NO: 37459 - DNA, 766 bp, Artificial Sequence
  chemically treated genomic DNA (Homo sapiens) CpG-island No: 37459
ttgtaaggattatcgtaaaggagtttgtagtgatgaaaaaatttgtcgtgatcggattggcggtagtggtatttgtcgtcgtggttgtcggaggttattggtggtattaaagtcgttaggataacggtttgacgttgtatggtaacgtggatattcgtacggtaaattttagttttcgtgttggggggcgcgttgaatcgttggcggtggacgaaggtgatgttattaaagcgggttaggtgttgggcgaattggattataagtcgtatgagattgttttgatgtaggcgaaagcgggtgtttcggtggtataggcgtagtatgatttgatgtttgtcgggtatcgtaatgaagaaatcgtttaggtcgtcgtagcggtgaaataggcgtaagtcgtttatgattatgcgtagaatttttataatcgttagtaagggttgtggaaaagtcgtattatttcggtaaatgatttggaaaatgttcgtttttcgcgcgattaggcgtaggtaacgttgaaattagtataggataaattgcgttagtatcgtttcggtaatcgtgaataggatatcgtttaggcgaaagttagtttcgaataggcgtaggcgtaattggcgtaggcggagttgaatttataggatttaacgttgatagtttcgtttgatggtacgttgttaacgcgcgcggtggagttaggtacggtttttaatgaaggtggtacggtgtttatcgttttattaacgcgttcggtgtgggtgcgcgttta

SEQ ID NO: 37460 - DNA, 766 bp, Artificial Sequence
  chemically treated genomic DNA (Homo sapiens) CpG-island No: 37460
taaacgcgcacccacaccgaacgcgttaataaaacgataaacaccgtaccaccttcattaaaaaccgtacctaactccaccgcgcgcgttaacaacgtaccatcaaacgaaactatcaacgttaaatcctataaattcaactccgcctacgccaattacgcctacgcctattcgaaactaactttcgcctaaacgatatcctattcacgattaccgaaacgatactaacgcaatttatcctatactaatttcaacgttacctacgcctaatcgcgcgaaaaacgaacattttccaaatcatttaccgaaataatacgacttttccacaacccttactaacgattataaaaattctacgcataatcataaacgacttacgcctatttcaccgctacgacgacctaaacgatttcttcattacgatacccgacaaacatcaaatcatactacgcctataccaccgaaacacccgctttcgcctacatcaaaacaatctcatacgacttataatccaattcgcccaacacctaacccgctttaataacatcaccttcgtccaccgccaacgattcaacgcgccccccaacacgaaaactaaaatttaccgtacgaatatccacgttaccatacaacgtcaaaccgttatcctaacgactttaataccaccaataacctccgacaaccacgacgacaaataccactaccgccaatccgatcacgacaaattttttcatcactacaaactcctttacgataatccttacaa

SEQ ID NO: 37461 - DNA, 781 bp, Artificial Sequence
  chemically treated genomic DNA (Homo sapiens) CpG-island No: 37461
agaatagttttagtaggtcgtcgtaaattattatttgtaatgcgttatagtcgaatattgtcgtacgtagtttttatagtttttgtggatcgagttcgaggtcgataataaatagtattagtattattttaatttcggtaaagtgtagaatagattcggtatcggttattagtcgtagtttttacgggttaataatgtagtcggcgattaggtagttaagtatcgattttagattaagacgtatcgtaatgggtataattagcgttgtcgaatcgagataaattagcgtttgaattagcgtatggttatttatgatgggttttttgttattttagtagacgttgtttatagtgacgcgtttgtttttcgagggtttcgtcgttataaataaaggtgtagtgtatggtaaacggtggtagttagtttagttcgtagtagattgtcgtcgtttgtagcggttgcgatagtatattaaagttcggatgcgtattaattttaaaatggtttttttcgtcgtcggtcgttatcgtttatagtaaatgtttgttatgtagcgtcgtgtcgttatgatcgtaagtttagtcgtgggagaaaattttatcgatttaaagtttgaggagcggaggaatgttgtattattgtatcggatgttgttagacgattagatcggcgcgagatagcgttttttgttcggcggtatatcgatttgaagttaggatagagttgataagagagcgaatttcgacgttttttagcgtttttgtttgtttaagtattcgtt

SEQ ID NO: 37462 - DNA, 781 bp, Artificial Sequence
  chemically treated genomic DNA (Homo sapiens) CpG-island No: 37462
aacgaatacttaaacaaacaaaaacgctaaaaaacgtcgaaattcgctctcttatcaactctatcctaacttcaaatcgatataccgccgaacaaaaaacgctatctcgcgccgatctaatcgtctaacaacatccgatacaataatacaacattcctccgctcctcaaactttaaatcgataaaattttctcccacgactaaacttacgatcataacgacacgacgctacataacaaacatttactataaacgataacgaccgacgacgaaaaaaaccattttaaaattaatacgcatccgaactttaatatactatcgcaaccgctacaaacgacgacaatctactacgaactaaactaactaccaccgtttaccatacactacacctttatttataacgacgaaaccctcgaaaaacaaacgcgtcactataaacaacgtctactaaaataacaaaaaacccatcataaataaccatacgctaattcaaacgctaatttatctcgattcgacaacgctaattatacccattacgatacgtcttaatctaaaatcgatacttaactacctaatcgccgactacattattaacccgtaaaaactacgactaataaccgataccgaatctattctacactttaccgaaattaaaataatactaatactatttattatcgacctcgaactcgatccacaaaaactataaaaactacgtacgacaatattcgactataacgcattacaaataataatttacgacgacctactaaaactattct

SEQ ID NO: 37463 - DNA, 781 bp, Artificial Sequence
  chemically treated genomic DNA (Homo sapiens) CpG-island No: 37463
aacggatgtttgaataggtaaggacgttggaaggcgtcgaaattcgtttttttattaattttattttgattttaaatcgatatgtcgtcgagtaggaggcgttgtttcgcgtcgatttgatcgtttggtagtattcgatgtagtggtatagtattttttcgttttttaaattttggatcgataaagtttttttttacggttgggtttacggttatggcggtacggcgttgtatggtaaatatttgttgtgggcggtgacgatcggcggcggggaaagttattttgaaattggtgcgtattcgggttttgatgtgttgtcgtagtcgttataggcgacggtaatttattgcgggttgaattggttgttatcgtttgttatgtattgtatttttatttgtgacgacgaaattttcgaagggtaggcgcgttattataagtaacgtttgttggaatggtaggaggtttattatggatagttatacgttgatttaggcgttgatttatttcggttcggtagcgttgattgtatttattgcggtacgttttggtttgggatcggtatttggttatttgatcgtcggttgtattattggttcgtgggggttgcgattggtgatcgatgtcgaatttattttgtattttgtcgagattggggtggtgttgatgttgtttattatcggtttcgaattcgatttataaaggttgtggaagttgcgtgcggtagtgttcggttgtggcgtattgtagatggtgatttgcggcggtttgttggggttgtttt

SEQ ID NO: 37464 - DNA, 781 bp, Artificial Sequence
  chemically treated genomic DNA (Homo sapiens) CpG-island No: 37464
aaaacaaccccaacaaaccgccgcaaatcaccatctacaatacgccacaaccgaacactaccgcacgcaacttccacaacctttataaatcgaattcgaaaccgataataaacaacatcaacaccaccccaatctcgacaaaatacaaaataaattcgacatcgatcaccaatcgcaacccccacgaaccaataatacaaccgacgatcaaataaccaaataccgatcccaaaccaaaacgtaccgcaataaatacaatcaacgctaccgaaccgaaataaatcaacgcctaaatcaacgtataactatccataataaacctcctaccattccaacaaacgttacttataataacgcgcctacccttcgaaaatttcgtcgtcacaaataaaaatacaatacataacaaacgataacaaccaattcaacccgcaataaattaccgtcgcctataacgactacgacaacacatcaaaacccgaatacgcaccaatttcaaaataactttccccgccgccgatcgtcaccgcccacaacaaatatttaccatacaacgccgtaccgccataaccgtaaacccaaccgtaaaaaaaaactttatcgatccaaaatttaaaaaacgaaaaaatactataccactacatcgaatactaccaaacgatcaaatcgacgcgaaacaacgcctcctactcgacgacatatcgatttaaaatcaaaataaaattaataaaaaaacgaatttcgacgccttccaacgtccttacctattcaaacatccgtt

SEQ ID NO: 37465 - DNA, 563 bp, Artificial Sequence
  chemically treated genomic DNA (Homo sapiens) CpG-island No: 37465
ttagtggtagacgcggtgcggcgtcggtaattatttgtgcgttaagatggtagtttttatcggtgtttatttgaatcgttggtgtgtcggtagcgcgaatgcgtgcggtatcgtttacggtttgttggtcgtttttaataattgcgtacggaacgttgttttttaggcgtattagggttttcgttagtagggtggttttatcggaattagggttggaaattaggttgagtattagttgtttgcgggtagtaaagcgcgcgcggttgcgtttagttagacggttatttttgtttagtacgttaatttcgatttttagtattcgacgttggtttatgttcggtgcgtgagtgttcgtttcgttatgatcgtaatgtaggtcgttttttttagtttggttgggggtaaatttaggcgttttaatgtcggtgatttttattttcgggcgtgtcgtcggggtaaatggcgcgttacgaaacgcggaatgagggttatgtttattattttcgatatataggttgtttttatcgtaatcgtatgttgtatatatcgtttatttttggttt

SEQ ID NO: 37466 - DNA, 563 bp, Artificial Sequence
  chemically treated genomic DNA (Homo sapiens) CpG-island No: 37466
aaaccaaaaataaacgatatatacaacatacgattacgataaaaacaacctatatatcgaaaataataaacataaccctcattccgcgtttcgtaacgcgccatttaccccgacgacacgcccgaaaataaaaatcaccgacattaaaacgcctaaatttacccccaaccaaactaaaaaaaacgacctacattacgatcataacgaaacgaacactcacgcaccgaacataaaccaacgtcgaatactaaaaatcgaaattaacgtactaaacaaaaataaccgtctaactaaacgcaaccgcgcgcgctttactacccgcaaacaactaatactcaacctaatttccaaccctaattccgataaaaccaccctactaacgaaaaccctaatacgcctaaaaaacaacgttccgtacgcaattattaaaaacgaccaacaaaccgtaaacgataccgcacgcattcgcgctaccgacacaccaacgattcaaataaacaccgataaaaactaccatcttaacgcacaaataattaccgacgccgcaccgcgtctaccactaa

SEQ ID NO: 37467 - DNA, 563 bp, Artificial Sequence
  chemically treated genomic DNA (Homo sapiens) CpG-island No: 37467
agattaggagtgagcgatgtgtataatatgcggttgcggtgaaggtaatttgtatatcgagggtgatgaatataatttttatttcgcgtttcgtagcgcgttatttgtttcggcggtacgttcgaagatgaaaattatcggtattaaagcgtttgaatttatttttagttagattgaagaaggcgatttgtattacggttatggcgaagcgggtatttacgtatcgggtatgagttagcgtcggatgttggaagtcgaaattgacgtgttggataaaaataatcgtttggttgaacgtaatcgcgcgcgttttgttgttcgtaagtaattggtgtttaatttggtttttagttttggtttcggtaaaattattttgttgacggaaattttaatgcgtttgaaagatagcgtttcgtgcgtagttattgaaggcgattagtaaatcgtgaacgatgtcgtacgtattcgcgttatcggtatattagcgatttaggtgaatatcggtaaaggttgttattttgacgtatagatgattgtcgacgtcgtatcgcgtttgttattgg

SEQ ID NO: 37468 - DNA, 563 bp, Artificial Sequence
  chemically treated genomic DNA (Homo sapiens) CpG-island No: 37468
ccaataacaaacgcgatacgacgtcgacaatcatctatacgtcaaaataacaacctttaccgatattcacctaaatcgctaatataccgataacgcgaatacgtacgacatcgttcacgatttactaatcgccttcaataactacgcacgaaacgctatctttcaaacgcattaaaatttccgtcaacaaaataattttaccgaaaccaaaactaaaaaccaaattaaacaccaattacttacgaacaacaaaacgcgcgcgattacgttcaaccaaacgattatttttatccaacacgtcaatttcgacttccaacatccgacgctaactcatacccgatacgtaaatacccgcttcgccataaccgtaatacaaatcgccttcttcaatctaactaaaaataaattcaaacgctttaataccgataattttcatcttcgaacgtaccgccgaaacaaataacgcgctacgaaacgcgaaataaaaattatattcatcaccctcgatatacaaattaccttcaccgcaaccgcatattatacacatcgctcactcctaatct

SEQ ID NO: 37469 - DNA, 587 bp, Artificial Sequence
  chemically treated genomic DNA (Homo sapiens) CpG-island No: 37469
cgatttacggtgttttcgttgttggtgtttcgtttggtttgttgatttatagttattacggttttgtcgtattggcgattattataatggtattattcgtattggcgtgggtttgtaacggtatagtgcgtaaagtatcggttttggcgggagaacgtttatcgttgtggagcgttgtcgggtttatttggaaattagggttaggtttggtattataaggcgttggttttgttgttatcgggattttcgtttcgttttattttgttagtaaaggatgggcgatggcgggttttatttttatcgcgtttggcggcgtatttgtcgtgatgcgcgttatgtttggttggatgtcggatcgttttggcggcgtgaaagtggcgattgtttttttgtttgtagaaacggtgggtttgttgttgttttggtaagttttaggtgtatgggtcgtattagcgggcgcggcgtttatcggagtcggatgttcgtttattttttttgcgttgggcgtggaggtggttaacgggttttttacgagaattagattttttgagtggaattcggattagaaattgttttgtgtatagagt

SEQ ID NO: 37470 - DNA, 587 bp, Artificial Sequence
  chemically treated genomic DNA (Homo sapiens) CpG-island No: 37470
actctatacacaaaacaatttctaatccgaattccactcaaaaaatctaattctcgtaaaaaacccgttaaccacctccacgcccaacgcaaaaaaaataaacgaacatccgactccgataaacgccgcgcccgctaatacgacccatacacctaaaacttaccaaaacaacaacaaacccaccgtttctacaaacaaaaaaacaatcgccactttcacgccgccaaaacgatccgacatccaaccaaacataacgcgcatcacgacaaatacgccgccaaacgcgataaaaataaaacccgccatcgcccatcctttactaacaaaataaaacgaaacgaaaatcccgataacaacaaaaccaacgccttataataccaaacctaaccctaatttccaaataaacccgacaacgctccacaacgataaacgttctcccgccaaaaccgatactttacgcactataccgttacaaacccacgccaatacgaataataccattataataatcgccaatacgacaaaaccgtaataactataaatcaacaaaccaaacgaaacaccaacaacgaaaacaccgtaaatcg

SEQ ID NO: 37471 - DNA, 587 bp, Artificial Sequence
  chemically treated genomic DNA (Homo sapiens) CpG-island No: 37471
gttttatatatagggtaatttttaattcgggttttatttagggggtttggttttcgtgagggattcgttaattatttttacgtttagcgtaggaaagataagcgaatattcggtttcggtaaacgtcgcgttcgttaatgcgatttatgtatttggggtttgttagagtagtaataagtttatcgtttttataagtagagagataatcgttatttttacgtcgttaaaacggttcggtatttagttaaatatgacgcgtattacgataaatgcgtcgttaaacgcggtaagagtaaagttcgttatcgtttattttttgttggtaaagtagagcgaaacgaaagtttcgataatagtaaaattaacgttttgtagtgttagatttaattttggtttttagataagttcgataacgttttatagcgatggacgttttttcgttagggtcggtattttgcgtattgtgtcgttataggtttacgttagtacgggtaatattattgtggtgatcgttagtgcggtaaaatcgtaatggttatgaattaataggttaagcggagtattaatagcgagggtatcgtaaatcg

SEQ ID NO: 37472 - DNA, 587 bp, Artificial Sequence
  chemically treated genomic DNA (Homo sapiens) CpG-island No: 37472
cgatttacgataccctcgctattaatactccgcttaacctattaattcataaccattacgattttaccgcactaacgatcaccacaataatattacccgtactaacgtaaacctataacgacacaatacgcaaaataccgaccctaacgaaaaaacgtccatcgctataaaacgttatcgaacttatctaaaaaccaaaattaaatctaacactacaaaacgttaattttactattatcgaaactttcgtttcgctctactttaccaacaaaaaataaacgataacgaactttactcttaccgcgtttaacgacgcatttatcgtaatacgcgtcatatttaactaaataccgaaccgttttaacgacgtaaaaataacgattatctctctacttataaaaacgataaacttattactactctaacaaaccccaaatacataaatcgcattaacgaacgcgacgtttaccgaaaccgaatattcgcttatctttcctacgctaaacgtaaaaataattaacgaatccctcacgaaaaccaaaccccctaaataaaacccgaattaaaaattaccctatatataaaac

SEQ ID NO: 37473 - DNA, 678 bp, Artificial Sequence
  chemically treated genomic DNA (Homo sapiens) CpG-island No: 37473
aatgaacgaagttattgaattgtcgtgggttttagcgcgttcgtgggtttgagcgcgtttcggcgtttcgtttttttttcgtttcgtcgagttaatttcgaggttcgagtagagttttgttcgtttatcgtcgtttattttcggcgtagggcggcggataaagagttttttcgtttttttcgtttataaattatcgtttcgtgaagtttgggtagtttagtagtacgaatcgatattttaattttcgtagtatttataaatgggtcgttataatcgtcgtttttgtcggagtttcgttttcgtttcgaggttttgtgggaagtgaggattttattcgcgcgtttgcgttaaagcgtaggtatcgttgagtttagtgaaattataatttttagtgacgttatagcgacgggcgttgttcggcgggggatggattgcgcgtcgtttttcgattagtagcgggttagtggtcgacgtaggcgggcggcgtggcggggcggaaaatcgttttcgggagagatttttcgtggtggacgtcgttttaggtttttatatttagaaaattaaagggaacgtttaacggagcgatggattttcgtgtttttagtaaagtagggagtacggagagttaaagttaatatagagtttaatcgacgtttaaaggaggtgttttgggttttg

SEQ ID NO: 37474 - DNA, 678 bp, Artificial Sequence
  chemically treated genomic DNA (Homo sapiens) CpG-island No: 37474
caaaacccaaaacacctcctttaaacgtcgattaaactctatattaactttaactctccgtactccctactttactaaaaacacgaaaatccatcgctccgttaaacgttccctttaattttctaaatataaaaacctaaaacgacgtccaccacgaaaaatctctcccgaaaacgattttccgccccgccacgccgcccgcctacgtcgaccactaacccgctactaatcgaaaaacgacgcgcaatccatcccccgccgaacaacgcccgtcgctataacgtcactaaaaattataatttcactaaactcaacgatacctacgctttaacgcaaacgcgcgaataaaatcctcacttcccacaaaacctcgaaacgaaaacgaaactccgacaaaaacgacgattataacgacccatttataaatactacgaaaattaaaatatcgattcgtactactaaactacccaaacttcacgaaacgataatttataaacgaaaaaaacgaaaaaactctttatccgccgccctacgccgaaaataaacgacgataaacgaacaaaactctactcgaacctcgaaattaactcgacgaaacgaaaaaaaaacgaaacgccgaaacgcgctcaaacccacgaacgcgctaaaacccacgacaattcaataacttcgttcatt

SEQ ID NO: 37475 - DNA, 678 bp, Artificial Sequence
  chemically treated genomic DNA (Homo sapiens) CpG-island No: 37475
taaaatttaaaatattttttttaagcgtcggttgggttttatgttagttttgatttttcgtgttttttgttttgttgggaatacggagatttatcgtttcgttaggcgttttttttagttttttaagtgtgggagtttggggcgacgtttattacggaaggtttttttcggaaacggtttttcgtttcgttacgtcgttcgtttacgtcgattattggttcgttgttggtcggaaggcggcgcgtagtttatttttcgtcgggtaacgttcgtcgttgtggcgttattgggagttgtagttttattgggtttagcggtgtttgcgttttagcgtagacgcgcgggtgagatttttattttttataggatttcgggacgggggcggggtttcgatagaggcggcgattgtggcggtttatttgtaaatgttgcggagattgaggtgtcggttcgtgttgttgagttgtttaggttttacggagcggtaatttgtgggcgaaaagagcggaggagttttttgttcgtcgttttgcgtcggagatggacggcggtgggcgggtaggattttgttcggatttcggggttggttcggcggggcgaggagggagcggggcgtcgggacgcgtttaggtttacgggcgcgttgaggtttacggtagtttagtggtttcgtttatt

SEQ ID NO: 37476 - DNA, 678 bp, Artificial Sequence
  chemically treated genomic DNA (Homo sapiens) CpG-island No: 37476
aataaacgaaaccactaaactaccgtaaacctcaacgcgcccgtaaacctaaacgcgtcccgacgccccgctccctcctcgccccgccgaaccaaccccgaaatccgaacaaaatcctacccgcccaccgccgtccatctccgacgcaaaacgacgaacaaaaaactcctccgctcttttcgcccacaaattaccgctccgtaaaacctaaacaactcaacaacacgaaccgacacctcaatctccgcaacatttacaaataaaccgccacaatcgccgcctctatcgaaaccccgcccccgtcccgaaatcctataaaaaataaaaatctcacccgcgcgtctacgctaaaacgcaaacaccgctaaacccaataaaactacaactcccaataacgccacaacgacgaacgttacccgacgaaaaataaactacgcgccgccttccgaccaacaacgaaccaataatcgacgtaaacgaacgacgtaacgaaacgaaaaaccgtttccgaaaaaaaccttccgtaataaacgtcgccccaaactcccacacttaaaaaactaaaaaaaacgcctaacgaaacgataaatctccgtattcccaacaaaacaaaaaacacgaaaaatcaaaactaacataaaacccaaccgacgcttaaaaaaaatattttaaatttta

SEQ ID NO: 37477 - DNA, 610 bp, Artificial Sequence
  chemically treated genomic DNA (Homo sapiens) CpG-island No: 37477
acgttatcgtttcggtggatgaggtagtgattcgattttaatttcggagagttttttggtaatatataattttagtaattataattggaattcgcgtgcgatttttcggcgtgtgttattatgttcgttattagcgaggtattatgggaaatttgttaatattcggtcggtagatgggggcggggcggggcggaattggcgtaggcgcgggagagcgtatttcggtgggcggttttgcgggggaggaataagagtcgcggagatgaagggaaatcgtaattttttagtttgcggagggttttggtttcgaggcggcgttgttgagttatttttgttttcggtcgttcggagtagtgggtttttttgtcgggttaggagggtgatggagggatcgcggcggcggttttattttaattcggcgttggtcggtgttcgttcgtgacggttataagggttgtacgtaatagatagttttgtatttaggatttcgaggttcgatcggcggttgttgcgcgtttagcggagcgttttagtttaagttagggttggagttcggagtttagaaatagtaacgggagaggcggggattcgtaaatttaaaaatgtagat

SEQ ID NO: 37478 - DNA, 610 bp, Artificial Sequence
  chemically treated genomic DNA (Homo sapiens) CpG-island No: 37478
atctacatttttaaatttacgaatccccgcctctcccgttactatttctaaactccgaactccaaccctaacttaaactaaaacgctccgctaaacgcgcaacaaccgccgatcgaacctcgaaatcctaaatacaaaactatctattacgtacaacccttataaccgtcacgaacgaacaccgaccaacgccgaattaaaataaaaccgccgccgcgatccctccatcaccctcctaacccgacaaaaaaacccactactccgaacgaccgaaaacaaaaataactcaacaacgccgcctcgaaaccaaaaccctccgcaaactaaaaaattacgatttcccttcatctccgcgactcttattcctcccccgcaaaaccgcccaccgaaatacgctctcccgcgcctacgccaattccgccccgccccgcccccatctaccgaccgaatattaacaaatttcccataatacctcgctaataacgaacataataacacacgccgaaaaatcgcacgcgaattccaattataattactaaaattatatattaccaaaaaactctccgaaattaaaatcgaatcactacctcatccaccgaaacgataacgt

SEQ ID NO: 37479 - DNA, 610 bp, Artificial Sequence
  chemically treated genomic DNA (Homo sapiens) CpG-island No: 37479
atttgtatttttaggtttgcgaattttcgtttttttcgttattatttttgaatttcgagttttagttttggtttgaattgagacgtttcgttgggcgcgtagtagtcgtcgatcggatttcggggttttggatgtaggattgtttgttacgtatagtttttgtgatcgttacgggcggatatcggttaacgtcgggttggggtgaggtcgtcgtcgcggtttttttattatttttttggttcggtagaggaatttattgtttcgggcggtcggggatagaggtggtttaatagcgtcgtttcgaagttagagtttttcgtaggttagaggattgcggtttttttttattttcgcggtttttatttttttttcgtaaggtcgtttatcggggtacgttttttcgcgtttgcgttaatttcgtttcgtttcgtttttatttatcgatcggatgttagtagattttttatagtgtttcgttagtggcgggtatgataatatacgtcggagggtcgtacgcgggttttagttgtgattgttggagttgtgtattgttaggaggtttttcgagattggggtcgggttattgttttatttatcggagcgatggcgt

SEQ ID NO: 37480 - DNA, 610 bp, Artificial Sequence
  chemically treated genomic DNA (Homo sapiens) CpG-island No: 37480
acgccatcgctccgataaataaaacaataacccgaccccaatctcgaaaaacctcctaacaatacacaactccaacaatcacaactaaaacccgcgtacgaccctccgacgtatattatcatacccgccactaacgaaacactataaaaaatctactaacatccgatcgataaataaaaacgaaacgaaacgaaattaacgcaaacgcgaaaaaacgtaccccgataaacgaccttacgaaaaaaaaataaaaaccgcgaaaataaaaaaaaaccgcaatcctctaacctacgaaaaactctaacttcgaaacgacgctattaaaccacctctatccccgaccgcccgaaacaataaattcctctaccgaaccaaaaaaataataaaaaaaccgcgacgacgacctcaccccaacccgacgttaaccgatatccgcccgtaacgatcacaaaaactatacgtaacaaacaatcctacatccaaaaccccgaaatccgatcgacgactactacgcgcccaacgaaacgtctcaattcaaaccaaaactaaaactcgaaattcaaaaataataacgaaaaaaacgaaaattcgcaaacctaaaaatacaaat

SEQ ID NO: 37481 - DNA, 741 bp, Artificial Sequence
  chemically treated genomic DNA (Homo sapiens) CpG-island No: 37481
tttttttcgggtttagatttttttttggtcgtttttagttttttatttcgatttcggtttttttcgtaagtcgagcgtttttttttttcgtattttattcggaagttttggcgttttttttcgggggcggcggtcggtgaggggtgcgcgggattcgggtcgcgttttggtcggttatttcgtatattcggggcgcgttcggcgggttgggcgcgcgaggtttgttttggagcgtaggagttgaggggttgaagatcgggtcgttttcgtcgtcggggcgggaatttattttttttgaggtaggggcgggcgtttataattattgtttttcgtttcgttaacgtcgttagttaggggataagtcgcggtggaggtggcggagaggtaggaataatcgttgtcgttatcgtcgttttcgtcgtcgagtaggttggatgggaggaggaggcggagattcggttttttgaggggaagtcgtcgttattatcggtttatgattggatagtatagacgttatggcggcgagacgcgttattgcgtttgcgcggttagtttagcgtttaggaagttttttgagtttcgttttgttgtttgtttcgttcgtttggtttggtagttttcggcgcggttttaatgttttgttggcgcgattggttttgattttgttcgtttgtttttttttttggggtaaggaaaagttcgtgggggtcgttcgttcgtttgggagaatgaatataaagt

SEQ ID NO: 37482 - DNA, 741 bp, Artificial Sequence
  chemically treated genomic DNA (Homo sapiens) CpG-island No: 37482
actttatattcattctcccaaacgaacgaacgacccccacgaacttttccttaccccaaaaaaaaaaacaaacgaacaaaatcaaaaccaatcgcgccaacaaaacattaaaaccgcgccgaaaactaccaaaccaaacgaacgaaacaaacaacaaaacgaaactcaaaaaacttcctaaacgctaaactaaccgcgcaaacgcaataacgcgtctcgccgccataacgtctatactatccaatcataaaccgataataacgacgacttcccctcaaaaaaccgaatctccgcctcctcctcccatccaacctactcgacgacgaaaacgacgataacgacaacgattattcctacctctccgccacctccaccgcgacttatcccctaactaacgacgttaacgaaacgaaaaacaataattataaacgcccgcccctacctcaaaaaaaataaattcccgccccgacgacgaaaacgacccgatcttcaacccctcaactcctacgctccaaaacaaacctcgcgcgcccaacccgccgaacgcgccccgaatatacgaaataaccgaccaaaacgcgacccgaatcccgcgcacccctcaccgaccgccgcccccgaaaaaaaacgccaaaacttccgaataaaatacgaaaaaaaaaaacgctcgacttacgaaaaaaaccgaaatcgaaataaaaaactaaaaacgaccaaaaaaaaatctaaacccgaaaaaaa

SEQ ID NO: 37483 - DNA, 741 bp, Artificial Sequence
  chemically treated genomic DNA (Homo sapiens) CpG-island No: 37483
gttttatatttatttttttaggcgagcgagcgatttttacgaatttttttttgttttaaaaaggagggtagacggataggattaaaattagtcgcgttagtaagatattagagtcgcgtcgggaattgttaggttaagcgggcgaagtaagtagtaaggcggggtttaagaggttttttgggcgttgggttggtcgcgtaagcgtagtagcgcgtttcgtcgttatggcgtttgtgttgtttagttataagtcggtagtggcggcgatttttttttaggaagtcgggttttcgttttttttttttatttagtttgttcggcggcggaggcggcggtggcggtagcggttgtttttgttttttcgttatttttatcgcggtttattttttggttggcggcgttggcggggcgggggatagtagttgtagacgttcgtttttgttttagagaaggtgagttttcgtttcggcggcgggggcggttcggtttttagttttttaatttttgcgttttaggataggtttcgcgcgtttagttcgtcgggcgcgtttcgagtgtgcgaaatggtcgattagggcgcggttcgagtttcgcgtattttttatcggtcgtcgttttcggaaagagacgttagggttttcgagtggagtgcggagggaaggggcgttcggtttgcggaggaagtcgaggtcggagtgggaaattaggggcgattaagaggaaatttagattcggaggaaa

SEQ ID NO: 37484 - DNA, 741 bp, Artificial Sequence
  chemically treated genomic DNA (Homo sapiens) CpG-island No: 37484
tttcctccgaatctaaatttcctcttaatcgcccctaatttcccactccgacctcgacttcctccgcaaaccgaacgccccttccctccgcactccactcgaaaaccctaacgtctctttccgaaaacgacgaccgataaaaaatacgcgaaactcgaaccgcgccctaatcgaccatttcgcacactcgaaacgcgcccgacgaactaaacgcgcgaaacctatcctaaaacgcaaaaattaaaaaactaaaaaccgaaccgcccccgccgccgaaacgaaaactcaccttctctaaaacaaaaacgaacgtctacaactactatcccccgccccgccaacgccgccaaccaaaaaataaaccgcgataaaaataacgaaaaaacaaaaacaaccgctaccgccaccgccgcctccgccgccgaacaaactaaataaaaaaaaaaaacgaaaacccgacttcctaaaaaaaaatcgccgccactaccgacttataactaaacaacacaaacgccataacgacgaaacgcgctactacgcttacgcgaccaacccaacgcccaaaaaacctcttaaaccccgccttactacttacttcgcccgcttaacctaacaattcccgacgcgactctaatatcttactaacgcgactaattttaatcctatccgtctaccctcctttttaaaacaaaaaaaaattcgtaaaaatcgctcgctcgcctaaaaaaataaatataaaac

SEQ ID NO: 37485 - DNA, 1716 bp, Artificial Sequence
  chemically treated genomic DNA (Homo sapiens) CpG-island No: 37485
acgattttcgtatttatatacgattttcgtatttatatacgattttcgtatttatatacgatttttcgtatttatatacgatttttatatttatatacgatatttatattaatatacgattttcgtatttatatacgatttttttatttatatacgattttttatatttatatatgatttttcgtatttatatacgattttcgtatttatatataatttttgtatttatatacgatatttatatttatatacgatattttatttatatacgattttttatatttatatacgatttttttatttatatataattttcgtattcgtatatgatttttcgtattcgtatacgatttttatatttatatacgattttttttatttatatacgattttcgtatttatatatgattttttttatttatatatgatttttcgtatttatatacgattttcgtatttatatacgattttcgtatttatatacgattttcgtatttttatatgattttttatattcgtatatgatttttttattcgtatataatttttcgtatttatatacgattttcgtatttttatatgattttttatattcgtatatgatttttttattcgtatataatttttcgtatttatatacgatattcgtatttatatacgaattttttatttatatataattttcgtattcgtatatgatttttatattcgtatatgattttttatattcgtatacgatttttttatttatatacgattttcgtatttatatacgatttttttatttatatataattttcgtattcgtatatgattttttaaatttatatacgatttttatattcgtatatgattttcgtattcgtatacgatttttcgtatttatatatgattttatatttatatatgattttttatatttatatttaatttcgtatttatttatgattttttatatttatatacgattttttgtatttatatacgattattttatttatatacgattttttatatttatatatgattttttgtatttatatatgatttttcgtatttatatacgattttatatttatatacgattttttatatttatatacgatttatttatatacgatttttcgtatttatatacgatttttgtatttatatacgattttttgtatttaaatacgattttttgtttttatatataatttttttatttatatacgattttagtattcgtatatgattttttatatttatatacgatttttttatttatacgcgatttttcgtatttatatacgattttcgtatttatatacgattttcgtatttatatacgatttttttatttatatacgatttttgtatttatatatgattttttatatttgtatacgatatttatatttatatacgatttttcgtatttatatataatttttcgtatttaaatacgatttttcgtatttatatacgatttttcgtatttatatacgatttttttatttatatatgatttttcgtatttatatacgatttttatatttatatatgatgtttttatttatatataattttcgtatttatatataattttcggtttaaatatgatttttttatttatatacggatttttatagtaatatataatttttttatttatatataaattttatatttatatatgattttcgtatttatatatgattttttttaatttat

SEQ ID NO: 37486 - DNA, 1716 bp, Artificial Sequence
  chemically treated genomic DNA (Homo sapiens) CpG-island No: 37486
ataaattaaaaaaaatcatatataaatacgaaaatcatatataaatataaaatttatatataaataaaaaaattatatattactataaaaatccgtatataaataaaaaaatcatatttaaaccgaaaattatatataaatacgaaaattatatataaataaaaacatcatatataaatataaaaatcgtatataaatacgaaaaatcatatataaataaaaaaatcgtatataaatacgaaaaatcgtatataaatacgaaaaatcgtatttaaatacgaaaaattatatataaatacgaaaaatcgtatataaatataaatatcgtatacaaatataaaaaatcatatataaatacaaaaatcgtatataaataaaaaaatcgtatataaatacgaaaatcgtatataaatacgaaaatcgtatataaatacgaaaaatcgcgtataaataaaaaaatcgtatataaatataaaaaatcatatacgaatactaaaatcgtatataaataaaaaaattatatataaaaacaaaaaatcgtatttaaatacaaaaaatcgtatataaatacaaaaatcgtatataaatacgaaaaatcgtatataaataaatcgtatataaatataaaaaatcgtatataaatataaaatcgtatataaatacgaaaaatcatatataaatacaaaaaatcatatataaatataaaaaatcgtatataaataaaataatcgtatataaatacaaaaaatcgtatataaatataaaaaatcataaataaatacgaaattaaatataaatataaaaaatcatatataaatataaaatcatatataaatacgaaaaatcgtatacgaatacgaaaatcatatacgaatataaaaatcgtatataaatttaaaaaatcatatacgaatacgaaaattatatataaataaaaaaatcgtatataaatacgaaaatcgtatataaataaaaaaatcgtatacgaatataaaaaatcatatacgaatataaaaatcatatacgaatacgaaaattatatataaataaaaaattcgtatataaatacgaatatcgtatataaatacgaaaaattatatacgaataaaaaaatcatatacgaatataaaaaatcatataaaaatacgaaaatcgtatataaatacgaaaaattatatacgaataaaaaaatcatatacgaatataaaaaatcatataaaaatacgaaaatcgtatataaatacgaaaatcgtatataaatacgaaaatcgtatataaatacgaaaaatcatatataaataaaaaaaatcatatataaatacgaaaatcgtatataaataaaaaaaatcgtatataaatataaaaatcgtatacgaatacgaaaaatcatatacgaatacgaaaattatatataaataaaaaaatcgtatataaatataaaaaatcgtatataaataaaatatcgtatataaatataaatatcgtatataaatacaaaaattatatataaatacgaaaatcgtatataaatacgaaaaatcatatataaatataaaaaatcgtatataaataaaaaaatcgtatataaatacgaaaatcgtatattaatataaatatcgtatataaatataaaaatcgtatataaatacgaaaaatcgtatataaatacgaaaatcgtatataaatacgaaaatcgtatataaatacgaaaatcgt

SEQ ID NO: 37487 - DNA, 1716 bp, Artificial Sequence
  chemically treated genomic DNA (Homo sapiens) CpG-island No: 37487
atgagttggggggggttatgtatgagtgcggggattatgtatgagtgtggggtttgtgtatgagtgggggggttatgtattattgtgggggttcgtgtatgagtaggggggttatgtttgagtcgggggttgtgtatgagtgcggggattgtgtataagtgggggtattatgtatgagtgtgggggtcgtgtatgagtgcggggggttatgtgtgggtggggggatcgtgtgtgggtgcggggggtcgtgtgtgggtgcggggggtcgtgtttgagtgcggggagttgtgtatgagtgcggggggtcgtgtatgagtgtgggtatcgtgtataagtgtggggggttatgtatgagtgtagagatcgtgtatgagtgggggggtcgtgtatgagtgcgggggtcgtgtatgagtgcgggggtcgtgtatgagtgcgggggatcgcgtatgagtggggggatcgtgtatgagtgtggggggttatgtacgagtgttggggtcgtgtgtgggtgggggggttgtgtgtgggggtaggggatcgtgtttgagtgtaggggatcgtgtatgagtgtaggggtcgtgtatgagtgcgaggggtcgtgtatgagtgggtcgtgtatgagtgtgaggggtcgtgtatgagtgtggggtcgtgtatgagtgcgaggggttatgtatgagtgtagggggttatgtatgagtgtgaggggtcgtgtatgagtggggtggtcgtgtatgagtgtagggggtcgtgtatgagtgtgaggggttatgaatgagtgcggggttgggtatgagtgtgaggggttatgtgtgagtgtggggttatgtatgagtgcgaggggtcgtgtacgagtgcggggattatgtacgagtgtggggatcgtgtatgagtttggggggttatgtacgagtgcggagattgtgtatgagtgggggggtcgtgtatgagtgcgggggtcgtgtatgagtggggggatcgtgtacgagtgtggggagttatgtacgagtgtaggggttatgtacgagtgcggagattgtgtatgagtggggggttcgtgtatgagtgcgggtatcgtgtatgagtgcgggggattgtgtacgagtgaggagattatgtacgagtgtgggggattatgtaagagtgcgggggtcgtgtgtgagtgcgggggattgtgtacgagtgaggagattatgtacgagtgtgagggattatgtaagagtgcgggggtcgtgtatgagtgcggagatcgtgtatgagtgcggagatcgtgtatgagtacgggggattatgtatgagtggggggggttatgtatgagtgcggggatcgtgtatgagtgggggggatcgtgtatgagtgtggggatcgtgtacgagtgcggggggttatgtacgagtgcggagattgtgtatgagtgggggggtcgtgtatgagtgtgggggatcgtgtatgagtggggtgtcgtgtatgagtgtgggtatcgtgtatgagtatagggattgtgtatgagtgcggggatcgtgtatgagtgcggggggttatgtatgagtgtgggggatcgtgtatgagtaggggggtcgtgtatgagtgcgggggtcgtgtattagtgtgggtgtcgtgtatgagtgtggagatcgtgtatgagtgcggggggtcgtgtataagtgcgggggtcgtgtatgagtgcgggggtcgtgtgtgagtgcggaggtcgt

SEQ ID NO: 37488 - DNA, 1716 bp, Artificial Sequence
  chemically treated genomic DNA (Homo sapiens) CpG-island No: 37488
acgacctccgcactcacacacgacccccgcactcatacacgacccccgcacttatacacgaccccccgcactcatacacgatctccacactcatacacgacacccacactaatacacgacccccgcactcatacacgacccccctactcatacacgatcccccacactcatacataaccccccgcactcatacacgatccccgcactcatacacaatccctatactcatacacgatacccacactcatacacgacaccccactcatacacgatcccccacactcatacacgacccccccactcatacacaatctccgcactcgtacataaccccccgcactcgtacacgatccccacactcatacacgatcccccccactcatacacgatccccgcactcatacataaccccccccactcatacataatcccccgtactcatacacgatctccgcactcatacacgatctccgcactcatacacgacccccgcactcttacataatccctcacactcgtacataatctcctcactcgtacacaatcccccgcactcacacacgacccccgcactcttacataatcccccacactcgtacataatctcctcactcgtacacaatcccccgcactcatacacgatacccgcactcatacacgaaccccccactcatacacaatctccgcactcgtacataacccctacactcgtacataactccccacactcgtacacgatccccccactcatacacgacccccgcactcatacacgacccccccactcatacacaatctccgcactcgtacataaccccccaaactcatacacgatccccacactcgtacataatccccgcactcgtacacgacccctcgcactcatacataaccccacactcacacataacccctcacactcatacccaaccccgcactcattcataacccctcacactcatacacgaccccctacactcatacacgaccaccccactcatacacgacccctcacactcatacataaccccctacactcatacataacccctcgcactcatacacgaccccacactcatacacgacccctcacactcatacacgacccactcatacacgacccctcgcactcatacacgacccctacactcatacacgatcccctacactcaaacacgatcccctacccccacacacaacccccccacccacacacgaccccaacactcgtacataaccccccacactcatacacgatccccccactcatacgcgatcccccgcactcatacacgacccccgcactcatacacgacccccgcactcatacacgacccccccactcatacacgatctctacactcatacataaccccccacacttatacacgatacccacactcatacacgaccccccgcactcatacacaactccccgcactcaaacacgaccccccgcacccacacacgaccccccgcacccacacacgatccccccacccacacataaccccccgcactcatacacgacccccacactcatacataatacccccacttatacacaatccccgcactcatacacaacccccgactcaaacataacccccctactcatacacgaacccccacaataatacataacccccccactcatacacaaaccccacactcatacataatccccgcactcatacataaccccccccaactcat

SEQ ID NO: 37489 - DNA, 646 bp, Artificial Sequence
  chemically treated genomic DNA (Homo sapiens) CpG-island No: 37489
gatcgtttcgggtttttagcgaatttcgatttggttcgtagaagtcgcgcgtcgtttatttttcggtttttttttaggcgaggttttttagtattcgaggtttttttttttcgagttcgtagcggtagcgtttttagcgggttttcgggaaggagatagttcgggtattgagggcgggaaagtaaggaagaggttagatttttatgttttgtttttgcgtcgtcgtcgtcgtcgtcgtcgtcgggaagttcggggttcggatgtaggtaattttattagtcgttagaggcgaaagttcgatatttagtttcggttagagaaatgagagggaaagtaaaaatgcgtcgagttttgaggagagttttcgtttttattcgcgttttttttcggtagtcgaattttaaatagttattcgttaggatgtcgtttttttatttatttattcgttatcgtttgcgttttcgtcgtcgcgggcgtaggtatcgtaatcgtagtttcgtttcgggttcgttttcgggttcgtttcgattacgtttcggtttcggtttcggtttttagcgcgcgatttttgagttttagagtttgttataggttgcggttgtttttttttttgtttttttttggttaatttttattaggttttttt

SEQ ID NO: 37490 - DNA, 646 bp, Artificial Sequence
  chemically treated genomic DNA (Homo sapiens) CpG-island No: 37490
aaaaaaacctaataaaaattaaccaaaaaaaaacaaaaaaaaaaacaaccgcaacctataacaaactctaaaactcaaaaatcgcgcgctaaaaaccgaaaccgaaaccgaaacgtaatcgaaacgaacccgaaaacgaacccgaaacgaaactacgattacgatacctacgcccgcgacgacgaaaacgcaaacgataacgaataaataaataaaaaaacgacatcctaacgaataactatttaaaattcgactaccgaaaaaaaacgcgaataaaaacgaaaactctcctcaaaactcgacgcatttttactttccctctcatttctctaaccgaaactaaatatcgaactttcgcctctaacgactaataaaattacctacatccgaaccccgaacttcccgacgacgacgacgacgacgacgacgcaaaaacaaaacataaaaatctaacctcttccttactttcccgccctcaatacccgaactatctccttcccgaaaacccgctaaaaacgctaccgctacgaactcgaaaaaaaaaaacctcgaatactaaaaaacctcgcctaaaaaaaaaccgaaaaataaacgacgcgcgacttctacgaaccaaatcgaaattcgctaaaaacccgaaacgatc

SEQ ID NO: 37491 - DNA, 646 bp, Artificial Sequence
  chemically treated genomic DNA (Homo sapiens) CpG-island No: 37491
gaaaagatttgataaagattaattagaagaaaataaggagggaaataatcgtagtttgtagtaagttttggaatttaggagtcgcgcgttaggggtcggggtcggggtcggggcgtggtcggggcgggttcgggggcgggttcggggcggggttgcggttgcggtgtttgcgttcgcggcggcggaggcgtaggcggtggcgagtgggtgagtgaggaggcggtattttggcgggtggttgtttggggttcggttgtcgggaagaggcgcgggtagaagcgggggttttttttagagttcgacgtatttttatttttttttttatttttttgatcgaagttgggtgtcgggttttcgtttttagcgattggtggaattgtttgtattcgggtttcgggtttttcggcggcggcggcggcggcggcggcgtagggataaggtatggggatttggttttttttttgttttttcgtttttagtattcgagttgtttttttttcggggattcgttgggagcgttgtcgttgcgggttcgagaaaagggagtttcgggtattgagaggtttcgtttgggggaaggtcggagggtgggcggcgcgcggtttttgcggattaagtcggggttcgttaggaattcgagacggtt

SEQ ID NO: 37492 - DNA, 646 bp, Artificial Sequence
  chemically treated genomic DNA (Homo sapiens) CpG-island No: 37492
aaccgtctcgaattcctaacgaaccccgacttaatccgcaaaaaccgcgcgccgcccaccctccgaccttcccccaaacgaaacctctcaatacccgaaactcccttttctcgaacccgcaacgacaacgctcccaacgaatccccgaaaaaaaaacaactcgaatactaaaaacgaaaaaacaaaaaaaaaaccaaatccccataccttatccctacgccgccgccgccgccgccgccgccgaaaaacccgaaacccgaatacaaacaattccaccaatcgctaaaaacgaaaacccgacacccaacttcgatcaaaaaaataaaaaaaaaaataaaaatacgtcgaactctaaaaaaaacccccgcttctacccgcgcctcttcccgacaaccgaaccccaaacaaccacccgccaaaataccgcctcctcactcacccactcgccaccgcctacgcctccgccgccgcgaacgcaaacaccgcaaccgcaaccccgccccgaacccgcccccgaacccgccccgaccacgccccgaccccgaccccgacccctaacgcgcgactcctaaattccaaaacttactacaaactacgattatttccctccttattttcttctaattaatctttatcaaatcttttc

SEQ ID NO: 37493 - DNA, 1179 bp, Artificial Sequence
  chemically treated genomic DNA (Homo sapiens) CpG-island No: 37493
gcgatgttgtttttgttggcgttagatgtttgtttttgcggcgtggaaggacgagtttcgtttttttcggttgtagatttatcgtcgattatcgttttgtaatcggttttaggttgcgggtagttggaggtagtagcggtcgtggcgttgttttcggtgttgaaatcgtgtataaattagcggaagttgaatatttgtatcgatagagagtcgagtattacgaagaagagcgtgagttcgaattattagcgttggtcgcgtaggtagtagtttacggcgagttagacgtttgtgtttacgttcgcgaagtatacggttacggcggttaggatttagaggtagttttatagtgagtagcgtcgttgttttttgtttaggcgtaggtatagcgtagtcgagttcgtttcgtcgtcgttcgggtcggcgacgtcgtcggagtcgttcgagttcgcggagtcgttattttcggcgtagtagtagtagtagcgcgagtagtcgtcgtcgttcgggtagtagtcgttttcggtcgttttttcgttttcggttttcgatttcgacggtaagtttggagttaatttttgtatcgagttcgagtggttcgagttttgtagcggggtgaacgttacgtcgttgtttttttttatttttagtttttcgtttgatttagcggttatgatgtttttatatcggaggagagtttttttttatttgatattttttttcgttgtttttttttttcgttattttttcgtttcgtttcggttttttttttaggcggtgcggttttttttttttttgtttttgcgtcggttcgtttgtcgttcgtcgtcgttcgtcgttcgtcgggttgggcgttgggtcgggttagcggcgcgtttggggtcggtaggagcgtcgtttggttgtttgcgcggagttaagttgttcgcggcgtttcgcgcgcgtttttgttcgtcgttcgcgtttttcgtcgtttcggtttcgttgttgtcgttcgagtcgtcgtcgtcgttagtagtaggagtagtagcggtcgtcgcggcgtttttcggatttgtatatttttttttttttttcgcgcgcgtttttttttttcgtttttttttttttattagttgatttcgagggagaggatgattttatttttttttttttagttgtcgtcgtttttattttggt

SEQ ID NO: 37494 - DNA, 1179 bp, Artificial Sequence
  chemically treated genomic DNA (Homo sapiens) CpG-island No: 37494
accaaaataaaaacgacgacaactaaaaaaaaaaaaataaaatcatcctctccctcgaaatcaactaataaaaaaaaaaaaacgaaaaaaaaaaacgcgcgcgaaaaaaaaaaaaaaatatacaaatccgaaaaacgccgcgacgaccgctactactcctactactaacgacgacgacgactcgaacgacaacaacgaaaccgaaacgacgaaaaacgcgaacgacgaacaaaaacgcgcgcgaaacgccgcgaacaacttaactccgcgcaaacaaccaaacgacgctcctaccgaccccaaacgcgccgctaacccgacccaacgcccaacccgacgaacgacgaacgacgacgaacgacaaacgaaccgacgcaaaaacaaaaaaaaaaaaaaccgcaccgcctaaaaaaaaaaccgaaacgaaacgaaaaaataacgaaaaaaaaaaacaacgaaaaaaaatatcaaataaaaaaaaactctcctccgatataaaaacatcataaccgctaaatcaaacgaaaaactaaaaataaaaaaaaacaacgacgtaacgttcaccccgctacaaaactcgaaccactcgaactcgatacaaaaattaactccaaacttaccgtcgaaatcgaaaaccgaaaacgaaaaaacgaccgaaaacgactactacccgaacgacgacgactactcgcgctactactactactacgccgaaaataacgactccgcgaactcgaacgactccgacgacgtcgccgacccgaacgacgacgaaacgaactcgactacgctatacctacgcctaaacaaaaaacaacgacgctactcactataaaactacctctaaatcctaaccgccgtaaccgtatacttcgcgaacgtaaacacaaacgtctaactcgccgtaaactactacctacgcgaccaacgctaataattcgaactcacgctcttcttcgtaatactcgactctctatcgatacaaatattcaacttccgctaatttatacacgatttcaacaccgaaaacaacgccacgaccgctactacctccaactacccgcaacctaaaaccgattacaaaacgataatcgacgataaatctacaaccgaaaaaaacgaaactcgtccttccacgccgcaaaaacaaacatctaacgccaacaaaaacaacatcgc

SEQ ID NO: 37495 - DNA, 1179 bp, Artificial Sequence
  chemically treated genomic DNA (Homo sapiens) CpG-island No: 37495
gttagggtgggagcgacggtagttggaagagaagggatgaggttattttttttttcggagttagttggtggaggagaggaagcgggaggagggagcgcgcgcgaggggaggagaggaatgtgtaggttcgaggagcgtcgcggcggtcgttgttgtttttgttgttggcggcggcggcggttcgggcggtagtagcgaagtcgggacggcgaggagcgcgggcggcgggtaggggcgcgcgcggggcgtcgcgagtagtttggtttcgcgtaggtagttaggcggcgtttttgtcggttttaggcgcgtcgttagttcggtttagcgtttagttcggcgggcggcgggcggcggcggacggtaggcgagtcgacgtaggagtaggaggagggggagtcgtatcgtttgggagggaagtcggggcgaggcgaggaggtggcgggaggaggagatagcggggaaaggtgttagataaaggagggttttttttcggtgtggaggtattatggtcgttaaattagacgggaggttgaaaatgaagaaaagtagcgacgtggcgtttatttcgttgtagaattcggattattcgggttcggtgtagggattggttttaggtttgtcgtcggggtcgggagtcgaggacgaggaggcggtcgggggcggttgttgttcggacggcggcggttgttcgcgttgttgttgttgttgcgtcgggagtggcggtttcgcgggttcgggcggtttcggcggcgtcgtcggttcgggcggcggcggggcgggttcggttgcgttgtgtttgcgtttgggtagggagtagcggcgttatttattgtgggattgtttttggattttggtcgtcgtggtcgtgtatttcgcggacgtgggtatagacgtttggttcgtcgtggattattatttgcgcggttagcgttggtggttcgggtttacgttttttttcgtggtgttcggttttttgtcggtgtaagtgtttagttttcgttggtttgtgtacgattttagtatcgaggatagcgttacggtcgttgttgtttttagttgttcgtagtttggagtcgattgtaagacggtggtcggcggtgggtttgtagtcggggaaggcgaggttcgtttttttacgtcgtaaaggtaagtatttaacgttagtaagagtaatatcgt

SEQ ID NO: 37496 - DNA, 1179 bp, Artificial Sequence
  chemically treated genomic DNA (Homo sapiens) CpG-island No: 37496
acgatattactcttactaacgttaaatacttacctttacgacgtaaaaaaacgaacctcgccttccccgactacaaacccaccgccgaccaccgtcttacaatcgactccaaactacgaacaactaaaaacaacaacgaccgtaacgctatcctcgatactaaaatcgtacacaaaccaacgaaaactaaacacttacaccgacaaaaaaccgaacaccacgaaaaaaaacgtaaacccgaaccaccaacgctaaccgcgcaaataataatccacgacgaaccaaacgtctatacccacgtccgcgaaatacacgaccacgacgaccaaaatccaaaaacaatcccacaataaataacgccgctactccctacccaaacgcaaacacaacgcaaccgaacccgccccgccgccgcccgaaccgacgacgccgccgaaaccgcccgaacccgcgaaaccgccactcccgacgcaacaacaacaacaacgcgaacaaccgccgccgtccgaacaacaaccgcccccgaccgcctcctcgtcctcgactcccgaccccgacgacaaacctaaaaccaatccctacaccgaacccgaataatccgaattctacaacgaaataaacgccacgtcgctacttttcttcattttcaacctcccgtctaatttaacgaccataatacctccacaccgaaaaaaaaccctcctttatctaacacctttccccgctatctcctcctcccgccacctcctcgcctcgccccgacttccctcccaaacgatacgactccccctcctcctactcctacgtcgactcgcctaccgtccgccgccgcccgccgcccgccgaactaaacgctaaaccgaactaacgacgcgcctaaaaccgacaaaaacgccgcctaactacctacgcgaaaccaaactactcgcgacgccccgcgcgcgcccctacccgccgcccgcgctcctcgccgtcccgacttcgctactaccgcccgaaccgccgccgccgccaacaacaaaaacaacaacgaccgccgcgacgctcctcgaacctacacattcctctcctcccctcgcgcgcgctccctcctcccgcttcctctcctccaccaactaactccgaaaaaaaaaataacctcatcccttctcttccaactaccgtcgctcccaccctaac

SEQ ID NO: 37497 - DNA, 836 bp, Artificial Sequence
  chemically treated genomic DNA (Homo sapiens) CpG-island No: 37497
tagcgtaaattttttcgtttcggaaatcgtggtttgtaagtttaagaggtcggtttttgattcggtcgaatttatttgggagattttggaggtaatgaaggcgagtacgaaggtaaggggcgttcgggtcggaaatcgtgtaattttagatattttttagattcggtttatcgttttcgttcgtagtttgggttagggtgtttgtttatttgggttatgcgtttgcgaatttgcgttatttttttttgaaattcgatatttttttgcggattaagcgataggattggtttagtcgggttagaaaaagtcgttatgttaaaagtcgtcgacgttaattacgcggcgttttcggaaacgtcgggtttttagttttttcgaggcggaagtagaggtaggataggggcggggcgaagcgttaaggcgaggcgaggcgtggcgaggggcggggagggttatgagtcgggcgcggggttggagtaggagttgttcggagaagcgggggcggggtacggggtgtggcgaggcgcggggcggggtataaattgcgttaggggcgagggcggggtacgaggtcgtgtcgagagattgggagaggcgtgagtcgcgcggaggcgcgatatggggcgtgacgaggagcggagggcggggcgtgagtagcgtcgaggcgcggaggcggggcgtaggggcgtgtcgaggcgcggtagcggggtttggggttggggttgggtcgtggggagttttcgtattttcggttgtcggggcgtcggttggtttcgtttaagagtgtttgaaataattacgtttacgtttatttttaaaaaaggtttaaaataaat

SEQ ID NO: 37498 - DNA, 836 bp, Artificial Sequence
  chemically treated genomic DNA (Homo sapiens) CpG-island No: 37498
atttattttaaaccttttttaaaaataaacgtaaacgtaattatttcaaacactcttaaacgaaaccaaccgacgccccgacaaccgaaaatacgaaaactccccacgacccaaccccaaccccaaaccccgctaccgcgcctcgacacgcccctacgccccgcctccgcgcctcgacgctactcacgccccgccctccgctcctcgtcacgccccatatcgcgcctccgcgcgactcacgcctctcccaatctctcgacacgacctcgtaccccgccctcgcccctaacgcaatttataccccgccccgcgcctcgccacaccccgtaccccgcccccgcttctccgaacaactcctactccaaccccgcgcccgactcataaccctccccgcccctcgccacgcctcgcctcgccttaacgcttcgccccgcccctatcctacctctacttccgcctcgaaaaaactaaaaacccgacgtttccgaaaacgccgcgtaattaacgtcgacgacttttaacataacgactttttctaacccgactaaaccaatcctatcgcttaatccgcaaaaaaatatcgaatttcaaaaaaaaataacgcaaattcgcaaacgcataacccaaataaacaaacaccctaacccaaactacgaacgaaaacgataaaccgaatctaaaaaatatctaaaattacacgatttccgacccgaacgccccttaccttcgtactcgccttcattacctccaaaatctcccaaataaattcgaccgaatcaaaaaccgacctcttaaacttacaaaccacgatttccgaaacgaaaaaatttacgcta

SEQ ID NO: 37499 - DNA, 836 bp, Artificial Sequence
  chemically treated genomic DNA (Homo sapiens) CpG-island No: 37499
atttattttagattttttttgaaagtaggcgtgaacgtaattgttttaggtatttttaagcgaagttagtcggcgtttcgatagtcgagggtgcgggagttttttacggtttagttttagttttagatttcgttgtcgcgtttcggtacgtttttgcgtttcgttttcgcgtttcggcgttatttacgtttcgtttttcgtttttcgttacgttttatgtcgcgttttcgcgcgatttacgttttttttagtttttcggtacgatttcgtgtttcgttttcgtttttggcgtaatttatgtttcgtttcgcgtttcgttatatttcgtgtttcgttttcgttttttcgggtaatttttgttttaatttcgcgttcgatttatggtttttttcgtttttcgttacgtttcgtttcgttttagcgtttcgtttcgtttttgttttgtttttattttcgtttcgggggagttgggagttcgacgttttcgggagcgtcgcgtggttagcgtcggcggtttttggtatggcgattttttttggttcggttgggttaattttgtcgtttaattcgtaggaagatgtcgagttttaaaaggaggtggcgtaggttcgtaagcgtataatttaggtgagtaggtattttggtttaggttgcgagcgggggcgatggatcgggtttagagggtatttggggttgtacggttttcggttcgggcgttttttgttttcgtgttcgtttttattatttttagggttttttaagtggattcgatcgaattagggatcgattttttaagtttgtaggttacggttttcgagacgaaagggtttacgttg

SEQ ID NO: 37500 - DNA, 836 bp, Artificial Sequence
  chemically treated genomic DNA (Homo sapiens) CpG-island No: 37500
caacgtaaaccctttcgtctcgaaaaccgtaacctacaaacttaaaaaatcgatccctaattcgatcgaatccacttaaaaaaccctaaaaataataaaaacgaacacgaaaacaaaaaacgcccgaaccgaaaaccgtacaaccccaaataccctctaaacccgatccatcgcccccgctcgcaacctaaaccaaaatacctactcacctaaattatacgcttacgaacctacgccacctccttttaaaactcgacatcttcctacgaattaaacgacaaaattaacccaaccgaaccaaaaaaaatcgccataccaaaaaccgccgacgctaaccacgcgacgctcccgaaaacgtcgaactcccaactcccccgaaacgaaaataaaaacaaaacaaaaacgaaacgaaacgctaaaacgaaacgaaacgtaacgaaaaacgaaaaaaaccataaatcgaacgcgaaattaaaacaaaaattacccgaaaaaacgaaaacgaaacacgaaatataacgaaacgcgaaacgaaacataaattacgccaaaaacgaaaacgaaacacgaaatcgtaccgaaaaactaaaaaaaacgtaaatcgcgcgaaaacgcgacataaaacgtaacgaaaaacgaaaaacgaaacgtaaataacgccgaaacgcgaaaacgaaacgcaaaaacgtaccgaaacgcgacaacgaaatctaaaactaaaactaaaccgtaaaaaactcccgcaccctcgactatcgaaacgccgactaacttcgcttaaaaatacctaaaacaattacgttcacgcctactttcaaaaaaaatctaaaataaat

SEQ ID NO: 37501 - DNA, 642 bp, Artificial Sequence
  chemically treated genomic DNA (Homo sapiens) CpG-island No: 37501
  unsure (428)
tcggaacgattataggttttcggggcgcgtttttttcgttacgcgtttcgttttttacgtttacgtatgcggtttttttaggtttggaaagcgtttagagttaaagagtttaggggtttgttcgcgtagaggtcgacgtggggttagggacgcgttttcggggtttttttcgtcgagttcgtagtttagtattcggagcgatttttcgagttcgaggggcgtgggaattacgcgcgtaagtcggttgtttttttagtttcgggacgtttttttattaggttagtgttaggcgggcggtcgggattcggggatcgtagttttcggagcgtttatttgggtggcgtaggttaaggacgtttatggatagcgcgatttttttttattttatatacgcgtttacgattaaagtgcgtatgttcgatatttgngattaataggaatttcggttcgagggtagttggggttaattatagcgcgtttggcgtgtgggcggtgttttttcgtgttacgcgtgcgcggaggggttgcgttattcggttttgggttttttatcggggagtgggagtggattgaaggtttggcgtttcgttttattgagtcggtttagttagcgtagttgtttttggaacgttagttttttag

SEQ ID NO: 37502 - DNA, 642 bp, Artificial Sequence
  chemically treated genomic DNA (Homo sapiens) CpG-island No: 37502
  unsure (215)
ctaaaaaactaacgttccaaaaacaactacgctaactaaaccgactcaataaaacgaaacgccaaaccttcaatccactcccactccccgataaaaaacccaaaaccgaataacgcaacccctccgcgcacgcgtaacacgaaaaaacaccgcccacacgccaaacgcgctataattaaccccaactaccctcgaaccgaaattcctattaatcncaaatatcgaacatacgcactttaatcgtaaacgcgtatataaaataaaaaaaaatcgcgctatccataaacgtccttaacctacgccacccaaataaacgctccgaaaactacgatccccgaatcccgaccgcccgcctaacactaacctaataaaaaaacgtcccgaaactaaaaaaacaaccgacttacgcgcgtaattcccacgcccctcgaactcgaaaaatcgctccgaatactaaactacgaactcgacgaaaaaaaccccgaaaacgcgtccctaaccccacgtcgacctctacgcgaacaaacccctaaactctttaactctaaacgctttccaaacctaaaaaaaccgcatacgtaaacgtaaaaaacgaaacgcgtaacgaaaaaaacgcgccccgaaaacctataatcgttccga

SEQ ID NO: 37503 - DNA, 642 bp, Artificial Sequence
  chemically treated genomic DNA (Homo sapiens) CpG-island No: 37503
  unsure (215)
ttaagggattggcgttttaggaatagttgcgttggttgagtcggtttagtgaggcggagcgttaagtttttagtttatttttatttttcgatgaaaaatttaagatcgggtagcgtagttttttcgcgtacgcgtaatacgaggagatatcgtttatacgttagacgcgttgtgattggttttagttattttcggatcgagatttttattggttntaggtgtcgagtatgcgtattttggtcgtgggcgcgtgtgtggaatgggaggaggtcgcgttgtttatgggcgtttttggtttgcgttatttaggtgagcgtttcggaggttgcgattttcgggtttcgatcgttcgtttagtattggtttgatggggaagcgtttcgggattggaagggtagtcggtttgcgcgcgtggtttttacgtttttcgggttcgggggatcgtttcgggtgttgggttgcgggttcggcggggaggatttcgggagcgcgtttttggttttacgtcggtttttgcgcgggtaagtttttgggttttttggttttagacgttttttaggtttggggaaatcgtatgcgtggacgtgggaaacggggcgcgtgacggggagggcgcgtttcgggggtttgtggtcgtttcga

SEQ ID NO: 37504 - DNA, 642 bp, Artificial Sequence
  chemically treated genomic DNA (Homo sapiens) CpG-island No: 37504
  unsure (428)
tcgaaacgaccacaaacccccgaaacgcgccctccccgtcacgcgccccgtttcccacgtccacgcatacgatttccccaaacctaaaaaacgtctaaaaccaaaaaacccaaaaacttacccgcgcaaaaaccgacgtaaaaccaaaaacgcgctcccgaaatcctccccgccgaacccgcaacccaacacccgaaacgatcccccgaacccgaaaaacgtaaaaaccacgcgcgcaaaccgactacccttccaatcccgaaacgcttccccatcaaaccaatactaaacgaacgatcgaaacccgaaaatcgcaacctccgaaacgctcacctaaataacgcaaaccaaaaacgcccataaacaacgcgacctcctcccattccacacacgcgcccacgaccaaaatacgcatactcgacacctanaaccaataaaaatctcgatccgaaaataactaaaaccaatcacaacgcgtctaacgtataaacgatatctcctcgtattacgcgtacgcgaaaaaactacgctacccgatcttaaatttttcatcgaaaaataaaaataaactaaaaacttaacgctccgcctcactaaaccgactcaaccaacgcaactattcctaaaacgccaatcccttaa

SEQ ID NO: 37505 - DNA, 737 bp, Artificial Sequence
  chemically treated genomic DNA (Homo sapiens) CpG-island No: 37505
ttacgcgagggattttcgtcgtgggatgtcgtcgtaggagtgggttatttatacgggtcgcgtggatgtcgttcgttttatgtagaggttgttggagcgtttttgttcggagtagttttgggagaagtatcggttcgagtttcgttttttgaagcgggcggatcgcgggttttaagaattgtttgtagaggtttatagattgcgtgttgttcgtgttgacgtcgcgtcgtgcgggttcggaggacgggggcgttttggattatatggtcggatgattacgagtttttatatttcgtcgtggttatcgtgtgttagatcgtgtgttttgagagtttttcgagcgtggggaagaggcggttggcggtgtaggagattttggcggcgcgggttgtacggggttttaggcgtaggaggaggatgaggtggggggcgcggggtagtcgggcggatcggataggaggacgcggattttcgggaggtttttcgagagtcggtttttttttcgttttggggtttcggggtttcgtagcgttcgtttcgcgaaaggttagttttttgtttttgtagcgtttgcggaagaagcgtgcggttcggtgtggtgtgttcgggttcgagttagtaacgttcgttattttttagttcgagcggtcggcgcggaagggtagtattaaggatagcggttatttgtagatttttaagtggcggtataaggaggttaaggaggagaagaggaaggt

SEQ ID NO: 37506 - DNA, 737 bp, Artificial Sequence
  chemically treated genomic DNA (Homo sapiens) CpG-island No: 37506
accttcctcttctcctccttaacctccttataccgccacttaaaaatctacaaataaccgctatccttaatactacccttccgcgccgaccgctcgaactaaaaaataacgaacgttactaactcgaacccgaacacaccacaccgaaccgcacgcttcttccgcaaacgctacaaaaacaaaaaactaacctttcgcgaaacgaacgctacgaaaccccgaaaccccaaaacgaaaaaaaaaccgactctcgaaaaacctcccgaaaatccgcgtcctcctatccgatccgcccgactaccccgcgccccccacctcatcctcctcctacgcctaaaaccccgtacaacccgcgccgccaaaatctcctacaccgccaaccgcctcttccccacgctcgaaaaactctcaaaacacacgatctaacacacgataaccacgacgaaatataaaaactcgtaatcatccgaccatataatccaaaacgcccccgtcctccgaacccgcacgacgcgacgtcaacacgaacaacacgcaatctataaacctctacaaacaattcttaaaacccgcgatccgcccgcttcaaaaaacgaaactcgaaccgatacttctcccaaaactactccgaacaaaaacgctccaacaacctctacataaaacgaacgacatccacgcgacccgtataaataacccactcctacgacgacatcccacgacgaaaatccctcgcgtaa

SEQ ID NO: 37507 - DNA, 737 bp, Artificial Sequence
  chemically treated genomic DNA (Homo sapiens) CpG-island No: 37507
gtttttttttttttttttttggtttttttgtatcgttatttggggatttgtaggtggtcgttgtttttggtgttgttttttcgcgtcggtcgttcgggttggaaggtggcgggcgttgttgattcggattcgggtatattatatcgggtcgtacgtttttttcgtaggcgttgtaggggtaggaggttggtttttcgcggggcgggcgttgcggggtttcgggattttagggcgggagggaggtcggttttcggggagtttttcgggagttcgcgtttttttgttcggttcgttcggttgtttcgcgttttttattttattttttttttgcgtttggggtttcgtgtagttcgcgtcgttaggattttttgtatcgttagtcgttttttttttacgttcggagggtttttagggtatacggtttggtatacgatggttacggcggggtgtagaggttcgtggttattcgattatgtggtttaggacgttttcgtttttcgggttcgtacgacgcggcgttagtacggatagtacgtagtttgtgagtttttgtaggtagtttttggagttcgcggttcgttcgttttagggggcggagttcgggtcggtattttttttagaattgtttcgggtaggggcgttttagtagtttttgtatgagacggacggtatttacgcggttcgtgtaagtggtttatttttgcggcgatattttacggcgggggtttttcgcgtgg

SEQ ID NO: 37508 - DNA, 737 bp, Artificial Sequence
  chemically treated genomic DNA (Homo sapiens) CpG-island No: 37508
ccacgcgaaaaacccccgccgtaaaatatcgccgcaaaaataaaccacttacacgaaccgcgtaaataccgtccgtctcatacaaaaactactaaaacgcccctacccgaaacaattctaaaaaaaataccgacccgaactccgccccctaaaacgaacgaaccgcgaactccaaaaactacctacaaaaactcacaaactacgtactatccgtactaacgccgcgtcgtacgaacccgaaaaacgaaaacgtcctaaaccacataatcgaataaccacgaacctctacaccccgccgtaaccatcgtataccaaaccgtataccctaaaaaccctccgaacgtaaaaaaaaaacgactaacgatacaaaaaatcctaacgacgcgaactacacgaaaccccaaacgcaaaaaaaaaataaaataaaaaacgcgaaacaaccgaacgaaccgaacaaaaaaacgcgaactcccgaaaaactccccgaaaaccgacctccctcccgccctaaaatcccgaaaccccgcaacgcccgccccgcgaaaaaccaacctcctacccctacaacgcctacgaaaaaaacgtacgacccgatataatatacccgaatccgaatcaacaacgcccgccaccttccaacccgaacgaccgacgcgaaaaaacaacaccaaaaacaacgaccacctacaaatccccaaataacgatacaaaaaaaccaaaaaaaaaaaaaaaaaaac

SEQ ID NO: 37509 - DNA, 620 bp, Artificial Sequence
  chemically treated genomic DNA (Homo sapiens) CpG-island No: 37509
ttagtgcgtatgtcgtcggtgggttcggttgcgttacgtcggcgcgcggcggtcgcgtttttttaacggtagtggtattgattcggttcgcgcggtttcggcgttttacgcgcgcgcgtcgttttttcgttcgttcgtttttcggcgtttatatttgagtttattcgcgtacgttcgttcggttcgagaatcgcgtcgcgtttcggtttcgcggaagtttcgtcgcgttatgttttcgtttttcgaagggaaattagagattaaagttggatattcgttcgtcggtattgattttttttttttttttttacgcgcgggtgtcgggggcgggttcgaattcgggggcgtcgggcggggtttcgcggggagggtttcggcgagcgttgagacgggtttcggttttgatgcgttcgaggggtcgggtcgcggagaggtcgggcgtttaggttcgggacgagttcgtcggagtttcggtttcgttttcggcggcggcgaagcgtttttttttgaggatcgcgggcggtcggtatttgtgcgattgcgcgtaggtttcggtgttttgggcgaatttagttgtataatttataataaagttttggcggataatatttatttagagg

SEQ ID NO: 37510 - DNA, 620 bp, Artificial Sequence
  chemically treated genomic DNA (Homo sapiens) CpG-island No: 37510
cctctaaataaatattatccgccaaaactttattataaattatacaactaaattcgcccaaaacaccgaaacctacgcgcaatcgcacaaataccgaccgcccgcgatcctcaaaaaaaaacgcttcgccgccgccgaaaacgaaaccgaaactccgacgaactcgtcccgaacctaaacgcccgacctctccgcgacccgacccctcgaacgcatcaaaaccgaaacccgtctcaacgctcgccgaaaccctccccgcgaaaccccgcccgacgcccccgaattcgaacccgcccccgacacccgcgcgtaaaaaaaaaaaaaaaaaatcaataccgacgaacgaatatccaactttaatctctaatttcccttcgaaaaacgaaaacataacgcgacgaaacttccgcgaaaccgaaacgcgacgcgattctcgaaccgaacgaacgtacgcgaataaactcaaatataaacgccgaaaaacgaacgaacgaaaaaacgacgcgcgcgcgtaaaacgccgaaaccgcgcgaaccgaatcaataccactaccgttaaaaaaacgcgaccgccgcgcgccgacgtaacgcaaccgaacccaccgacgacatacgcactaa

SEQ ID NO: 37511 - DNA, 620 bp, Artificial Sequence
  chemically treated genomic DNA (Homo sapiens) CpG-island No: 37511
tttttaagtaaatattattcgttaaaattttgttataagttgtgtaattgggttcgtttaaggtatcggagtttgcgcgtaatcgtataggtatcggtcgttcgcggtttttaggaagaaacgtttcgtcgtcgtcggaagcggggtcgaagtttcggcgggttcgtttcgggtttgggcgttcgattttttcgcggttcggtttttcgggcgtattaaggtcggaattcgttttagcgttcgtcggggtttttttcgcggagtttcgttcggcgttttcgggttcgagttcgttttcggtattcgcgcgtggagagagaggaaaagagttagtatcggcgggcgggtgtttagttttagtttttagttttttttcgggaggcgaagatatggcgcggcggggttttcgcggggtcgaggcgcggcgcggttttcgggtcgggcgggcgtgcgcgagtgagtttaggtgtgagcgtcggggagcgagcgggcgggagaacgacgcgcgcgcgtggggcgtcggggtcgcgcgagtcgggttagtgttattgtcgttaagggggcgcggtcgtcgcgcgtcgacgtggcgtagtcgagtttatcgacggtatgcgtattga

SEQ ID NO: 37512 - DNA, 620 bp, Artificial Sequence
  chemically treated genomic DNA (Homo sapiens) CpG-island No: 37512
tcaatacgcataccgtcgataaactcgactacgccacgtcgacgcgcgacgaccgcgcccccttaacgacaataacactaacccgactcgcgcgaccccgacgccccacgcgcgcgcgtcgttctcccgcccgctcgctccccgacgctcacacctaaactcactcgcgcacgcccgcccgacccgaaaaccgcgccgcgcctcgaccccgcgaaaaccccgccgcgccatatcttcgcctcccgaaaaaaaactaaaaactaaaactaaacacccgcccgccgatactaactcttttcctctctctccacgcgcgaataccgaaaacgaactcgaacccgaaaacgccgaacgaaactccgcgaaaaaaaccccgacgaacgctaaaacgaattccgaccttaatacgcccgaaaaaccgaaccgcgaaaaaatcgaacgcccaaacccgaaacgaacccgccgaaacttcgaccccgcttccgacgacgacgaaacgtttcttcctaaaaaccgcgaacgaccgatacctatacgattacgcgcaaactccgataccttaaacgaacccaattacacaacttataacaaaattttaacgaataatatttacttaaaaa

SEQ ID NO: 37513 - DNA, 909 bp, Artificial Sequence
  chemically treated genomic DNA (Homo sapiens) CpG-island No: 37513
gtttttgagagtagatagcgcgggttgggagcgtcggtaagggcggttttcgcgtatttggttgttagttcgtagggggttcgtacgtagatttgtttttgttattttagcgttcgggtgcgggttgggggcggtggagttacgaaaggtggtgtcgagagcggagcgtaggatagcgtaggagtttcggcgtatcgcggcgcgtatagatttaggtgagtgttgttttcgtagcgattgttggtcgggcgcggtttttttttttagggtttcgagttgagaagaggggggcgaggggtgttttcgcgggttatcgcgaagagtttagaggttaagttttagcgcgagttggggcgagaggcgtgtgtcgggttcgtagtacggttcgcggcgcggcgcgtttaaagtttattcgtttttcggtttttttcggattttttgtttttcgttaattattcgtttttatttttttggttcggacgtttttattttcggcgggagacgtttgtcgttttcggggcgtttggtacgtcggtgagaggagttggggggttcgtcggcgtagtttgtcgggtagtcgtcgtttttttcgttagatttgcgttcgcgggagaagagagtcgttttttcgcgttgttttttcgttggtttttttgggttttcgcgtgtagatagtttggttcgtttagggaaagaatgagtgtgggacgtgattcgtagtgtgtggttgtgtatttacgtaggtaaacgttttttggtagattcgttattattttatataattagtttagttttcgcgtatatagatacgtttcgtatcgtttacggttttaaatattttttttagcgatttttatatagtttaggcgtttttaatttttggattaatatataggtttgtttaacggg

SEQ ID NO: 37514 - DNA, 909 bp, Artificial Sequence
  chemically treated genomic DNA (Homo sapiens) CpG-island No: 37514
cccgttaaacaaacctatatattaatccaaaaattaaaaacgcctaaactatataaaaatcgctaaaaaaaatatttaaaaccgtaaacgatacgaaacgtatctatatacgcgaaaactaaactaattatataaaataataacgaatctaccaaaaaacgtttacctacgtaaatacacaaccacacactacgaatcacgtcccacactcattctttccctaaacgaaccaaactatctacacgcgaaaacccaaaaaaaccaacgaaaaaacaacgcgaaaaaacgactctcttctcccgcgaacgcaaatctaacgaaaaaaacgacgactacccgacaaactacgccgacgaaccccccaactcctctcaccgacgtaccaaacgccccgaaaacgacaaacgtctcccgccgaaaataaaaacgtccgaaccaaaaaaataaaaacgaataattaacgaaaaacaaaaaatccgaaaaaaaccgaaaaacgaataaactttaaacgcgccgcgccgcgaaccgtactacgaacccgacacacgcctctcgccccaactcgcgctaaaacttaacctctaaactcttcgcgataacccgcgaaaacacccctcgcccccctcttctcaactcgaaaccctaaaaaaaaaaaccgcgcccgaccaacaatcgctacgaaaacaacactcacctaaatctatacgcgccgcgatacgccgaaactcctacgctatcctacgctccgctctcgacaccacctttcgtaactccaccgcccccaacccgcacccgaacgctaaaataacaaaaacaaatctacgtacgaaccccctacgaactaacaaccaaatacgcgaaaaccgcccttaccgacgctcccaacccgcgctatctactctcaaaaac

SEQ ID NO: 37515 - DNA, 909 bp, Artificial Sequence
  chemically treated genomic DNA (Homo sapiens) CpG-island No: 37515
ttcgttgggtaggtttgtgtgttggtttaagggttgggagcgtttgagttgtgtgagggtcgttgggaagggtgtttgaggtcgtgggcggtgcggagcgtgtttgtgtgcgcggaggttgagttggttgtgtgaagtggtagcgggtttgttagagagcgtttatttgcgtgaatgtataattatatattacgggttacgttttatatttattttttttttaggcgggttaggttgtttgtacgcggagatttagagaggttagcggaagggtagcgcgggaaggcggtttttttttttcgcgagcgtagatttggcggaggaggcggcgattgttcggtaggttgcgtcggcgagttttttagttttttttatcgacgtgttaggcgtttcgaaggcgataggcgtttttcgtcgaaaatgaaggcgttcgagttaggaaggtgggggcgggtagttagcgggagataaggagttcggagaaaatcgagaggcgggtaggttttgaacgcgtcgcgtcgcgggtcgtgttgcgagttcggtatacgtttttcgttttagttcgcgttggggtttggtttttaggtttttcgcgatgattcgcgaaaatatttttcgtttttttttttttaattcggaattttggagggagaggtcgcgttcggttagtagtcgttgcgagagtagtatttatttgggtttgtgcgcgtcgcgatgcgtcggggtttttgcgttgttttgcgtttcgttttcggtattatttttcgtggttttatcgtttttagttcgtattcgagcgttgaggtggtaagggtaggtttgcgtgcgagttttttgcgggttggtagttaggtgcgcgagggtcgtttttgtcggcgtttttagttcgcgttgtttgtttttaggaat

SEQ ID NO: 37516 - DNA, 909 bp, Artificial Sequence
  chemically treated genomic DNA (Homo sapiens) CpG-island No: 37516
attcctaaaaacaaacaacgcgaactaaaaacgccgacaaaaacgaccctcgcgcacctaactaccaacccgcaaaaaactcgcacgcaaacctacccttaccacctcaacgctcgaatacgaactaaaaacgataaaaccacgaaaaataataccgaaaacgaaacgcaaaacaacgcaaaaaccccgacgcatcgcgacgcgcacaaacccaaataaatactactctcgcaacgactactaaccgaacgcgacctctccctccaaaattccgaattaaaaaaaaaaaaacgaaaaatattttcgcgaatcatcgcgaaaaacctaaaaaccaaaccccaacgcgaactaaaacgaaaaacgtataccgaactcgcaacacgacccgcgacgcgacgcgttcaaaacctacccgcctctcgattttctccgaactccttatctcccgctaactacccgcccccaccttcctaactcgaacgccttcattttcgacgaaaaacgcctatcgccttcgaaacgcctaacacgtcgataaaaaaaactaaaaaactcgccgacgcaacctaccgaacaatcgccgcctcctccgccaaatctacgctcgcgaaaaaaaaaaaccgccttcccgcgctacccttccgctaacctctctaaatctccgcgtacaaacaacctaacccgcctaaaaaaaaaataaatataaaacgtaacccgtaatatataattatacattcacgcaaataaacgctctctaacaaacccgctaccacttcacacaaccaactcaacctccgcgcacacaaacacgctccgcaccgcccacgacctcaaacacccttcccaacgaccctcacacaactcaaacgctcccaacccttaaaccaacacacaaacctacccaacgaa

SEQ ID NO: 37517 - DNA, 1427 bp, Artificial Sequence
  chemically treated genomic DNA (Homo sapiens) CpG-island No: 37517
tcggacggtatgatatcgttgcgcgaatatgtcggttattacggcggtggtagcggatttggagggtagttgcggtcgtggaatttatcgagtgaaagtgtggatgtagttttgttgtttaattttattcgtggtaatgttcgcgtagacgatttggtacgtaataacggttatgtcgttaacgttatttagttgtattaggattatatcgtcgggtttttttttcggtttagttatcgtttaagttggcgttatttgggtatcggggaggaagaagttcgtgttttttttcgcgaggttgaagcggtatggaaagagtttgtcgaggatgattgttgttgtattgacgttgagcgaaaacgtacgtttattatgatgattcgggaaggtgtggttatgtacgtttttaacggtgaattgttcgtttaggttatttgggatattagttcgtcgcggttttttcggatatagtttcggatggttagttcgaagcgtattagtaattcgaataatatcggcgatagtcggaattgtcgtgtcggtgtgtagattaatgatagcggtgcggcgttgggatattacgttagcgaggacgggtattttggttatatgtcgtagaaatggatatggatatttcgtgagttattcggcgggcgcgtttcgtttatttacgtttttgaattcgtggaggacgggtagattcgcggtgtaaatgtgttttatagcgtgatggagtagataaagatgttcgatacgttgtagaatacgtagttgtagagcgttattgtgaaggcgatgtatgtcgttattattgagagtgagttggatacgtagttagcgatggattttattttgggcgcgaatagttaggagtagcgggaaaggttgatcggttggattggtgaaattgtcgcgtattacgtcgtagcgtcggttcggttgggaggcgtaaaagtatcgtatttgatgtcgggtgatttattgaatttgtagacggtttaggatacggataacggttatttcgtgtttgagtagttattgttgcggtatatcgttgtcgggttgggtgtttcgtatgagtagttttttcggaattacgtttagatgagttattttacggtacgggttagtgcgaacgagtcgtgggcgtattttatggggcggcgaaaattcgtcgtatttcgttaggcgagttagatgtttttgtgttggttggaagaggttatcgttcgtcgcgtggtgacgttatttttaaaagcgcgttttagtttttaggaagttcgtagtgtttgggggaattgcgattggataggtttcggtcgtatggttatcgatggtttgaaagaagtttaggaagcggtgatgttgatagaagtcggattgagtatttacgagaaagagtgcgtaaaacgcggtgacgattatta

SEQ ID NO: 37518 - DNA, 1427 bp, Artificial Sequence
  chemically treated genomic DNA (Homo sapiens) CpG-island No: 37518
taataatcgtcaccgcgttttacgcactctttctcgtaaatactcaatccgacttctatcaacatcaccgcttcctaaacttctttcaaaccatcgataaccatacgaccgaaacctatccaatcgcaattcccccaaacactacgaacttcctaaaaactaaaacgcgcttttaaaaataacgtcaccacgcgacgaacgataacctcttccaaccaacacaaaaacatctaactcgcctaacgaaatacgacgaattttcgccgccccataaaatacgcccacgactcgttcgcactaacccgtaccgtaaaataactcatctaaacgtaattccgaaaaaactactcatacgaaacacccaacccgacaacgatataccgcaacaataactactcaaacacgaaataaccgttatccgtatcctaaaccgtctacaaattcaataaatcacccgacatcaaatacgatacttttacgcctcccaaccgaaccgacgctacgacgtaatacgcgacaatttcaccaatccaaccgatcaacctttcccgctactcctaactattcgcgcccaaaataaaatccatcgctaactacgtatccaactcactctcaataataacgacatacatcgccttcacaataacgctctacaactacgtattctacaacgtatcgaacatctttatctactccatcacgctataaaacacatttacaccgcgaatctacccgtcctccacgaattcaaaaacgtaaataaacgaaacgcgcccgccgaataactcacgaaatatccatatccatttctacgacatataaccaaaatacccgtcctcgctaacgtaatatcccaacgccgcaccgctatcattaatctacacaccgacacgacaattccgactatcgccgatattattcgaattactaatacgcttcgaactaaccatccgaaactatatccgaaaaaaccgcgacgaactaatatcccaaataacctaaacgaacaattcaccgttaaaaacgtacataaccacaccttcccgaatcatcataataaacgtacgttttcgctcaacgtcaatacaacaacaatcatcctcgacaaactctttccataccgcttcaacctcgcgaaaaaaaacacgaacttcttcctccccgatacccaaataacgccaacttaaacgataactaaaccgaaaaaaaaacccgacgatataatcctaatacaactaaataacgttaacgacataaccgttattacgtaccaaatcgtctacgcgaacattaccacgaataaaattaaacaacaaaactacatccacactttcactcgataaattccacgaccgcaactaccctccaaatccgctaccaccgccgtaataaccgacatattcgcgcaacgatatcataccgtccga

SEQ ID NO: 37519 - DNA, 1427 bp, Artificial Sequence
  chemically treated genomic DNA (Homo sapiens) CpG-island No: 37519
tgatagtcgttatcgcgttttgcgtattttttttcgtaggtatttagttcggtttttattagtattatcgttttttgaattttttttagattatcgatggttatacgatcggagtttatttagtcgtagtttttttaggtattgcgggttttttgaaaattgaagcgcgtttttgaaggtaacgttattacgcggcgaacgatggttttttttagttagtatagaaatatttggttcgtttgacgggatgcgacgaattttcgtcgttttataaagtacgtttacgattcgttcgtattggttcgtgtcgtggagtagtttatttgggcgtaatttcgggaaagttgtttatacgagatatttagttcggtagcgatatatcgtagtagtgattgtttaaatacggagtagtcgttattcgtattttgagtcgtttgtaggtttagtgagttattcggtattaggtgcggtatttttgcgttttttagtcggatcggcgttgcggcgtaatacgcggtaattttattaatttagtcggttagtttttttcgttgtttttgattgttcgcgtttagaataaaatttatcgttgattgcgtatttagtttatttttaatggtggcggtatatatcgtttttataatggcgttttgtagttgcgtgttttgtagcgtgtcgagtatttttatttgttttattacgttgtaaaatatatttgtatcgcgagtttgttcgttttttacgggtttaaaaacgtgaatgaacgaggcgcgttcgtcgggtaatttacggggtatttatgtttatttttgcggtatatagttaggatattcgttttcgttgacgtaatattttagcgtcgtatcgttgttattaatttgtatatcggtacggtagtttcggttgtcgtcggtattgttcgggttgttgatgcgtttcgggttgattattcggaattgtgttcggaaaagtcgcgacgaattggtattttaggtggtttgaacgaatagtttatcgttaaaggcgtgtatggttatattttttcgaattattatggtaaacgtgcgttttcgtttaacgttaatgtagtagtagttattttcggtaaattttttttatgtcgttttaatttcgcgggaaaaggtacgggttttttttttttcgatgtttagatagcgttagtttgggcgatgattgagtcggaaaaaagattcgacgatatgattttgatgtagttggatggcgttggcggtatagtcgttattgcgtattagatcgtttgcgcgggtattgttacgggtaaagttgggtaatagggttgtatttatatttttattcggtgggttttacgatcgtaattgttttttaaattcgttgttatcgtcgtgataatcggtatattcgcgtagcgatgttatgtcgttcgg

SEQ ID NO: 37520 - DNA, 1427 bp, Artificial Sequence
  chemically treated genomic DNA (Homo sapiens) CpG-island No: 37520
ccgaacgacataacatcgctacgcgaatataccgattatcacgacgataacaacgaatttaaaaaacaattacgatcgtaaaacccaccgaataaaaatataaatacaaccctattacccaactttacccgtaacaatacccgcgcaaacgatctaatacgcaataacgactataccgccaacgccatccaactacatcaaaatcatatcgtcgaatcttttttccgactcaatcatcgcccaaactaacgctatctaaacatcgaaaaaaaaaaaacccgtaccttttcccgcgaaattaaaacgacataaaaaaaatttaccgaaaataactactactacattaacgttaaacgaaaacgcacgtttaccataataattcgaaaaaatataaccatacacgcctttaacgataaactattcgttcaaaccacctaaaataccaattcgtcgcgacttttccgaacacaattccgaataatcaacccgaaacgcatcaacaacccgaacaataccgacgacaaccgaaactaccgtaccgatatacaaattaataacaacgatacgacgctaaaatattacgtcaacgaaaacgaatatcctaactatataccgcaaaaataaacataaataccccgtaaattacccgacgaacgcgcctcgttcattcacgtttttaaacccgtaaaaaacgaacaaactcgcgatacaaatatattttacaacgtaataaaacaaataaaaatactcgacacgctacaaaacacgcaactacaaaacgccattataaaaacgatatataccgccaccattaaaaataaactaaatacgcaatcaacgataaattttattctaaacgcgaacaatcaaaaacaacgaaaaaaactaaccgactaaattaataaaattaccgcgtattacgccgcaacgccgatccgactaaaaaacgcaaaaataccgcacctaataccgaataactcactaaacctacaaacgactcaaaatacgaataacgactactccgtatttaaacaatcactactacgatatatcgctaccgaactaaatatctcgtataaacaactttcccgaaattacgcccaaataaactactccacgacacgaaccaatacgaacgaatcgtaaacgtactttataaaacgacgaaaattcgtcgcatcccgtcaaacgaaccaaatatttctatactaactaaaaaaaaccatcgttcgccgcgtaataacgttaccttcaaaaacgcgcttcaattttcaaaaaacccgcaatacctaaaaaaactacgactaaataaactccgatcgtataaccatcgataatctaaaaaaaattcaaaaaacgataatactaataaaaaccgaactaaatacctacgaaaaaaaatacgcaaaacgcgataacgactatca

SEQ ID NO: 37521 - DNA, 778 bp, Artificial Sequence
  chemically treated genomic DNA (Homo sapiens) CpG-island No: 37521
tagtaggttcgtgaaacgatggagcgtcgtgtagtcggttttaaatcgttcgtttgggcggttgtagtatttgaattcgggttgcgataattaatagaggaggagaagagtgatagtagagttgcgtaatttttcgtatattgttagtatggtttttaatgagtcgttgatgtttgaattcgtttatgcgcgggtttttttttgtgcgtttgtaggttagtttgggattagtagtttgacggatgcggtgttcggcgatagtttgattgtttaggaggtattcgcgacgttggtattattcggtgatgatgacggattacgataggttcgtagttattaggttatgaacggtatcgtcgtgttgtcggtgttcggtacgttggttagtcggacgcgggcgttgtagtcgtattcggggatgatcggttataacggtattatcgttcgtttgtaataggttgttagcgattcgatggtggacggtattttgttcgatatggatacgttcggcgggatggtggcgggggtatttgattgcgttgatattatcgttcgtgtgcgtgatataaaatcggtatgggcgtttgttaacgatatgaattgtagtgtaggttagttgtttgttagtgtcgtttttcggcgtttggttacgtagatcgttcggataggttttatcggcgttatgatggtttatagtaattacggtgttgcgttggagaaatagggtgtggaaattacgttgatttatagcggtagttataaggtggatggtaatttt

SEQ ID NO: 37522 - DNA, 778 bp, Artificial Sequence
  chemically treated genomic DNA (Homo sapiens) CpG-island No: 37522
aaaattaccatccaccttataactaccgctataaatcaacgtaatttccacaccctatttctccaacgcaacaccgtaattactataaaccatcataacgccgataaaacctatccgaacgatctacgtaaccaaacgccgaaaaacgacactaacaaacaactaacctacactacaattcatatcgttaacaaacgcccataccgattttatatcacgcacacgaacgataatatcaacgcaatcaaatacccccgccaccatcccgccgaacgtatccatatcgaacaaaataccgtccaccatcgaatcgctaacaacctattacaaacgaacgataataccgttataaccgatcatccccgaatacgactacaacgcccgcgtccgactaaccaacgtaccgaacaccgacaacacgacgataccgttcataacctaataactacgaacctatcgtaatccgtcatcatcaccgaataataccaacgtcgcgaatacctcctaaacaatcaaactatcgccgaacaccgcatccgtcaaactactaatcccaaactaacctacaaacgcacaaaaaaaaacccgcgcataaacgaattcaaacatcaacgactcattaaaaaccatactaacaatatacgaaaaattacgcaactctactatcactcttctcctcctctattaattatcgcaacccgaattcaaatactacaaccgcccaaacgaacgatttaaaaccgactacacgacgctccatcgtttcacgaacctacta

SEQ ID NO: 37523 - DNA, 778 bp, Artificial Sequence
  chemically treated genomic DNA (Homo sapiens) CpG-island No: 37523
ggggttgttatttattttatggttgtcgttgtaaattagcgtgatttttatattttgtttttttagcgtagtatcgtaattattgtgagttattatgacgtcgatggagtttgttcgggcggtttgcgtgattagacgtcgggaggcggtattggtaagtaattgatttgtattgtagtttatgtcgttggtaagcgtttatatcggttttatgttacgtatacgggcgatgatgttagcgtagttaaatgttttcgttattatttcgtcgggcgtgtttatatcgagtagaatgtcgtttattatcggatcgttggtagtttgttgtagacgggcgataatgtcgttgtaatcggttattttcgagtacggttgtagcgttcgcgttcggttgattagcgtgtcggatatcggtagtacggcgatgtcgtttatgatttgataattgcgggtttgtcgtggttcgttattattatcggataatgttagcgtcgcgagtgttttttgggtagttaggttgtcgtcggatatcgtattcgttaggttgttgattttaagttggtttgtaagcgtataaaagaaaattcgcgtataggcgggtttaagtattagcggtttattaaaggttatgttggtaatatgcgggagattacgtagttttgttgttatttttttttttttttgttgattgtcgtagttcggatttaaatgttgtagtcgtttaggcgggcggtttaagatcggttgtacggcgttttatcgttttacggatttgttg

SEQ ID NO: 37524 - DNA, 778 bp, Artificial Sequence
  chemically treated genomic DNA (Homo sapiens) CpG-island No: 37524
caacaaatccgtaaaacgataaaacgccgtacaaccgatcttaaaccgcccgcctaaacgactacaacatttaaatccgaactacgacaatcaacaaaaaaaaaaaaaaataacaacaaaactacgtaatctcccgcatattaccaacataacctttaataaaccgctaatacttaaacccgcctatacgcgaattttcttttatacgcttacaaaccaacttaaaatcaacaacctaacgaatacgatatccgacgacaacctaactacccaaaaaacactcgcgacgctaacattatccgataataataacgaaccacgacaaacccgcaattatcaaatcataaacgacatcgccgtactaccgatatccgacacgctaatcaaccgaacgcgaacgctacaaccgtactcgaaaataaccgattacaacgacattatcgcccgtctacaacaaactaccaacgatccgataataaacgacattctactcgatataaacacgcccgacgaaataataacgaaaacatttaactacgctaacatcatcgcccgtatacgtaacataaaaccgatataaacgcttaccaacgacataaactacaatacaaatcaattacttaccaataccgcctcccgacgtctaatcacgcaaaccgcccgaacaaactccatcgacgtcataataactcacaataattacgatactacgctaaaaaaacaaaatataaaaatcacgctaatttacaacgacaaccataaaataaataacaacccc

SEQ ID NO: 37525 - DNA, 674 bp, Artificial Sequence
  chemically treated genomic DNA (Homo sapiens) CpG-island No: 37525
atttttcggatgacgttcgggagatattgtagtttcggatggacgtaattcgttagatgtttgcgtagaaggtgtcggtatatatcggtttgttcgtgtaggttgtgttggatatcgaggttgtagtgtatagcggttaggaggttattgatgtcggattggttgatgaatttgttaatagtatcgatgcgattatcgttatgcgtgatgtattggatgtacgtaaatttcgttttttaggagggcgaatgattaaagagatttaattaataattgttttagttattgtttcgtaggttgacgttattgacgtggtgttagcgacggagggcgagaacgttagcgcggcgtagtcggacgtgaacgcgtagattatcgtagcggttgcggtagaaaatagtcgtattatggggatatttaattgtgaggaggtttacggacgcgaagaataggtacgcgtgttggtagaaattttcggtatgatcgtgaaaacggttcgtcgtattttggtcgtagtattatagagtgtataggcgcgtagtgatattgcgttggatcgtttgatgtagggggtatcggtatcgttggttgtaggtaattcggtatttgatgtcgttaacgatttgttgaatatattagtgtaagggatgtttatgacgagtaaagaaattttt

SEQ ID NO: 37526 - DNA, 674 bp, Artificial Sequence
  chemically treated genomic DNA (Homo sapiens) CpG-island No: 37526
aaaaatttctttactcgtcataaacatcccttacactaatatattcaacaaatcgttaacgacatcaaataccgaattacctacaaccaacgataccgataccccctacatcaaacgatccaacgcaatatcactacgcgcctatacactctataatactacgaccaaaatacgacgaaccgttttcacgatcataccgaaaatttctaccaacacgcgtacctattcttcgcgtccgtaaacctcctcacaattaaatatccccataatacgactattttctaccgcaaccgctacgataatctacgcgttcacgtccgactacgccgcgctaacgttctcgccctccgtcgctaacaccacgtcaataacgtcaacctacgaaacaataactaaaacaattattaattaaatctctttaatcattcgccctcctaaaaaacgaaatttacgtacatccaatacatcacgcataacgataatcgcatcgatactattaacaaattcatcaaccaatccgacatcaataacctcctaaccgctatacactacaacctcgatatccaacacaacctacacgaacaaaccgatatataccgacaccttctacgcaaacatctaacgaattacgtccatccgaaactacaatatctcccgaacgtcatccgaaaaat

SEQ ID NO: 37527 - DNA, 674 bp, Artificial Sequence
  chemically treated genomic DNA (Homo sapiens) CpG-island No: 37527
aaaggtttttttgttcgttataaatattttttatattggtgtgtttagtaaatcgttaacggtattagatgtcgggttatttgtagttagcggtgtcggtgttttttgtattagacgatttagcgtagtgttattgcgcgtttgtgtattttgtggtgttgcggttagaatgcggcgggtcgtttttacggttatatcgggggtttttgttagtacgcgtgtttgtttttcgcgttcgtgagtttttttatagttgagtatttttataatgcggttgttttttgtcgtaatcgttgcggtgatttgcgcgtttacgttcggttgcgtcgcgttggcgttttcgtttttcgtcgttggtattacgttagtaacgttagtttgcgaagtagtggttgaaatagttgttgattgagtttttttggttattcgtttttttgagagacgggatttacgtgtatttagtgtattacgtatgacggtgatcgtatcggtgttgttaataagtttattagttagttcggtattaatggttttttgatcgttgtatattgtagtttcggtatttagtataatttgtacggataggtcggtatatgtcgatattttttgcgtaaatatttggcgggttgcgtttattcgggattgtagtgtttttcggacgttattcggaagat

SEQ ID NO: 37528 - DNA, 674 bp, Artificial Sequence
  chemically treated genomic DNA (Homo sapiens) CpG-island No: 37528
atcttccgaataacgtccgaaaaacactacaatcccgaataaacgcaacccgccaaatatttacgcaaaaaatatcgacatataccgacctatccgtacaaattatactaaataccgaaactacaatatacaacgatcaaaaaaccattaataccgaactaactaataaacttattaacaacaccgatacgatcaccgtcatacgtaatacactaaatacacgtaaatcccgtctctcaaaaaaacgaataaccaaaaaaactcaatcaacaactatttcaaccactacttcgcaaactaacgttactaacgtaataccaacgacgaaaaacgaaaacgccaacgcgacgcaaccgaacgtaaacgcgcaaatcaccgcaacgattacgacaaaaaacaaccgcattataaaaatactcaactataaaaaaactcacgaacgcgaaaaacaaacacgcgtactaacaaaaacccccgatataaccgtaaaaacgacccgccgcattctaaccgcaacaccacaaaatacacaaacgcgcaataacactacgctaaatcgtctaatacaaaaaacaccgacaccgctaactacaaataacccgacatctaataccgttaacgatttactaaacacaccaatataaaaaatatttataacgaacaaaaaaaccttt

SEQ ID NO: 37529 - DNA, 1074 bp, Artificial Sequence
  chemically treated genomic DNA (Homo sapiens) CpG-island No: 37529
ttcgttttcgtggcggttttatttttgaatttacgtcgggatatgttaagtcgaagtatgaagtgaattcgtagatgattttgcgtcgtttgtcggatgaagattcgtagaatttggcggattcggtttatcgtcgtcgtcgtattattatgtagaatatgcgtgacgaagagttggttattgtttaggtcgaagagatgtaggtagtttttgtcgtgtttaagggtaaatatattatgatcggtgaagttttcgattcggttgaggtggatatgggtcgtagtgaggagaataatattacgtagttcggcggtacggagtggagtaagcgtgataagtttacgtatgattcgatcgacgatatcgaagtttacgcgttgaacgttagcggtgtggtgaatattatcgtgttcgattcgaaaggttgggcgttgtttcgtttttttaaagtcgttaaggagaagttggatattcgtcgtggttttaatttcgagttggagatagcggtgaaagatttgggtaaagcggtgttttataaggggatgtatggcgatgtggttatcgtcgtgtatttcggatagtacgtggaaaacggcgttaaaaagaattttttgtcggataatacgatggtgttggggaatatttaggtacgcggtttgcgtatttatggttgtatttaggatgcggacgtatagcgcgaaggtattaacgtttttgttcgttattcgaaaaattgggtgattatcggcgattcggcgcgtgagtttattatgatttagttagtatcgttgatgttgttggttgattttgatgagttcgtgttcgtataattggcgtaattatggtttttcggggttattgtttttttgtggaggagtttatgacgaaagatgaattgattgttcgttttcgttcgttgggtgaataattgaatcgtgatgttagtttgacggggacgaaagaagaattggcgtttcgtgtggtagagttgaaagaggagtttgatgatacggatgaaattgtcggttaggatattttttttagtcgggaaaatgtgttgatcggatatgaaaa

SEQ ID NO: 37530 - DNA, 1074 bp, Artificial Sequence
  chemically treated genomic DNA (Homo sapiens) CpG-island No: 37530
ttttcatatccgatcaacacattttcccgactaaaaaaaatatcctaaccgacaatttcatccgtatcatcaaactcctctttcaactctaccacacgaaacgccaattcttctttcgtccccgtcaaactaacatcacgattcaattattcacccaacgaacgaaaacgaacaatcaattcatctttcgtcataaactcctccacaaaaaaacaataaccccgaaaaaccataattacgccaattatacgaacacgaactcatcaaaatcaaccaacaacatcaacgatactaactaaatcataataaactcacgcgccgaatcgccgataatcacccaatttttcgaataacgaacaaaaacgttaataccttcgcgctatacgtccgcatcctaaatacaaccataaatacgcaaaccgcgtacctaaatattccccaacaccatcgtattatccgacaaaaaattctttttaacgccgttttccacgtactatccgaaatacacgacgataaccacatcgccatacatccccttataaaacaccgctttacccaaatctttcaccgctatctccaactcgaaattaaaaccacgacgaatatccaacttctccttaacgactttaaaaaaacgaaacaacgcccaacctttcgaatcgaacacgataatattcaccacaccgctaacgttcaacgcgtaaacttcgatatcgtcgatcgaatcatacgtaaacttatcacgcttactccactccgtaccgccgaactacgtaatattattctcctcactacgacccatatccacctcaaccgaatcgaaaacttcaccgatcataatatatttacccttaaacacgacaaaaactacctacatctcttcgacctaaacaataaccaactcttcgtcacgcatattctacataataatacgacgacgacgataaaccgaatccgccaaattctacgaatcttcatccgacaaacgacgcaaaatcatctacgaattcacttcatacttcgacttaacatatcccgacgtaaattcaaaaataaaaccgccacgaaaacgaa

SEQ ID NO: 37531 - DNA, 1074 bp, Artificial Sequence
  chemically treated genomic DNA (Homo sapiens) CpG-island No: 37531
tttttatgttcggttagtatattttttcggttgagaggggtgttttgatcggtagttttattcgtgttattaagttttttttttagttttgttatacggagcgttagtttttttttcgttttcgttaggttgatattacggtttagttgtttatttagcgagcggagacgggtaattagtttatttttcgttatggatttttttatagagaaataatggtttcgaagggttatgattacgttagttgtacggatacgaatttattagggttagttagtagtattagcggtgttgattgaattatggtgaatttacgcgtcggatcgtcggtggttatttagtttttcgggtaacgggtagaggcgttaatgttttcgcgttgtgcgttcgtattttgaatgtagttataggtgcgtagatcgcgtgtttgagtgttttttagtattatcgtgttgttcggtaggaagttttttttgacgtcgttttttacgtattgttcggaatatacgacgatggttatatcgttatatatttttttataggatatcgttttgtttaggttttttatcgttgtttttagttcggaattagagttacgacgggtatttagtttttttttgacggttttgaaggaacggaatagcgtttagtttttcggatcgaatacgatgatatttattatatcgttggcgtttagcgcgtaggtttcgatatcgtcggtcgggttatacgtggatttgttacgtttgttttatttcgtgtcgtcggattgcgtgatgttattttttttattgcggtttatatttattttaatcggatcgaaggttttatcggttatggtgtatttgtttttaagtacggtagaaattgtttgtattttttcgatttgagtaatggttagtttttcgttacgtatgttttgtatgatgatgcgacggcggcggtaagtcgggttcgttagattttgcggatttttattcggtaggcgacgtagggttatttgcggatttattttatgtttcggtttgatatatttcggcgtaaatttagaggtggagtcgttacgggaacgga

SEQ ID NO: 37532 - DNA, 1074 bp, Artificial Sequence
  chemically treated genomic DNA (Homo sapiens) CpG-island No: 37532
tccgttcccgtaacgactccacctctaaatttacgccgaaatatatcaaaccgaaacataaaataaatccgcaaataaccctacgtcgcctaccgaataaaaatccgcaaaatctaacgaacccgacttaccgccgccgtcgcatcatcatacaaaacatacgtaacgaaaaactaaccattactcaaatcgaaaaaatacaaacaatttctaccgtacttaaaaacaaatacaccataaccgataaaaccttcgatccgattaaaataaatataaaccgcaataaaaaaaataacatcacgcaatccgacgacacgaaataaaacaaacgtaacaaatccacgtataacccgaccgacgatatcgaaacctacgcgctaaacgccaacgatataataaatatcatcgtattcgatccgaaaaactaaacgctattccgttccttcaaaaccgtcaaaaaaaaactaaatacccgtcgtaactctaattccgaactaaaaacaacgataaaaaacctaaacaaaacgatatcctataaaaaaatatataacgatataaccatcgtcgtatattccgaacaatacgtaaaaaacgacgtcaaaaaaaacttcctaccgaacaacacgataatactaaaaaacactcaaacacgcgatctacgcacctataactacattcaaaatacgaacgcacaacgcgaaaacattaacgcctctacccgttacccgaaaaactaaataaccaccgacgatccgacgcgtaaattcaccataattcaatcaacaccgctaatactactaactaaccctaataaattcgtatccgtacaactaacgtaatcataacccttcgaaaccattatttctctataaaaaaatccataacgaaaaataaactaattacccgtctccgctcgctaaataaacaactaaaccgtaatatcaacctaacgaaaacgaaaaaaaaactaacgctccgtataacaaaactaaaaaaaaaacttaataacacgaataaaactaccgatcaaaacacccctctcaaccgaaaaaatatactaaccgaacataaaaa

SEQ ID NO: 37533 - DNA, 1140 bp, Artificial Sequence
  chemically treated genomic DNA (Homo sapiens) CpG-island No: 37533
gattagcgtagtcggatatcgtgattttggatacgtttgaattggttacggtcgtggtattggtgaagttgtatattgatgtattttacgttacgcgggatgaatttgtggtatttgtgttgtcgggaacggcgtttcgtgtttttgtcggtgtggtagtcgaaatgatagagcgcggtttggttagaatgtaataacgggaggcgttgtggttgatttcgataatttgttcgatgttgttattgttcgcgtcgatgaaacgatacgcgggtatatgggaacgttagttattattatattcggtgagtagttaggtgcggtgatacgtggtgtttttgatgattttgaaaatattagttatgtcggatagggcgtgcgcgttgaaggttttagttcgtttttgtttgttcggattgatgaggtgcggtagttgcggcgtggagatacgttgattatcggtgaggaaaatttttgggtagatcgggtttcgtcggatgatggcggaagttgttatttttggtttggacggggcgtatcgtttgtcgttaatcgtcgtcgttgaaagggggatgtatggttataaaaggttttgagtaggtcgttgaaaattttagtcgtattagtaaaacggcggtgtttggtgtcgtcgtaatggttattaatcgcgttgttttattcgcgatatcgtagtcggcgttataggttgttcgtgagataaaggtacgtcggaaattggtaaaggaaagggttaggttgaaaagggttacggttaaaaattcgtaggttagaattaaagttaatcggggggatttgttcgtaattaagttgggtaatgcgcgggttgttttttcgcgtcgtaggcgtcgtaaaaaggggtagcgtttatttttgaaaggtggcggtagcgtgtttgtggtgggtaatcgtcgtattttcggcgcgtttatttagtaattgaaaaatggtcggtggtatgttatgtagcgtgtggttgggaaaaatcgttattttattgatgtggtgaaaatttcgatggcggtgtcgttgattacggcgtttaaataaaatattgagcggatacggcgtgaacgtttttcgaaagagttgggttatgcgttgtagtattaattgaggatggta

SEQ ID NO: 37534 - DNA, 1140 bp, Artificial Sequence
  chemically treated genomic DNA (Homo sapiens) CpG-island No: 37534
taccatcctcaattaatactacaacgcataacccaactctttcgaaaaacgttcacgccgtatccgctcaatattttatttaaacgccgtaatcaacgacaccgccatcgaaattttcaccacatcaataaaataacgatttttcccaaccacacgctacataacataccaccgaccatttttcaattactaaataaacgcgccgaaaatacgacgattacccaccacaaacacgctaccgccacctttcaaaaataaacgctacccctttttacgacgcctacgacgcgaaaaaacaacccgcgcattacccaacttaattacgaacaaatccccccgattaactttaattctaacctacgaatttttaaccgtaacccttttcaacctaaccctttcctttaccaatttccgacgtacctttatctcacgaacaacctataacgccgactacgatatcgcgaataaaacaacgcgattaataaccattacgacgacaccaaacaccgccgttttactaatacgactaaaattttcaacgacctactcaaaaccttttataaccatacatccccctttcaacgacgacgattaacgacaaacgatacgccccgtccaaaccaaaaataacaacttccgccatcatccgacgaaacccgatctacccaaaaattttcctcaccgataatcaacgtatctccacgccgcaactaccgcacctcatcaatccgaacaaacaaaaacgaactaaaaccttcaacgcgcacgccctatccgacataactaatattttcaaaatcatcaaaaacaccacgtatcaccgcacctaactactcaccgaatataataataactaacgttcccatatacccgcgtatcgtttcatcgacgcgaacaataacaacatcgaacaaattatcgaaatcaaccacaacgcctcccgttattacattctaaccaaaccgcgctctatcatttcgactaccacaccgacaaaaacacgaaacgccgttcccgacaacacaaataccacaaattcatcccgcgtaacgtaaaatacatcaatatacaacttcaccaataccacgaccgtaaccaattcaaacgtatccaaaatcacgatatccgactacgctaatc

SEQ ID NO: 37535 - DNA, 1140 bp, Artificial Sequence
  chemically treated genomic DNA (Homo sapiens) CpG-island No: 37535
tattatttttagttgatgttgtagcgtatagtttagttttttcggaagacgtttacgtcgtattcgtttaatattttgtttaaacgtcgtggttagcggtatcgttatcgggatttttattatattaatggggtaacggttttttttagttatacgttgtatgatatgttatcggttattttttagttgttgaataaacgcgtcgggaatacgacggttatttattataagtacgttgtcgttattttttagggatgaacgttgtttttttttacgacgtttgcggcgcgaaaggataattcgcgtattatttagtttgattacgggtaaattttttcggttaattttgattttggtttgcggatttttgatcgtggttttttttagtttggtttttttttttattagttttcggcgtatttttgttttacgggtaatttgtgacgtcgattgcgatatcgcggatgaagtaacgcggttaatggttattgcggcggtattaggtatcgtcgttttgttgatacggttgaggtttttaacggtttgtttaagattttttatggttatatattttttttttagcggcgacggttaacggtaggcggtacgtttcgtttaagttagagatgataattttcgttattattcggcgaaattcgatttatttagaaattttttttatcgatggttagcgtgtttttacgtcgtagttgtcgtattttattagttcggataaatagggacgggttggagtttttaacgcgtacgttttgttcggtatagttgatatttttagggttattaaaaatattacgtattatcgtatttgattgtttatcggatgtaatggtggttgacgtttttatgtattcgcgtatcgttttatcggcgcgggtaatggtagtatcgaataggttatcgaaattagttatagcgtttttcgttattgtattttggttaggtcgcgttttgttatttcggttgttatatcggtagagatacgaaacgtcgttttcggtagtataaatgttataggtttatttcgcgtggcgtgaagtgtattagtatgtagttttattagtgttacgatcgtgattagtttagacgtatttagaattacggtattcggttgcgttgatt

SEQ ID NO: 37536 - DNA, 1140 bp, Artificial Sequence
  chemically treated genomic DNA (Homo sapiens) CpG-island No: 37536
aatcaacgcaaccgaataccgtaattctaaatacgtctaaactaatcacgatcgtaacactaataaaactacatactaatacacttcacgccacgcgaaataaacctataacatttatactaccgaaaacgacgtttcgtatctctaccgatataacaaccgaaataacaaaacgcgacctaaccaaaatacaataacgaaaaacgctataactaatttcgataacctattcgatactaccattacccgcgccgataaaacgatacgcgaatacataaaaacgtcaaccaccattacatccgataaacaatcaaatacgataatacgtaatatttttaataaccctaaaaatatcaactataccgaacaaaacgtacgcgttaaaaactccaacccgtccctatttatccgaactaataaaatacgacaactacgacgtaaaaacacgctaaccatcgataaaaaaaatttctaaataaatcgaatttcgccgaataataacgaaaattatcatctctaacttaaacgaaacgtaccgcctaccgttaaccgtcgccgctaaaaaaaaaatatataaccataaaaaatcttaaacaaaccgttaaaaacctcaaccgtatcaacaaaacgacgatacctaataccgccgcaataaccattaaccgcgttacttcatccgcgatatcgcaatcgacgtcacaaattacccgtaaaacaaaaatacgccgaaaactaataaaaaaaaaaaccaaactaaaaaaaaccacgatcaaaaatccgcaaaccaaaatcaaaattaaccgaaaaaatttacccgtaatcaaactaaataatacgcgaattatcctttcgcgccgcaaacgtcgtaaaaaaaaacaacgttcatccctaaaaaataacgacaacgtacttataataaataaccgtcgtattcccgacgcgtttattcaacaactaaaaaataaccgataacatatcatacaacgtataactaaaaaaaaccgttaccccattaatataataaaaatcccgataacgataccgctaaccacgacgtttaaacaaaatattaaacgaatacgacgtaaacgtcttccgaaaaaactaaactatacgctacaacatcaactaaaaataata

SEQ ID NO: 37537 - DNA, 691 bp, Artificial Sequence
  chemically treated genomic DNA (Homo sapiens) CpG-island No: 37537
atttttacgcgaattcgtttttagacgttgattggtcgcgtttggtaaaagttaaagatttgacgttcggcgaattgatcgttgagttttatgacgatagttatttcgatgatgaagatgtagattggattgcgatcgggtaggggtagaaatttgtcggagatattagttttacgttggcgtggatgttcggagagtaggggtagtaggcgttgttggcgtggtttaatgaaggcgatattcgtgtttataaaattcgtttttcgaacggtacggtcgatgtgtttcgtggttgggttagtagtatcggtaaggcggtgacggcgaaggaagtgattattcgtacggtgaaagttattaatgtgggacgttcgtcgatggtagaagatcgtagtacggtaatagcggtaatcggtatgatcgtgacgtttgttagtatttcggtggtgaaagggtagagtattacgttgatcgtggttttttagtcggagggcgtaatcgataagagttttcgtgcggtgtttgcggataaaataaaagttatcgtgtcggttagtggtatgattattatcgtgaacggcgttgttgtaggtaaggttaatatttcggttgtattcggtaatggtgagtttgttgcggttgtagaaattatcgttatcgttagttaattcggagagttagcgatgttttt

SEQ ID NO: 37538 - DNA, 691 bp, Artificial Sequence
  chemically treated genomic DNA (Homo sapiens) CpG-island No: 37538
aaaaacatcgctaactctccgaattaactaacgataacgataatttctacaaccgcaacaaactcaccattaccgaatacaaccgaaatattaaccttacctacaacaacgccgttcacgataataatcataccactaaccgacacgataacttttattttatccgcaaacaccgcacgaaaactcttatcgattacgccctccgactaaaaaaccacgatcaacgtaatactctaccctttcaccaccgaaatactaacaaacgtcacgatcataccgattaccgctattaccgtactacgatcttctaccatcgacgaacgtcccacattaataactttcaccgtacgaataatcacttccttcgccgtcaccgccttaccgatactactaacccaaccacgaaacacatcgaccgtaccgttcgaaaaacgaattttataaacacgaatatcgccttcattaaaccacgccaacaacgcctactacccctactctccgaacatccacgccaacgtaaaactaatatctccgacaaatttctacccctacccgatcgcaatccaatctacatcttcatcatcgaaataactatcgtcataaaactcaacgatcaattcgccgaacgtcaaatctttaacttttaccaaacgcgaccaatcaacgtctaaaaacgaattcgcgtaaaaat

SEQ ID NO: 37539 - DNA, 691 bp, Artificial Sequence
  chemically treated genomic DNA (Homo sapiens) CpG-island No: 37539
aggaatatcgttgatttttcggattaattggcggtgacggtaatttttgtaatcgtagtaaatttattattatcggatataatcggaatgttgattttgtttgtagtaacgtcgtttacggtgatggttatattattgatcgatacggtggtttttgttttattcgtagatatcgtacgaaagtttttgtcggttacgtttttcggttggaaggttacggttagcgtggtgttttgtttttttattatcgaggtgttggtaggcgttacggttatgtcggttgtcgttgttatcgtgttgcgattttttgttatcgacggacgttttatattggtgatttttatcgtgcgggtgattatttttttcgtcgttatcgttttatcgatattgttgatttagttacggaatatatcgatcgtgtcgttcgggaagcggattttataggtacgggtatcgtttttattaaattacgttagtagcgtttgttgtttttgtttttcgggtatttacgttagcgtgaagttggtattttcggtagatttttgtttttgttcggtcgtagtttagtttgtatttttattatcgagatagttgtcgttataggatttagcggttagttcgtcgggcgttaggtttttaatttttgttagacgcgattagttaacgtttgaaagcggattcgcgtaagggt

SEQ ID NO: 37540 - DNA, 691 bp, Artificial Sequence
  chemically treated genomic DNA (Homo sapiens) CpG-island No: 37540
acccttacgcgaatccgctttcaaacgttaactaatcgcgtctaacaaaaattaaaaacctaacgcccgacgaactaaccgctaaatcctataacgacaactatctcgataataaaaatacaaactaaactacgaccgaacaaaaacaaaaatctaccgaaaataccaacttcacgctaacgtaaatacccgaaaaacaaaaacaacaaacgctactaacgtaatttaataaaaacgatacccgtacctataaaatccgcttcccgaacgacacgatcgatatattccgtaactaaatcaacaatatcgataaaacgataacgacgaaaaaaataatcacccgcacgataaaaatcaccaatataaaacgtccgtcgataacaaaaaatcgcaacacgataacaacgacaaccgacataaccgtaacgcctaccaacacctcgataataaaaaaacaaaacaccacgctaaccgtaaccttccaaccgaaaaacgtaaccgacaaaaactttcgtacgatatctacgaataaaacaaaaaccaccgtatcgatcaataatataaccatcaccgtaaacgacgttactacaaacaaaatcaacattccgattatatccgataataataaatttactacgattacaaaaattaccgtcaccgccaattaatccgaaaaatcaacgatattcct

SEQ ID NO: 37541 - DNA, 648 bp, Artificial Sequence
  chemically treated genomic DNA (Homo sapiens) CpG-island No: 37541
gcggtggcgatcggtgcgttggcgtatgtttggtattagggtaatttaattttgttcgattttaataaaacgttggtttttttcggtaattaggcgggattgacggtagatcgtatgttggttttgtttagagtcgggtaggcggtagggttgacgtttaattagattagcgagttatttagcgtattggttaaggcgggggtaagcggtgaggtttagattgcgtttattagttagagtgtggcgcgttttttttttgtattcggcgtggaggtggataaggtcgttgaagttttcgggaagttgattatagattcgacgtcggggttgacggcgatggttcgttagttttataacgtgtcggcggagtagattgcgtatgttgtttagttgtagcgtttcggcgatgaagtcggggtattgtaggcggcgaacgaggtcgtaacgaaagggtttgatgattagattcgtcgtttgaaagagaatatgggtacgttggagatttgggtagataggattgcgcgggtatttaaatttatgtgggatgcggtgttggatattggtcgttttgatatcgcgtaggagatgttgattaaggtagaggttgcgtataagaaagtagacgatatttggaatttgcgtaaggat

SEQ ID NO: 37542 - DNA, 648 bp, Artificial Sequence
  chemically treated genomic DNA (Homo sapiens) CpG-island No: 37542
atccttacgcaaattccaaatatcgtctactttcttatacgcaacctctaccttaatcaacatctcctacgcgatatcaaaacgaccaatatccaacaccgcatcccacataaatttaaatacccgcgcaatcctatctacccaaatctccaacgtacccatattctctttcaaacgacgaatctaatcatcaaaccctttcgttacgacctcgttcgccgcctacaataccccgacttcatcgccgaaacgctacaactaaacaacatacgcaatctactccgccgacacgttataaaactaacgaaccatcgccgtcaaccccgacgtcgaatctataatcaacttcccgaaaacttcaacgaccttatccacctccacgccgaatacaaaaaaaaaacgcgccacactctaactaataaacgcaatctaaacctcaccgcttacccccgccttaaccaatacgctaaataactcgctaatctaattaaacgtcaaccctaccgcctacccgactctaaacaaaaccaacatacgatctaccgtcaatcccgcctaattaccgaaaaaaaccaacgttttattaaaatcgaacaaaattaaattaccctaataccaaacatacgccaacgcaccgatcgccaccgc

SEQ ID NO: 37543 - DNA, 648 bp, Artificial Sequence
  chemically treated genomic DNA (Homo sapiens) CpG-island No: 37543
atttttgcgtagattttagatgtcgtttgtttttttatacgtagtttttgttttaattagtattttttgcgcggtattaggacgattaatatttagtatcgtattttatatggatttgaatgttcgcgtagttttgtttgtttaggtttttagcgtgtttatgtttttttttaggcggcgggtttggttattaaattttttcgttgcggtttcgttcgtcgtttgtaatgtttcggttttatcgtcggaacgttgtaattgagtaatatacgtaatttgtttcgtcgatacgttatggaattggcgagttatcgtcgttagtttcgacgtcgggtttgtggttagtttttcgaaggttttagcgattttgtttatttttacgtcggatgtagaggagaaacgcgttatattttggttgatggacgtaatttgagttttatcgtttattttcgttttaattagtgcgttgagtgattcgttggtttggttaaacgttagttttgtcgtttgttcggttttggataggattagtatacgatttgtcgttagtttcgtttgattgtcggaaaggattagcgttttgttgaaatcggatagggttgagttgttttgatattaggtatacgttagcgtatcggtcgttatcgt

SEQ ID NO: 37544 - DNA, 648 bp, Artificial Sequence
  chemically treated genomic DNA (Homo sapiens) CpG-island No: 37544
acgataacgaccgatacgctaacgtatacctaatatcaaaacaactcaaccctatccgatttcaacaaaacgctaatcctttccgacaatcaaacgaaactaacgacaaatcgtatactaatcctatccaaaaccgaacaaacgacaaaactaacgtttaaccaaaccaacgaatcactcaacgcactaattaaaacgaaaataaacgataaaactcaaattacgtccatcaaccaaaatataacgcgtttctcctctacatccgacgtaaaaataaacaaaatcgctaaaaccttcgaaaaactaaccacaaacccgacgtcgaaactaacgacgataactcgccaattccataacgtatcgacgaaacaaattacgtatattactcaattacaacgttccgacgataaaaccgaaacattacaaacgacgaacgaaaccgcaacgaaaaaatttaataaccaaacccgccgcctaaaaaaaaacataaacacgctaaaaacctaaacaaacaaaactacgcgaacattcaaatccatataaaatacgatactaaatattaatcgtcctaataccgcgcaaaaaatactaattaaaacaaaaactacgtataaaaaaacaaacgacatctaaaatctacgcaaaaat

SEQ ID NO: 37545 - DNA, 2451 bp, Artificial Sequence
  chemically treated genomic DNA (Homo sapiens) CpG-island No: 37545
tgcgtttgaagtcgttcgaaagaaggttgagtagtagatttaataggataaaaatgcgtagtagtagagcgatatcgaagcgttacggttgaaatatatcgaagaggcgtagaaggtttacgaacggttgtagacgtcgttggagaaatatatcgttcgttaggaagaattgaataaggtattgaaagacgggaaaattttgtaggcggattataatacgttgatggcggcggcgaaaaaggattatgaagcgacgttgaaaaagtcgaaatagtttagcgtgaaggtgtttgcgggcgatcgttaggaagatagtgtttatgttgttttgttgacgttttaggtagaatttcggacgttggagaagtatgtcggagtaaatgagaaaattagttagtagcgtcgggatttgtggaaggcggagagttagttcgcggtattggaggaggcggcgtaacgtcgttagttgtttgtataggagaaatttttgttggcgtataaagatgagacgttggagtataaacgttagttggttgtatttggcgataaggttacgtattaggagcgtttgaacgcgttggcgtagtaggcggataaattcgtatagtagtaacgggtaaaacgggtcgttattgatgcgaaaagtcgggggttgattgatcggtaggtagaacgggaagttacggaatagcgtttgaaggaatagtatggcgataattcgttggcgttgaataacgttatgttagagtagaaaaagatttgggcggttgaagattagtttcgcgggaattggatggtaggtttgaagttcggttggagtgagtgggaagagagcgttacggatagtatgtcgtaggtaaaaagtgtagttacgtagatttttgatggtattgtatagaatatggcggcgatgttgatcggtagtgagtagaattggcgtagttttattcgtttcgtgttgtttatgatgatagaaattttgtttaagtaggtaatggtggggattgtcgggagtatcggtagcgttattggcggggttgttggtggcggcgtattcgcgttaggcggtatagttatttaggtcgttgcggcgaaattttattttgtaatcggaggatttacgggaatcggcggtaaatatgagttagcggggattgtttatcgtggtgagtttgtttttacgaaggaggtaattagtcggattggcgtggggaatttttatcggttgatgcgcggttatgttatcggcggttatgtcggtatatcgggtagtatggtagatagtcggtcgtaggcgttcgggacgtttgagtagaataattatgtggtgattaataacgacggtacgaacgggtagataggttcggttgttttgaaggcggtgtatgatatggttcgtaagggtgttcgtgatgaaatttagatatagatgcgtgatggtggtttgtttttcggaggtggacgatgaagatttttcgttggaaagtgaaattcggtatggatgtggtttcggttttttttgtaagaaaggtgcgttttggtgatggttatttttagcgagcgtttgtcgggttgaatgttaatttgaaaacgtatagcgtgacgttttttgtttttcgtgaggaggttacggtattggagtcgtttttggaagagtacgggggttggaaattttttttgtggacgtcgttttatgagtggcggtagataaaggtgatttgcgtaaaatggtcgtcgcgggttagtatgttgcgtgttgagtttagcgtagagtttgaataggtggtgaattgatgtaggatattcggtaggaaatattgaatgaatgtattcgtgcggagtagtcggttagcgtggtgttttgggaaatcgatttgatagaggtcggtggagaacgttattttttttgtaatgagtagaacgaaaaaggtgagtcggttatttggtaggggcgatagtattagtcgtattttatttaggggagcggttttgaattgaatggtaaaggtattagtacgcgttttacgttgacggtttttaatttgtacggtatggttatcgggatggcggaagatatgtagagtttggtcggcggaacggtggttcggcgtaaggtttacgttcgttttttggatgcggtgaatttcgttaacggaaatagttacgtcgattcggagtaggaggtgattagtcgttggcgtattgagtagtgtagcgaattgagcgcggtgagtgttttttttgtattgtttacgtcgacggaaacggatggcgttgttttttcgggacgtattatgttggttaatatttgtatttggatttatcgcggtgacgagtgcggttatagcggttcggttgtcgcggatgaatatgattagttaacgttcgatattacgaaggataaatgtagtaaatgtttgagcggttgtaagtttcgtaataacgtcggta

SEQ ID NO: 37546 - DNA, 2451 bp, Artificial Sequence
  chemically treated genomic DNA (Homo sapiens) CpG-island No: 37546
taccgacgttattacgaaacttacaaccgctcaaacatttactacatttatccttcgtaatatcgaacgttaactaatcatattcatccgcgacaaccgaaccgctataaccgcactcgtcaccgcgataaatccaaatacaaatattaaccaacataatacgtcccgaaaaaacaacgccatccgtttccgtcgacgtaaacaatacaaaaaaaacactcaccgcgctcaattcgctacactactcaatacgccaacgactaatcacctcctactccgaatcgacgtaactatttccgttaacgaaattcaccgcatccaaaaaacgaacgtaaaccttacgccgaaccaccgttccgccgaccaaactctacatatcttccgccatcccgataaccataccgtacaaattaaaaaccgtcaacgtaaaacgcgtactaatacctttaccattcaattcaaaaccgctcccctaaataaaatacgactaatactatcgcccctaccaaataaccgactcacctttttcgttctactcattacaaaaaaaataacgttctccaccgacctctatcaaatcgatttcccaaaacaccacgctaaccgactactccgcacgaatacattcattcaatatttcctaccgaatatcctacatcaattcaccacctattcaaactctacgctaaactcaacacgcaacatactaacccgcgacgaccattttacgcaaatcacctttatctaccgccactcataaaacgacgtccacaaaaaaaatttccaacccccgtactcttccaaaaacgactccaataccgtaacctcctcacgaaaaacaaaaaacgtcacgctatacgttttcaaattaacattcaacccgacaaacgctcgctaaaaataaccatcaccaaaacgcacctttcttacaaaaaaaaccgaaaccacatccataccgaatttcactttccaacgaaaaatcttcatcgtccacctccgaaaaacaaaccaccatcacgcatctatatctaaatttcatcacgaacacccttacgaaccatatcatacaccgccttcaaaacaaccgaacctatctacccgttcgtaccgtcgttattaatcaccacataattattctactcaaacgtcccgaacgcctacgaccgactatctaccatactacccgatataccgacataaccgccgataacataaccgcgcatcaaccgataaaaattccccacgccaatccgactaattacctccttcgtaaaaacaaactcaccacgataaacaatccccgctaactcatatttaccgccgattcccgtaaatcctccgattacaaaataaaatttcgccgcaacgacctaaataactataccgcctaacgcgaatacgccgccaccaacaaccccgccaataacgctaccgatactcccgacaatccccaccattacctacttaaacaaaatttctatcatcataaacaacacgaaacgaataaaactacgccaattctactcactaccgatcaacatcgccgccatattctatacaataccatcaaaaatctacgtaactacactttttacctacgacatactatccgtaacgctctcttcccactcactccaaccgaacttcaaacctaccatccaattcccgcgaaactaatcttcaaccgcccaaatctttttctactctaacataacgttattcaacgccaacgaattatcgccatactattccttcaaacgctattccgtaacttcccgttctacctaccgatcaatcaacccccgacttttcgcatcaataacgacccgttttacccgttactactatacgaatttatccgcctactacgccaacgcgttcaaacgctcctaatacgtaaccttatcgccaaatacaaccaactaacgtttatactccaacgtctcatctttatacgccaacaaaaatttctcctatacaaacaactaacgacgttacgccgcctcctccaataccgcgaactaactctccgccttccacaaatcccgacgctactaactaattttctcatttactccgacatacttctccaacgtccgaaattctacctaaaacgtcaacaaaacaacataaacactatcttcctaacgatcgcccgcaaacaccttcacgctaaactatttcgactttttcaacgtcgcttcataatcctttttcgccgccgccatcaacgtattataatccgcctacaaaattttcccgtctttcaataccttattcaattcttcctaacgaacgatatatttctccaacgacgtctacaaccgttcgtaaaccttctacgcctcttcgatatatttcaaccgtaacgcttcgatatcgctctactactacgcatttttatcctattaaatctactactcaaccttctttcgaacgacttcaaacgca

SEQ ID NO: 37547 - DNA, 2451 bp, Artificial Sequence
  chemically treated genomic DNA (Homo sapiens) CpG-island No: 37547
tgtcgacgttattgcggaatttataatcgtttaggtatttgttgtatttatttttcgtgatatcggacgttggttggttatatttattcgcgatagtcggatcgttataatcgtattcgttatcgcgataggtttaggtgtaggtgttggttagtatgatacgtttcggaaaaatagcgttattcgttttcgtcggcgtggatagtataaaggaggtatttatcgcgtttagttcgttgtattgtttaatgcgttagcggttgattattttttgtttcggatcggcgtaattgttttcgttgacgaagtttatcgtatttagaaaacgggcgtaaattttacgtcggattatcgtttcgtcgattagattttgtatatttttcgttatttcggtgattatatcgtataggttagaaatcgttagcgtggggcgcgtattggtgtttttgttatttagtttaaaatcgtttttttgaatgggatacggttgatattgtcgtttttgttaggtgatcggtttatttttttcgttttgtttattatagaaaaaataacgttttttatcgatttttgttaggtcgattttttagagtattacgttggtcgattgtttcgtacgggtgtatttatttagtgttttttgtcggatattttgtattagtttattatttgtttaaattttgcgttgaatttaatacgtagtatattgattcgcgacgattattttgcgtaggttatttttatttgtcgttatttataaggcggcgtttatagaaaggatttttagttttcgtgtttttttagaaacgattttagtatcgtggtttttttacgggggatagaaagcgttacgttgtacgtttttaggttggtatttagttcggtaggcgttcgttgagaatagttattattaaagcgtattttttttatagaagggatcgaagttatatttatatcgggttttattttttagcggaaggtttttatcgtttattttcggagaataggttattattacgtatttgtgtttgaattttattacgggtatttttgcgggttatgttatatatcgtttttagagtagtcggatttatttgttcgttcgtgtcgtcgttgttaattattatatggttattttgtttaaacgtttcggacgtttgcgatcggttgtttgttatgttgttcggtgtatcgatataatcgtcggtggtatagtcgcgtattagtcggtaaagattttttacgttaattcggttggttgtttttttcgtgaagataaatttattacggtgaataattttcgttggtttatatttgtcgtcggttttcgtaaatttttcggttgtaaaatggaatttcgtcgtagcggtttgaatggttgtatcgtttgacgcggatgcgtcgttattaatagtttcgttaatggcgttgtcgatattttcgataatttttattattgtttgtttaagtagaatttttgttattatggatagtacggaacgggtgaagttgcgttagttttgtttattgtcggttagtatcgtcgttatattttgtgtaatattattaaaggtttgcgtggttgtattttttatttgcgatatattgttcgtggcgttttttttttatttattttagtcggattttaggtttgttatttagttttcgcgaagttggtttttagtcgtttaggtttttttttgttttgatatgacgttatttagcgttagcggattatcgttatattgtttttttaggcgttgtttcgtggtttttcgttttgtttgtcggttagttagttttcggtttttcgtattaatggcggttcgttttgttcgttgttgttgtgcgaatttattcgtttgttgcgttagcgcgtttaggcgtttttgatacgtaattttgtcgttaagtgtagttagttggcgtttgtattttagcgttttatttttatgcgttagtagggattttttttgtgtagatagttggcgacgttgcgtcgttttttttagtatcgcgaattgatttttcgttttttataaatttcggcgttgttggttgatttttttatttgtttcggtatgtttttttagcgttcggagttttgtttgaagcgttagtagggtagtatgagtattgtttttttgacgatcgttcgtagatatttttacgttggattgtttcggtttttttagcgtcgttttataattttttttcgtcgtcgttattagcgtgttgtaattcgtttgtaggattttttcgttttttagtgttttgtttagttttttttgacgggcggtatatttttttagcggcgtttgtagtcgttcgtaagttttttgcgttttttcggtatattttagtcgtgacgtttcggtatcgttttgttgttgcgtatttttgttttgttgagtttgttgtttagttttttttcgggcggttttaagcgta

SEQ ID NO: 37548 - DNA, 2451 bp, Artificial Sequence
  chemically treated genomic DNA (Homo sapiens) CpG-island No: 37548
tacgcttaaaaccgcccgaaaaaaaactaaacaacaaactcaacaaaacaaaaatacgcaacaacaaaacgataccgaaacgtcacgactaaaatataccgaaaaaacgcaaaaaacttacgaacgactacaaacgccgctaaaaaaatataccgcccgtcaaaaaaaactaaacaaaacactaaaaaacgaaaaaatcctacaaacgaattacaacacgctaataacgacgacgaaaaaaaattataaaacgacgctaaaaaaaccgaaacaatccaacgtaaaaatatctacgaacgatcgtcaaaaaaacaatactcatactaccctactaacgcttcaaacaaaactccgaacgctaaaaaaacataccgaaacaaataaaaaaatcaaccaacaacgccgaaatttataaaaaacgaaaaatcaattcgcgatactaaaaaaaacgacgcaacgtcgccaactatctacacaaaaaaaatccctactaacgcataaaaataaaacgctaaaatacaaacgccaactaactacacttaacgacaaaattacgtatcaaaaacgcctaaacgcgctaacgcaacaaacgaataaattcgcacaacaacaacgaacaaaacgaaccgccattaatacgaaaaaccgaaaactaactaaccgacaaacaaaacgaaaaaccacgaaacaacgcctaaaaaaacaatataacgataatccgctaacgctaaataacgtcatatcaaaacaaaaaaaaacctaaacgactaaaaaccaacttcgcgaaaactaaataacaaacctaaaatccgactaaaataaataaaaaaaaaacgccacgaacaatatatcgcaaataaaaaatacaaccacgcaaacctttaataatattacacaaaatataacgacgatactaaccgacaataaacaaaactaacgcaacttcacccgttccgtactatccataataacaaaaattctacttaaacaaacaataataaaaattatcgaaaatatcgacaacgccattaacgaaactattaataacgacgcatccgcgtcaaacgatacaaccattcaaaccgctacgacgaaattccattttacaaccgaaaaatttacgaaaaccgacgacaaatataaaccaacgaaaattattcaccgtaataaatttatcttcacgaaaaaaacaaccaaccgaattaacgtaaaaaatctttaccgactaatacgcgactataccaccgacgattatatcgatacaccgaacaacataacaaacaaccgatcgcaaacgtccgaaacgtttaaacaaaataaccatataataattaacaacgacgacacgaacgaacaaataaatccgactactctaaaaacgatatataacataacccgcaaaaatacccgtaataaaattcaaacacaaatacgtaataataacctattctccgaaaataaacgataaaaaccttccgctaaaaaataaaacccgatataaatataacttcgatcccttctataaaaaaaatacgctttaataataactattctcaacgaacgcctaccgaactaaataccaacctaaaaacgtacaacgtaacgctttctatcccccgtaaaaaaaccacgatactaaaatcgtttctaaaaaaacacgaaaactaaaaatcctttctataaacgccgccttataaataacgacaaataaaaataacctacgcaaaataatcgtcgcgaatcaatatactacgtattaaattcaacgcaaaatttaaacaaataataaactaatacaaaatatccgacaaaaaacactaaataaatacacccgtacgaaacaatcgaccaacgtaatactctaaaaaatcgacctaacaaaaatcgataaaaaacgttattttttctataataaacaaaacgaaaaaaataaaccgatcacctaacaaaaacgacaatatcaaccgtatcccattcaaaaaaacgattttaaactaaataacaaaaacaccaatacgcgccccacgctaacgatttctaacctatacgatataatcaccgaaataacgaaaaatatacaaaatctaatcgacgaaacgataatccgacgtaaaatttacgcccgttttctaaatacgataaacttcgtcaacgaaaacaattacgccgatccgaaacaaaaaataatcaaccgctaacgcattaaacaatacaacgaactaaacgcgataaatacctcctttatactatccacgccgacgaaaacgaataacgctatttttccgaaacgtatcatactaaccaacacctacacctaaacctatcgcgataacgaatacgattataacgatccgactatcgcgaataaatataaccaaccaacgtccgatatcacgaaaaataaatacaacaaatacctaaacgattataaattccgcaataacgtcgaca

SEQ ID NO: 37549 - DNA, 671 bp, Artificial Sequence
  chemically treated genomic DNA (Homo sapiens) CpG-island No: 37549
gatttataagtttcgttgtgtgtcgtattttatcgggcggcgttttgagtacggtgtgacggattgttatatattgtttcgggatgtttattatttggcggggattgagatgtcggatttttatcgtgaggatgattggtggcgtaacggttagaatttttatttggataatttggaggcgacggggttgtattaggtgtcgttgttagcggtatagtcgggcgatgtgttgttgtgttgttttggtttattagtgtcgaattacgtcgtaatttattgcggcgacggcgagttgttgtattatatttttgaataattgagtaaacgagagaggtatatcgataaatggtagcgacgtatatattttttttggcgttatcgggtatggcgcgtatttgtttttacggggatttataacgatttggtcgtcgtatcgattttcgtgtgaaaacgggggttgaagttattcgggtattggttatatagttttcggcgtttcgttagaaattgagcgacggttggtattaggtacggattgtcgggcgggacgttagtacgttcgggttaacggcgtagttatatgagattttgtttgatggcgttgtaatttatattgtttttagagtcgtcggggttaagttaggtggcgtattttagattgttttgggggt

SEQ ID NO: 37550 - DNA, 671 bp, Artificial Sequence
  chemically treated genomic DNA (Homo sapiens) CpG-island No: 37550
acccccaaaacaatctaaaatacgccacctaacttaaccccgacgactctaaaaacaatataaattacaacgccatcaaacaaaatctcatataactacgccgttaacccgaacgtactaacgtcccgcccgacaatccgtacctaataccaaccgtcgctcaatttctaacgaaacgccgaaaactatataaccaatacccgaataacttcaacccccgttttcacacgaaaatcgatacgacgaccaaatcgttataaatccccgtaaaaacaaatacgcgccatacccgataacgccaaaaaaaatatatacgtcgctaccatttatcgatatacctctctcgtttactcaattattcaaaaatataatacaacaactcgccgtcgccgcaataaattacgacgtaattcgacactaataaaccaaaacaacacaacaacacatcgcccgactataccgctaacaacgacacctaatacaaccccgtcgcctccaaattatccaaataaaaattctaaccgttacgccaccaatcatcctcacgataaaaatccgacatctcaatccccgccaaataataaacatcccgaaacaatatataacaatccgtcacaccgtactcaaaacgccgcccgataaaatacgacacacaacgaaacttataaatc

SEQ ID NO: 37551 - DNA, 671 bp, Artificial Sequence
  chemically treated genomic DNA (Homo sapiens) CpG-island No: 37551
gtttttaggataatttggaatacgttatttgatttggtttcggcgattttgggaataatatgaattatagcgttattaggtagagttttatgtaattgcgtcgttaattcggacgtgttgacgtttcgttcggtaattcgtatttgatattagtcgtcgtttagtttttgacgaaacgtcgggagttgtgtggttagtgttcggatggttttagttttcgtttttatacgaaggtcgatgcggcgattaaatcgttgtaaattttcgtaaaggtagatgcgcgttatgttcggtgacgttagagggagtgtgtgcgtcgttgttatttgtcggtgtatttttttcgtttgtttagttgtttaggaatatggtgtagtagttcgtcgtcgtcgtagtaaattgcggcgtgattcggtattgatgaattaaaatagtatagtagtatatcgttcggttgtgtcgttgataacggtatttgatatagtttcgtcgtttttagattatttagatagagattttggtcgttacgttattagttatttttacgatgaaagttcggtattttaattttcgttagatgataagtatttcggaatagtgtgtaatagttcgttatatcgtgtttaaagcgtcgttcggtgagatgcggtatatagcggaatttatgaatt

SEQ ID NO: 37552 - DNA, 671 bp, Artificial Sequence
  chemically treated genomic DNA (Homo sapiens) CpG-island No: 37552
aattcataaattccgctatataccgcatctcaccgaacgacgctttaaacacgatataacgaactattacacactattccgaaatacttatcatctaacgaaaattaaaataccgaactttcatcgtaaaaataactaataacgtaacgaccaaaatctctatctaaataatctaaaaacgacgaaactatatcaaataccgttatcaacgacacaaccgaacgatatactactatactattttaattcatcaataccgaatcacgccgcaatttactacgacgacgacgaactactacaccatattcctaaacaactaaacaaacgaaaaaaatacaccgacaaataacaacgacgcacacactccctctaacgtcaccgaacataacgcgcatctacctttacgaaaatttacaacgatttaatcgccgcatcgaccttcgtataaaaacgaaaactaaaaccatccgaacactaaccacacaactcccgacgtttcgtcaaaaactaaacgacgactaatatcaaatacgaattaccgaacgaaacgtcaacacgtccgaattaacgacgcaattacataaaactctacctaataacgctataattcatattattcccaaaatcgccgaaaccaaatcaaataacgtattccaaattatcctaaaaac

SEQ ID NO: 37553 - DNA, 2251 bp, Artificial Sequence
  chemically treated genomic DNA (Homo sapiens) CpG-island No: 37553
ttcgcgcgaagcgaaggataatttgaagtttacgtagttgttgagtgtgatcgatgttattagcgaagggtcgattgaaggttcggtggatggtttaaaaagcgtgttgttgaatagtacgtcggtgttggatattgaggggaatattaatatattcggtgttacggtggtgtttcgggttggtgagtaggagtagatttcgtcggagggatttgaatttttcggtttcgagacggtgttgggtacggaagtgaaatatgatacgtcgattattcgtattattacgtttgtaaatatcgatcgtttgcgttttattttcggtgtataggtattggtggaaattattttaaagggtgataggaattcgtcggaagttcgtttgttggtttagatataacgtaacggtggttgggtgacggaaaaagatattattattaagggtaaaattatttcgtagtatttggtttcggtggtgatgggtaatttgtcgtcgcgttcgtttaatattcggatgcgtaggatgacgtcggatagtattatagattagttgtagaataaaacgttttggtcgttatatattgaaattatcgatgtgaaatagtgttattcgaatacggtattggtcggcgtgtaggtggattcggagtagttcggtagttagtaggtgagtcgtaattattatttgcgcgggcgtattttgtaggtgtcgtcgaattataattcgtagacgcggtaatatagcggtatttgggacggaacgtttaaatcggtatatagtaataatatggtttggtgtttgtgggatatgttgatttattcgcgttacggtatggggaaacgttttggtgcggcggatgtggataaatgggcgttgtatgttatcggttagtattgcgattagttagtgtcggacggttttggcggtacggagtcgcgtattatttgtaatgcgtatttgattatatagcgtaaggcgtgggatgtgtttagcgatttttgttcggcgatgcgttgtatgtcggtatggaacgggtagacgttgacgttcgtgtaggatcgatcgtcggataagacgtggatttataatcgtagtaatgtggtgatgtcggatgatggcgcgtcgtttcgttatagttttagcgttttgaaggatcgttataatgtcgttgaggtgaattggattgattcgaataacggttgggagacggcgatagagtttgttgaagatacgtaggttattgttcgttacggtcgtaatgttacgaagatggatgtttttggttgtattagtcgggggtaggtatatcgcgtcgggttgtggttgattaaaatagaattgttggaaacgtagatcgtggattttagcgtcggcgtagaagggtttcgttatgtatcgggcgatgttattgaaatttgcgatgatgattatgtcggtattagtatcggtggtcgtgtgttggcggtgaatagttagattcggacgttgacgttcgatcgtgaaattacgttgttatttttcggtattggaggaagtatcgcgttgataagtttggttgacggaagtggtaattcggttagcgtggaggtttagttcgttatcgacggcgtgaaggtaaaagtgagtcgtgtttttgacggtgttgttgaatatagcgtatgggagttgaagttgtcgacgttgcgttagcgattgtttcgttgcgtgagtattcgtgagaacgacgacggtacgtatgttattatcgtcgtgtagtatgtgtcggaaaaagaggttatcgtggataacggggcgtattttgacggcgaatagagtggtacggtgaatggtgttacgtcgttagcggtgtagtatttgatcgtagaagttattgtagatagcggggaatattaggtgttggcgcgatgggatatatcgaaggtggtgaagggcgtgagttttttgtttcgtttgatcgtaatagcggacgacggtagtgagcggttggttagtacggttcggacgacggaaattatatatcgttttacgtaattggcgttggggaattataggttgatagttcgggcggtaaatgcgtgggggtagtagggcgattcggcgtcggtatcgtttcggattgtcgtatcggtagtatcgtcgaggattgagttgacgtcgggttatttttagataatcgttacgtcgtattttgtcgtttatgattcgacggtatagtttgagttttggttttcggaaaagtagattgcggatatt

SEQ ID NO: 37554 - DNA, 2251 bp, Artificial Sequence
  chemically treated genomic DNA (Homo sapiens) CpG-island No: 37554
aatatccgcaatctacttttccgaaaaccaaaactcaaactataccgtcgaatcataaacgacaaaatacgacgtaacgattatctaaaaataacccgacgtcaactcaatcctcgacgatactaccgatacgacaatccgaaacgataccgacgccgaatcgccctactacccccacgcatttaccgcccgaactatcaacctataattccccaacgccaattacgtaaaacgatatataatttccgtcgtccgaaccgtactaaccaaccgctcactaccgtcgtccgctattacgatcaaacgaaacaaaaaactcacgcccttcaccaccttcgatatatcccatcgcgccaacacctaatattccccgctatctacaataacttctacgatcaaatactacaccgctaacgacgtaacaccattcaccgtaccactctattcgccgtcaaaatacgccccgttatccacgataacctctttttccgacacatactacacgacgataataacatacgtaccgtcgtcgttctcacgaatactcacgcaacgaaacaatcgctaacgcaacgtcgacaacttcaactcccatacgctatattcaacaacaccgtcaaaaacacgactcacttttaccttcacgccgtcgataacgaactaaacctccacgctaaccgaattaccacttccgtcaaccaaacttatcaacgcgatacttcctccaataccgaaaaataacaacgtaatttcacgatcgaacgtcaacgtccgaatctaactattcaccgccaacacacgaccaccgatactaataccgacataatcatcatcgcaaatttcaataacatcgcccgatacataacgaaacccttctacgccgacgctaaaatccacgatctacgtttccaacaattctattttaatcaaccacaacccgacgcgatatacctacccccgactaatacaaccaaaaacatccatcttcgtaacattacgaccgtaacgaacaataacctacgtatcttcaacaaactctatcgccgtctcccaaccgttattcgaatcaatccaattcacctcaacgacattataacgatccttcaaaacgctaaaactataacgaaacgacgcgccatcatccgacatcaccacattactacgattataaatccacgtcttatccgacgatcgatcctacacgaacgtcaacgtctacccgttccataccgacatacaacgcatcgccgaacaaaaatcgctaaacacatcccacgccttacgctatataatcaaatacgcattacaaataatacgcgactccgtaccgccaaaaccgtccgacactaactaatcgcaatactaaccgataacatacaacgcccatttatccacatccgccgcaccaaaacgtttccccataccgtaacgcgaataaatcaacatatcccacaaacaccaaaccatattattactatataccgatttaaacgttccgtcccaaataccgctatattaccgcgtctacgaattataattcgacgacacctacaaaatacgcccgcgcaaataataattacgactcacctactaactaccgaactactccgaatccacctacacgccgaccaataccgtattcgaataacactatttcacatcgataatttcaatatataacgaccaaaacgttttattctacaactaatctataatactatccgacgtcatcctacgcatccgaatattaaacgaacgcgacgacaaattacccatcaccaccgaaaccaaatactacgaaataattttacccttaataataatatctttttccgtcacccaaccaccgttacgttatatctaaaccaacaaacgaacttccgacgaattcctatcaccctttaaaataatttccaccaatacctatacaccgaaaataaaacgcaaacgatcgatatttacaaacgtaataatacgaataatcgacgtatcatatttcacttccgtacccaacaccgtctcgaaaccgaaaaattcaaatccctccgacgaaatctactcctactcaccaacccgaaacaccaccgtaacaccgaatatattaatattcccctcaatatccaacaccgacgtactattcaacaacacgctttttaaaccatccaccgaaccttcaatcgacccttcgctaataacatcgatcacactcaacaactacgtaaacttcaaattatccttcgcttcgcgcgaa

SEQ ID NO: 37555 - DNA, 2251 bp, Artificial Sequence
  chemically treated genomic DNA (Homo sapiens) CpG-island No: 37555
gatattcgtaatttgttttttcgagaattagaatttaaattgtatcgtcgggttataaacggtaagatgcggcgtggcggttatttgaaaatagttcggcgttagtttaattttcgacggtgttgtcggtgcggtaattcggaacgatatcgacgtcggatcgttttgttgtttttacgtatttatcgttcggattgttagtttgtagttttttagcgttagttgcgtgaagcggtatgtggttttcgtcgttcgggtcgtgttgattagtcgtttattgtcgtcgttcgttgttacggttagacggagtaggaaatttacgttttttattattttcggtgtgttttatcgcgttagtatttgatatttttcgttgtttgtagtgatttttgcggttaggtgttgtatcgttggcggcgtgatattatttatcgtgttattttgttcgtcgttaaagtgcgtttcgttatttacgatggttttttttttcggtatatgttgtacggcggtgatggtatacgtgtcgtcgtcgtttttacggatatttacgtagcggaatagtcgttggcgtagcgtcggtagttttagtttttatacgttgtatttagtaatatcgttaggaatacggtttatttttatttttacgtcgtcggtgacggattgaatttttacgttgatcggattgttattttcgttaattaggtttattagcgcggtattttttttagtatcggaggatggtagcgtgattttacggtcgagcgttagcgttcgggtttggttgtttatcgttagtatacgattatcggtgttgatatcggtatagttattatcgtagattttaataatatcgttcggtatatggcgaagtttttttgcgtcgacgttgaaatttacggtttgcgtttttagtagttttgttttaattagttatagttcggcgcggtgtgtttgttttcggttggtatagttaaaggtatttattttcgtaatattacgatcgtaacgggtaatggtttgcgtatttttaataagttttgtcgtcgttttttagtcgttgttcgggttaatttagtttattttaacggtattatggcggttttttagggcgttgaagttgtagcggaacggcgcgttattattcggtattattatattattgcggttataggtttacgttttattcgacggtcggttttgtacgaacgttagcgtttgttcgttttatatcggtatatagcgtatcgtcgagtagaaatcgttgagtatattttacgttttacgttgtgtggttaggtacgtattataggtgatgcgcggtttcgtgtcgttaaagtcgttcggtattgattggtcgtagtattggtcgatgatatatagcgtttatttatttatattcgtcgtattaagacgtttttttatgtcgtagcgcggatgggttagtatattttatagatattaggttatgttgttgttgtatgtcggtttaaacgtttcgttttagatatcgttgtattgtcgcgtttgcgggttatagttcgacggtatttgtagaatacgttcgcgtagatgataattacggtttatttgttggttgtcgaattgtttcgagtttatttgtacgtcgattagtgtcgtgttcgggtagtattgttttatatcgatgattttagtgtatgacgattagagcgttttgttttgtagttggtttgtggtgttgttcggcgttattttgcgtattcggatattaaacgggcgcggcggtaggttatttattattatcgaggttagatattgcgaggtggttttgtttttaatggtgatgttttttttcgttatttagttatcgttacgttgtatttgaattagtaggcggattttcgacggatttttgttattttttgaggtggtttttattagtgtttgtatatcgaaggtaaagcgtagacggtcgatgtttgtagacgtaatggtgcgggtgatcggcgtgttatattttattttcgtatttagtatcgtttcggagtcggaggatttaaattttttcggcggagtttgtttttgtttattagttcggaatattatcgtgatatcggatatgttggtattttttttagtgtttagtatcggcgtattgtttagtagtacgttttttaagttatttatcggatttttaatcggtttttcgttgatggtatcgattatatttagtaattgcgtggattttaggttgtttttcgtttcgcgcggg

SEQ ID NO: 37556 - DNA, 2251 bp, Artificial Sequence
  chemically treated genomic DNA (Homo sapiens) CpG-island No: 37556
cccgcgcgaaacgaaaaacaacctaaaatccacgcaattactaaatataatcgataccatcaacgaaaaaccgattaaaaatccgataaataacttaaaaaacgtactactaaacaatacgccgatactaaacactaaaaaaaataccaacatatccgatatcacgataatattccgaactaataaacaaaaacaaactccgccgaaaaaatttaaatcctccgactccgaaacgatactaaatacgaaaataaaatataacacgccgatcacccgcaccattacgtctacaaacatcgaccgtctacgctttaccttcgatatacaaacactaataaaaaccacctcaaaaaataacaaaaatccgtcgaaaatccgcctactaattcaaatacaacgtaacgataactaaataacgaaaaaaaacatcaccattaaaaacaaaaccacctcgcaatatctaacctcgataataataaataacctaccgccgcgcccgtttaatatccgaatacgcaaaataacgccgaacaacaccacaaaccaactacaaaacaaaacgctctaatcgtcatacactaaaatcatcgatataaaacaatactacccgaacacgacactaatcgacgtacaaataaactcgaaacaattcgacaaccaacaaataaaccgtaattatcatctacgcgaacgtattctacaaataccgtcgaactataacccgcaaacgcgacaatacaacgatatctaaaacgaaacgtttaaaccgacatacaacaacaacataacctaatatctataaaatatactaacccatccgcgctacgacataaaaaaacgtcttaatacgacgaatataaataaataaacgctatatatcatcgaccaatactacgaccaatcaataccgaacgactttaacgacacgaaaccgcgcatcacctataatacgtacctaaccacacaacgtaaaacgtaaaatatactcaacgatttctactcgacgatacgctatataccgatataaaacgaacaaacgctaacgttcgtacaaaaccgaccgtcgaataaaacgtaaacctataaccgcaataatataataataccgaataataacgcgccgttccgctacaacttcaacgccctaaaaaaccgccataataccgttaaaataaactaaattaacccgaacaacgactaaaaaacgacgacaaaacttattaaaaatacgcaaaccattacccgttacgatcgtaatattacgaaaataaatacctttaactataccaaccgaaaacaaacacaccgcgccgaactataactaattaaaacaaaactactaaaaacgcaaaccgtaaatttcaacgtcgacgcaaaaaaacttcgccatataccgaacgatattattaaaatctacgataataactataccgatatcaacaccgataatcgtatactaacgataaacaaccaaacccgaacgctaacgctcgaccgtaaaatcacgctaccatcctccgatactaaaaaaaataccgcgctaataaacctaattaacgaaaataacaatccgatcaacgtaaaaattcaatccgtcaccgacgacgtaaaaataaaaataaaccgtattcctaacgatattactaaatacaacgtataaaaactaaaactaccgacgctacgccaacgactattccgctacgtaaatatccgtaaaaacgacgacgacacgtataccatcaccgccgtacaacatataccgaaaaaaaaaaccatcgtaaataacgaaacgcactttaacgacgaacaaaataacacgataaataatatcacgccgccaacgatacaacacctaaccgcaaaaatcactacaaacaacgaaaaatatcaaatactaacgcgataaaacacaccgaaaataataaaaaacgtaaatttcctactccgtctaaccgtaacaacgaacgacgacaataaacgactaatcaacacgacccgaacgacgaaaaccacataccgcttcacgcaactaacgctaaaaaactacaaactaacaatccgaacgataaatacgtaaaaacaacaaaacgatccgacgtcgatatcgttccgaattaccgcaccgacaacaccgtcgaaaattaaactaacgccgaactattttcaaataaccgccacgccgcatcttaccgtttataacccgacgatacaatttaaattctaattctcgaaaaaacaaattacgaatatc

SEQ ID NO: 37557 - DNA, 562 bp, Artificial Sequence
  chemically treated genomic DNA (Homo sapiens) CpG-island No: 37557
tgtcggaatagtacgacgaaaagtcgtaggtatagtaggtagcgtagattattaacggtgtgtttagttagttattggtaattttttcggcgagtttggttaatcgtgattagaacgaagtgaacgaaattcgtcgttagtgggttttggtttttcgggaaaacgggattattacgatggaataggttaacgtaggaatgcgcgtagttcgtcggtagaatcgattatttttgttattatttgggtagtttgttgtatggtgtcgggaagaagtattcgttatcgtcggattgttaaacgttagcgagttggtggatatggtttacgagtattgtcggaagcgaggtttgtattcggatgcggagttttattcgtggaaattaaacgcgtattattggttggttattaatttgtattagaatatgcgggttaatgcgtttattgatgcggaattacgtcgtaaggtcgtagatgagtttgtttatatgattgcgagaattaatcgtggtgaggcgatttttgaattagtaaaataattttttgttatgggcggtagattttt

SEQ ID NO: 37558 - DNA, 562 bp, Artificial Sequence
  chemically treated genomic DNA (Homo sapiens) CpG-island No: 37558
aaaaatctaccgcccataacaaaaaattattttactaattcaaaaatcgcctcaccacgattaattctcgcaatcatataaacaaactcatctacgaccttacgacgtaattccgcatcaataaacgcattaacccgcatattctaatacaaattaataaccaaccaataatacgcgtttaatttccacgaataaaactccgcatccgaatacaaacctcgcttccgacaatactcgtaaaccatatccaccaactcgctaacgtttaacaatccgacgataacgaatacttcttcccgacaccatacaacaaactacccaaataataacaaaaataatcgattctaccgacgaactacgcgcattcctacgttaacctattccatcgtaataatcccgttttcccgaaaaaccaaaacccactaacgacgaatttcgttcacttcgttctaatcacgattaaccaaactcgccgaaaaaattaccaataactaactaaacacaccgttaataatctacgctacctactatacctacgacttttcgtcgtactattccgaca

SEQ ID NO: 37559 - DNA, 562 bp, Artificial Sequence
  chemically treated genomic DNA (Homo sapiens) CpG-island No: 37559
agaggtttatcgtttatgataggaagttgttttattggtttagggatcgttttattacggttaattttcgtagttatatggataagtttatttgcggttttacggcgtaatttcgtattagtaagcgtattggttcgtatgttttgatataggttggtaattagttagtagtgcgcgtttgatttttacggataagatttcgtattcggatataggtttcgttttcggtaatattcgtaaattatatttattagttcgttgacgtttggtagttcggcggtaacggatgttttttttcggtattatgtaataaattgtttaggtgatggtagaaatggtcgattttgtcgacgggttacgcgtatttttgcgttaatttgttttatcgtggtgatttcgttttttcgaaaagttagaatttattggcgacggatttcgtttatttcgttttggttacggttagttaggttcgtcgggaaagttgttagtaattggttgaatatatcgttgatgatttgcgttatttgttgtatttgcggtttttcgtcgtattgtttcggta

SEQ ID NO: 37560 - DNA, 562 bp, Artificial Sequence
  chemically treated genomic DNA (Homo sapiens) CpG-island No: 37560
taccgaaacaatacgacgaaaaaccgcaaatacaacaaataacgcaaatcatcaacgatatattcaaccaattactaacaactttcccgacgaacctaactaaccgtaaccaaaacgaaataaacgaaatccgtcgccaataaattctaacttttcgaaaaaacgaaatcaccacgataaaacaaattaacgcaaaaatacgcgtaacccgtcgacaaaatcgaccatttctaccatcacctaaacaatttattacataataccgaaaaaaaacatccgttaccgccgaactaccaaacgtcaacgaactaataaatataatttacgaatattaccgaaaacgaaacctatatccgaatacgaaatcttatccgtaaaaatcaaacgcgcactactaactaattaccaacctatatcaaaacatacgaaccaatacgcttactaatacgaaattacgccgtaaaaccgcaaataaacttatccatataactacgaaaattaaccgtaataaaacgatccctaaaccaataaaacaacttcctatcataaacgataaacctct

SEQ ID NO: 37561 - DNA, 571 bp, Artificial Sequence
  chemically treated genomic DNA (Homo sapiens) CpG-island No: 37561
ttcggttcgtgcggaaggtggatatggtacgtttacggtgggttatttttaagtgaaatcgggtatattgtcgtcgttgtcgggcggggatatcggtgtgagttatttgaaagggattaacgtgaagtatcgttatgagttgacggatagtgtgggggtgatggtttttttggggttcgtcgcgtcgaaaaagagtagtatagtgatgatcggggaggatacgttttattatgagagtttgcgtggacgttatgtgagcgtgatggtcggatcggttttataaattagtaagtaggttagtgcgtacgttatggtcggagtggtttatagtcggtggttcggtagtataatggattatcgtaagacggaaattattttcgggtatatgaaagagacgattattgttagggacgaaagtgtaatgcggtatattttagtggcgtggagtgtaggtatatagattaattcggtagcgttcgtcgttgttgatattgtttatgaaggtttcggtagtggcgattggcgtattgacggatttatcgttggggtcggttataaattttgattagtt

SEQ ID NO: 37562 - DNA, 571 bp, Artificial Sequence
  chemically treated genomic DNA (Homo sapiens) CpG-island No: 37562
aactaatcaaaatttataaccgaccccaacgataaatccgtcaatacgccaatcgccactaccgaaaccttcataaacaatatcaacaacgacgaacgctaccgaattaatctatatacctacactccacgccactaaaatataccgcattacactttcgtccctaacaataatcgtctctttcatatacccgaaaataatttccgtcttacgataatccattatactaccgaaccaccgactataaaccactccgaccataacgtacgcactaacctacttactaatttataaaaccgatccgaccatcacgctcacataacgtccacgcaaactctcataataaaacgtatcctccccgatcatcactatactactctttttcgacgcgacgaaccccaaaaaaaccatcacccccacactatccgtcaactcataacgatacttcacgttaatccctttcaaataactcacaccgatatccccgcccgacaacgacgacaatatacccgatttcacttaaaaataacccaccgtaaacgtaccatatccaccttccgcacgaaccgaa

SEQ ID NO: 37563 - DNA, 571 bp, Artificial Sequence
  chemically treated genomic DNA (Homo sapiens) CpG-island No: 37563
ggttaattagaatttataatcgattttaacgatgaattcgttagtacgttagtcgttattgtcggagtttttataagtaatattaataacgacggacgttgtcggattaatttgtatatttgtattttacgttattgaggtatgtcgtattgtattttcgtttttggtagtggtcgttttttttatatattcgggagtgattttcgttttacggtaatttattgtattgtcggattatcgattgtgagttatttcggttatggcgtacgtattgatttgtttattgatttgtaaaatcggttcggttattacgtttatataacgtttacgtaggtttttatagtgaaacgtatttttttcggttattattgtgttgttttttttcgacgcggcgaattttagggaagttattatttttatattgttcgttagtttataacggtattttacgttaattttttttagatgatttatatcggtattttcgttcgataacgacggtaatgtattcggttttatttgaaaatagtttatcgtaaacgtattatgtttatttttcgtacgggtcgga

SEQ ID NO: 37564 - DNA, 571 bp, Artificial Sequence
  chemically treated genomic DNA (Homo sapiens) CpG-island No: 37564
tccgacccgtacgaaaaataaacataatacgtttacgataaactattttcaaataaaaccgaatacattaccgtcgttatcgaacgaaaataccgatataaatcatctaaaaaaaattaacgtaaaataccgttataaactaacgaacaatataaaaataataacttccctaaaattcgccgcgtcgaaaaaaaacaacacaataataaccgaaaaaaatacgtttcactataaaaacctacgtaaacgttatataaacgtaataaccgaaccgattttacaaatcaataaacaaatcaatacgtacgccataaccgaaataactcacaatcgataatccgacaatacaataaattaccgtaaaacgaaaatcactcccgaatatataaaaaaaacgaccactaccaaaaacgaaaatacaatacgacatacctcaataacgtaaaatacaaatatacaaattaatccgacaacgtccgtcgttattaatattacttataaaaactccgacaataacgactaacgtactaacgaattcatcgttaaaatcgattataaattctaattaacc

SEQ ID NO: 37565 - DNA, 797 bp, Artificial Sequence
  chemically treated genomic DNA (Homo sapiens) CpG-island No: 37565
taacgttaggtgatcgggaaggggtcgaggcggagaggggagaggggttaggaggtgcggggtgcgcggcggtagcgggttttttatcggtcggcgagaatttgatagtaggcgtcggtgtttagtattttttttttttttttagtttttgtcggcgggtatttgagtttatttcgttgtcggttttcgcgatttttcggggaggttaatatgcgttttataaggtcgacgtttatttttatttttttcgtttttttttaagtaaacgggaagttttttgggatgttaacgttcggtaatagtcgagcgggaatttttttttttttgatatttgttaaattcggagttggagttaggttcgttgcgtttttcgcggagttttgggattttaaggtcggttcgtattcgggtttcgggcgatatttttaggtcgacgcgtatttgttcgtagatttacggggtatttttgagggtcgtttaggatttggacggtataggttttacgaaagttcgtaggttggggtcggtttcgtgtcggtcggggattttcgggtgtagcgttagttttggttatagggtcgaaggggcgggcggatttggattttttaagttcgacggagacgtttttttcgtttttatttagtttcgcgggttttcgaaagggaagtgaagcggggaggaagggtagacgcggtatcgttcgtttaacgtttttgaggggtagttattaggtatggttttttcggggattttcgaagttttcggggatatatttaggagtttttttcggtcgagtt

SEQ ID NO: 37566 - DNA, 797 bp, Artificial Sequence
  chemically treated genomic DNA (Homo sapiens) CpG-island No: 37566
aactcgaccgaaaaaaactcctaaatatatccccgaaaacttcgaaaatccccgaaaaaaccatacctaataactacccctcaaaaacgttaaacgaacgataccgcgtctacccttcctccccgcttcacttccctttcgaaaacccgcgaaactaaataaaaacgaaaaaaacgtctccgtcgaacttaaaaaatccaaatccgcccgccccttcgaccctataaccaaaactaacgctacacccgaaaatccccgaccgacacgaaaccgaccccaacctacgaactttcgtaaaacctataccgtccaaatcctaaacgaccctcaaaaataccccgtaaatctacgaacaaatacgcgtcgacctaaaaatatcgcccgaaacccgaatacgaaccgaccttaaaatcccaaaactccgcgaaaaacgcaacgaacctaactccaactccgaatttaacaaatatcaaaaaaaaaaaaattcccgctcgactattaccgaacgttaacatcccaaaaaacttcccgtttacttaaaaaaaaacgaaaaaaataaaaataaacgtcgaccttataaaacgcatattaacctccccgaaaaatcgcgaaaaccgacaacgaaataaactcaaatacccgccgacaaaaactaaaaaaaaaaaaaaaatactaaacaccgacgcctactatcaaattctcgccgaccgataaaaaacccgctaccgccgcgcaccccgcacctcctaacccctctcccctctccgcctcgaccccttcccgatcacctaacgtta

SEQ ID NO: 37567 - DNA, 797 bp, Artificial Sequence
  chemically treated genomic DNA (Homo sapiens) CpG-island No: 37567
gattcggtcgaagaggatttttagatgtgttttcgggagtttcggggattttcgaggggattatgtttggtggttgttttttaagggcgttgggcgaacggtgtcgcgtttgtttttttttttcgttttatttttttttcgggagttcgcgaggttgggtgggggcggggagggcgttttcgtcgggtttggggagtttaagttcgttcgttttttcggttttgtagttagggttggcgttgtattcgggaattttcggtcggtacggggtcgattttagtttgcgaattttcgtggggtttgtgtcgtttaggttttgggcggtttttaaggatgtttcgtgggtttgcgggtaggtgcgcgtcggtttggggatgtcgttcggagttcgggtgcgggtcggttttggagttttagagtttcgcggagggcgtagcgagtttggttttagtttcgggtttgatagatgttagggaagaaaaggttttcgttcggttattgtcgggcgttgatattttagagagtttttcgtttgtttggaagaagacgaggaaggtagaggtgaacgtcgattttgtggggcgtatgttagttttttcgaggggtcgcgagagtcggtagcggggtgagtttaggtgttcgtcggtaggagttggggagggaaggggagtgttggatatcggcgtttgttgttaagttttcgtcggtcggtgagagattcgttgtcgtcgcgtatttcgtattttttgatttttttttttttttcgtttcggttttttttcggttatttagcgttg

SEQ ID NO: 37568 - DNA, 797 bp, Artificial Sequence
  chemically treated genomic DNA (Homo sapiens) CpG-island No: 37568
caacgctaaataaccgaaaaaaaaccgaaacgaaaaaaaaaaaaaaatcaaaaaatacgaaatacgcgacgacaacgaatctctcaccgaccgacgaaaacttaacaacaaacgccgatatccaacactccccttccctccccaactcctaccgacgaacacctaaactcaccccgctaccgactctcgcgacccctcgaaaaaactaacatacgccccacaaaatcgacgttcacctctaccttcctcgtcttcttccaaacaaacgaaaaactctctaaaatatcaacgcccgacaataaccgaacgaaaaccttttcttccctaacatctatcaaacccgaaactaaaaccaaactcgctacgccctccgcgaaactctaaaactccaaaaccgacccgcacccgaactccgaacgacatccccaaaccgacgcgcacctacccgcaaacccacgaaacatccttaaaaaccgcccaaaacctaaacgacacaaaccccacgaaaattcgcaaactaaaatcgaccccgtaccgaccgaaaattcccgaatacaacgccaaccctaactacaaaaccgaaaaaacgaacgaacttaaactccccaaacccgacgaaaacgccctccccgcccccacccaacctcgcgaactcccgaaaaaaaaataaaacgaaaaaaaaaaacaaacgcgacaccgttcgcccaacgcccttaaaaaacaaccaccaaacataatcccctcgaaaatccccgaaactcccgaaaacacatctaaaaatcctcttcgaccgaatc

SEQ ID NO: 37569 - DNA, 991 bp, Artificial Sequence
  chemically treated genomic DNA (Homo sapiens) CpG-island No: 37569
cggacgggcgcggcgtttttaaggggcgtagtttttttacggttcgggtgggggtagggagcggttacgggttttttaaggtcggtagcgggtacgtcgggtagggtttttcggcggtcgggttgttttcggggcggcggtaggggcgtagcgttcgcgagggtgttaacggttttcgacggggtgcgcgggatcgcgtcgttggtcgtcgtcggtttgatatttatcgtggttcgtcgggagcgttcgcgttcgcgttcgtattcggatttcgcggcggcggcggcggtgagttcggcgcgggtaaataggtattttcgtttttgatttattttttgttttttttaaatgtcgtattattaatttatttttcgattaattcgtttttcgtcggtttaggttcggtttttcgtttattaatcgttgtgtttaatttttttttttcgtttattaatggaggagtcgtagcgttcggatatttgttttttttcgttagttaattcgaacgttcgaagggagtcggtttcggcggtcgtttttagttaattcgcgcgcggttcggtagttcgttggttagttgtgtggcggttagagaggtcgttgattaatggcgaggcggcgggagtcggtttatttgttatttttttgttattaattatttggcgtataggagcgtacgtttcgaggagaggattaattcgcgcgcgttttttgggtttttcgtttttgttttttttttttttttttaggttttttattagtcgcggttattgcggtgtttaagtcgcgtttttcggggtcgttcgggatgttttttttttttgggttttttgtcggttggcgtttggtcgttcgtttttattttttttttttttttttttttttttcgggtatttcgacgaaaagtagtagtttttgatttttttttttttttcggttttatttaggaaattaattttaggaacgttgagtgttagattttttttaaaat

SEQ ID NO: 37570 - DNA, 991 bp, Artificial Sequence
  chemically treated genomic DNA (Homo sapiens) CpG-island No: 37570
attttaaaaaaaatctaacactcaacgttcctaaaattaatttcctaaataaaaccgaaaaaaaaaaaaaaatcaaaaactactacttttcgtcgaaatacccgaaaaaaaaaaaaaaaaaaaaaaaaaataaaaacgaacgaccaaacgccaaccgacaaaaaacccaaaaaaaaaaaacatcccgaacgaccccgaaaaacgcgacttaaacaccgcaataaccgcgactaataaaaaacctaaaaaaaaaaaaaaaaaacaaaaacgaaaaacccaaaaaacgcgcgcgaattaatcctctcctcgaaacgtacgctcctatacgccaaataattaataacaaaaaaataacaaataaaccgactcccgccgcctcgccattaatcaacgacctctctaaccgccacacaactaaccaacgaactaccgaaccgcgcgcgaattaactaaaaacgaccgccgaaaccgactcccttcgaacgttcgaattaactaacgaaaaaaaacaaatatccgaacgctacgactcctccattaataaacgaaaaaaaaaaattaaacacaacgattaataaacgaaaaaccgaacctaaaccgacgaaaaacgaattaatcgaaaaataaattaataatacgacatttaaaaaaaacaaaaaataaatcaaaaacgaaaatacctatttacccgcgccgaactcaccgccgccgccgccgcgaaatccgaatacgaacgcgaacgcgaacgctcccgacgaaccacgataaatatcaaaccgacgacgaccaacgacgcgatcccgcgcaccccgtcgaaaaccgttaacaccctcgcgaacgctacgcccctaccgccgccccgaaaacaacccgaccgccgaaaaaccctacccgacgtacccgctaccgaccttaaaaaacccgtaaccgctccctacccccacccgaaccgtaaaaaaactacgccccttaaaaacgccgcgcccgtccg

SEQ ID NO: 37571 - DNA, 991 bp, Artificial Sequence
  chemically treated genomic DNA (Homo sapiens) CpG-island No: 37571
attttaggaagggtttggtatttaacgtttttaaaattggttttttagatggagtcggagggagagagggagttaggaattgttgtttttcgtcggaatgttcggaggggagaagaagaaggaggaggggtgagggcgggcggttaaacgttagtcggtaggggatttagagaagagggatatttcgggcgatttcgaggagcgcggtttgggtatcgtagtggtcgcggttagtgggagatttgaggggaaagggagagggtaggggcgaggaatttagggagcgcgcgcggattggtttttttttcggggcgtgcgtttttgtgcgttaaatgattggtggtaggaaagtagtaggtaaatcggttttcgtcgtttcgttattggttagcggtttttttagtcgttatataattggttagcgggttgtcgagtcgcgcgcggattggttgggggcggtcgtcgggatcggtttttttcgggcgttcggattggttggcgggaagaggtaggtattcgggcgttgcggtttttttattggtgggcggggaaggggggttgggtatagcgattggtgggcggggggtcgggtttgggtcggcggggagcggattggtcggaaagtaggttagtggtgcgatatttagggaaggtagaaagtaggttagggacggaggtgtttgtttattcgcgtcggatttatcgtcgtcgtcgtcgcgggattcgagtgcgggcgcgggcgcgggcgttttcggcgagttacggtgagtgttaggtcggcggcggttagcgacgcgatttcgcgtatttcgtcgggggtcgttagtattttcgcgggcgttgcgtttttgtcgtcgtttcgggggtaattcggtcgtcgaagaattttgttcgacgtgttcgttgtcggttttaaagggttcgtgatcgttttttgtttttattcgggtcgtggggaggttgcgttttttaaaggcgtcgcgttcgttcg

SEQ ID NO: 37572 - DNA, 991 bp, Artificial Sequence
  chemically treated genomic DNA (Homo sapiens) CpG-island No: 37572
cgaacgaacgcgacgcctttaaaaaacgcaacctccccacgacccgaataaaaacaaaaaacgatcacgaaccctttaaaaccgacaacgaacacgtcgaacaaaattcttcgacgaccgaattacccccgaaacgacgacaaaaacgcaacgcccgcgaaaatactaacgacccccgacgaaatacgcgaaatcgcgtcgctaaccgccgccgacctaacactcaccgtaactcgccgaaaacgcccgcgcccgcgcccgcactcgaatcccgcgacgacgacgacgataaatccgacgcgaataaacaaacacctccgtccctaacctactttctaccttccctaaatatcgcaccactaacctactttccgaccaatccgctccccgccgacccaaacccgaccccccgcccaccaatcgctatacccaaccccccttccccgcccaccaataaaaaaaccgcaacgcccgaatacctacctcttcccgccaaccaatccgaacgcccgaaaaaaaccgatcccgacgaccgcccccaaccaatccgcgcgcgactcgacaacccgctaaccaattatataacgactaaaaaaaccgctaaccaataacgaaacgacgaaaaccgatttacctactactttcctaccaccaatcatttaacgcacaaaaacgcacgccccgaaaaaaaaaccaatccgcgcgcgctccctaaattcctcgcccctaccctctccctttcccctcaaatctcccactaaccgcgaccactacgatacccaaaccgcgctcctcgaaatcgcccgaaatatccctcttctctaaatcccctaccgactaacgtttaaccgcccgccctcacccctcctccttcttcttctcccctccgaacattccgacgaaaaacaacaattcctaactccctctctccctccgactccatctaaaaaaccaattttaaaaacgttaaataccaaacccttcctaaaat

SEQ ID NO: 37573 - DNA, 696 bp, Artificial Sequence
  chemically treated genomic DNA (Homo sapiens) CpG-island No: 37573
tgcgggagagcggagggagggagttgcgagtcgggaggaggaaggttgggagggaaggagagggaggggtcgagggacgaagcgggtgggggttagttcggtagtagtcgtcgcggttattagcgtcgttacgttcgttcgtttagtcgttttcggtgttcgttgttcgtcgttcggttttcggttgttcgcggttttttgtttttgtttggcgttttgggtagttacgtgtttcggaatataggattgcgcgattggtcggtcgatttttggtcgcggttaggataggataggtggttgagtggggatcgtgagatcgcgagttttcggacgtcgtaggtacgaggggacgcgtgggtgggggtttcggttttgggatagggattttgatggtcgcgattaatttttattagtttcgtgatgtcgggtgtttgttcgggtcgcgttgttgaagcgagttgtgtttcgggagtaggtggattcggagtattgaggagcgttagggggttcggtagattgtagggcgttttaatgtgggtatgcgaggtttttcgtcggagtcgtgatgtagttttcgcgtcgtttttacgtgtgggggaagaacgatagtagtggtttgtgcgggtgtttagggagtgtttcgttgtttttttgaatttgggaattcgttttaagcgtacgggtgcgcggtttaat

SEQ ID NO: 37574 - DNA, 696 bp, Artificial Sequence
  chemically treated genomic DNA (Homo sapiens) CpG-island No: 37574
attaaaccgcgcacccgtacgcttaaaacgaattcccaaattcaaaaaaacaacgaaacactccctaaacacccgcacaaaccactactatcgttcttcccccacacgtaaaaacgacgcgaaaactacatcacgactccgacgaaaaacctcgcatacccacattaaaacgccctacaatctaccgaaccccctaacgctcctcaatactccgaatccacctactcccgaaacacaactcgcttcaacaacgcgacccgaacaaacacccgacatcacgaaactaataaaaattaatcgcgaccatcaaaatccctatcccaaaaccgaaacccccacccacgcgtcccctcgtacctacgacgtccgaaaactcgcgatctcacgatccccactcaaccacctatcctatcctaaccgcgaccaaaaatcgaccgaccaatcgcgcaatcctatattccgaaacacgtaactacccaaaacgccaaacaaaaacaaaaaaccgcgaacaaccgaaaaccgaacgacgaacaacgaacaccgaaaacgactaaacgaacgaacgtaacgacgctaataaccgcgacgactactaccgaactaacccccacccgcttcgtccctcgacccctccctctccttccctcccaaccttcctcctcccgactcgcaactccctccctccgctctcccgca

SEQ ID NO: 37575 - DNA, 696 bp, Artificial Sequence
  chemically treated genomic DNA (Homo sapiens) CpG-island No: 37575
attaagtcgcgtattcgtgcgtttaagacgaatttttagatttaaggggataacggagtattttttggatattcgtatagattattgttatcgttttttttttatacgtggaggcgacgcggaagttgtattacgatttcggcgggaggtttcgtatgtttatattgaggcgttttataatttgtcggattttttggcgttttttaatgtttcggatttatttattttcggagtataattcgttttagtagcgcgattcgggtaggtattcggtattacggagttggtaaaagttagtcgcggttattaaagtttttattttagggtcggaatttttatttacgcgttttttcgtgtttacggcgttcgagaattcgcgattttacggtttttatttaattatttattttgttttagtcgcgattagggatcggtcggttagtcgcgtaattttgtatttcggagtacgtagttgtttagagcgttaggtaggagtagggggtcgcgagtagtcgggagtcgggcggcgggtagcgggtatcgggagcgattgagcgagcgagcgtgacggcgttggtagtcgcggcggttgttgtcgagttagtttttattcgtttcgtttttcggttttttttttttttttttttttagttttttttttttcggttcgtagtttttttttttcgttttttcgta

SEQ ID NO: 37576 - DNA, 696 bp, Artificial Sequence
  chemically treated genomic DNA (Homo sapiens) CpG-island No: 37576
tacgaaaaaacgaaaaaaaaaaactacgaaccgaaaaaaaaaaaactaaaaaaaaaaaaaaaaaaaaaaccgaaaaacgaaacgaataaaaactaactcgacaacaaccgccgcgactaccaacgccgtcacgctcgctcgctcaatcgctcccgatacccgctacccgccgcccgactcccgactactcgcgaccccctactcctacctaacgctctaaacaactacgtactccgaaatacaaaattacgcgactaaccgaccgatccctaatcgcgactaaaacaaaataaataattaaataaaaaccgtaaaatcgcgaattctcgaacgccgtaaacacgaaaaaacgcgtaaataaaaattccgaccctaaaataaaaactttaataaccgcgactaacttttaccaactccgtaataccgaatacctacccgaatcgcgctactaaaacgaattatactccgaaaataaataaatccgaaacattaaaaaacgccaaaaaatccgacaaattataaaacgcctcaatataaacatacgaaacctcccgccgaaatcgtaatacaacttccgcgtcgcctccacgtataaaaaaaaaacgataacaataatctatacgaatatccaaaaaatactccgttatccccttaaatctaaaaattcgtcttaaacgcacgaatacgcgacttaat

SEQ ID NO: 37577 - DNA, 525 bp, Artificial Sequence
  chemically treated genomic DNA (Homo sapiens) CpG-island No: 37577
  unsure (490, 504, 524)
tcgttttagtcgggcgtagtttttttcgtcgtatatttatttttaggaaggaagagatatcgttttagtttagagtttggtaatcgggtatcgtttgggaattttgggcgggtcgagatagaggtcggtacggcgcgtttttggtatatttgttaggcgacgacggattttaggttttgaaatcgttggggttcggtggtcgaggttagttggagcgcgttattcgatttttcgtttcgggaacgttttgttttttcgattttcgtttcgttttttttatataaaggtaatttatatttatcgttattttttttttattttaaaaattattttttcgttaaatttcggtgttattttttttcgttatgttattcgttttagtacgatgggaaatgaaggcgggagtataggcggtacgaagttttagttttgtcgtttcgtgggtttaaaaaattataatttttaatatttttcgtcggttatcgttttntttttcgagttcgnttattggagaagaaagtgant

SEQ ID NO: 37578 - DNA, 525 bp, Artificial Sequence
  chemically treated genomic DNA (Homo sapiens) CpG-island No: 37578
  unsure (2, 22, 36)
antcactttcttctccaataancgaactcgaaaaanaaaacgataaccgacgaaaaatattaaaaattataattttttaaacccacgaaacgacaaaactaaaacttcgtaccgcctatactcccgccttcatttcccatcgtactaaaacgaataacataacgaaaaaaaataacaccgaaatttaacgaaaaaataatttttaaaataaaaaaaaaataacgataaatataaattacctttatataaaaaaaacgaaacgaaaatcgaaaaaacaaaacgttcccgaaacgaaaaatcgaataacgcgctccaactaacctcgaccaccgaaccccaacgatttcaaaacctaaaatccgtcgtcgcctaacaaatataccaaaaacgcgccgtaccgacctctatctcgacccgcccaaaattcccaaacgatacccgattaccaaactctaaactaaaacgatatctcttccttcctaaaaataaatatacgacgaaaaaaactacgcccgactaaaacga

SEQ ID NO: 37579 - DNA, 525 bp, Artificial Sequence
  chemically treated genomic DNA (Homo sapiens) CpG-island No: 37579
  unsure (2, 22, 36)
gnttatttttttttttaataancgggttcgaaaagnggggcggtgatcggcgaggaatattgggaattgtagttttttggatttacgggacggtagagttggagtttcgtgtcgtttgtattttcgtttttattttttatcgtgttgaggcgggtggtatggcggagaaggatgatatcggagtttgacgaagaggtggtttttgaggtaagaggaaaatggcggtgggtgtggattgtttttgtgtgagaaggacgagacggaaatcgaggaagtaaggcgttttcggggcgagggatcgggtgacgcgttttagttggtttcgattatcgaattttagcgattttagggtttagagttcgtcgtcgtttgataggtgtattagaggcgcgtcgtgtcggtttttatttcggttcgtttagaatttttagacggtgttcggttgttaggttttgggttggagcggtgtttttttttttttgggaatggatgtgcggcgggggggattgcgttcggttggggcgg

SEQ ID NO: 37580 - DNA, 525 bp, Artificial Sequence
  chemically treated genomic DNA (Homo sapiens) CpG-island No: 37580
  unsure (490, 504, 524)
ccgccccaaccgaacgcaatcccccccgccgcacatccattcccaaaaaaaaaaaaacaccgctccaacccaaaacctaacaaccgaacaccgtctaaaaattctaaacgaaccgaaataaaaaccgacacgacgcgcctctaatacacctatcaaacgacgacgaactctaaaccctaaaatcgctaaaattcgataatcgaaaccaactaaaacgcgtcacccgatccctcgccccgaaaacgccttacttcctcgatttccgtctcgtccttctcacacaaaaacaatccacacccaccgccattttcctcttacctcaaaaaccacctcttcgtcaaactccgatatcatccttctccgccataccacccgcctcaacacgataaaaaataaaaacgaaaatacaaacgacacgaaactccaactctaccgtcccgtaaatccaaaaaactacaattcccaatattcctcgccgatcaccgccccncttttcgaacccgnttattaaaaaaaaaaataanc

SEQ ID NO: 37581 - DNA, 950 bp, Artificial Sequence
  chemically treated genomic DNA (Homo sapiens) CpG-island No: 37581
tcgggtcggtcgggttagtgttttgcggtggggtcgcgttattgcgttaggattcggtcggggttcggcggtttgtgcgttcgggtttagtcgggtcggattagtattttggggttcggtcgtattagaattagtgcgttggggtcggggttcggtgtacgcgttggggtcggggcgggtgggtgtttagaggatgtgtcggataggttcggtttatttgttgtcgcgttgatgtatttttacgtggatcgttggcgattcggttatatagggaagcgtttgttttaggtcgtttacggtttcgtttatggcgttttcgagagtagtggggatttaattagggcgcggtcgtcgttattttacgtttagcgtcgtcgttatagtcgttgttttagttcgcgggtttcgttttagtttcgaatttgtcgcgcgaggcgtattattttttgattcggaagcgttcgggttcggtagggttattttttgtcgcggtttcgtttcgtttcgttttcggcgcggtttagcgagttcggtaatttcggcgtagcgagcgcgggcggttagttagggttagggggcggtggcggttaaggttcgatcgggtgttagttgtttttagttttcgtttcgggttcgtcgtcggcgtcgttatgggtaagaagtataagaagtataaggtcgagtggcgttcgttttacgagggtgaggcggcggcgttttgtgacgcgcggcgggcggggtttcgggtacgggggaggagtttcgggtacgcggacgggggttttgggtatcgggcgaggttttggttacgagggaggggttttgggtacgcgggagggggttttgggatttcgggtagggaatcgggtatacgtgaggggttttgggtaggcgtttacgtttttggtagagggttttgggttcgaggttgtaagtttatttatttcggt

SEQ ID NO: 37582 - DNA, 950 bp, Artificial Sequence
  chemically treated genomic DNA (Homo sapiens) CpG-island No: 37582
accgaaataaataaacttacaacctcgaacccaaaaccctctaccaaaaacgtaaacgcctacccaaaacccctcacgtatacccgattccctacccgaaatcccaaaaccccctcccgcgtacccaaaacccctccctcgtaaccaaaacctcgcccgatacccaaaacccccgtccgcgtacccgaaactcctcccccgtacccgaaaccccgcccgccgcgcgtcacaaaacgccgccgcctcaccctcgtaaaacgaacgccactcgaccttatacttcttatacttcttacccataacgacgccgacgacgaacccgaaacgaaaactaaaaacaactaacacccgatcgaaccttaaccgccaccgccccctaaccctaactaaccgcccgcgctcgctacgccgaaattaccgaactcgctaaaccgcgccgaaaacgaaacgaaacgaaaccgcgacaaaaaataaccctaccgaacccgaacgcttccgaatcaaaaaataatacgcctcgcgcgacaaattcgaaactaaaacgaaacccgcgaactaaaacaacgactataacgacgacgctaaacgtaaaataacgacgaccgcgccctaattaaatccccactactctcgaaaacgccataaacgaaaccgtaaacgacctaaaacaaacgcttccctatataaccgaatcgccaacgatccacgtaaaaatacatcaacgcgacaacaaataaaccgaacctatccgacacatcctctaaacacccacccgccccgaccccaacgcgtacaccgaaccccgaccccaacgcactaattctaatacgaccgaaccccaaaatactaatccgacccgactaaacccgaacgcacaaaccgccgaaccccgaccgaatcctaacgcaataacgcgaccccaccgcaaaacactaacccgaccgacccga

SEQ ID NO: 37583 - DNA, 950 bp, Artificial Sequence
  chemically treated genomic DNA (Homo sapiens) CpG-island No: 37583
atcggggtgagtgggtttgtagtttcgaatttagaattttttattaggaacgtaagcgtttatttaggattttttacgtgtgttcggttttttgttcgaaattttaggattttttttcgcgtgtttagaatttttttttcgtggttaggatttcgttcggtgtttaggattttcgttcgcgtgttcggaatttttttttcgtgttcgggatttcgttcgtcgcgcgttataaagcgtcgtcgttttattttcgtaggacgagcgttattcggttttgtgttttttgtgttttttgtttatggcggcgtcggcggcgggttcgaggcgggggttgggaatagttggtattcggtcggattttggtcgttatcgttttttggttttggttggtcgttcgcgttcgttgcgtcgaggttgtcgagttcgttgggtcgcgtcggaaacggggcgaggcggggtcgcggtaggaagtggttttgtcgggttcgagcgttttcgggttaggaggtggtgcgtttcgcgcggtagattcgaagttagggcggggttcgcgggttgaggtagcggttgtggcggcgacgttgggcgtgaggtggcggcggtcgcgttttggttgggtttttattgttttcgggggcgttatggacgaggtcgtgggcgatttgaagtaggcgtttttttgtgtggtcgagtcgttaacggtttacgtggaggtgtattagcgcggtagtaggtgagtcggatttgttcgatatattttttgggtatttattcgtttcgattttagcgcgtgtatcgagtttcgattttagcgtattgattttgatgcgatcgaattttagggtattgattcggttcgattggattcgggcgtataggtcgtcgggtttcgatcggattttagcgtaatgacgcgattttatcgtagggtattgattcggtcgattcga

SEQ ID NO: 37584 - DNA, 950 bp, Artificial Sequence
  chemically treated genomic DNA (Homo sapiens) CpG-island No: 37584
tcgaatcgaccgaatcaataccctacgataaaatcgcgtcattacgctaaaatccgatcgaaacccgacgacctatacgcccgaatccaatcgaaccgaatcaataccctaaaattcgatcgcatcaaaatcaatacgctaaaatcgaaactcgatacacgcgctaaaatcgaaacgaataaatacccaaaaaatatatcgaacaaatccgactcacctactaccgcgctaatacacctccacgtaaaccgttaacgactcgaccacacaaaaaaacgcctacttcaaatcgcccacgacctcgtccataacgcccccgaaaacaataaaaacccaaccaaaacgcgaccgccgccacctcacgcccaacgtcgccgccacaaccgctacctcaacccgcgaaccccgccctaacttcgaatctaccgcgcgaaacgcaccacctcctaacccgaaaacgctcgaacccgacaaaaccacttcctaccgcgaccccgcctcgccccgtttccgacgcgacccaacgaactcgacaacctcgacgcaacgaacgcgaacgaccaaccaaaaccaaaaaacgataacgaccaaaatccgaccgaataccaactattcccaacccccgcctcgaacccgccgccgacgccgccataaacaaaaaacacaaaaaacacaaaaccgaataacgctcgtcctacgaaaataaaacgacgacgctttataacgcgcgacgaacgaaatcccgaacacgaaaaaaaaattccgaacacgcgaacgaaaatcctaaacaccgaacgaaatcctaaccacgaaaaaaaaattctaaacacgcgaaaaaaaatcctaaaatttcgaacaaaaaaccgaacacacgtaaaaaatcctaaataaacgcttacgttcctaataaaaaattctaaattcgaaactacaaacccactcaccccgat

SEQ ID NO: 37585 - DNA, 787 bp, Artificial Sequence
  chemically treated genomic DNA (Homo sapiens) CpG-island No: 37585
gtcgatgcgttgcgggtagcggtcgtcgggggcgttgcgggggtcgcggttaaagtttcggcgcgggcgtacgcgtttagagggagtcgggtcgtcgtcgttgtcgtcgttgttttcgcgttttgcgttcggtggttttttattttcgtttcgcggtcgtatttggcgttttttggttttttcggttttcgcgcggcgtggagttatttttttttattttttatcggtattttagtttgttttcggtttatgcggttttcgcgggttttcggtttcggttttagaatttagttttgtatttgagcgcggggttcggcggggcgtggcggcggcgatggggaaattgtagtcgaagtacggtgagtcgcgggtcggtagggcgggagggcgggcgggcgggcgtggggtcgttttttattgtcgttttttttttttcgcgtttcgtcgtgtcgtagtcgtcgtcgttcgtaagcggagagagagttcggaaggtgagcgggcgagtcgacgggcggggcggggggcggcgattcggttcgggatttttagagttaggagttcgcgcgcgttttgttttggagttagcggtggggggacggggtcgcgggtttttaggagcgcgcgggatttttacgtttgtttttgcgcggtttttaggcgatggggatatagcgaaggcgtagcgttcgcggggtttacggcgcgttttttttttttttcggtgcgggtttttcgcgcgttcgttttcggatcgtaggggatagtttcgtggcgttcgcgtacgcga

SEQ ID NO: 37586 - DNA, 787 bp, Artificial Sequence
  chemically treated genomic DNA (Homo sapiens) CpG-island No: 37586
tcgcgtacgcgaacgccacgaaactatcccctacgatccgaaaacgaacgcgcgaaaaacccgcaccgaaaaaaaaaaaaaacgcgccgtaaaccccgcgaacgctacgccttcgctatatccccatcgcctaaaaaccgcgcaaaaacaaacgtaaaaatcccgcgcgctcctaaaaacccgcgaccccgtccccccaccgctaactccaaaacaaaacgcgcgcgaactcctaactctaaaaatcccgaaccgaatcgccgccccccgccccgcccgtcgactcgcccgctcaccttccgaactctctctccgcttacgaacgacgacgactacgacacgacgaaacgcgaaaaaaaaaaaacgacaataaaaaacgaccccacgcccgcccgcccgccctcccgccctaccgacccgcgactcaccgtacttcgactacaatttccccatcgccgccgccacgccccgccgaaccccgcgctcaaatacaaaactaaattctaaaaccgaaaccgaaaacccgcgaaaaccgcataaaccgaaaacaaactaaaataccgataaaaaataaaaaaaaataactccacgccgcgcgaaaaccgaaaaaaccaaaaaacgccaaatacgaccgcgaaacgaaaataaaaaaccaccgaacgcaaaacgcgaaaacaacgacgacaacgacgacgacccgactccctctaaacgcgtacgcccgcgccgaaactttaaccgcgacccccgcaacgcccccgacgaccgctacccgcaacgcatcgac

SEQ ID NO: 37587 - DNA, 787 bp, Artificial Sequence
  chemically treated genomic DNA (Homo sapiens) CpG-island No: 37587
tcgcgtacgcggacgttacgaagttgttttttgcggttcgggggcggacgcgcgggaaattcgtatcgaggagggaaagagacgcgtcgtgagtttcgcgggcgttgcgttttcgttgtgtttttatcgtttggagatcgcgtaggggtaggcgtgggggtttcgcgcgtttttggagattcgcggtttcgtttttttatcgttggttttagggtaggacgcgcgcgggtttttagttttgagggtttcgggtcgggtcgtcgtttttcgtttcgttcgtcggttcgttcgtttatttttcgggtttttttttcgtttgcgggcggcggcggttgcggtacggcgggacgcggggagaggaaaacgatagtgagaggcggttttacgttcgttcgttcgttttttcgttttatcggttcgcggtttatcgtgtttcgattgtagtttttttatcgtcgtcgttacgtttcgtcgggtttcgcgtttaggtgtagggttgagttttgaagtcggggtcgggagttcgcgggggtcgtatgggtcgggagtaagttagggtgtcggtaggaggtgagggaagatggttttacgtcgcgcgggggtcgggggagttagggggcgttaggtacggtcgcggggcggaggtggggggttatcgggcgtagggcgcggggatagcggcggtagcgacggcggttcggttttttttgagcgcgtgcgttcgcgtcggggttttaatcgcggttttcgtagcgttttcggcggtcgttgttcgtagcgtatcggt

SEQ ID NO: 37588 - DNA, 787 bp, Artificial Sequence
  chemically treated genomic DNA (Homo sapiens) CpG-island No: 37588
accgatacgctacgaacaacgaccgccgaaaacgctacgaaaaccgcgattaaaaccccgacgcgaacgcacgcgctcaaaaaaaaccgaaccgccgtcgctaccgccgctatccccgcgccctacgcccgataaccccccacctccgccccgcgaccgtacctaacgccccctaactcccccgacccccgcgcgacgtaaaaccatcttccctcacctcctaccgacaccctaacttactcccgacccatacgacccccgcgaactcccgaccccgacttcaaaactcaaccctacacctaaacgcgaaacccgacgaaacgtaacgacgacgataaaaaaactacaatcgaaacacgataaaccgcgaaccgataaaacgaaaaaacgaacgaacgaacgtaaaaccgcctctcactatcgttttcctctccccgcgtcccgccgtaccgcaaccgccgccgcccgcaaacgaaaaaaaaacccgaaaaataaacgaacgaaccgacgaacgaaacgaaaaacgacgacccgacccgaaaccctcaaaactaaaaacccgcgcgcgtcctaccctaaaaccaacgataaaaaaacgaaaccgcgaatctccaaaaacgcgcgaaacccccacgcctacccctacgcgatctccaaacgataaaaacacaacgaaaacgcaacgcccgcgaaactcacgacgcgtctctttccctcctcgatacgaatttcccgcgcgtccgcccccgaaccgcaaaaaacaacttcgtaacgtccgcgtacgcga

SEQ ID NO: 37589 - DNA, 1148 bp, Artificial Sequence
  chemically treated genomic DNA (Homo sapiens) CpG-island No: 37589
tgcgttgtagtagagttcggcgttttcgtcgttatttttgcgcgtttttcggttttttcgacgttgttagggaggatgtttcgtttttcgtttcgagtttttagcggttcggcgcgaagttttttaaagtgattcgggcgtcgagaattttcgtttttttttttcgggttttttcggagatttcgttcgtcgttttttttcgcgttttcggaaaagttgcgagcgacgttttaaatttcggttttttcgtttcgcgtcgcgcgcgttttgggcgttttcgcgttcggtcgtcgcgtaggggcgtagttttttttattttagtttcggcgttatgacgcggggagcgtagcgggggttatcggtggcggcggcggcgtagaggcggttaagtgcggggcgtgggcggtagcgcggggcgtacgtgcgtcgggtcgggggtcggggtcgggcggggggtcgtttatttgttggaggtagaggaaggcgggcgggtagggtacggagtgcgggagtatgttgtcggagttggatagtaggaggtagttcgagttcgttatggagtatagtatggggcggtaggggggcgttcggcggcggttttgcgttcgttgcgtttttcggagtgtgcgcgcgttttgtttttcgggcgttttttcggtttttttttttttttttttttgggttttttttttttttcgtggcgttttttaagagggaggtatcgaaaggagagcggcgcgtttttgttcggtgttttttttgttcgggcggggaggttggagagagcgcgcgcgagaatacggttagagagtttgtgcgcgagagatcgggcgagcgggcgagagtaggagttagttattttggagttttcggagttttgtttgtaaagagtggtgcgtgtgcgtgtgtgagtgcgcgcgtgtgcgcgcgtgtgtagcggtgggagggggagtttttggcgtattttaatattaaacggagtttcgcgcggagggaagagaattcggagcgacggtataatagttgattttatatttaatttttcgttcgtcggtatcggggtagttttttttcgcgtttttttacgttcgggtttttgcgcgttttttttttttttcgttgttagtatttgtttttggtttgggggg

SEQ ID NO: 37590 - DNA, 1148 bp, Artificial Sequence
  chemically treated genomic DNA (Homo sapiens) CpG-island No: 37590
ccccccaaaccaaaaacaaatactaacaacgaaaaaaaaaaaaaacgcgcaaaaacccgaacgtaaaaaaacgcgaaaaaaaactaccccgataccgacgaacgaaaaattaaatataaaatcaactattataccgtcgctccgaattctcttccctccgcgcgaaactccgtttaatattaaaatacgccaaaaactccccctcccaccgctacacacgcgcgcacacgcgcgcactcacacacgcacacgcaccactctttacaaacaaaactccgaaaactccaaaataactaactcctactctcgcccgctcgcccgatctctcgcgcacaaactctctaaccgtattctcgcgcgcgctctctccaacctccccgcccgaacaaaaaaaacaccgaacaaaaacgcgccgctctcctttcgatacctccctcttaaaaaacgccacgaaaaaaaaaaaaaacccaaaaaaaaaaaaaaaaaaaaaccgaaaaaacgcccgaaaaacaaaacgcgcgcacactccgaaaaacgcaacgaacgcaaaaccgccgccgaacgcccccctaccgccccatactatactccataacgaactcgaactacctcctactatccaactccgacaacatactcccgcactccgtaccctacccgcccgccttcctctacctccaacaaataaacgaccccccgcccgaccccgacccccgacccgacgcacgtacgccccgcgctaccgcccacgccccgcacttaaccgcctctacgccgccgccgccaccgataacccccgctacgctccccgcgtcataacgccgaaactaaaataaaaaaaactacgcccctacgcgacgaccgaacgcgaaaacgcccaaaacgcgcgcgacgcgaaacgaaaaaaccgaaatttaaaacgtcgctcgcaacttttccgaaaacgcgaaaaaaaacgacgaacgaaatctccgaaaaaacccgaaaaaaaaaaacgaaaattctcgacgcccgaatcactttaaaaaacttcgcgccgaaccgctaaaaactcgaaacgaaaaacgaaacatcctccctaacaacgtcgaaaaaaccgaaaaacgcgcaaaaataacgacgaaaacgccgaactctactacaacgca

SEQ ID NO: 37591 - DNA, 1148 bp, Artificial Sequence
  chemically treated genomic DNA (Homo sapiens) CpG-island No: 37591
ttttttaggttaggagtaagtgttggtaacgggggggaggaggggcgcgtaggggttcgagcgtgggagggcgcgagggagggttgtttcggtgtcggcgggcgaggggttaagtgtgggattagttgttgtgtcgtcgtttcggattttttttttttcgcgcggggtttcgtttgatgttggagtacgttagggatttttttttttatcgttatatacgcgcgtatacgcgcgtatttatatacgtatacgtattattttttgtagatagggtttcggaggttttaaagtgattgatttttgttttcgttcgttcgttcgatttttcgcgtatagattttttggtcgtattttcgcgcgcgttttttttagttttttcgttcgggtagggggaatatcgggtagaggcgcgtcgtttttttttcgatgttttttttttaaagagcgttacgagggggaggggaggtttagaggaggaggaggagagagatcgggagggcgttcgggaggtagggcgcgcgtatatttcgagggacgtagcgagcgtagagtcgtcgtcgggcgtttttttgtcgttttatgttgtgttttatggcgaattcgggttgttttttgttgtttaatttcggtagtatgttttcgtatttcgtgttttgttcgttcgtttttttttatttttaataggtaagcggtttttcgttcggtttcggttttcggttcggcgtacgtgcgtttcgcgttgtcgtttacgtttcgtatttggtcgtttttgcgtcgtcgtcgttatcggtggttttcgttgcgtttttcgcgttatggcgtcggggttggggtagggggaattgcgtttttgcgcggcggtcgagcgcgggggcgtttagggcgcgcgcggcgcgaggcgggggggtcggagtttggggcgtcgttcgtaattttttcgaaggcgcgggagggggcggcgggcggagttttcggggaagttcgaggggagggggcgggggttttcggcgttcgggttattttggggaatttcgcgtcgggtcgttggggattcggggcggggagcggggtattttttttggtagcgtcgggaaagtcggggggcgcgtagaggtggcggcgggggcgtcgagttttgttgtagcgta

SEQ ID NO: 37592 - DNA, 1148 bp, Artificial Sequence
  chemically treated genomic DNA (Homo sapiens) CpG-island No: 37592
tacgctacaacaaaactcgacgcccccgccgccacctctacgcgccccccgactttcccgacgctaccaaaaaaaataccccgctccccgccccgaatccccaacgacccgacgcgaaattccccaaaataacccgaacgccgaaaacccccgccccctcccctcgaacttccccgaaaactccgcccgccgccccctcccgcgccttcgaaaaaattacgaacgacgccccaaactccgacccccccgcctcgcgccgcgcgcgccctaaacgcccccgcgctcgaccgccgcgcaaaaacgcaattccccctaccccaaccccgacgccataacgcgaaaaacgcaacgaaaaccaccgataacgacgacgacgcaaaaacgaccaaatacgaaacgtaaacgacaacgcgaaacgcacgtacgccgaaccgaaaaccgaaaccgaacgaaaaaccgcttacctattaaaaataaaaaaaaacgaacgaacaaaacacgaaatacgaaaacatactaccgaaattaaacaacaaaaaacaacccgaattcgccataaaacacaacataaaacgacaaaaaaacgcccgacgacgactctacgctcgctacgtccctcgaaatatacgcgcgccctacctcccgaacgccctcccgatctctctcctcctcctcctctaaacctcccctccccctcgtaacgctctttaaaaaaaaaacatcgaaaaaaaaacgacgcgcctctacccgatattccccctacccgaacgaaaaaactaaaaaaaacgcgcgcgaaaatacgaccaaaaaatctatacgcgaaaaatcgaacgaacgaacgaaaacaaaaatcaatcactttaaaacctccgaaaccctatctacaaaaaataatacgtatacgtatataaatacgcgcgtatacgcgcgtatataacgataaaaaaaaaaatccctaacgtactccaacatcaaacgaaaccccgcgcgaaaaaaaaaaaatccgaaacgacgacacaacaactaatcccacacttaacccctcgcccgccgacaccgaaacaaccctccctcgcgccctcccacgctcgaacccctacgcgcccctcctcccccccgttaccaacacttactcctaacctaaaaaa

SEQ ID NO: 37593 - DNA, 574 bp, Artificial Sequence
  chemically treated genomic DNA (Homo sapiens) CpG-island No: 37593
cgcgttttaaaatttttttttcgttttatacgcgtttttcgatataagcgttttataagtttttagttttataagcgttttacgaatttttatgagggttgcgtttttcgagttttcgcggttttttacgttttcgtgtttttcgttttttagcgtcgcgtttttttttttcgtagcgtttgtttttatcgattattttttgtagttcgtaatcgtttttgttgatggattagggtagggcgttcgagttttcggatatgacggcggtagcggttcgcggtttttttttaaattcgttgatttcgttcgttttttcgtcgcgcgtttttttatttttaatagtcgtcgtcgtcgtcgtcgcgtttttattaatcgtttcggaatagttacgggtcggacggcgtcggggcgcggggttatcgcgcggtagagtagcgggggtttagagtttcggcggatttcgttttttgttttttcgagttcggtattgttcggtttagtttacgttttgttttcggttttcgtagtagtagcgatagaagttttgtttgggtttagtttttttgtttcgttt

SEQ ID NO: 37594 - DNA, 574 bp, Artificial Sequence
  chemically treated genomic DNA (Homo sapiens) CpG-island No: 37594
aaacgaaacaaaaaaactaaacccaaacaaaacttctatcgctactactacgaaaaccgaaaacaaaacgtaaactaaaccgaacaataccgaactcgaaaaaacaaaaaacgaaatccgccgaaactctaaacccccgctactctaccgcgcgataaccccgcgccccgacgccgtccgacccgtaactattccgaaacgattaataaaaacgcgacgacgacgacgacgactattaaaaataaaaaaacgcgcgacgaaaaaacgaacgaaatcaacgaatttaaaaaaaaaccgcgaaccgctaccgccgtcatatccgaaaactcgaacgccctaccctaatccatcaacaaaaacgattacgaactacaaaaaataatcgataaaaacaaacgctacgaaaaaaaaaaacgcgacgctaaaaaacgaaaaacacgaaaacgtaaaaaaccgcgaaaactcgaaaaacgcaaccctcataaaaattcgtaaaacgcttataaaactaaaaacttataaaacgcttatatcgaaaaacgcgtataaaacgaaaaaaaaattttaaaacgcg

SEQ ID NO: 37595 - DNA, 574 bp, Artificial Sequence
  chemically treated genomic DNA (Homo sapiens) CpG-island No: 37595
gggcgggatagaggggttgggtttaggtaaagtttttgtcgttgttgttgcggaggtcgaggataggacgtgggttgggtcgggtagtgtcggattcggaggagtaggaggcgaggttcgtcggagttttgagttttcgttgttttgtcgcgcggtgatttcgcgtttcggcgtcgttcgattcgtggttgtttcgagacgattggtgggggcgcggcggcggcggcggcggttgttgggggtggggagacgcgcggcgaggagacgagcgaggttagcgagtttgagggaggatcgcgagtcgttgtcgtcgttatgttcgaggattcgagcgttttgttttggtttattaatagggacgattacgagttgtaggaggtgatcggtgagagtaggcgttgcggaggggggaggcgcggcgttgggaggcgggggatacgggaacgtggggagtcgcgggagttcggggagcgtagtttttataggaattcgtggggcgtttgtggggttgggggtttgtaggacgtttgtgtcgaggagcgcgtgtgagacgggaagggggttttgaggcgcg

SEQ ID NO: 37596 - DNA, 574 bp, Artificial Sequence
  chemically treated genomic DNA (Homo sapiens) CpG-island No: 37596
cgcgcctcaaaacccccttcccgtctcacacgcgctcctcgacacaaacgtcctacaaacccccaaccccacaaacgccccacgaattcctataaaaactacgctccccgaactcccgcgactccccacgttcccgtatcccccgcctcccaacgccgcgcctcccccctccgcaacgcctactctcaccgatcacctcctacaactcgtaatcgtccctattaataaaccaaaacaaaacgctcgaatcctcgaacataacgacgacaacgactcgcgatcctccctcaaactcgctaacctcgctcgtctcctcgccgcgcgtctccccacccccaacaaccgccgccgccgccgccgcgcccccaccaatcgtctcgaaacaaccacgaatcgaacgacgccgaaacgcgaaatcaccgcgcgacaaaacaacgaaaactcaaaactccgacgaacctcgcctcctactcctccgaatccgacactacccgacccaacccacgtcctatcctcgacctccgcaacaacaacgacaaaaactttacctaaacccaacccctctatcccgccc

SEQ ID NO: 37597 - DNA, 968 bp, Artificial Sequence
  chemically treated genomic DNA (Homo sapiens) CpG-island No: 37597
  unsure (508, 797)
tgcgattcgcgcgggttagttgggtcgtattttcgagaagtcgcggagacgatcgataggtaggcgcggttcgacgtgtttatcgttcgcgtcgatttcggggagtcgttttttcgcgttcgtagtatttgtttacggcgcggattttacggcggggattttatatcgcggtcgttcgttttaggggaggagtgagttcgtttcgggcgttagattcggggattcggggtaaggattcggggtttcgttgggggcggagcgtttgaggtagtatcggcggtcgggcgcgtttttattcggaaagcggcgacggtttttaagttgggttgcggagtgggaggcgcgtcgagttttaagtagataatgcgggagaagggcgatgcgtagggaggaggggttcgtagatttgaggtttcggcgtcgtcggattcgtttgtttagttcgttttcgaaattttcgtagttttcgtttttttttcggggttcgttttatcgagtaatcgtaggngattggtcgcgtttcgttttcgatttataaattataaaattttttttaatttcgttaattaagttgcgtttttatcgtgcggttttcggggttttttcgcgggtcgagttgggataattttttattttcgtcgcggagaaagataataggcggtcgttttttcggaggcggttaaagcggcggcgatcgaggcgagtaatgggtacggtagtttcggtagagtataggcgttttatcgcggttgttcgggtttcgcgttggttttgtatatagttttagttcgcgtatngtcgaaagacgttcgggagggtgggcggggtacgcgggaaggcggtaacgtttgcgagttttttcgtgagtatacgcggagtaagaattgcgagttgggattgtacggtagaattgtttatttcgttgtatgagattaatagtaaggtttttggacggggtatttaggttg

SEQ ID NO: 37598 - DNA, 968 bp, Artificial Sequence
  chemically treated genomic DNA (Homo sapiens) CpG-island No: 37598
  unsure (172, 461)
caacctaaataccccgtccaaaaaccttactattaatctcatacaacgaaataaacaattctaccgtacaatcccaactcgcaattcttactccgcgtatactcacgaaaaaactcgcaaacgttaccgccttcccgcgtaccccgcccaccctcccgaacgtctttcgacnatacgcgaactaaaactatatacaaaaccaacgcgaaacccgaacaaccgcgataaaacgcctatactctaccgaaactaccgtacccattactcgcctcgatcgccgccgctttaaccgcctccgaaaaaacgaccgcctattatctttctccgcgacgaaaataaaaaattatcccaactcgacccgcgaaaaaaccccgaaaaccgcacgataaaaacgcaacttaattaacgaaattaaaaaaaattttataatttataaatcgaaaacgaaacgcgaccaatcncctacgattactcgataaaacgaaccccgaaaaaaaaacgaaaactacgaaaatttcgaaaacgaactaaacaaacgaatccgacgacgccgaaacctcaaatctacgaacccctcctccctacgcatcgcccttctcccgcattatctacttaaaactcgacgcgcctcccactccgcaacccaacttaaaaaccgtcgccgctttccgaataaaaacgcgcccgaccgccgatactacctcaaacgctccgcccccaacgaaaccccgaatccttaccccgaatccccgaatctaacgcccgaaacgaactcactcctcccctaaaacgaacgaccgcgatataaaatccccgccgtaaaatccgcgccgtaaacaaatactacgaacgcgaaaaaacgactccccgaaatcgacgcgaacgataaacacgtcgaaccgcgcctacctatcgatcgtctccgcgacttctcgaaaatacgacccaactaacccgcgcgaatcgca

SEQ ID NO: 37599 - DNA, 968 bp, Artificial Sequence
  chemically treated genomic DNA (Homo sapiens) CpG-island No: 37599
  unsure (172, 461)
taatttgagtgtttcgtttaggagttttattattggttttatgtagcgagatgggtagttttgtcgtgtaattttagttcgtagtttttgtttcgcgtgtatttacgggaggattcgtaggcgttatcgttttttcgcgtgtttcgtttattttttcgagcgtttttcggtnatgcgcggattggagttgtgtgtagggttagcgcggagttcgagtagtcgcggtgaagcgtttgtgttttgtcgagattgtcgtgtttattgttcgtttcggtcgtcgtcgttttagtcgttttcgggggagcggtcgtttattgttttttttcgcggcgaaggtgaagagttgttttagttcggttcgcgggggagtttcgggagtcgtacggtgagagcgtaatttagttggcggagttgggggaagttttgtgatttgtgggtcgggggcggagcgcggttagttntttgcggttgttcggtggggcgggtttcggaggaggggcgggggttgcgggggtttcgggggcgggttggatagacgggttcggcggcgtcgggattttaggtttgcggattttttttttttgcgtatcgtttttttttcgtattgtttgtttggggttcggcgcgttttttatttcgtagtttaatttagaggtcgtcgtcgtttttcgggtgggggcgcgttcggtcgtcgatgttattttaggcgtttcgtttttagcgaggtttcgaatttttgtttcgggttttcgggtttggcgttcggggcgggtttattttttttttggggcgggcggtcgcggtgtggagttttcgtcgtggagttcgcgtcgtgaataagtgttgcgggcgcgagggagcggtttttcggggtcgacgcggacggtaaatacgtcgggtcgcgtttgtttgtcggtcgttttcgcggtttttcgggggtgcggtttagttgattcgcgcgggtcgta

SEQ ID NO: 37600 - DNA, 968 bp, Artificial Sequence
  chemically treated genomic DNA (Homo sapiens) CpG-island No: 37600
  unsure (508, 797)
tacgacccgcgcgaatcaactaaaccgcacccccgaaaaaccgcgaaaacgaccgacaaacaaacgcgacccgacgtatttaccgtccgcgtcgaccccgaaaaaccgctccctcgcgcccgcaacacttattcacgacgcgaactccacgacgaaaactccacaccgcgaccgcccgccccaaaaaaaaaataaacccgccccgaacgccaaacccgaaaacccgaaacaaaaattcgaaacctcgctaaaaacgaaacgcctaaaataacatcgacgaccgaacgcgcccccacccgaaaaacgacgacgacctctaaattaaactacgaaataaaaaacgcgccgaaccccaaacaaacaatacgaaaaaaaaacgatacgcaaaaaaaaaaaatccgcaaacctaaaatcccgacgccgccgaacccgtctatccaacccgcccccgaaacccccgcaacccccgcccctcctccgaaacccgccccaccgaacaaccgcaaanaactaaccgcgctccgcccccgacccacaaatcacaaaacttcccccaactccgccaactaaattacgctctcaccgtacgactcccgaaactcccccgcgaaccgaactaaaacaactcttcaccttcgccgcgaaaaaaaacaataaacgaccgctcccccgaaaacgactaaaacgacgacgaccgaaacgaacaataaacacgacaatctcgacaaaacacaaacgcttcaccgcgactactcgaactccgcgctaaccctacacacaactccaatccgcgcatnaccgaaaaacgctcgaaaaaataaacgaaacacgcgaaaaaacgataacgcctacgaatcctcccgtaaatacacgcgaaacaaaaactacgaactaaaattacacgacaaaactacccatctcgctacataaaaccaataataaaactcctaaacgaaacactcaaatta

SEQ ID NO: 37601 - DNA, 726 bp, Artificial Sequence
  chemically treated genomic DNA (Homo sapiens) CpG-island No: 37601
tcgtcgttcgggttacgggtcgggttcgtttcgtttagaggcgttgtagacggtttagtttcgcgttttcggttttattcggttcggttcgacgtatcgattagtttcggttacgagttggtttacgtaggatagttttatttttttattttgtttcgtcgttgttggggttgttgttacggtgttcggtggggtagggcgaggtcgatgttcgatggagatttagtagaggaaaggttggagagcgggcgaagaggaagacgatagttgggtttcggcggttgttgatgggggagtttttgggaggggttgcggttttagtcggggaaagggcgagtcgcggcggcgaatgtttggggggtggggcgaggggggttgagagggattaatatgttcgtttttttgtttaaataaacggagatcgtcggggtagattgcgtatgcggggcgcggacgttcggaaggggaattagtcgggatttcgcgcgcgcgcgcgtattttgtcgttttcgtagggtggggtggggcggggcggtgaggtgggcggggttttgcgggtaggcggtggagaaggcggatcgttgggaggagtcgagtgcgggtaagtagttgtcggtaaggttttcgttttggtcggttttgaggagttatgtagggttttggagcggttttggaggttcggacggaggcggagttttggttgtttttgatcgttgtttcggtaga

SEQ ID NO: 37602 - DNA, 726 bp, Artificial Sequence
  chemically treated genomic DNA (Homo sapiens) CpG-island No: 37602
tctaccgaaacaacgatcaaaaacaaccaaaactccgcctccgtccgaacctccaaaaccgctccaaaaccctacataactcctcaaaaccgaccaaaacgaaaaccttaccgacaactacttacccgcactcgactcctcccaacgatccgccttctccaccgcctacccgcaaaaccccgcccacctcaccgccccgccccaccccaccctacgaaaacgacaaaatacgcgcgcgcgcgcgaaatcccgactaattccccttccgaacgtccgcgccccgcatacgcaatctaccccgacgatctccgtttatttaaacaaaaaaacgaacatattaatccctctcaacccccctcgccccaccccccaaacattcgccgccgcgactcgccctttccccgactaaaaccgcaacccctcccaaaaactcccccatcaacaaccgccgaaacccaactatcgtcttcctcttcgcccgctctccaacctttcctctactaaatctccatcgaacatcgacctcgccctaccccaccgaacaccgtaacaacaaccccaacaacgacgaaacaaaataaaaaaataaaactatcctacgtaaaccaactcgtaaccgaaactaatcgatacgtcgaaccgaaccgaataaaaccgaaaacgcgaaactaaaccgtctacaacgcctctaaacgaaacgaacccgacccgtaacccgaacgacga

SEQ ID NO: 37603 - DNA, 726 bp, Artificial Sequence
  chemically treated genomic DNA (Homo sapiens) CpG-island No: 37603
tttgtcgggatagcgattagaagtagttagagtttcgttttcgttcggatttttaaggtcgttttagagttttgtatggttttttagagtcggttaaggcgagaattttgtcggtagttgtttattcgtattcggttttttttagcggttcgttttttttatcgtttgttcgtaaggtttcgtttattttatcgtttcgttttattttattttgcggaggcgatagagtgcgcgcgcgcgcgcggggtttcggttggtttttttttcgagcgttcgcgtttcgtatgcgtagtttgtttcggcggttttcgtttgtttgaataggaaggcggatatattagttttttttagtttttttcgttttattttttaggtattcgtcgtcgcgattcgtttttttttcggttgggatcgtagttttttttagaagtttttttattagtagtcgtcgggatttaattatcgttttttttttcgttcgttttttagttttttttttgttaagtttttatcgggtatcgatttcgttttgttttatcggatatcgtagtagtagttttagtagcgacgggataaaatgggagagtgaggttgttttgcgtggattagttcgtggtcgagattgatcggtgcgtcgggtcgggtcgagtagagtcggggacgcggggttagatcgtttatagcgtttttgagcggagcgggttcggttcgtggttcgagcggcgg

SEQ ID NO: 37604 - DNA, 726 bp, Artificial Sequence
  chemically treated genomic DNA (Homo sapiens) CpG-island No: 37604
ccgccgctcgaaccacgaaccgaacccgctccgctcaaaaacgctataaacgatctaaccccgcgtccccgactctactcgacccgacccgacgcaccgatcaatctcgaccacgaactaatccacgcaaaacaacctcactctcccattttatcccgtcgctactaaaactactactacgatatccgataaaacaaaacgaaatcgatacccgataaaaacttaacaaaaaaaaaactaaaaaacgaacgaaaaaaaaaacgataattaaatcccgacgactactaataaaaaaacttctaaaaaaaactacgatcccaaccgaaaaaaaaacgaatcgcgacgacgaatacctaaaaaataaaacgaaaaaaactaaaaaaaactaatatatccgccttcctattcaaacaaacgaaaaccgccgaaacaaactacgcatacgaaacgcgaacgctcgaaaaaaaaaccaaccgaaaccccgcgcgcgcgcgcgcactctatcgcctccgcaaaataaaataaaacgaaacgataaaataaacgaaaccttacgaacaaacgataaaaaaaacgaaccgctaaaaaaaaccgaatacgaataaacaactaccgacaaaattctcgccttaaccgactctaaaaaaccatacaaaactctaaaacgaccttaaaaatccgaacgaaaacgaaactctaactacttctaatcgctatcccgacaaa

SEQ ID NO: 37605 - DNA, 654 bp, Artificial Sequence
  chemically treated genomic DNA (Homo sapiens) CpG-island No: 37605
gttaacgtcgattttcgggtttttttgttggttaaagcgttgaatggtgagtaggcggtcggtacgcgcgtagttttacgttatggttacgcgtattcgttagtagtatttgtaagatttgttattaacgaggtgattattacgtcgttggattcggttttacgtttcggtttgtttttttgggtgggaacgtcgggtcgttcggggtttaggcgtcgattgtaggtagcgggtttattggtgtggggagatgcgttcgcgcgggcgcgggtcgtcgtcggggtttaggcgagcggtttcgaaggtatcgaggtgttttgtttgttgggtatttcggtcgaggttttggtgttggtggcgtcgcgcgacggtcgcgtagtgtttaattgcgtttgtcgcgacgtgttggtttggatttttttcgagtagtagttggatttgtattacggtcgcggggaggcgattacgttgcgtttcgacgggtttttcgttaagcgtgggcgaggtggtggcgcgtttgtaggtgagttggagtggtaaattggggtttttgcgcgcggcgggcggagtttgttttggatttttttttttcgtcgtttttgttttttatttttgcggaagggaaagtcgaggagggtagaagttatttcgggg

SEQ ID NO: 37606 - DNA, 654 bp, Artificial Sequence
  chemically treated genomic DNA (Homo sapiens) CpG-island No: 37606
ccccgaaataacttctaccctcctcgactttcccttccgcaaaaataaaaaacaaaaacgacgaaaaaaaaaaatccaaaacaaactccgcccgccgcgcgcaaaaaccccaatttaccactccaactcacctacaaacgcgccaccacctcgcccacgcttaacgaaaaacccgtcgaaacgcaacgtaatcgcctccccgcgaccgtaatacaaatccaactactactcgaaaaaaatccaaaccaacacgtcgcgacaaacgcaattaaacactacgcgaccgtcgcgcgacgccaccaacaccaaaacctcgaccgaaatacccaacaaacaaaacacctcgataccttcgaaaccgctcgcctaaaccccgacgacgacccgcgcccgcgcgaacgcatctccccacaccaataaacccgctacctacaatcgacgcctaaaccccgaacgacccgacgttcccacccaaaaaaacaaaccgaaacgtaaaaccgaatccaacgacgtaataatcacctcgttaataacaaatcttacaaatactactaacgaatacgcgtaaccataacgtaaaactacgcgcgtaccgaccgcctactcaccattcaacgctttaaccaacaaaaaaacccgaaaatcgacgttaac

SEQ ID NO: 37607 - DNA, 654 bp, Artificial Sequence
  chemically treated genomic DNA (Homo sapiens) CpG-island No: 37607
tttcggggtggtttttgtttttttcgattttttttttcgtaggagtaggggataaaggcggcgggagggaggggtttaaagtaggtttcgttcgtcgcgcgtaggggttttagtttattattttagtttatttgtaggcgcgttattatttcgtttacgtttggcgggggattcgtcgaagcgtagcgtgatcgttttttcgcggtcgtggtataggtttagttgttgttcggagaaggtttaggttagtacgtcgcgataggcgtaattgaatattacgcggtcgtcgcgcggcgttattagtattagagtttcggtcgagatgtttagtaggtagggtatttcgatgttttcggggtcgttcgtttgagtttcggcggcgattcgcgttcgcgcggacgtatttttttatattagtgagttcgttgtttgtagtcggcgtttgggtttcgagcggttcggcgtttttatttagggaggtaggtcgaagcgtgaagtcgagtttagcgacgtagtggttatttcgttggtggtaggttttgtaggtattgttggcgggtgcgcgtggttatggcgtggaattgcgcgcgtgtcggtcgtttgtttattatttagcgttttggttagtaggaaggttcggaagtcggcgttggt

SEQ ID NO: 37608 - DNA, 654 bp, Artificial Sequence
  chemically treated genomic DNA (Homo sapiens) CpG-island No: 37608
accaacgccgacttccgaaccttcctactaaccaaaacgctaaataataaacaaacgaccgacacgcgcgcaattccacgccataaccacgcgcacccgccaacaatacctacaaaacctaccaccaacgaaataaccactacgtcgctaaactcgacttcacgcttcgacctacctccctaaataaaaacgccgaaccgctcgaaacccaaacgccgactacaaacaacgaactcactaatataaaaaaatacgtccgcgcgaacgcgaatcgccgccgaaactcaaacgaacgaccccgaaaacatcgaaataccctacctactaaacatctcgaccgaaactctaatactaataacgccgcgcgacgaccgcgtaatattcaattacgcctatcgcgacgtactaacctaaaccttctccgaacaacaactaaacctataccacgaccgcgaaaaaacgatcacgctacgcttcgacgaatcccccgccaaacgtaaacgaaataataacgcgcctacaaataaactaaaataataaactaaaacccctacgcgcgacgaacgaaacctactttaaacccctccctcccgccgcctttatcccctactcctacgaaaaaaaaaatcgaaaaaaacaaaaaccaccccgaaa

SEQ ID NO: 37609 - DNA, 559 bp, Artificial Sequence
  chemically treated genomic DNA (Homo sapiens) CpG-island No: 37609
ttatttttcgggcggtggtatacgcggttttcggggattgtggaaagtttcgtgtggtttgggacgtagtttagggggcgggtattggcggttttatttttcggtagtttcgtttattcgtttcgtttcgttcgtagttggtgagtcgtggttgcgagattcgcgagttggcgttgtttcgcgacggttaaggtcgtttgggtttcgaggtggacgtcgagggattcgttacgtacgtggagcgttttatattcgtcgagacggcggttgcggcggggcgcgttttttggcgtgtgcggttagacgttgtttagttttcgttcgagtcgttgtttagttttttgtcggcgtttaaggtttgcgttatcgttttgtttttcgacgagagcggtcggtttcgtaggttagggtgtcggggacgcggggaggtgggagggtcggtagttggtatcgcgtagtttgcgttttcgggtcgttattagtagttttaggaatttagtgtggatatttttttttttggaaagaatttttcgttttttagttcgtttgagtttgtttt

SEQ ID NO: 37610 - DNA, 559 bp, Artificial Sequence
  chemically treated genomic DNA (Homo sapiens) CpG-island No: 37610
aaaacaaactcaaacgaactaaaaaacgaaaaattctttccaaaaaaaaaaatatccacactaaattcctaaaactactaataacgacccgaaaacgcaaactacgcgataccaactaccgaccctcccacctccccgcgtccccgacaccctaacctacgaaaccgaccgctctcgtcgaaaaacaaaacgataacgcaaaccttaaacgccgacaaaaaactaaacaacgactcgaacgaaaactaaacaacgtctaaccgcacacgccaaaaaacgcgccccgccgcaaccgccgtctcgacgaatataaaacgctccacgtacgtaacgaatccctcgacgtccacctcgaaacccaaacgaccttaaccgtcgcgaaacaacgccaactcgcgaatctcgcaaccacgactcaccaactacgaacgaaacgaaacgaataaacgaaactaccgaaaaataaaaccgccaatacccgccccctaaactacgtcccaaaccacacgaaactttccacaatccccgaaaaccgcgtataccaccgcccgaaaaataa

SEQ ID NO: 37611 - DNA, 559 bp, Artificial Sequence
  chemically treated genomic DNA (Homo sapiens) CpG-island No: 37611
gagataggtttagacgggttaagagacgggagattttttttagaaggaaaggtatttatattgggtttttgaaattgttgatggcgattcgggagcgtagattgcgcggtgttaattgtcggtttttttattttttcgcgttttcggtattttgatttgcggggtcggtcgttttcgtcggggggtaggacggtgacgtagattttgggcgtcgatagggagttgggtagcggttcgggcggaggttgggtagcgtttggtcgtatacgttaggaggcgcgtttcgtcgtagtcgtcgtttcggcgaatgtgaagcgttttacgtgcgtgacgaatttttcggcgtttatttcgaagtttaggcggttttgatcgtcgcggggtagcgttagttcgcgggtttcgtagttacggtttattagttgcggacggggcgggacgagtgggcggggttgtcgggaggtggggtcgttagtgttcgttttttggattgcgttttaggttatacggaattttttatagttttcgagggtcgcgtgtgttatcgttcgagggatga

SEQ ID NO: 37612 - DNA, 559 bp, Artificial Sequence
  chemically treated genomic DNA (Homo sapiens) CpG-island No: 37612
tcatccctcgaacgataacacacgcgaccctcgaaaactataaaaaattccgtataacctaaaacgcaatccaaaaaacgaacactaacgaccccacctcccgacaaccccgcccactcgtcccgccccgtccgcaactaataaaccgtaactacgaaacccgcgaactaacgctaccccgcgacgatcaaaaccgcctaaacttcgaaataaacgccgaaaaattcgtcacgcacgtaaaacgcttcacattcgccgaaacgacgactacgacgaaacgcgcctcctaacgtatacgaccaaacgctacccaacctccgcccgaaccgctacccaactccctatcgacgcccaaaatctacgtcaccgtcctaccccccgacgaaaacgaccgaccccgcaaatcaaaataccgaaaacgcgaaaaaataaaaaaaccgacaattaacaccgcgcaatctacgctcccgaatcgccatcaacaatttcaaaaacccaatataaatacctttccttctaaaaaaaatctcccgtctcttaacccgtctaaacctatctc

SEQ ID NO: 37613 - DNA, 611 bp, Artificial Sequence
  chemically treated genomic DNA (Homo sapiens) CpG-island No: 37613
  unsure (1, 60, 75, 81, 92, 105..106, 109, 117)
ntagcgtcggtttttttagcgttaggagtttttttatttcgttcgtttttttttcgattnttttttttaggcgtnttcggntattcgttcgngttttgatttggnnttnatgcgagntcgttcgtttttcgcgtgggagtttcgtcgaggttcgttttcgttttaagtttcgttttggtcgttttttcggagtcggagtttcgtggaaaacgttattttttcgacggaattggtttgtcgtttcgtcgcgtcgttcgtcggagtttgtatttagggttttttttgtttttaggagattcgttgaattttgggacgcgtttcgttgacgataatttttttttttttgttattgttttttcgcgacggtgcgaagtttaaacgaagacgttatcggtttcggcggggattttttttagacgttggattcggttttcggttgttgcgggttttttgtgcgtttgcgtagtcgagaagggggtttacgtcggttagcgttttttgttgttgcgtttcgtcggggtaaagcggaagtacgtttagttgtatttttgtgggttgcggttgggtttttgttttggttttttgaggttgtggattgaagattttatcgt

SEQ ID NO: 37614 - DNA, 611 bp, Artificial Sequence
  chemically treated genomic DNA (Homo sapiens) CpG-island No: 37614
  unsure (495, 503, 506..507, 520, 531, 537, 552, 611)
acgataaaatcttcaatccacaacctcaaaaaaccaaaacaaaaacccaaccgcaacccacaaaaatacaactaaacgtacttccgctttaccccgacgaaacgcaacaacaaaaaacgctaaccgacgtaaacccccttctcgactacgcaaacgcacaaaaaacccgcaacaaccgaaaaccgaatccaacgtctaaaaaaaatccccgccgaaaccgataacgtcttcgtttaaacttcgcaccgtcgcgaaaaaacaataacaaaaaaaaaaaaattatcgtcaacgaaacgcgtcccaaaattcaacgaatctcctaaaaacaaaaaaaaccctaaatacaaactccgacgaacgacgcgacgaaacgacaaaccaattccgtcgaaaaaataacgttttccacgaaactccgactccgaaaaaacgaccaaaacgaaacttaaaacgaaaacgaacctcgacgaaactcccacgcgaaaaacgaacganctcgcatnaannccaaatcaaaacncgaacgaatanccgaanacgcctaaaaaaaanaatcgaaaaaaaaacgaacgaaataaaaaaactcctaacgctaaaaaaaccgacgctan

SEQ ID NO: 37615 - DNA, 611 bp, Artificial Sequence
  chemically treated genomic DNA (Homo sapiens) CpG-island No: 37615
  unsure (495, 503, 506..507, 520, 531, 537, 552, 611)
acggtgaaatttttaatttatagttttaggaagttaaaataaaggtttagtcgtagtttataagggtatagttggacgtattttcgttttgtttcgacgaagcgtagtagtaaaaagcgttggtcggcgtgggtttttttttcgattgcgtaggcgtataaggagttcgtagtaatcggaggtcgggtttagcgtttggggaaaattttcgtcgaggtcgatggcgttttcgtttgggtttcgtatcgtcgcgggaggataatagtaggggaaaaggagttatcgttagcgggacgcgttttaaaatttagcgagttttttaggaatagaaaaggttttgggtgtaggtttcgacgggcggcgcggcgagacggtaggttaatttcgtcgaggaagtggcgttttttacggggtttcggtttcgggggggcggttagggcggggtttggagcgagggcgggtttcggcggaatttttacgcgaggggcggacggnttcgtatnggnnttaggttaggatncgggcgaatgntcggangcgtttgggaggggnggtcggggaggaagcgggcggggtgagaaggtttttaacgttgaggaagtcgacgttan

SEQ ID NO: 37616 - DNA, 611 bp, Artificial Sequence
  chemically treated genomic DNA (Homo sapiens) CpG-island No: 37616
  unsure (1, 60, 75, 81, 92, 105..106, 109, 117)
ntaacgtcgacttcctcaacgttaaaaaccttctcaccccgcccgcttcctccccgaccncccctcccaaacgcntccgancattcgcccgnatcctaacctaannccnatacgaanccgtccgcccctcgcgtaaaaattccgccgaaacccgccctcgctccaaaccccgccctaaccgcccccccgaaaccgaaaccccgtaaaaaacgccacttcctcgacgaaattaacctaccgtctcgccgcgccgcccgtcgaaacctacacccaaaaccttttctattcctaaaaaactcgctaaattttaaaacgcgtcccgctaacgataactccttttcccctactattatcctcccgcgacgatacgaaacccaaacgaaaacgccatcgacctcgacgaaaattttccccaaacgctaaacccgacctccgattactacgaactccttatacgcctacgcaatcgaaaaaaaaacccacgccgaccaacgctttttactactacgcttcgtcgaaacaaaacgaaaatacgtccaactatacccttataaactacgactaaacctttattttaacttcctaaaactataaattaaaaatttcaccgt

SEQ ID NO: 37617 - DNA, 527 bp, Artificial Sequence
  chemically treated genomic DNA (Homo sapiens) CpG-island No: 37617
  unsure (193)
tttttgcgtagtttcgtcgacgggaatggggcggaaacgcggcgcgtgcggtttcgtatagtcgtgcggtttcggcgattgtatttcgcggggttagagggcgattttatcgtttatggtcggggtttcggggcgtggcggggtcgtagttgggttcggcgttgtattatagacgagttattcgttagacgantatgcgttcgcgttcgtcgtcgtttattgttcggaattcgtcgcgtttttgtttcgtcgtcgttcgcgaggcggcgagtttatagtgtacgtcgcgcggaggacgaagaggttgtacgtatagtcgttgtcgggggtcggggttaagtgcgcgtttttcgaggacgaagaggttggcgtgtcggtggttcggttagttttcgggtttcggtttcgtttggaagggtgggttcgtcgattatttattttgtttttaggggattttagggttttttttcgtcgatcggcggagtttggtgatgttattttgggtcgggtttggagtaaattagggt

SEQ ID NO: 37618 - DNA, 527 bp, Artificial Sequence
  chemically treated genomic DNA (Homo sapiens) CpG-island No: 37618
  unsure (335)
accctaatttactccaaacccgacccaaaataacatcaccaaactccgccgatcgacgaaaaaaaaccctaaaatcccctaaaaacaaaataaataatcgacgaacccacccttccaaacgaaaccgaaacccgaaaactaaccgaaccaccgacacgccaacctcttcgtcctcgaaaaacgcgcacttaaccccgacccccgacaacgactatacgtacaacctcttcgtcctccgcgcgacgtacactataaactcgccgcctcgcgaacgacgacgaaacaaaaacgcgacgaattccgaacaataaacgacgacgaacgcgaacgcatantcgtctaacgaataactcgtctataatacaacgccgaacccaactacgaccccgccacgccccgaaaccccgaccataaacgataaaatcgccctctaaccccgcgaaatacaatcgccgaaaccgcacgactatacgaaaccgcacgcgccgcgtttccgccccattcccgtcgacgaaactacgcaaaaa

SEQ ID NO: 37619 - DNA, 527 bp, Artificial Sequence
  chemically treated genomic DNA (Homo sapiens) CpG-island No: 37619
  unsure (335)
gttttggtttgttttagattcggtttagagtgatattattaaatttcgtcgatcggcgggagggggttttgaaattttttaaaaataaagtgagtaatcggcggatttatttttttaggcggggtcgggattcgggagttagtcgagttatcggtacgttagttttttcgttttcgggaggcgcgtatttggtttcgattttcggtagcggttgtgcgtgtagttttttcgtttttcgcgcggcgtgtattatagattcgtcgtttcgcgggcggcggcggggtaggagcgcggcggatttcgggtagtgagcgacggcgggcgcgggcgtatgntcgtttggcgaatggttcgtttgtagtgtaacgtcgggtttagttgcgatttcgttacgtttcgagatttcggttatggacggtgaggtcgttttttgatttcgcggggtgtaatcgtcggggtcgtacggttgtgcggagtcgtacgcgtcgcgttttcgttttattttcgtcgacggagttgcgtaggga

SEQ ID NO: 37620 - DNA, 527 bp, Artificial Sequence
  chemically treated genomic DNA (Homo sapiens) CpG-island No: 37620
  unsure (193)
tccctacgcaactccgtcgacgaaaataaaacgaaaacgcgacgcgtacgactccgcacaaccgtacgaccccgacgattacaccccgcgaaatcaaaaaacgacctcaccgtccataaccgaaatctcgaaacgtaacgaaatcgcaactaaacccgacgttacactacaaacgaaccattcgccaaacgancatacgcccgcgcccgccgtcgctcactacccgaaatccgccgcgctcctaccccgccgccgcccgcgaaacgacgaatctataatacacgccgcgcgaaaaacgaaaaaactacacgcacaaccgctaccgaaaatcgaaaccaaatacgcgcctcccgaaaacgaaaaaactaacgtaccgataactcgactaactcccgaatcccgaccccgcctaaaaaaataaatccgccgattactcactttatttttaaaaaatttcaaaaccccctcccgccgatcgacgaaatttaataatatcactctaaaccgaatctaaaacaaaccaaaac

SEQ ID NO: 37621 - DNA, 689 bp, Artificial Sequence
  chemically treated genomic DNA (Homo sapiens) CpG-island No: 37621
tttttttttggtcgttagtttcggaatttcgtaaggggtttggtttttttatcgatattttttttttttttgttattattacgtattttacgaggttaggcggatcgttatttttttttttcgtagatagcggtttcgaaacgatatttcgagttttggagcgggaggcgtaaagggttttaggtaggatttacgttgggtcgagttcggagttgttttttcgttattttcggacggattacgatttttaggagtttaggcgatgagaagcgcgtaggtcgggcgcgggggttgtcggagtcgtagttcggtcgtaggtttattttcggggttttggcggatggcgggcgtgaagaagcgtttacgggcgggttcgtttatcgtaatttcgtagggtagtagatgtagtgtggcgggtacggcgtcgcgtaatgtggcggagcgtaagtggacgcggtgtttttcgatggtcgtttcgtcgtcgttttttatttttttttttacgcgacgttagggttcgtagttgatattgaagttggcgcggaaagagtggatttttttaggaagttttcgcggggttttacgggaagtcgtcgcgagttttacgggaagtgtagtttttttattttttaacgttttttttgggtttaagttttagggttttttagttgtgttttgttttttttttt

SEQ ID NO: 37622 - DNA, 689 bp, Artificial Sequence
  chemically treated genomic DNA (Homo sapiens) CpG-island No: 37622
aaaaaaaaaaacaaaacacaactaaaaaaccctaaaacttaaacccaaaaaaaacgttaaaaaataaaaaaactacacttcccgtaaaactcgcgacgacttcccgtaaaaccccgcgaaaacttcctaaaaaaatccactctttccgcgccaacttcaatatcaactacgaaccctaacgtcgcgtaaaaaaaaaaataaaaaacgacgacgaaacgaccatcgaaaaacaccgcgtccacttacgctccgccacattacgcgacgccgtacccgccacactacatctactaccctacgaaattacgataaacgaacccgcccgtaaacgcttcttcacgcccgccatccgccaaaaccccgaaaataaacctacgaccgaactacgactccgacaacccccgcgcccgacctacgcgcttctcatcgcctaaactcctaaaaatcgtaatccgtccgaaaataacgaaaaaacaactccgaactcgacccaacgtaaatcctacctaaaaccctttacgcctcccgctccaaaactcgaaatatcgtttcgaaaccgctatctacgaaaaaaaaaaataacgatccgcctaacctcgtaaaatacgtaataataacaaaaaaaaaaaaaatatcgataaaaaaaccaaaccccttacgaaattccgaaactaacgaccaaaaaaaaa

SEQ ID NO: 37623 - DNA, 689 bp, Artificial Sequence
  chemically treated genomic DNA (Homo sapiens) CpG-island No: 37623
aaggaaaaaaataaaatataattggaaaattttaggatttgaatttagggaaagcgttagggggtaaggggattatatttttcgtgaagttcgcggcggtttttcgtgaggtttcgcggaggttttttgagagggtttatttttttcgcgttagttttagtgttagttgcgagttttggcgtcgcgtaggagggaggatggagagcggcgacgaagcggttatcgagaggtatcgcgtttatttgcgtttcgttatattgcgcgacgtcgtattcgttatattgtatttgttgttttgcgaggttgcggtggacgggttcgttcgtgggcgtttttttacgttcgttattcgttagggtttcgagggtgagtttgcggtcggattacggtttcggtagttttcgcgttcggtttgcgcgttttttatcgtttgggtttttggggatcgtggttcgttcggaggtggcgggagggtagtttcgggttcgatttagcgtgggttttgtttgaggttttttgcgtttttcgttttaggattcgaagtgtcgtttcggggtcgttgtttacggggagaggaggtggcggttcgtttggtttcgtgggatacgtgatggtgatagaagagaagaaggtgtcgatggggaagttagattttttgcgggatttcgggattgacgattaagaggagg

SEQ ID NO: 37624 - DNA, 689 bp, Artificial Sequence
  chemically treated genomic DNA (Homo sapiens) CpG-island No: 37624
cctcctcttaatcgtcaatcccgaaatcccgcaaaaaatctaacttccccatcgacaccttcttctcttctatcaccatcacgtatcccacgaaaccaaacgaaccgccacctcctctccccgtaaacaacgaccccgaaacgacacttcgaatcctaaaacgaaaaacgcaaaaaacctcaaacaaaacccacgctaaatcgaacccgaaactaccctcccgccacctccgaacgaaccacgatccccaaaaacccaaacgataaaaaacgcgcaaaccgaacgcgaaaactaccgaaaccgtaatccgaccgcaaactcaccctcgaaaccctaacgaataacgaacgtaaaaaaacgcccacgaacgaacccgtccaccgcaacctcgcaaaacaacaaatacaatataacgaatacgacgtcgcgcaatataacgaaacgcaaataaacgcgatacctctcgataaccgcttcgtcgccgctctccatcctccctcctacgcgacgccaaaactcgcaactaacactaaaactaacgcgaaaaaaataaaccctctcaaaaaacctccgcgaaacctcacgaaaaaccgccgcgaacttcacgaaaaatataatccccttaccccctaacgctttccctaaattcaaatcctaaaattttccaattatattttatttttttcctt

SEQ ID NO: 37625 - DNA, 533 bp, Artificial Sequence
  chemically treated genomic DNA (Homo sapiens) CpG-island No: 37625
atgtcgcgggattttttttattttatgtaggaaggttggaagcgcgagatttagggttttttcgacgagttgcgagttaaggaaaaggtgcgaggaattaagggatttagcgttggaacgagtgttttttcgatttttttggggtagagtcggggcggcgttgtcgggattggtgttaggttgatttttttattatcgttgtttcgggcgtaggaattattgagtcgcgaggaggacgtgaatcgagcggcgcgcgagtagcggttataggcggagtagttgcggcggcgcgagtatttgttggtttagtgggagttagaggtgttcgagcgcgacgtgattggtgttgtagtaggtggacgcgagcgatcgtacgtgtcgtcgtcgcgggatatttaagcgtagtaagtttcgggcgcgcgacggcggcgagcgtattagtatgttattcggtgagggtcgggtttcgggcgtttttcgttattggttgcgggggtgggggtggagttaggtttgtgtgtttatcgcgttgg

SEQ ID NO: 37626 - DNA, 533 bp, Artificial Sequence
  chemically treated genomic DNA (Homo sapiens) CpG-island No: 37626
ccaacgcgataaacacacaaacctaactccacccccacccccgcaaccaataacgaaaaacgcccgaaacccgaccctcaccgaataacatactaatacgctcgccgccgtcgcgcgcccgaaacttactacgcttaaatatcccgcgacgacgacacgtacgatcgctcgcgtccacctactacaacaccaatcacgtcgcgctcgaacacctctaactcccactaaaccaacaaatactcgcgccgccgcaactactccgcctataaccgctactcgcgcgccgctcgattcacgtcctcctcgcgactcaataattcctacgcccgaaacaacgataataaaaaaatcaacctaacaccaatcccgacaacgccgccccgactctaccccaaaaaaatcgaaaaaacactcgttccaacgctaaatcccttaattcctcgcaccttttccttaactcgcaactcgtcgaaaaaaccctaaatctcgcgcttccaaccttcctacataaaataaaaaaaatcccgcgacat

SEQ ID NO: 37627 - DNA, 533 bp, Artificial Sequence
  chemically treated genomic DNA (Homo sapiens) CpG-island No: 37627
ttagcgcggtgagtatataggtttggttttatttttattttcgtagttaatggcgggggacgttcggggttcggtttttatcgagtggtatgttgatacgttcgtcgtcgtcgcgcgttcggagtttgttgcgtttgaatgtttcgcggcggcggtacgtgcggtcgttcgcgtttatttgttgtagtattagttacgtcgcgttcgaatatttttagtttttattgggttagtaggtgttcgcgtcgtcgtagttgtttcgtttgtgatcgttgttcgcgcgtcgttcggtttacgtttttttcgcggtttagtagtttttgcgttcgagatagcgatggtggagaggttagtttggtattaatttcggtagcgtcgtttcgattttgttttagggagatcggggagatattcgttttaacgttgggttttttgatttttcgtattttttttttggttcgtagttcgtcgaagagattttggatttcgcgtttttagtttttttgtatggaatggaaggagtttcgcggtat

SEQ ID NO: 37628 - DNA, 533 bp, Artificial Sequence
  chemically treated genomic DNA (Homo sapiens) CpG-island No: 37628
ataccgcgaaactccttccattccatacaaaaaaactaaaaacgcgaaatccaaaatctcttcgacgaactacgaaccaaaaaaaaaatacgaaaaatcaaaaaacccaacgttaaaacgaatatctccccgatctccctaaaacaaaatcgaaacgacgctaccgaaattaataccaaactaacctctccaccatcgctatctcgaacgcaaaaactactaaaccgcgaaaaaaacgtaaaccgaacgacgcgcgaacaacgatcacaaacgaaacaactacgacgacgcgaacacctactaacccaataaaaactaaaaatattcgaacgcgacgtaactaatactacaacaaataaacgcgaacgaccgcacgtaccgccgccgcgaaacattcaaacgcaacaaactccgaacgcgcgacgacgacgaacgtatcaacataccactcgataaaaaccgaaccccgaacgtcccccgccattaactacgaaaataaaaataaaaccaaacctatatactcaccgcgctaa

SEQ ID NO: 37629 - DNA, 606 bp, Artificial Sequence
  chemically treated genomic DNA (Homo sapiens) CpG-island No: 37629
ttcggttttcggatcgttagttcgttcggtgtttatttcggttttattttatacggtcgttatttttttttgtcgagttattggatttttaatattcggtagtagatttattttttggaggagcgggtagaagatgggattaggcgggagtcgtaacgggagattaatatcgttttttttaaagtttttttttgattagtggaaaatttttttttataaatttcgatttttgattcgattagtttcggtcgtgtgcggagtagcgaatttgttttttcgattttaaagattaattttatgtataggttcgttttcgcggatttcgaaacgttttcgttcgcgttttatttttgtcggggcgcgagaggtggggtcgttattggtcgatacgcgcgttggggcggggtttatgtgtaaaatcggaaagggagggagaagggtgggattcgcgagggtttttgggaaatgtagtttttaatttggttcgtgatagatgtttgcggaggggcgcgtttaaatttagatcgtgatttcgttaggaataaggggatttatataatgatattgttttttaattaataaacgatataggttagtcgtgtgtaa

SEQ ID NO: 37630 - DNA, 606 bp, Artificial Sequence
  chemically treated genomic DNA (Homo sapiens) CpG-island No: 37630
ttacacacgactaacctatatcgtttattaattaaaaaacaatatcattatataaatccccttattcctaacgaaatcacgatctaaatttaaacgcgcccctccgcaaacatctatcacgaaccaaattaaaaactacatttcccaaaaaccctcgcgaatcccacccttctccctccctttccgattttacacataaaccccgccccaacgcgcgtatcgaccaataacgaccccacctctcgcgccccgacaaaaataaaacgcgaacgaaaacgtttcgaaatccgcgaaaacgaacctatacataaaattaatctttaaaatcgaaaaaacaaattcgctactccgcacacgaccgaaactaatcgaatcaaaaatcgaaatttataaaaaaaaattttccactaatcaaaaaaaaactttaaaaaaaacgatattaatctcccgttacgactcccgcctaatcccatcttctacccgctcctccaaaaaataaatctactaccgaatattaaaaatccaataactcgacaaaaaaaaataacgaccgtataaaataaaaccgaaataaacaccgaacgaactaacgatccgaaaaccgaa

SEQ ID NO: 37631 - DNA, 606 bp, Artificial Sequence
  chemically treated genomic DNA (Homo sapiens) CpG-island No: 37631
ttgtatacggttggtttatgtcgtttattaattgggaggtagtgttattgtgtaaatttttttatttttagcggggttacggtttgagtttgaacgcgttttttcgtaagtatttgttacgggttagattaaagattatattttttaaaggttttcgcggattttattttttttttttttttttcggttttatatataggtttcgttttaacgcgcgtgtcggttaatagcggttttatttttcgcgtttcggtaaaaataggacgcgggcgggaacgtttcggggttcgcgggggcgggtttgtgtatggggttggtttttggaatcggagaggtagattcgttgtttcgtatacggtcggagttggtcgggttaagagtcgggatttgtggggagaggttttttattggttaagagaaggttttaagaaagacggtattaatttttcgttgcggttttcgtttggttttattttttgttcgtttttttaggaaatgaatttgttgtcgaatattgagagtttagtgattcggtaggagaagatggcgatcgtgtgggatgaggtcgaggtgggtatcgggcgagttggcggttcgggaatcggg

SEQ ID NO: 37632 - DNA, 606 bp, Artificial Sequence
  chemically treated genomic DNA (Homo sapiens) CpG-island No: 37632
cccgattcccgaaccgccaactcgcccgatacccacctcgacctcatcccacacgatcgccatcttctcctaccgaatcactaaactctcaatattcgacaacaaattcatttcctaaaaaaacgaacaaaaaataaaaccaaacgaaaaccgcaacgaaaaattaataccgtctttcttaaaaccttctcttaaccaataaaaaacctctccccacaaatcccgactcttaacccgaccaactccgaccgtatacgaaacaacgaatctacctctccgattccaaaaaccaaccccatacacaaacccgcccccgcgaaccccgaaacgttcccgcccgcgtcctatttttaccgaaacgcgaaaaataaaaccgctattaaccgacacgcgcgttaaaacgaaacctatatataaaaccgaaaaaaaaaaaaaaaaaataaaatccgcgaaaacctttaaaaaatataatctttaatctaacccgtaacaaatacttacgaaaaaacgcgttcaaactcaaaccgtaaccccgctaaaaataaaaaaatttacacaataacactacctcccaattaataaacgacataaaccaaccgtatacaa

SEQ ID NO: 37633 - DNA, 1495 bp, Artificial Sequence
  chemically treated genomic DNA (Homo sapiens) CpG-island No: 37633
gggcggcgagtaggagtcggggttaggttaggggttcgagttttcgttcgaggggcggggaaggcgggtgacgtgagtcgggtcgggcgggcggagttgggatcggtttcgggaggcgggggcgagcgcgcggagaggtagacgcgaggagggaggcggttgagtagcgcgggcggttttgcggcgggcgcggtgggcgcgggcggcggggtttcgggattttcgcgcgtttttttcgcgcggcgtcgtcgtcgcgcgtttttacgtttcgcgttttacggcgttttcgtttcgcgcgtttttcgtgttcgttttttgttagttttcgggtcgcggtcgtttgtagagcgagcgtttagacggagttttcgggtaatttgagtggcgtcgatcggcggcggagtttttggtagagtttttcgattcggtagcgcggaggggattcgcgttcgttcgcgtcgcgttattttaaattttaagtagcgtcgttttatcggcgcggagtttcggttggaggtaagagtcgcgcgtcgggagatacgtatcgtgagcggtagcgtcgtcggttttttttttcgtcgtttcggagggcgaagtcgcggttttttagttttttgttgcgtcgcgatagcgtcggaatacgtttcgtttcgttgtcgttttcgttgtgtcgtcggcggagggggtcgcgagtttcgcgtttcggtcggaggatgtgcgttttcgcgggtcgtttagtttgagttatgcgttttaacggcggcggcgcgtcggtcggtatggagtttcgcgcggtcgcgttttgattcgttgtgcgtttcgcggtcggcgggcggcgggaggcggcggatcgagagtcggagatcggcgtcgcgggacggaagcgagcgggcgcgggcgtcgcgtagatggtttgggcgagttaggtttgaggtttcgtttttcgaaacgtgattatgtggatttaatagtttttaggatttaggtgagcgattcggtcggcgtcgggtgcgtgtgggcgcgtgggtgttaggttgggcggaagcggcgtttttttttatgttgtaaattaagggattttttttcgtttttcgtaagcgggtaacggggtgtatcggtagtcggaaaggggcgttcgttcggagtttggagtagtatcgcggttttggcggggagcggtcgggtttttagggtttcgcgcgttcggggtcggggtagcggcgttcgttttagtaattcgggaagtggggtcggttaggcgcgttcgtagttttaggagttagtagcgtagtgttttggtcggttgtttcggcgcgtttttttttcggggttcggggcgaggcgtcggtcgttgggcgcggcgggcgcgggggtcggggttgtcggggaaagttaaagtttcgggtttttagcgagagtttcgtaggcggagttggaggaaattatagttaaatagttatttcgttttttttttttttttttcggggtttcgggg

SEQ ID NO: 37634 - DNA, 1495 bp, Artificial Sequence
  chemically treated genomic DNA (Homo sapiens) CpG-island No: 37634
ccccgaaaccccgaaaaaaaaaaaaaaaaaacgaaataactatttaactataatttcctccaactccgcctacgaaactctcgctaaaaacccgaaactttaactttccccgacaaccccgacccccgcgcccgccgcgcccaacgaccgacgcctcgccccgaaccccgaaaaaaaaacgcgccgaaacaaccgaccaaaacactacgctactaactcctaaaactacgaacgcgcctaaccgaccccacttcccgaattactaaaacgaacgccgctaccccgaccccgaacgcgcgaaaccctaaaaacccgaccgctccccgccaaaaccgcgatactactccaaactccgaacgaacgcccctttccgactaccgatacaccccgttacccgcttacgaaaaacgaaaaaaaatcccttaatttacaacataaaaaaaaacgccgcttccgcccaacctaacacccacgcgcccacacgcacccgacgccgaccgaatcgctcacctaaatcctaaaaactattaaatccacataatcacgtttcgaaaaacgaaacctcaaacctaactcgcccaaaccatctacgcgacgcccgcgcccgctcgcttccgtcccgcgacgccgatctccgactctcgatccgccgcctcccgccgcccgccgaccgcgaaacgcacaacgaatcaaaacgcgaccgcgcgaaactccataccgaccgacgcgccgccgccgttaaaacgcataactcaaactaaacgacccgcgaaaacgcacatcctccgaccgaaacgcgaaactcgcgaccccctccgccgacgacacaacgaaaacgacaacgaaacgaaacgtattccgacgctatcgcgacgcaacaaaaaactaaaaaaccgcgacttcgccctccgaaacgacgaaaaaaaaaaccgacgacgctaccgctcacgatacgtatctcccgacgcgcgactcttacctccaaccgaaactccgcgccgataaaacgacgctacttaaaatttaaaataacgcgacgcgaacgaacgcgaatcccctccgcgctaccgaatcgaaaaactctaccaaaaactccgccgccgatcgacgccactcaaattacccgaaaactccgtctaaacgctcgctctacaaacgaccgcgacccgaaaactaacaaaaaacgaacacgaaaaacgcgcgaaacgaaaacgccgtaaaacgcgaaacgtaaaaacgcgcgacgacgacgccgcgcgaaaaaaacgcgcgaaaatcccgaaaccccgccgcccgcgcccaccgcgcccgccgcaaaaccgcccgcgctactcaaccgcctccctcctcgcgtctacctctccgcgcgctcgcccccgcctcccgaaaccgatcccaactccgcccgcccgacccgactcacgtcacccgccttccccgcccctcgaacgaaaactcgaacccctaacctaaccccgactcctactcgccgccc

SEQ ID NO: 37635 - DNA, 1495 bp, Artificial Sequence
  chemically treated genomic DNA (Homo sapiens) CpG-island No: 37635
tttcggggtttcgagaaaggagaagggggagcggagtggttgtttggttgtggttttttttaatttcgtttgcgaagttttcgttgggagttcggagttttagtttttttcggtagtttcggttttcgcgttcgtcgcgtttagcggtcggcgtttcgtttcgggtttcggggaggaggcgcgtcggggtagtcggttaggatattgcgttgttggtttttagagttgcgggcgcgtttggtcggttttatttttcgggttgttggggcgggcgtcgttgtttcgatttcggacgcgcggaattttggagattcggtcgtttttcgttagggtcgcggtgttgttttaggtttcgggcgggcgttttttttcggttatcggtgtatttcgttgttcgtttgcgggaagcgaagaggggttttttgatttgtaatatagaggaaagcgtcgttttcgtttagtttggtatttacgcgtttatacgtattcggcgtcggtcgggtcgtttatttgagttttaaaagttgttgaatttatatggttacgtttcggggagcggggttttagatttggttcgtttaggttatttgcgcggcgttcgcgttcgttcgttttcgtttcgcggcgtcggttttcggttttcggttcgtcgtttttcgtcgttcgtcggtcgcggggcgtatagcgagttagagcgcggtcgcgcggggttttatgtcggtcggcgcgtcgtcgtcgttggggcgtatggtttaggttgggcggttcgcgggggcgtatatttttcggtcggggcgcggggttcgcggtttttttcgtcggcggtatagcgaaggcggtagcgaggcggggcgtgtttcggcgttgtcgcggcgtagtaaagggttggggagtcgcggtttcgtttttcggggcggcgaggagggaggtcggcggcgttgtcgtttacggtgcgtgtttttcggcgcgcggtttttgtttttagtcggagtttcgcgtcgatggggcggcgttgtttagggtttggggtgacgcgacgcggacggacgcgagtttttttcgcgttgtcgggtcggggggttttgttagaggtttcgtcgtcgatcggcgttatttaagttgttcgggggtttcgtttgagcgttcgttttgtagacggtcgcggttcggagattggtaggaggcgggtacgagaggcgcgcggggcgagggcgtcgtggagcgcggggcgtggggacgcgcggcggcggcgtcgcgcggaggaggcgcgcggggatttcggggtttcgtcgttcgcgtttatcgcgttcgtcgtagagtcgttcgcgttgtttagtcgttttttttttcgcgtttgttttttcgcgcgttcgttttcgtttttcggagtcggttttaatttcgttcgttcggttcggtttacgttattcgtttttttcgtttttcgaacgggagttcgagtttttggtttggtttcggtttttgttcgtcgttt

SEQ ID NO: 37636 - DNA, 1495 bp, Artificial Sequence
  chemically treated genomic DNA (Homo sapiens) CpG-island No: 37636
aaacgacgaacaaaaaccgaaaccaaaccaaaaactcgaactcccgttcgaaaaacgaaaaaaacgaataacgtaaaccgaaccgaacgaacgaaattaaaaccgactccgaaaaacgaaaacgaacgcgcgaaaaaacaaacgcgaaaaaaaaaacgactaaacaacgcgaacgactctacgacgaacgcgataaacgcgaacgacgaaaccccgaaatccccgcgcgcctcctccgcgcgacgccgccgccgcgcgtccccacgccccgcgctccacgacgccctcgccccgcgcgcctctcgtacccgcctcctaccaatctccgaaccgcgaccgtctacaaaacgaacgctcaaacgaaacccccgaacaacttaaataacgccgatcgacgacgaaacctctaacaaaaccccccgacccgacaacgcgaaaaaaactcgcgtccgtccgcgtcgcgtcaccccaaaccctaaacaacgccgccccatcgacgcgaaactccgactaaaaacaaaaaccgcgcgccgaaaaacacgcaccgtaaacgacaacgccgccgacctccctcctcgccgccccgaaaaacgaaaccgcgactccccaaccctttactacgccgcgacaacgccgaaacacgccccgcctcgctaccgccttcgctataccgccgacgaaaaaaaccgcgaaccccgcgccccgaccgaaaaatatacgcccccgcgaaccgcccaacctaaaccatacgccccaacgacgacgacgcgccgaccgacataaaaccccgcgcgaccgcgctctaactcgctatacgccccgcgaccgacgaacgacgaaaaacgacgaaccgaaaaccgaaaaccgacgccgcgaaacgaaaacgaacgaacgcgaacgccgcgcaaataacctaaacgaaccaaatctaaaaccccgctccccgaaacgtaaccatataaattcaacaacttttaaaactcaaataaacgacccgaccgacgccgaatacgtataaacgcgtaaataccaaactaaacgaaaacgacgctttcctctatattacaaatcaaaaaacccctcttcgcttcccgcaaacgaacaacgaaatacaccgataaccgaaaaaaaacgcccgcccgaaacctaaaacaacaccgcgaccctaacgaaaaacgaccgaatctccaaaattccgcgcgtccgaaatcgaaacaacgacgcccgccccaacaacccgaaaaataaaaccgaccaaacgcgcccgcaactctaaaaaccaacaacgcaatatcctaaccgactaccccgacgcgcctcctccccgaaacccgaaacgaaacgccgaccgctaaacgcgacgaacgcgaaaaccgaaactaccgaaaaaaactaaaactccgaactcccaacgaaaacttcgcaaacgaaattaaaaaaaaccacaaccaaacaaccactccgctcccccttctcctttctcgaaaccccgaaa

SEQ ID NO: 37637 - DNA, 523 bp, Artificial Sequence
  chemically treated genomic DNA (Homo sapiens) CpG-island No: 37637
  unsure (225)
gcggtcgttagatttttcgggtagttttcggtagtttcgaggtagcgtttttttttttaattatcgtttttcgggatgggtcgtatcgaagagttcgttttttagttagggtacgaagtgcgtcgtcgcgatgggtagttggaggaaggggcgtgacgtaagtggaattttcgcgtgacgtcgcgcgggttttcgggcggggcgggttcggtcgttttcgagttntcgcggtagttttcggttttaaagcgcgggttgttcggaggggtcggtttttttatcgaggatttggtattttggtgagggaaaagggcgaaagagaaaagcgagtagtcgtttttttatagttttagaaagtgttcgttttttttcgggggttttcgcgaatttcgaggtaatttcggaggcggtgagtaaaagtaatttttttattttattcggagttttgggtcggagcgattgtttttggtttggagttgcgtgtttggcgaagggttttcggggtaggggtggttttcggttt

SEQ ID NO: 37638 - DNA, 523 bp, Artificial Sequence
  chemically treated genomic DNA (Homo sapiens) CpG-island No: 37638
  unsure (299)
aaaccgaaaaccacccctaccccgaaaacccttcgccaaacacgcaactccaaaccaaaaacaatcgctccgacccaaaactccgaataaaataaaaaaattacttttactcaccgcctccgaaattacctcgaaattcgcgaaaacccccgaaaaaaaacgaacactttctaaaactataaaaaaacgactactcgcttttctctttcgcccttttccctcaccaaaataccaaatcctcgataaaaaaaccgacccctccgaacaacccgcgctttaaaaccgaaaactaccgcganaactcgaaaacgaccgaacccgccccgcccgaaaacccgcgcgacgtcacgcgaaaattccacttacgtcacgccccttcctccaactacccatcgcgacgacgcacttcgtaccctaactaaaaaacgaactcttcgatacgacccatcccgaaaaacgataattaaaaaaaaaaacgctacctcgaaactaccgaaaactacccgaaaaatctaacgaccgc

SEQ ID NO: 37639 - DNA, 523 bp, Artificial Sequence
  chemically treated genomic DNA (Homo sapiens) CpG-island No: 37639
  unsure (299)
gagtcgggagttatttttatttcgggagtttttcgttaagtacgtagttttagattagaagtagtcgtttcgatttagagtttcgggtggggtaaagagattgtttttatttatcgttttcgagattgtttcgggattcgcgaaagttttcgaagggaagcgagtattttttgaggttgtgaaaggacggttgttcgtttttttttttcgttttttttttttattagagtgttaaattttcggtgggaaagtcgattttttcggatagttcgcgttttaaggtcgggggttgtcgcgangattcggaggcggtcggattcgtttcgttcgggagttcgcgcgacgttacgcgggagttttatttgcgttacgtttttttttttagttgtttatcgcggcggcgtatttcgtgttttagttgaggagcgggtttttcggtgcggtttatttcggagggcgatggttggggaggggagcgttatttcggagttgtcgggagttattcgaagagtttggcgatcgt

SEQ ID NO: 37640 - DNA, 523 bp, Artificial Sequence
  chemically treated genomic DNA (Homo sapiens) CpG-island No: 37640
  unsure (225)
acgatcgccaaactcttcgaataactcccgacaactccgaaataacgctcccctccccaaccatcgccctccgaaataaaccgcaccgaaaaacccgctcctcaactaaaacacgaaatacgccgccgcgataaacaactaaaaaaaaaaacgtaacgcaaataaaactcccgcgtaacgtcgcgcgaactcccgaacgaaacgaatccgaccgcctccgaatcntcgcgacaacccccgaccttaaaacgcgaactatccgaaaaaatcgactttcccaccgaaaatttaacactctaataaaaaaaaaaaacgaaaaaaaaaaacgaacaaccgtcctttcacaacctcaaaaaatactcgcttcccttcgaaaactttcgcgaatcccgaaacaatctcgaaaacgataaataaaaacaatctctttaccccacccgaaactctaaatcgaaacgactacttctaatctaaaactacgtacttaacgaaaaactcccgaaataaaaataactcccgactc

SEQ ID NO: 37641 - DNA, 623 bp, Artificial Sequence
  chemically treated genomic DNA (Homo sapiens) CpG-island No: 37641
ggcgatgttttgagcggcgttttcgttggcgatgttttgggcggcgttttcgttggcgatgttttgggcggcgttttttttgtcgatgttttgggcggcgttttcgttggcgatttcgtgggcgtcgttttcgttggcgatgttttgggcggcgttttcgttggcgatgttttgggcggcgttttttttggcgatgttttgggcggcgttttttttggcgatgttttgggcggcgttttttttggcgatgttttgggcggcgttttttttggcgatgttttgggcggcgttttcgttggcgatgttttgggcggcgttttcgttggcgatgttttgggcggcgttttcgttggcgatgttttgggcggcgttttcgttggcgatgtcgtgggcggcgttttcgttggcgatgtcgtgggcggcgttttcgttggcgatgttgtgggcggtattttcgttggcgatgtttttgtcggcggtttcgttagcgatgtcgtgtatagtattttcgttagcgatgtcgtgtgtggcgttttcgttagtgatgtcgtgtacggtgtttttatggggagttagaaaaatatagagttaaggttagtgttttggtggtggagattgtgaat

SEQ ID NO: 37642 - DNA, 623 bp, Artificial Sequence
  chemically treated genomic DNA (Homo sapiens) CpG-island No: 37642
attcacaatctccaccaccaaaacactaaccttaactctatatttttctaactccccataaaaacaccgtacacgacatcactaacgaaaacgccacacacgacatcgctaacgaaaatactatacacgacatcgctaacgaaaccgccgacaaaaacatcgccaacgaaaataccgcccacaacatcgccaacgaaaacgccgcccacgacatcgccaacgaaaacgccgcccacgacatcgccaacgaaaacgccgcccaaaacatcgccaacgaaaacgccgcccaaaacatcgccaacgaaaacgccgcccaaaacatcgccaacgaaaacgccgcccaaaacatcgccaaaaaaaacgccgcccaaaacatcgccaaaaaaaacgccgcccaaaacatcgccaaaaaaaacgccgcccaaaacatcgccaaaaaaaacgccgcccaaaacatcgccaacgaaaacgccgcccaaaacatcgccaacgaaaacgacgcccacgaaatcgccaacgaaaacgccgcccaaaacatcgacaaaaaaaacgccgcccaaaacatcgccaacgaaaacgccgcccaaaacatcgccaacgaaaacgccgctcaaaacatcgcc

SEQ ID NO: 37643 - DNA, 623 bp, Artificial Sequence
  chemically treated genomic DNA (Homo sapiens) CpG-island No: 37643
atttatagtttttattattagggtattgattttaattttgtgtttttttagttttttatgaggatatcgtatacgatattattaacgaggacgttatatacgatatcgttaacgaggatattgtatacgatatcgttaacgaggtcgtcgataagggtatcgttagcgaggatgtcgtttatagtatcgttagcgaggacgtcgtttacggtatcgttagcgaggacgtcgtttacggtatcgttagcgaggacgtcgtttagggtatcgttagcgaggacgtcgtttagggtatcgttagcgaggacgtcgtttagggtatcgttaacgaggacgtcgtttagggtatcgttaaagaggacgtcgtttagggtatcgttaaggaggacgtcgtttagggtatcgttaaggaggacgtcgtttagggtatcgttaaggaggacgtcgtttagggtatcgttaacgaggacgtcgtttagggtatcgttaacgaggacggcgtttacggaatcgttagcgaggacgtcgtttagggtatcgataaggaggacgtcgtttagggtatcgttaacgaggacgtcgtttagggtatcgttaacgaggacgtcgtttagggtatcgtt

SEQ ID NO: 37644 - DNA, 623 bp, Artificial Sequence
  chemically treated genomic DNA (Homo sapiens) CpG-island No: 37644
aacgataccctaaacgacgtcctcgttaacgataccctaaacgacgtcctcgttaacgataccctaaacgacgtcctccttatcgataccctaaacgacgtcctcgctaacgattccgtaaacgccgtcctcgttaacgataccctaaacgacgtcctcgttaacgataccctaaacgacgtcctccttaacgataccctaaacgacgtcctccttaacgataccctaaacgacgtcctccttaacgataccctaaacgacgtcctctttaacgataccctaaacgacgtcctcgttaacgataccctaaacgacgtcctcgctaacgataccctaaacgacgtcctcgctaacgataccctaaacgacgtcctcgctaacgataccgtaaacgacgtcctcgctaacgataccgtaaacgacgtcctcgctaacgatactataaacgacatcctcgctaacgatacccttatcgacgacctcgttaacgatatcgtatacaatatcctcgttaacgatatcgtatataacgtcctcgttaataatatcgtatacgatatcctcataaaaaactaaaaaaacacaaaattaaaatcaataccctaataataaaaactataaat

SEQ ID NO: 37645 - DNA, 758 bp, Artificial Sequence
  chemically treated genomic DNA (Homo sapiens) CpG-island No: 37645
tcgatatttttaaagttttggtttttcgattttttaacgattttagagttttcgtcgttcggtttttagacggtttatagatttttatgattattttgtttttatatttttaatttcgagtttcggtttttcgcgtttttttagtcgttggttttacgtatcggattcgtatttgatgtcgtgcgagtgtagtcgtacgcggtggtgcgtattgagtagttttagtatcgattcgtaggttacgagtttcgtatcggttttggcggtattatcgttcggtattaatagcgttagtagtagttttaatagtatcggttaggtagtttcgtcgcggttcgcgttttatatcgtttcggttcggttttagtttttcgggtttaggggtcgttttcgttttcgtcgcggtttaattcggttttgatagcgttcgtttgcggtagttaatagtcggttcgcgcggtatttcgtttgtattgttattgggttagcgcggggagggttcgttttcggttcgcgagagtcgtagttgggcggggattggagatacgaggagggttttgattggtttacgttttcgaggatttattaatgagtgtttagggaagggcggttgagttttcgagtcgcggagagtgagcgtgaatagttggtgaagacgcggtttttcgtagtcggtgagtttttggatatcggtttaggattttaggattttgtaggtacgtttttacgacgttttttgattttggatttttgggtat

SEQ ID NO: 37646 - DNA, 758 bp, Artificial Sequence
  chemically treated genomic DNA (Homo sapiens) CpG-island No: 37646
atacccaaaaatccaaaatcaaaaaacgtcgtaaaaacgtacctacaaaatcctaaaatcctaaaccgatatccaaaaactcaccgactacgaaaaaccgcgtcttcaccaactattcacgctcactctccgcgactcgaaaactcaaccgcccttccctaaacactcattaataaatcctcgaaaacgtaaaccaatcaaaaccctcctcgtatctccaatccccgcccaactacgactctcgcgaaccgaaaacgaaccctccccgcgctaacccaataacaatacaaacgaaataccgcgcgaaccgactattaactaccgcaaacgaacgctatcaaaaccgaattaaaccgcgacgaaaacgaaaacgacccctaaacccgaaaaactaaaaccgaaccgaaacgatataaaacgcgaaccgcgacgaaactacctaaccgatactattaaaactactactaacgctattaataccgaacgataataccgccaaaaccgatacgaaactcgtaacctacgaatcgatactaaaactactcaatacgcaccaccgcgtacgactacactcgcacgacatcaaatacgaatccgatacgtaaaaccaacgactaaaaaaacgcgaaaaaccgaaactcgaaattaaaaatataaaaacaaaataatcataaaaatctataaaccgtctaaaaaccgaacgacgaaaactctaaaatcgttaaaaaatcgaaaaaccaaaactttaaaaatatcga

SEQ ID NO: 37647 - DNA, 758 bp, Artificial Sequence
  chemically treated genomic DNA (Homo sapiens) CpG-island No: 37647
gtgtttaggagtttaggattaaggggcgtcgtgaaaacgtgtttgtagggttttaggattttgagtcggtgtttagggatttatcggttgcgaggagtcgcgtttttattaattgtttacgtttatttttcgcggttcggagatttagtcgtttttttttgggtatttattggtaagttttcggaagcgtggattaattaaaatttttttcgtgtttttagttttcgtttagttacggttttcgcgaatcgggggcgggtttttttcgcgttgatttagtggtagtgtaagcggagtgtcgcgcgggtcgattattggttgtcgtaagcgggcgttgttagaatcggattgggtcgcggcggggacggaagcggtttttgggttcgaggggttggagtcgggtcggggcgatgtggagcgcgggtcgcggcggggttgtttggtcggtgttgttggggttgttgttggcgttgttagtgtcgggcggtggtgtcgttaagatcggtgcggagttcgtgatttgcgggtcggtgttgaagttgtttaatacgtattatcgcgtgcggttgtattcgtacgatattaaatacggattcggtgcgtggggttagcgattgggagagcgcggggaatcggggttcggggttgggagtgtggagatagggtggttatgggggtttgtgggtcgtttggaagtcgggcggcgggggttttagagtcgttgggaggtcgaggggttaaagttttgagggtgtcga

SEQ ID NO: 37648 - DNA, 758 bp, Artificial Sequence
  chemically treated genomic DNA (Homo sapiens) CpG-island No: 37648
tcgacaccctcaaaactttaacccctcgacctcccaacgactctaaaacccccgccgcccgacttccaaacgacccacaaacccccataaccaccctatctccacactcccaaccccgaaccccgattccccgcgctctcccaatcgctaaccccacgcaccgaatccgtatttaatatcgtacgaatacaaccgcacgcgataatacgtattaaacaacttcaacaccgacccgcaaatcacgaactccgcaccgatcttaacgacaccaccgcccgacactaacaacgccaacaacaaccccaacaacaccgaccaaacaaccccgccgcgacccgcgctccacatcgccccgacccgactccaacccctcgaacccaaaaaccgcttccgtccccgccgcgacccaatccgattctaacaacgcccgcttacgacaaccaataatcgacccgcgcgacactccgcttacactaccactaaatcaacgcgaaaaaaacccgcccccgattcgcgaaaaccgtaactaaacgaaaactaaaaacacgaaaaaaattttaattaatccacgcttccgaaaacttaccaataaatacccaaaaaaaaacgactaaatctccgaaccgcgaaaaataaacgtaaacaattaataaaaacgcgactcctcgcaaccgataaatccctaaacaccgactcaaaatcctaaaaccctacaaacacgttttcacgacgccccttaatcctaaactcctaaacac

SEQ ID NO: 37649 - DNA, 587 bp, Artificial Sequence
  chemically treated genomic DNA (Homo sapiens) CpG-island No: 37649
cgttgcggttgcgttttatcggcggtttatagtagtagggttcgtgtaggagtagtttgcgtagcggtattagcgggatggtgtgtgcgtttattagtttttgttgttggtgacgcgcgtcgtttcgtcgtttgaggcgtttaaatttcgttagcgcgttggtcgacgtttggtagagtagtagggttatggtttgcgttttttcgggtttggatattagtacggcgtggtagcgtagtattacggttttgtgttttagttcgtgtcggtatatttaggcgaagattttgggtagtcgcgcgtcggttacgtagtaggtgacgcggtgtagtaggtagaggtggttcgggcggcgtagcgcgcgtttttcggcgtgtattatgcggatattttgcgtatttatcgttagttttattttggtgttttgacggttcgtttcgtttttgttttagattttgtttatagtaaggtcggtgtagtcgtcgtcgcgcgtttggatggtggtggtattgtttaggtagagtacggtgtaagttgggttttcgttagtgatgtgtagttttttgcgtttggagcggaatatgttg

SEQ ID NO: 37650 - DNA, 587 bp, Artificial Sequence
  chemically treated genomic DNA (Homo sapiens) CpG-island No: 37650
caacatattccgctccaaacgcaaaaaactacacatcactaacgaaaacccaacttacaccgtactctacctaaacaataccaccaccatccaaacgcgcgacgacgactacaccgaccttactataaacaaaatctaaaacaaaaacgaaacgaaccgtcaaaacaccaaaataaaactaacgataaatacgcaaaatatccgcataatacacgccgaaaaacgcgcgctacgccgcccgaaccacctctacctactacaccgcgtcacctactacgtaaccgacgcgcgactacccaaaatcttcgcctaaatataccgacacgaactaaaacacaaaaccgtaatactacgctaccacgccgtactaatatccaaacccgaaaaaacgcaaaccataaccctactactctaccaaacgtcgaccaacgcgctaacgaaatttaaacgcctcaaacgacgaaacgacgcgcgtcaccaacaacaaaaactaataaacgcacacaccatcccgctaataccgctacgcaaactactcctacacgaaccctactactataaaccgccgataaaacgcaaccgcaacg

SEQ ID NO: 37651 - DNA, 587 bp, Artificial Sequence
  chemically treated genomic DNA (Homo sapiens) CpG-island No: 37651
tagtatgtttcgttttaagcgtaagaagttgtatattattagcgaggatttaatttatatcgtgttttatttgggtaatgttattattatttaggcgcgcggcgacggttgtatcgattttgttgtgggtaagatttggagtaagagcgaggcgggtcgttagggtattaagatgaagttgacggtgagtgcgtagggtattcgtatggtgtacgtcgaggagcgcgcgttgcgtcgttcgggttatttttatttgttgtatcgcgttatttattgcgtggtcgacgcgcggttgtttaaggttttcgtttgggtgtatcggtacgagttgaagtataaggtcgtgatgttgcgttgttacgtcgtgttggtgtttaagttcgaaaaggcgtaggttatggttttgttgttttattagacgtcggttaacgcgttggcggaatttaaacgttttaagcggcgggacgacgcgcgttattagtagtaggagttggtgggcgtatatattatttcgttagtgtcgttgcgtaagttgtttttatacggattttgttgttataaatcgtcggtggagcgtagtcgtagcg

SEQ ID NO: 37652 - DNA, 587 bp, Artificial Sequence
  chemically treated genomic DNA (Homo sapiens) CpG-island No: 37652
cgctacgactacgctccaccgacgatttataacaacaaaatccgtataaaaacaacttacgcaacgacactaacgaaataatatatacgcccaccaactcctactactaataacgcgcgtcgtcccgccgcttaaaacgtttaaattccgccaacgcgttaaccgacgtctaataaaacaacaaaaccataacctacgccttttcgaacttaaacaccaacacgacgtaacaacgcaacatcacgaccttatacttcaactcgtaccgatacacccaaacgaaaaccttaaacaaccgcgcgtcgaccacgcaataaataacgcgatacaacaaataaaaataacccgaacgacgcaacgcgcgctcctcgacgtacaccatacgaataccctacgcactcaccgtcaacttcatcttaataccctaacgacccgcctcgctcttactccaaatcttacccacaacaaaatcgatacaaccgtcgccgcgcgcctaaataataataacattacccaaataaaacacgatataaattaaatcctcgctaataatatacaacttcttacgcttaaaacgaaacatacta

SEQ ID NO: 37653 - DNA, 530 bp, Artificial Sequence
  chemically treated genomic DNA (Homo sapiens) CpG-island No: 37653
tggtcgcggcgggtttcgcgtagtagtttcgcggggatttattgtattttcgtttcgtcggacgtcggggattcgcgttcggttcgtttagtgttcgggttggtttggtcgagacggcgttgggtttcgagaataggggacgggtatggtcgggttcgggaatcgtcgttattttatttttttttttcgaggcggtgtttagtttcgttttcgggttttttacggtttgttgttcgtttttgtagtgcgtttttttcggtgttgcgagcggcgttcggttcgtttgttttatatttttgtcgttcgggaggaagatttcgggtaaatataggtcggcgcgaattattcgtcgcgcggggataggggaggagtagagaagaggatttgttttgggtttcgatttcgggcggatttttggttttttaaagggatcgcgtgatagttattggtcgagggagcggggagatcggtttaattttttaattatattttaaatttattagtattttttttgtttatggaaattattg

SEQ ID NO: 37654 - DNA, 530 bp, Artificial Sequence
  chemically treated genomic DNA (Homo sapiens) CpG-island No: 37654
caataatttccataaacaaaaaaaatactaataaatttaaaatataattaaaaaattaaaccgatctccccgctccctcgaccaataactatcacgcgatccctttaaaaaaccaaaaatccgcccgaaatcgaaacccaaaacaaatcctcttctctactcctcccctatccccgcgcgacgaataattcgcgccgacctatatttacccgaaatcttcctcccgaacgacaaaaatataaaacaaacgaaccgaacgccgctcgcaacaccgaaaaaaacgcactacaaaaacgaacaacaaaccgtaaaaaacccgaaaacgaaactaaacaccgcctcgaaaaaaaaaaataaaataacgacgattcccgaacccgaccatacccgtcccctattctcgaaacccaacgccgtctcgaccaaaccaacccgaacactaaacgaaccgaacgcgaatccccgacgtccgacgaaacgaaaatacaataaatccccgcgaaactactacgcgaaacccgccgcgacca

SEQ ID NO: 37655 - DNA, 530 bp, Artificial Sequence
  chemically treated genomic DNA (Homo sapiens) CpG-island No: 37655
tagtgatttttatagataaaagagatgttggtaaatttgggatgtaattggaggattggatcggttttttcgttttttcgattaatggttgttacgcggtttttttaagaaattaggaattcgttcggagtcggagtttaaaatagatttttttttttgttttttttttgttttcgcgcggcgaatggttcgcgtcggtttatatttattcgagatttttttttcggacggtaaggatgtgaggtaggcgagtcggacgtcgttcgtagtatcggagagggcgtattgtaaaggcgggtagtagatcgtggagagttcgggagcggagttggatatcgtttcggagggaagaaatgaggtagcggcggttttcggattcggttatgttcgttttttgttttcggagtttagcgtcgtttcggttaggttagttcggatattgagcgggtcgagcgcgagttttcggcgttcggcggagcgaagatgtagtgagttttcgcgggattgttgcgcggggttcgtcgcggtta

SEQ ID NO: 37656 - DNA, 530 bp, Artificial Sequence
  chemically treated genomic DNA (Homo sapiens) CpG-island No: 37656
taaccgcgacgaaccccgcgcaacaatcccgcgaaaactcactacatcttcgctccgccgaacgccgaaaactcgcgctcgacccgctcaatatccgaactaacctaaccgaaacgacgctaaactccgaaaacaaaaaacgaacataaccgaatccgaaaaccgccgctacctcatttcttccctccgaaacgatatccaactccgctcccgaactctccacgatctactacccgcctttacaatacgccctctccgatactacgaacgacgtccgactcgcctacctcacatccttaccgtccgaaaaaaaaatctcgaataaatataaaccgacgcgaaccattcgccgcgcgaaaacaaaaaaaaaacaaaaaaaaaaatctattttaaactccgactccgaacgaattcctaatttcttaaaaaaaccgcgtaacaaccattaatcgaaaaaacgaaaaaaccgatccaatcctccaattacatcccaaatttaccaacatctcttttatctataaaaatcacta

SEQ ID NO: 37657 - DNA, 800 bp, Artificial Sequence
  chemically treated genomic DNA (Homo sapiens) CpG-island No: 37657
tcgttcgatagtttttcgattcgtggttttattatagcgcgtgggcggcgatttagtaggaggaggcgtagatttataggtcgaaggagatgtagacgcggtggcgggcgaagtagcggtttaggtagttttagttttagagcgcgggcgcggggttgggcgttttttttatggcgcggttgggcgcgcggcgcggggtcggggatttgggcgtagtttttttcgtcgcgggtaagtttcgagcgtcgtcgtttcgcgtgtttttttttgggtttcgtttcgtcgcggcggttttcggtcgagcgtatcgatcgcgggtagagaagggcgcgttttcgggcgcgggcggcggcggcgaaggcgtcggggaaaagttttcgggatcgcgcgttttttatttttcgcgttattgtcgggggtcggtagggcggaggtcgttttttagcggcgggagtcgggagttgcgcgcgtataaagattgcggttttcgtttttcgtcgattttttcgcggttatttatttttaatattttggtcggagcggggcgggcggttgggttcgcggacggtcgagtttttgtcggtcgttgtaaggtacggcgtttttttttgcgtattgtttatattttttgagttaatagtaattagttgcgttgttgaagcgtatgggtgttgggatttcgaggtgaagggggcgtggttttgatcgtcgatagggcgtagtaaaaagggtggggtgtaagattaggaaggaggaaataaacgtgtcggagaataaatatttttatatttgttttttat

SEQ ID NO: 37658 - DNA, 800 bp, Artificial Sequence
  chemically treated genomic DNA (Homo sapiens) CpG-island No: 37658
ataaaaaacaaatataaaaatatttattctccgacacgtttatttcctccttcctaatcttacaccccaccctttttactacgccctatcgacgatcaaaaccacgcccccttcacctcgaaatcccaacacccatacgcttcaacaacgcaactaattactattaactcaaaaaatataaacaatacgcaaaaaaaaacgccgtaccttacaacgaccgacaaaaactcgaccgtccgcgaacccaaccgcccgccccgctccgaccaaaatattaaaaataaataaccgcgaaaaaatcgacgaaaaacgaaaaccgcaatctttatacgcgcgcaactcccgactcccgccgctaaaaaacgacctccgccctaccgacccccgacaataacgcgaaaaataaaaaacgcgcgatcccgaaaacttttccccgacgccttcgccgccgccgcccgcgcccgaaaacgcgcccttctctacccgcgatcgatacgctcgaccgaaaaccgccgcgacgaaacgaaacccaaaaaaaaacacgcgaaacgacgacgctcgaaacttacccgcgacgaaaaaaactacgcccaaatccccgaccccgcgccgcgcgcccaaccgcgccataaaaaaaacgcccaaccccgcgcccgcgctctaaaactaaaactacctaaaccgctacttcgcccgccaccgcgtctacatctccttcgacctataaatctacgcctcctcctactaaatcgccgcccacgcgctataataaaaccacgaatcgaaaaactatcgaacga

SEQ ID NO: 37659 - DNA, 800 bp, Artificial Sequence
  chemically treated genomic DNA (Homo sapiens) CpG-island No: 37659
gtgagaggtagatgtgggggtatttgtttttcggtacgtttgtttttttttttttggttttgtattttattttttttattgcgttttgtcggcgattaggattacgttttttttatttcgggattttagtatttatgcgttttagtagcgtaattaattgttgttggtttaggaaatgtggataatacgtaggaagggacgtcgtgttttatagcgatcggtagggattcggtcgttcgcgagtttagtcgttcgtttcgtttcggttaggatgttggaggtgggtgatcgcgaagaggtcggcggggggcgggggtcgtagtttttgtgcgcgcgtagttttcggttttcgtcgttggggggcggttttcgttttgtcgattttcgataatagcgcgaggggtggggagcgcgcggtttcggaaattttttttcggcgttttcgtcgtcgtcgttcgcgttcgggagcgcgtttttttttgttcgcggtcggtgcgttcggtcggaggtcgtcgcggcggaacggaatttagagaagggtacgcggggcggcggcgttcggggtttgttcgcggcgagggaggttgcgtttaggttttcggtttcgcgtcgcgcgtttagtcgcgttatgggggaggcgtttagtttcgcgttcgcgttttgggattgggattatttggatcgttgtttcgttcgttatcgcgtttgtatttttttcggtttgtggatttgcgtttttttttgttggatcgtcgtttacgcgttgtaatggggttacgggtcggggggttgtcgggcgg

SEQ ID NO: 37660 - DNA, 800 bp, Artificial Sequence
  chemically treated genomic DNA (Homo sapiens) CpG-island No: 37660
ccgcccgacaaccccccgacccgtaaccccattacaacgcgtaaacgacgatccaacaaaaaaaaacgcaaatccacaaaccgaaaaaaatacaaacgcgataacgaacgaaacaacgatccaaataatcccaatcccaaaacgcgaacgcgaaactaaacgcctcccccataacgcgactaaacgcgcgacgcgaaaccgaaaacctaaacgcaacctccctcgccgcgaacaaaccccgaacgccgccgccccgcgtacccttctctaaattccgttccgccgcgacgacctccgaccgaacgcaccgaccgcgaacaaaaaaaaacgcgctcccgaacgcgaacgacgacgacgaaaacgccgaaaaaaaatttccgaaaccgcgcgctccccacccctcgcgctattatcgaaaatcgacaaaacgaaaaccgccccccaacgacgaaaaccgaaaactacgcgcgcacaaaaactacgacccccgccccccgccgacctcttcgcgatcacccacctccaacatcctaaccgaaacgaaacgaacgactaaactcgcgaacgaccgaatccctaccgatcgctataaaacacgacgtcccttcctacgtattatccacatttcctaaaccaacaacaattaattacgctactaaaacgcataaatactaaaatcccgaaataaaaaaaacgtaatcctaatcgccgacaaaacgcaataaaaaaaataaaatacaaaaccaaaaaaaaaaaaacaaacgtaccgaaaaacaaatacccccacatctacctctcac

SEQ ID NO: 37661 - DNA, 645 bp, Artificial Sequence
  chemically treated genomic DNA (Homo sapiens) CpG-island No: 37661
tttcgtcgtcgaagtttttttcgcggttttttttattttcgttttaggttcgtttatatttttgttcgggatttaagttcggtatcgtcgttttttttttcgtttcgtcgcgttagagtttggggtttcggtaattttcggcggcgggagttgtagagcgtaaggcgcgtttattgcgcgtgcgtttcggttcggttttttttgcgttttcggtttttgcgattgggatttggtacggtcgggcggttggcgttttttgcggtttttgttaggggcgggttttttaaattttttttttgaaggagtggcgacggttcggatagttcgcgttggagatggtaggggtcgagtttgtagggttttgcgtttcgtttggcggggttttttatttagtacgtgagttgcgggtaggtattttgtcgcggtaagcgtacggtatcggcgttttgtttttttcgtattgtttcgtttagtatttcgtaatattttttttcgtttttttatagtatttcggttttaaatatcgtacgtttagtttattcgtttcggcgttttattttcgtaattttattttttatttttagttttagtttattttattatttttttttttattttttttttttttttttttttttttttttt

SEQ ID NO: 37662 - DNA, 645 bp, Artificial Sequence
  chemically treated genomic DNA (Homo sapiens) CpG-island No: 37662
aaaaaaaaaaaaaaaaaaaaaaaaaaaaaaataaaaaaaaaaataataaaataaactaaaactaaaaataaaaaataaaattacgaaaataaaacgccgaaacgaataaactaaacgtacgatatttaaaaccgaaatactataaaaaaacgaaaaaaaatattacgaaatactaaacgaaacaatacgaaaaaaacaaaacgccgataccgtacgcttaccgcgacaaaatacctacccgcaactcacgtactaaataaaaaaccccgccaaacgaaacgcaaaaccctacaaactcgacccctaccatctccaacgcgaactatccgaaccgtcgccactccttcaaaaaaaaaatttaaaaaacccgcccctaacaaaaaccgcaaaaaacgccaaccgcccgaccgtaccaaatcccaatcgcaaaaaccgaaaacgcaaaaaaaaccgaaccgaaacgcacgcgcaataaacgcgccttacgctctacaactcccgccgccgaaaattaccgaaaccccaaactctaacgcgacgaaacgaaaaaaaaaacgacgataccgaacttaaatcccgaacaaaaatataaacgaacctaaaacgaaaataaaaaaaaccgcgaaaaaaacttcgacgacgaaa

SEQ ID NO: 37663 - DNA, 645 bp, Artificial Sequence
  chemically treated genomic DNA (Homo sapiens) CpG-island No: 37663
ggggggagaggggggggaaggggaggaagggtggggggggggatggtgggatggattaggattgagagtggggggtgaagttgcgggggtggagcgtcggagcgagtgggttaggcgtgcggtgtttggggtcggggtgttatagaggagcggggggaggtgttgcggggtgttgggcggggtaatgcgggaggggtagaacgtcggtgtcgtgcgtttgtcgcggtagggtgtttgttcgtaatttacgtgttgggtgggaagtttcgttaggcggagcgtaggattttgtaggttcggtttttgttatttttaacgcgaattgttcgggtcgtcgttatttttttaaagggaagatttgaaaagttcgtttttggtaggagtcgtagaggacgttaatcgttcggtcgtattaagttttagtcgtaggggtcgggggcgtaggaggagtcgggtcgaagcgtacgcgtagtgggcgcgttttgcgttttgtagttttcgtcgtcggaagttgtcgagattttaggttttagcgcggcggggcgggggagagggcggcggtgtcggatttaagtttcggatagggatgtgggcgggtttgggacgggagtgggaggggtcgcggggaaagtttcggcggcggag

SEQ ID NO: 37664 - DNA, 645 bp, Artificial Sequence
  chemically treated genomic DNA (Homo sapiens) CpG-island No: 37664
ctccgccgccgaaactttccccgcgacccctcccactcccgtcccaaacccgcccacatccctatccgaaacttaaatccgacaccgccgccctctcccccgccccgccgcgctaaaacctaaaatctcgacaacttccgacgacgaaaactacaaaacgcaaaacgcgcccactacgcgtacgcttcgacccgactcctcctacgcccccgacccctacgactaaaacttaatacgaccgaacgattaacgtcctctacgactcctaccaaaaacgaacttttcaaatcttccctttaaaaaaataacgacgacccgaacaattcgcgttaaaaataacaaaaaccgaacctacaaaatcctacgctccgcctaacgaaacttcccacccaacacgtaaattacgaacaaacaccctaccgcgacaaacgcacgacaccgacgttctacccctcccgcattaccccgcccaacaccccgcaacacctccccccgctcctctataacaccccgaccccaaacaccgcacgcctaacccactcgctccgacgctccacccccgcaacttcaccccccactctcaatcctaatccatcccaccatccccccccccacccttcctccccttcccccccctctcccccc

SEQ ID NO: 37665 - DNA, 941 bp, Artificial Sequence
  chemically treated genomic DNA (Homo sapiens) CpG-island No: 37665
ttcgtatcgggtaggagggtgggcgtgagtgcgcgttcgcgtgtggtttcgatgggaggcgaggcgttgggaggtcggggggcgcgggggcggtcggcgtcgttttttattttttcgatatttcgttttttttttttttttttcgtttttttttttcgggttcgttttcgtattgtttggttattttttttaggtgttcggggggaaaggacggttcgcgaattgggggaatttatgtgaggtttcgagttagggtttcggcggggcgcgaaggggcgtttgttattgagcgatttattcgcgttttcgacggcgtttgtacgtttttcgagttcgcggttttttacgtagttggtcgttatttcggacgcggtaggcgggattgcgtggggcgcgtcgagttttttcggggtgttttcgtcgttaaggtcgagggttcggggcggcgggaacgttgggttcgcgtttttttcgtttcggataggtattttagacgcgtcggggagttatagtttgcgcggtcggagtcgttcgcgggttattgggttcggttcggtcgcgttttgacggttttttttttggtcggttttcgttttcggaaggttttgtgcgagtcgggggaggtggggtttgggcgggcgcgggagggagtcggaggtgggtttcgcggtttttttcgggattcggcggggatattttttttttttttttttcgggcgcgttcgggtttgggaattggttgcgttttattggaagtgcgcggggtcgtttttttgtttttttcggtaattttgtcgtggcgttgcggttatttcgaggggatttttttgaaggtgtttcgtcggagagggtcggtgttttaaggtcgcgggtcgttgggtttgttatggagaagtggcggggattcgttttaagttgagggattacgagggaggagtggg

SEQ ID NO: 37666 - DNA, 941 bp, Artificial Sequence
  chemically treated genomic DNA (Homo sapiens) CpG-island No: 37666
cccactcctccctcgtaatccctcaacttaaaacgaatccccgccacttctccataacaaacccaacgacccgcgaccttaaaacaccgaccctctccgacgaaacaccttcaaaaaaatcccctcgaaataaccgcaacgccacgacaaaattaccgaaaaaaacaaaaaaacgaccccgcgcacttccaataaaacgcaaccaattcccaaacccgaacgcgcccgaaaaaaaaaaaaaaaaaatatccccgccgaatcccgaaaaaaaccgcgaaacccacctccgactccctcccgcgcccgcccaaaccccacctcccccgactcgcacaaaaccttccgaaaacgaaaaccgaccaaaaaaaaaaccgtcaaaacgcgaccgaaccgaacccaataacccgcgaacgactccgaccgcgcaaactataactccccgacgcgtctaaaatacctatccgaaacgaaaaaaacgcgaacccaacgttcccgccgccccgaaccctcgaccttaacgacgaaaacaccccgaaaaaactcgacgcgccccacgcaatcccgcctaccgcgtccgaaataacgaccaactacgtaaaaaaccgcgaactcgaaaaacgtacaaacgccgtcgaaaacgcgaataaatcgctcaataacaaacgccccttcgcgccccgccgaaaccctaactcgaaacctcacataaattcccccaattcgcgaaccgtcctttccccccgaacacctaaaaaaaataaccaaacaatacgaaaacgaacccgaaaaaaaaaaacgaaaaaaaaaaaaaaaaaacgaaatatcgaaaaaataaaaaacgacgccgaccgcccccgcgccccccgacctcccaacgcctcgcctcccatcgaaaccacacgcgaacgcgcactcacgcccaccctcctacccgatacgaa

SEQ ID NO: 37667 - DNA, 941 bp, Artificial Sequence
  chemically treated genomic DNA (Homo sapiens) CpG-island No: 37667
tttatttttttttcgtggttttttaatttgggacgggttttcgttatttttttatgataggtttagcggttcgcggttttggggtatcggtttttttcggcgagatatttttaggaaggttttttcggggtggtcgtaacgttacggtaaagttatcggggaaagtaaaagggcggtttcgcgtatttttaataggacgtagttagtttttaggttcggacgcgttcgagaggagggggaagggagtgttttcgtcgaatttcgagaaaggtcgcgggatttattttcggttttttttcgcgttcgtttaggttttatttttttcggttcgtataaagtttttcgagggcgggggtcggttaggggggaggtcgttaggacgcggtcggatcgggtttagtgattcgcgggcggtttcggtcgcgtaggttgtggtttttcgacgcgtttggagtgtttgttcgggacgggaaggacgcgagtttagcgttttcgtcgtttcgagttttcggttttgacggcgagagtatttcgagaaggttcggcgcgttttacgtagtttcgtttgtcgcgttcgaggtggcggttaattgcgtggagggtcgcgagttcgaggggcgtgtagacgtcgtcgggggcgcgggtgaatcgtttagtggtaggcgttttttcgcgtttcgtcgaggttttaattcgaggttttatatgagtttttttagttcgcgaatcgtttttttttttcgggtatttgaggaaggtggttaaataatgcgggggcggattcgggggagggaggcgggggaggggggaggaaggcgggatgtcgagggagtgggggacggcgtcggtcgttttcgcgtttttcggttttttagcgtttcgttttttatcggggttatacgcgggcgcgtatttacgtttatttttttgttcggtgcgag

SEQ ID NO: 37668 - DNA, 941 bp, Artificial Sequence
  chemically treated genomic DNA (Homo sapiens) CpG-island No: 37668
ctcgcaccgaacaaaaaaataaacgtaaatacgcgcccgcgtataaccccgataaaaaacgaaacgctaaaaaaccgaaaaacgcgaaaacgaccgacgccgtcccccactccctcgacatcccgccttcctcccccctcccccgcctccctcccccgaatccgcccccgcattatttaaccaccttcctcaaatacccgaaaaaaaaaaacgattcgcgaactaaaaaaactcatataaaacctcgaattaaaacctcgacgaaacgcgaaaaaacgcctaccactaaacgattcacccgcgcccccgacgacgtctacacgcccctcgaactcgcgaccctccacgcaattaaccgccacctcgaacgcgacaaacgaaactacgtaaaacgcgccgaaccttctcgaaatactctcgccgtcaaaaccgaaaactcgaaacgacgaaaacgctaaactcgcgtccttcccgtcccgaacaaacactccaaacgcgtcgaaaaaccacaacctacgcgaccgaaaccgcccgcgaatcactaaacccgatccgaccgcgtcctaacgacctcccccctaaccgacccccgccctcgaaaaactttatacgaaccgaaaaaaataaaacctaaacgaacgcgaaaaaaaaccgaaaataaatcccgcgacctttctcgaaattcgacgaaaacactcccttccccctcctctcgaacgcgtccgaacctaaaaactaactacgtcctattaaaaatacgcgaaaccgcccttttactttccccgataactttaccgtaacgttacgaccaccccgaaaaaaccttcctaaaaatatctcgccgaaaaaaaccgataccccaaaaccgcgaaccgctaaacctatcataaaaaaataacgaaaacccgtcccaaattaaaaaaccacgaaaaaaaaataaa

SEQ ID NO: 37669 - DNA, 883 bp, Artificial Sequence
  chemically treated genomic DNA (Homo sapiens) CpG-island No: 37669
aatatcggtagggatgttcgattgtagtttgggttttcgtttgtagagcgcggcggcggagggcgtagtaagtcgggtagttatcgggtgttggagaatttcgtatcgtatttgttggacgtggacgtagatagcgggtttttttatattaagtagcgtatcgatcgcgagtttttgtgtcgttataatgttaagtgttagttgtttttcgaggtgttcgttaacgataaggagatttgtatgattaaggtagagatttaggatattaacgataacgcgtttttttttttttcggattagatcgaaatggatatttcggagaacgttgtttcgggtattcgttttttttttattagcgtatatgatttcgacgtcggcgagaatgggtttcgtatttatttgtttacgcgcgacgattacggtttttttggattggacgttaagtttcgcggcgacggtattaagtttttagaattggttatttagaaggttttggatcgcgagtaatagaattattatacgttcgtgttgattgttttggacggtggcgagtttttacgtttcgttatcgtatagattaacgtgaaggtgattgattttaacgataatagttcggttttcgaggcgttattttatttggtggaattgttcgagaacgtttcgttgggtatagtggttatcgatttgaacgttatcgacgtcgatgaaggttttaatggtgaagtgttttatttttttagtagttacgtgtttgatcgcgtgcgggagtttttttttatcgattttaagatcggtttaattcgtgtgaagggtaatttggattatgaggaaaacgggatgttggagattgacgtgtaggttcgagatttggggtttaatttta

SEQ ID NO: 37670 - DNA, 883 bp, Artificial Sequence
  chemically treated genomic DNA (Homo sapiens) CpG-island No: 37670
taaaattaaaccccaaatctcgaacctacacgtcaatctccaacatcccgttttcctcataatccaaattacccttcacacgaattaaaccgatcttaaaatcgataaaaaaaaactcccgcacgcgatcaaacacgtaactactaaaaaaataaaacacttcaccattaaaaccttcatcgacgtcgataacgttcaaatcgataaccactatacccaacgaaacgttctcgaacaattccaccaaataaaataacgcctcgaaaaccgaactattatcgttaaaatcaatcaccttcacgttaatctatacgataacgaaacgtaaaaactcgccaccgtccaaaacaatcaacacgaacgtataataattctattactcgcgatccaaaaccttctaaataaccaattctaaaaacttaataccgtcgccgcgaaacttaacgtccaatccaaaaaaaccgtaatcgtcgcgcgtaaacaaataaatacgaaacccattctcgccgacgtcgaaatcatatacgctaataaaaaaaaaacgaatacccgaaacaacgttctccgaaatatccatttcgatctaatccgaaaaaaaaaaaaacgcgttatcgttaatatcctaaatctctaccttaatcatacaaatctccttatcgttaacgaacacctcgaaaaacaactaacacttaacattataacgacacaaaaactcgcgatcgatacgctacttaatataaaaaaacccgctatctacgtccacgtccaacaaatacgatacgaaattctccaacacccgataactacccgacttactacgccctccgccgccgcgctctacaaacgaaaacccaaactacaatcgaacatccctaccgatatt

SEQ ID NO: 37671 - DNA, 883 bp, Artificial Sequence
  chemically treated genomic DNA (Homo sapiens) CpG-island No: 37671
tagggttaggttttaggtttcgggtttgtacgttaatttttagtatttcgttttttttatagtttagattgttttttatacggattaggtcggttttggggtcgatggagaagagttttcgtacgcggttaggtacgtagttgttgaaagagtagagtattttattattgggatttttatcggcgtcggtggcgtttagatcgatgattattgtatttagcggagcgttttcgggtagttttattaagtaggatggcgtttcgaagatcgggttgttgtcgttggagttaattatttttacgttgatttgtacggtggcggaacgtggaggttcgttatcgtttagggtagttagtacgagcgtatggtgattttgttgttcgcggtttagagttttttggatgattagttttgggaatttggtgtcgtcgtcgcgggatttaacgtttagtttaaagaggtcgtgatcgtcgcgcgtgagtaggtaggtgcggagtttattttcgtcggcgtcggggttatgtgcgttggtgagggggaagcgggtgttcggagtagcgtttttcgagatgtttatttcgatttggttcgaggagaaggagggcgcgttgtcgttgatgttttggatttttattttgattatgtagatttttttgtcgttggcgaatatttcgagggatagttggtatttggtattgtggcggtatagggattcgcggtcgatgcgttgtttggtgtagaggagttcgttgtttgcgtttacgtttagtaggtgcggtgcggagttttttagtattcggtagttattcgatttgttgcgtttttcgtcgtcgcgttttgtaggcggaagtttaggttgtagtcgagtatttttgtcgatgtt

SEQ ID NO: 37672 - DNA, 883 bp, Artificial Sequence
  chemically treated genomic DNA (Homo sapiens) CpG-island No: 37672
aacatcgacaaaaatactcgactacaacctaaacttccgcctacaaaacgcgacgacgaaaaacgcaacaaatcgaataactaccgaatactaaaaaactccgcaccgcacctactaaacgtaaacgcaaacaacgaactcctctacaccaaacaacgcatcgaccgcgaatccctataccgccacaataccaaataccaactatccctcgaaatattcgccaacgacaaaaaaatctacataatcaaaataaaaatccaaaacatcaacgacaacgcgccctccttctcctcgaaccaaatcgaaataaacatctcgaaaaacgctactccgaacacccgcttccccctcaccaacgcacataaccccgacgccgacgaaaataaactccgcacctacctactcacgcgcgacgatcacgacctctttaaactaaacgttaaatcccgcgacgacgacaccaaattcccaaaactaatcatccaaaaaactctaaaccgcgaacaacaaaatcaccatacgctcgtactaactaccctaaacgataacgaacctccacgttccgccaccgtacaaatcaacgtaaaaataattaactccaacgacaacaacccgatcttcgaaacgccatcctacttaataaaactacccgaaaacgctccgctaaatacaataatcatcgatctaaacgccaccgacgccgataaaaatcccaataataaaatactctactctttcaacaactacgtacctaaccgcgtacgaaaactcttctccatcgaccccaaaaccgacctaatccgtataaaaaacaatctaaactataaaaaaaacgaaatactaaaaattaacgtacaaacccgaaacctaaaacctaacccta

SEQ ID NO: 37673 - DNA, 1300 bp, Artificial Sequence
  chemically treated genomic DNA (Homo sapiens) CpG-island No: 37673
tcgatcgtaacgataatgcgtcgtttatcggtttcgttttcgtgcgttagggggcgttgagcgaggtcgtttttttcggtatcgttatcgttttggtgcgggttattgatcgggattttggtaagaacggatagttgtagtgtcgggttttaggcggaggagggacgggcggcggcgggggtttgggcgggttcgggggtttcgttttttttaagtttgaggagaattacgataatttttatacggtggtgattgatcgttcgttggatcgcgagatataagacgagtataacgtgattatcgtggcgcgggacgggggtttttttttttttaattttattaagtcgttcgcgattaagattttagacgagaacgataattcgtttcggtttattaaagggttttacgtgttttaggtgtacgagaataatatttcgggagagtatttgggttttgtgttcgtttaggatttcgatttgggttagaacggtatcgtattttattttattttgttttcgtatatcggcgacgtgtttatttatatttatgtgtttgtgaattttacgaacggggttatttacgttttgcgtttttttaatttcgagtagattaaggtttttgagtttaaggtgtttgttaaggattcgggggcgttcgcgtatttggagagtaacgttacggtgagggtgatagtgttagacgtgaatgataacgcgttagtgatcgtgttttttacgttgtagaacgatatcgcggagttgtaggtgtcgcgtaacgttggtttgggttatttggtgagtattgtgcgcgttttagatagcgatttcggcgagagcgggcgttttatttacgagatcgtggacggtaacgacgattatttgtttgagatcgattcgtttagcggcgagattcgtacgttgtattttttttgggaggacgtgacgttcgtggtggagttggtggtgaaggtgatcgattacggtaagtttattttgttcgtagtggttaagtttattattcgttcggtgagcggattttttttcgagggggtattacgggtgaatggcgagtagtattattgggatatgtcgttgtcgtttatcgtgattttgagtattatttttattatttttttagcggttatgattattatcgtcgttaagtgtaagcgcgagaataaggagattcgtatttataattgtcgtatcgtcgagtatagttattcgtagttgggtgggggtaagggtaagaagaagaagattaataaaaatgatattatgttggtgtagagcgaagtgga

SEQ ID NO: 37674 - DNA, 1300 bp, Artificial Sequence
  chemically treated genomic DNA (Homo sapiens) CpG-island No: 37674
tccacttcgctctacaccaacataatatcatttttattaatcttcttcttcttacccttacccccacccaactacgaataactatactcgacgatacgacaattataaatacgaatctccttattctcgcgcttacacttaacgacgataataatcataaccgctaaaaaaataataaaaataatactcaaaatcacgataaacgacaacgacatatcccaataatactactcgccattcacccgtaataccccctcgaaaaaaaatccgctcaccgaacgaataataaacttaaccactacgaacaaaataaacttaccgtaatcgatcaccttcaccaccaactccaccacgaacgtcacgtcctcccaaaaaaaatacaacgtacgaatctcgccgctaaacgaatcgatctcaaacaaataatcgtcgttaccgtccacgatctcgtaaataaaacgcccgctctcgccgaaatcgctatctaaaacgcgcacaatactcaccaaataacccaaaccaacgttacgcgacacctacaactccgcgatatcgttctacaacgtaaaaaacacgatcactaacgcgttatcattcacgtctaacactatcaccctcaccgtaacgttactctccaaatacgcgaacgcccccgaatccttaacaaacaccttaaactcaaaaaccttaatctactcgaaattaaaaaaacgcaaaacgtaaataaccccgttcgtaaaattcacaaacacataaatataaataaacacgtcgccgatatacgaaaacaaaataaaataaaatacgataccgttctaacccaaatcgaaatcctaaacgaacacaaaacccaaatactctcccgaaatattattctcgtacacctaaaacacgtaaaaccctttaataaaccgaaacgaattatcgttctcgtctaaaatcttaatcgcgaacgacttaataaaattaaaaaaaaaaaaacccccgtcccgcgccacgataatcacgttatactcgtcttatatctcgcgatccaacgaacgatcaatcaccaccgtataaaaattatcgtaattctcctcaaacttaaaaaaaacgaaacccccgaacccgcccaaacccccgccgccgcccgtccctcctccgcctaaaacccgacactacaactatccgttcttaccaaaatcccgatcaataacccgcaccaaaacgataacgataccgaaaaaaacgacctcgctcaacgccccctaacgcacgaaaacgaaaccgataaacgacgcattatcgttacgatcga

SEQ ID NO: 37675 - DNA, 1300 bp, Artificial Sequence
  chemically treated genomic DNA (Homo sapiens) CpG-island No: 37675
tttatttcgttttgtattagtatgatattatttttgttgatttttttttttttgtttttgtttttatttagttgcgggtggttgtattcggcgatgcggtagttgtaagtgcggatttttttgttttcgcgtttgtatttgacggcgatggtgattatggtcgttaggaggatgatggagatagtgtttagagttacgatgagcggtagcgatatgttttagtggtgttgttcgttatttattcgtggtattttttcgggaagggattcgtttatcgagcggatgatgagtttggttattgcggatagggtaggtttgtcgtggtcggttatttttattattagttttattacgggcgttacgtttttttagaaagggtgtagcgtgcggatttcgtcgttggacgggtcgattttaaataggtggtcgtcgttgtcgtttacgatttcgtaggtgagacgttcgttttcgtcgaagtcgttgtttagggcgcgtatagtgtttattagatagtttaggttagcgttgcgcggtatttgtagtttcgcggtgtcgttttgtagcgtggggagtacgattattggcgcgttgttatttacgtttagtattgttatttttatcgtggcgttgttttttaagtgcgcgggcgttttcgagtttttagtaagtattttgaatttaaaagttttggtttgttcgaagttaaaggagcgtagggcgtagatggtttcgttcgtgggatttatagatatataggtgtagatagatacgtcgtcgatgtgcgagggtaggatagagtaggatacggtgtcgttttggtttaggtcgggattttgggcgagtatagagtttaggtattttttcgggatgttgttttcgtgtatttgaagtacgtagagttttttggtgaatcgaggcgggttgtcgttttcgtttagaattttgatcgcgaacgatttggtggagttgaggggaggagagttttcgtttcgcgttacgatggttacgttgtattcgttttgtgtttcgcggtttagcgggcggttagttattatcgtgtagaagttgtcgtagttttttttaagtttgaaggggacggaattttcgggttcgtttaggttttcgtcgtcgttcgtttttttttcgtttaggattcgatattgtagttgttcgtttttgttagagtttcggttagtgattcgtattagggcgatgacggtgtcgggaggggcggtttcgtttagcgttttttggcgtacggagacgaaatcgatggacggcgtattgtcgttgcggtcga

SEQ ID NO: 37676 - DNA, 1300 bp, Artificial Sequence
  chemically treated genomic DNA (Homo sapiens) CpG-island No: 37676
tcgaccgcaacgacaatacgccgtccatcgatttcgtctccgtacgccaaaaaacgctaaacgaaaccgcccctcccgacaccgtcatcgccctaatacgaatcactaaccgaaactctaacaaaaacgaacaactacaatatcgaatcctaaacgaaaaaaaaacgaacgacgacgaaaacctaaacgaacccgaaaattccgtccccttcaaacttaaaaaaaactacgacaacttctacacgataataactaaccgcccgctaaaccgcgaaacacaaaacgaatacaacgtaaccatcgtaacgcgaaacgaaaactctcctcccctcaactccaccaaatcgttcgcgatcaaaattctaaacgaaaacgacaacccgcctcgattcaccaaaaaactctacgtacttcaaatacacgaaaacaacatcccgaaaaaatacctaaactctatactcgcccaaaatcccgacctaaaccaaaacgacaccgtatcctactctatcctaccctcgcacatcgacgacgtatctatctacacctatatatctataaatcccacgaacgaaaccatctacgccctacgctcctttaacttcgaacaaaccaaaacttttaaattcaaaatacttactaaaaactcgaaaacgcccgcgcacttaaaaaacaacgccacgataaaaataacaatactaaacgtaaataacaacgcgccaataatcgtactccccacgctacaaaacgacaccgcgaaactacaaataccgcgcaacgctaacctaaactatctaataaacactatacgcgccctaaacaacgacttcgacgaaaacgaacgtctcacctacgaaatcgtaaacgacaacgacgaccacctatttaaaatcgacccgtccaacgacgaaatccgcacgctacaccctttctaaaaaaacgtaacgcccgtaataaaactaataataaaaataaccgaccacgacaaacctaccctatccgcaataaccaaactcatcatccgctcgataaacgaatcccttcccgaaaaaataccacgaataaataacgaacaacaccactaaaacatatcgctaccgctcatcgtaactctaaacactatctccatcatcctcctaacgaccataatcaccatcgccgtcaaatacaaacgcgaaaacaaaaaaatccgcacttacaactaccgcatcgccgaatacaaccacccgcaactaaataaaaacaaaaacaaaaaaaaaaaaatcaacaaaaataatatcatactaatacaaaacgaaataaa

SEQ ID NO: 37677 - DNA, 520 bp, Artificial Sequence
  chemically treated genomic DNA (Homo sapiens) CpG-island No: 37677
acgaattttttttaggtttataggcggttcgggtggtcggtgattgttttttcgagtgtcgggtattcggttatggcgttttcgggtcgtttaagaagtaagagttagagttttttaaggtcgttcgttggtttttgggatgtggggtcgattttttatattcgggtagtatgcggtcgttattaagcggcggggcgggaggacggttttggggcgggatttcgggtcgggagaacgattttggggcggggcgtaaggtaggatggggcggggtttgtgggggttttggtggtaagtgagggtttcgcgtaggcgttacgtttcggtttgatttgttttttggaacggtggtagtttttgggaacgtagattcggttttagttggttcgcgtttttttcgaggtttcggttagtagcgatatcgatcgtcgttttttgttgttgttggagaggtatcggggtgattttggttttttttttttttggaagattttttcgtttttttcggttgtcggatcgg

SEQ ID NO: 37678 - DNA, 520 bp, Artificial Sequence
  chemically treated genomic DNA (Homo sapiens) CpG-island No: 37678
ccgatccgacaaccgaaaaaaacgaaaaaatcttccaaaaaaaaaaaaaaccaaaatcaccccgatacctctccaacaacaacaaaaaacgacgatcgatatcgctactaaccgaaacctcgaaaaaaacgcgaaccaactaaaaccgaatctacgttcccaaaaactaccaccgttccaaaaaacaaatcaaaccgaaacgtaacgcctacgcgaaaccctcacttaccaccaaaacccccacaaaccccgccccatcctaccttacgccccgccccaaaatcgttctcccgacccgaaatcccgccccaaaaccgtcctcccgccccgccgcttaataacgaccgcatactacccgaatataaaaaatcgaccccacatcccaaaaaccaacgaacgaccttaaaaaactctaactcttacttcttaaacgacccgaaaacgccataaccgaatacccgacactcgaaaaaacaatcaccgaccacccgaaccgcctataaacctaaaaaaaattcgt

SEQ ID NO: 37679 - DNA, 520 bp, Artificial Sequence
  chemically treated genomic DNA (Homo sapiens) CpG-island No: 37679
tcggttcggtagtcgagggaagcgggggggttttttagaagaagaaagggttaaggttatttcggtgtttttttagtagtagtagagggcggcggtcggtgtcgttgttggtcggggtttcgaggaaggcgcgggttagttggggtcgggtttgcgtttttaggagttgttatcgttttagggagtaagttaggtcgggacgtagcgtttgcgcgggatttttatttgttattaagatttttataaatttcgttttattttgttttacgtttcgttttaaggtcgttttttcgattcggggtttcgttttaaggtcgttttttcgtttcgtcgtttggtggcggtcgtatgttgttcggatataaagggtcggttttatattttagggattagcgagcggttttgagaggttttggtttttgttttttaggcggttcgaggacgttatggtcgagtgttcgatattcggggaggtagttatcgattattcggatcgtttgtgggtttgggagaagttcgt

SEQ ID NO: 37680 - DNA, 520 bp, Artificial Sequence
  chemically treated genomic DNA (Homo sapiens) CpG-island No: 37680
acgaacttctcccaaacccacaaacgatccgaataatcgataactacctccccgaatatcgaacactcgaccataacgtcctcgaaccgcctaaaaaacaaaaaccaaaacctctcaaaaccgctcgctaatccctaaaatataaaaccgaccctttatatccgaacaacatacgaccgccaccaaacgacgaaacgaaaaaacgaccttaaaacgaaaccccgaatcgaaaaaacgaccttaaaacgaaacgtaaaacaaaataaaacgaaatttataaaaatcttaataacaaataaaaatcccgcgcaaacgctacgtcccgacctaacttactccctaaaacgataacaactcctaaaaacgcaaacccgaccccaactaacccgcgccttcctcgaaaccccgaccaacaacgacaccgaccgccgccctctactactactaaaaaaacaccgaaataaccttaaccctttcttcttctaaaaaacccccccgcttccctcgactaccgaaccga

SEQ ID NO: 37681 - DNA, 670 bp, Artificial Sequence
  chemically treated genomic DNA (Homo sapiens) CpG-island No: 37681
cgttagcgaggtatagcgcgattcgcgcgcgggttcggcgttattggttgaggacgtgtaggtggattcgcgtaaggattcgtatagtagtttcgagcgttttttagagtagtcgtattcgtttatggagcgcgttttcgaggtcgattacgggcgtttttgcgattataaggtggggtcgtcgttttatttggataagttgttgtggcgcgataataagtcgtattattattcggagtttaagtttattttggatttgtcgtattggaagtaggcggtcggcgcgttttttacggttacggggttggcggatacgggggcgcgcgaggacgagtcggttagtttttttttggagatcgcgtagtgggttaagagtacgtagggcggtttagagtacgttagttcgttcgtcgacgatttcgagcgtcgtttgtttgtttcgtttttcggtcgttcggtttcggtggacggcggcgttagtttttagttcgatttggacgtgtttatttttcgcgttttgaagttttgtattaagttcgaggatttgtcggataataaattgggcgattttaatggtgcgtgtattttcgagtattttggcgatttcgtgtagatcgaggttttttttaaagaaaggtggtgagggcggaggggtcgttttaggttttat

SEQ ID NO: 37682 - DNA, 670 bp, Artificial Sequence
  chemically treated genomic DNA (Homo sapiens) CpG-island No: 37682
ataaaacctaaaacgacccctccgccctcaccacctttctttaaaaaaaacctcgatctacacgaaatcgccaaaatactcgaaaatacacgcaccattaaaatcgcccaatttattatccgacaaatcctcgaacttaatacaaaacttcaaaacgcgaaaaataaacacgtccaaatcgaactaaaaactaacgccgccgtccaccgaaaccgaacgaccgaaaaacgaaacaaacaaacgacgctcgaaatcgtcgacgaacgaactaacgtactctaaaccgccctacgtactcttaacccactacgcgatctccaaaaaaaaactaaccgactcgtcctcgcgcgcccccgtatccgccaaccccgtaaccgtaaaaaacgcgccgaccgcctacttccaatacgacaaatccaaaataaacttaaactccgaataataatacgacttattatcgcgccacaacaacttatccaaataaaacgacgaccccaccttataatcgcaaaaacgcccgtaatcgacctcgaaaacgcgctccataaacgaatacgactactctaaaaaacgctcgaaactactatacgaatccttacgcgaatccacctacacgtcctcaaccaataacgccgaacccgcgcgcgaatcgcgctatacctcgctaacg

SEQ ID NO: 37683 - DNA, 670 bp, Artificial Sequence
  chemically treated genomic DNA (Homo sapiens) CpG-island No: 37683
gtggggtttggagcggttttttcgtttttattatttttttttggagaaggtttcggtttgtacgaggtcgttagggtgttcggggatgtacgtattattgaggtcgtttagtttattgttcggtaggttttcgggtttggtgtagagttttagggcgcgggagatgaatacgtttaggtcgaattgggggttggcgtcgtcgtttatcggggtcgggcggtcggggggcgaggtagataagcggcgttcggggtcgtcggcgggcgggttggcgtgttttgggtcgttttgcgtgtttttgatttattgcgcgatttttaggaagaggttggtcggttcgttttcgcgcgttttcgtgttcgttagtttcgtggtcgtggggggcgcgtcggtcgtttgtttttagtgcgataggtttaggatgagtttgggtttcgagtagtggtgcggtttgttgtcgcgttatagtagtttgtttaggtaggacggcgattttattttgtagtcgtaggagcgttcgtagtcggtttcgaaggcgcgttttatggacgagtgcgattgttttaggaagcgttcggagttgttgtgcgagtttttgcgcgggtttatttgtacgtttttagttagtggcgtcgaattcgcgcgcgggtcgcgttgtatttcgttggcg

SEQ ID NO: 37684 - DNA, 670 bp, Artificial Sequence
  chemically treated genomic DNA (Homo sapiens) CpG-island No: 37684
cgccaacgaaatacaacgcgacccgcgcgcgaattcgacgccactaactaaaaacgtacaaataaacccgcgcaaaaactcgcacaacaactccgaacgcttcctaaaacaatcgcactcgtccataaaacgcgccttcgaaaccgactacgaacgctcctacgactacaaaataaaatcgccgtcctacctaaacaaactactataacgcgacaacaaaccgcaccactactcgaaacccaaactcatcctaaacctatcgcactaaaaacaaacgaccgacgcgccccccacgaccacgaaactaacgaacacgaaaacgcgcgaaaacgaaccgaccaacctcttcctaaaaatcgcgcaataaatcaaaaacacgcaaaacgacccaaaacacgccaacccgcccgccgacgaccccgaacgccgcttatctacctcgccccccgaccgcccgaccccgataaacgacgacgccaacccccaattcgacctaaacgtattcatctcccgcgccctaaaactctacaccaaacccgaaaacctaccgaacaataaactaaacgacctcaataatacgtacatccccgaacaccctaacgacctcgtacaaaccgaaaccttctccaaaaaaaaataataaaaacgaaaaaaccgctccaaaccccac

SEQ ID NO: 37685 - DNA, 681 bp, Artificial Sequence
  chemically treated genomic DNA (Homo sapiens) CpG-island No: 37685
gtagtcgggtatcgtcggtttgtgggcgatatttttttagcgttatcgttatttgagagcgtaaatttataattcgtttttgtttcgggaataacgttaagaattgttttttcgtttgggtgcggttttgcgttatttgttcgttgacgttttataacgttacgtttcgttttattgttagcgtaattagaattagtaatatcggtagaattattattcgttagcgcgtttattgttttcggtagttgacgcgaggttgttacggttttgttagtaggttttttttcggttcgttataagtggtaatggcgggtagagttgtaacggttaggcgtttagcgtttgcgttagtttatgttgatagttttttcggtgtaatgtcgattacggttagcgaaagcggtaaattttgtttattgagttgggcgcggaatatgatcggagttagcgttagttcggcgttttattttcggtatttatcgatgcggtagataattcgttgcgtatcgtaagttataaatttataaggaatggatatttagttcggcgcgacggtagcgcgggtgatgtcgtttttttgtaattattgcgtaatgttgcgtatatgttgttggtgaattattgttacggttgttagttgttggtcgatatttaacggggcgaaatgtagtttatcgatat

SEQ ID NO: 37686 - DNA, 681 bp, Artificial Sequence
  chemically treated genomic DNA (Homo sapiens) CpG-island No: 37686
atatcgataaactacatttcgccccgttaaatatcgaccaacaactaacaaccgtaacaataattcaccaacaacatatacgcaacattacgcaataattacaaaaaaacgacatcacccgcgctaccgtcgcgccgaactaaatatccattccttataaatttataacttacgatacgcaacgaattatctaccgcatcgataaataccgaaaataaaacgccgaactaacgctaactccgatcatattccgcgcccaactcaataaacaaaatttaccgctttcgctaaccgtaatcgacattacaccgaaaaaactatcaacataaactaacgcaaacgctaaacgcctaaccgttacaactctacccgccattaccacttataacgaaccgaaaaaaaacctactaacaaaaccgtaacaacctcgcgtcaactaccgaaaacaataaacgcgctaacgaataataattctaccgatattactaattctaattacgctaacaataaaacgaaacgtaacgttataaaacgtcaacgaacaaataacgcaaaaccgcacccaaacgaaaaaacaattcttaacgttattcccgaaacaaaaacgaattataaatttacgctctcaaataacgataacgctaaaaaaatatcgcccacaaaccgacgatacccgactac

SEQ ID NO: 37687 - DNA, 681 bp, Artificial Sequence
  chemically treated genomic DNA (Homo sapiens) CpG-island No: 37687
atatcgatgaattgtatttcgtttcgttgaatatcgattagtaattggtaatcgtagtagtgatttattaatagtatatgcgtaatattgcgtagtggttgtaggaaaacggtattattcgcgttatcgtcgcgtcggattggatgtttattttttgtgggtttatggtttgcgatgcgtaacgggttatttgtcgtatcgatgaatgtcggggatggagcgtcgggttggcgttggtttcggttatgtttcgcgtttagtttaatgagtaggatttatcgttttcgttaatcgtagtcggtattgtatcggaaaagttattagtatgggttggcgtagacgttgaacgtttgatcgttatagttttgttcgttattattatttatggcgaatcggaagggaatttgttgatagggtcgtggtagtttcgcgttagttatcgaaaatagtgggcgcgttggcgggtgatgattttgtcgatattgttgattttggttgcgttggtagtggagcggggcgtgacgttatggagcgttagcgaataggtggcgtaaagtcgtatttaggcggaggaatagtttttaacgttgttttcggagtagaagcggattgtgaatttacgtttttaggtgacgatggcgttgaaaaaatatcgtttataggtcgacgatattcggttgt

SEQ ID NO: 37688 - DNA, 681 bp, Artificial Sequence
  chemically treated genomic DNA (Homo sapiens) CpG-island No: 37688
acaaccgaatatcgtcgacctataaacgatattttttcaacgccatcgtcacctaaaaacgtaaattcacaatccgcttctactccgaaaacaacgttaaaaactattcctccgcctaaatacgactttacgccacctattcgctaacgctccataacgtcacgccccgctccactaccaacgcaaccaaaatcaacaatatcgacaaaatcatcacccgccaacgcgcccactattttcgataactaacgcgaaactaccacgaccctatcaacaaattcccttccgattcgccataaataataataacgaacaaaactataacgatcaaacgttcaacgtctacgccaacccatactaataacttttccgatacaataccgactacgattaacgaaaacgataaatcctactcattaaactaaacgcgaaacataaccgaaaccaacgccaacccgacgctccatccccgacattcatcgatacgacaaataacccgttacgcatcgcaaaccataaacccacaaaaaataaacatccaatccgacgcgacgataacgcgaataataccgttttcctacaaccactacgcaatattacgcatatactattaataaatcactactacgattaccaattactaatcgatattcaacgaaacgaaatacaattcatcgatat

SEQ ID NO: 37689 - DNA, 1215 bp, Artificial Sequence
  chemically treated genomic DNA (Homo sapiens) CpG-island No: 37689
  unsure (31)
gtggagggagggggtcgggagcggacggtgncggtgggtaattattgtttttagcgttaagttttgtgtcgtcgtcgtcgtttaggcgtttgggggtcggtggggcggcgcgggcgggggtcgttgcgcgggcggcgagtttttgttttgtttttttttttttttgtggagcggttcgggttgttggggaggtttcggtttttttcggacgttcggttaacggcggcggttagttcgcggttttgttgagagggaaaaggacgtcgcggtttttttaggcgtcgcggagagtaggtaagagcgcgggtagtcgaggttggtgagagggagcgcgaagggcgcggcgataaagtttggttgtttcgattgtcgtcgttttttttcgcgttttcgtttcgcgtttgtgttgtttgtttcggggtttgcggaggggtttttcggcggttgcggcggtgatatcggtcgggggttgggggaagggggttgagtgtttttaggtaacggtcgcggagcgggatttggagaaaggggaaggcgcgttgcgtttcgttcgcggggagcggggcgcggggtagggttgagggaagaggttatagatttcggcgggggggatgggtcgagcgtagttggttttttcgtgtttatatttttgcgcgagttatttttgtcgagaagcggattgaattgattcgttttatttcgcggggaggttagggcgggggttcggtttcggaggaagcgcgttttgggagggtttgtgtagggcgggagtttgcggtcggcgtcggggttgggcggcgagttcggggcgggatttgggaggtttcggtcgttttgggtggcgggtaggcgggggggggcgttggatattagtttttttttttgtcgtgttttatcgtcgtcgtttatttttttttttcggcgttgttagtttgtacgataggttgtattcggtagtttttttattttcgttttttacgtcggtatcgtgttgttatttttttttatttttcgggaggtagggaggttttgttcggatcggaatttgttttttaagtaaaataaaaacgggttcgtaataggtacgtttagtgatcgttttttggattttcgcgaacgtggtttttagggatcgcgcgacgggatggtttaggggcgcggaaggaggatagggagggttttgttagggttggatgttgattttattttaggagt

SEQ ID NO: 37690 - DNA, 1215 bp, Artificial Sequence
  chemically treated genomic DNA (Homo sapiens) CpG-island No: 37690
  unsure (1185)
actcctaaaataaaatcaacatccaaccctaacaaaaccctccctatcctccttccgcgcccctaaaccatcccgtcgcgcgatccctaaaaaccacgttcgcgaaaatccaaaaaacgatcactaaacgtacctattacgaacccgtttttattttacttaaaaaacaaattccgatccgaacaaaacctccctacctcccgaaaaataaaaaaaaataacaacacgataccgacgtaaaaaacgaaaataaaaaaactaccgaatacaacctatcgtacaaactaacaacgccgaaaaaaaaaaataaacgacgacgataaaacacgacaaaaaaaaaaactaatatccaacgcccccccccgcctacccgccacccaaaacgaccgaaacctcccaaatcccgccccgaactcgccgcccaaccccgacgccgaccgcaaactcccgccctacacaaaccctcccaaaacgcgcttcctccgaaaccgaacccccgccctaacctccccgcgaaataaaacgaatcaattcaatccgcttctcgacaaaaataactcgcgcaaaaatataaacacgaaaaaaccaactacgctcgacccatcccccccgccgaaatctataacctcttccctcaaccctaccccgcgccccgctccccgcgaacgaaacgcaacgcgccttcccctttctccaaatcccgctccgcgaccgttacctaaaaacactcaacccccttcccccaacccccgaccgatatcaccgccgcaaccgccgaaaaacccctccgcaaaccccgaaacaaacaacacaaacgcgaaacgaaaacgcgaaaaaaaacgacgacaatcgaaacaaccaaactttatcgccgcgcccttcgcgctccctctcaccaacctcgactacccgcgctcttacctactctccgcgacgcctaaaaaaaccgcgacgtccttttccctctcaacaaaaccgcgaactaaccgccgccgttaaccgaacgtccgaaaaaaaccgaaacctccccaacaacccgaaccgctccacaaaaaaaaaaaaaaacaaaacaaaaactcgccgcccgcgcaacgacccccgcccgcgccgccccaccgacccccaaacgcctaaacgacgacgacgacacaaaacttaacgctaaaaacaataattacccaccgncaccgtccgctcccgaccccctccctccac

SEQ ID NO: 37691 - DNA, 1215 bp, Artificial Sequence
  chemically treated genomic DNA (Homo sapiens) CpG-island No: 37691
  unsure (1185)
gtttttggggtagagttagtatttagttttggtagagttttttttgtttttttttcgcgtttttagattatttcgtcgcgcggtttttgaggattacgttcgcgaggatttagaaggcggttattggacgtgtttgttacgagttcgtttttgttttgtttaagaaatagatttcgattcgagtaaagtttttttatttttcggggaatagggggagatggtagtacggtgtcggcgtggagagcgagaataaaagaattgtcgagtataatttgtcgtgtaagttagtagcgtcgggaaggaaaggtaagcggcggcgataaggtacgatagggaaggaaattggtgtttagcgttttttttcgtttgttcgttatttagagcggtcggagttttttaggtttcgtttcgagttcgtcgtttagtttcggcgtcggtcgtagattttcgttttatataaatttttttaggacgcgtttttttcggagtcggattttcgttttggttttttcgcgggatgaggcgggttagtttagttcgtttttcggtagaggtgattcgcgtagagatgtaaatacggagagattagttgcgttcggtttatttttttcgtcggggtttgtaatttttttttttagttttgtttcgcgtttcgtttttcgcgggcgaggcgtagcgcgtttttttttttttttaagtttcgtttcgcgatcgttgtttggggatatttagttttttttttttagttttcggtcggtgttatcgtcgtagtcgtcggaaaattttttcgtaaatttcgaagtaaataatataagcgcggggcgggggcgcggagggaggcggcggtagtcgggatagttaggttttatcgtcgcgtttttcgcgtttttttttattagtttcggttgttcgcgtttttatttgtttttcgcgacgtttgggaagatcgcggcgttttttttttttttagtagggtcgcggattagtcgtcgtcgttggtcgagcgttcggagggagtcggggtttttttagtagttcgagtcgttttatagggagagaaggagataaaatagaggttcgtcgttcgcgtagcgattttcgttcgcgtcgttttatcgatttttaaacgtttaggcgacggcggcgatatagagtttggcgttgggagtaatggttgtttatcgntatcgttcgttttcggttttttttttttat

SEQ ID NO: 37692 - DNA, 1215 bp, Artificial Sequence
  chemically treated genomic DNA (Homo sapiens) CpG-island No: 37692
  unsure (31)
ataaaaaaaaaaaaccgaaaacgaacgatancgataaacaaccattactcccaacgccaaactctatatcgccgccgtcgcctaaacgtttaaaaatcgataaaacgacgcgaacgaaaatcgctacgcgaacgacgaacctctattttatctccttctctccctataaaacgactcgaactactaaaaaaaccccgactccctccgaacgctcgaccaacgacgacgactaatccgcgaccctactaaaaaaaaaaaaaacgccgcgatcttcccaaacgtcgcgaaaaacaaataaaaacgcgaacaaccgaaactaataaaaaaaaacgcgaaaaacgcgacgataaaacctaactatcccgactaccgccgcctccctccgcgcccccgccccgcgcttatattatttacttcgaaatttacgaaaaaattttccgacgactacgacgataacaccgaccgaaaactaaaaaaaaaaaactaaatatccccaaacaacgatcgcgaaacgaaacttaaaaaaaaaaaaaaacgcgctacgcctcgcccgcgaaaaacgaaacgcgaaacaaaactaaaaaaaaaaattacaaaccccgacgaaaaaaataaaccgaacgcaactaatctctccgtatttacatctctacgcgaatcacctctaccgaaaaacgaactaaactaacccgcctcatcccgcgaaaaaaccaaaacgaaaatccgactccgaaaaaaacgcgtcctaaaaaaatttatataaaacgaaaatctacgaccgacgccgaaactaaacgacgaactcgaaacgaaacctaaaaaactccgaccgctctaaataacgaacaaacgaaaaaaaacgctaaacaccaatttccttccctatcgtaccttatcgccgccgcttacctttccttcccgacgctactaacttacacgacaaattatactcgacaattcttttattctcgctctccacgccgacaccgtactaccatctccccctattccccgaaaaataaaaaaactttactcgaatcgaaatctatttcttaaacaaaacaaaaacgaactcgtaacaaacacgtccaataaccgccttctaaatcctcgcgaacgtaatcctcaaaaaccgcgcgacgaaataatctaaaaacgcgaaaaaaaaacaaaaaaaactctaccaaaactaaatactaactctaccccaaaaac

SEQ ID NO: 37693 - DNA, 807 bp, Artificial Sequence
  chemically treated genomic DNA (Homo sapiens) CpG-island No: 37693
ttcggattgttattcggtggtagtattttcgttttacggttttgttattcgcgggttttcggagttttattgtaagttagggaggtgggtagtcgatacgcggcgttttagttttttagagcggttcggacggcgtttcggatttagatagtcggttgacgttattttcggatcggtttcgattggcggggagggagggtcgaacgggcgaggttgggttgtcgtgttgttcggcggcgttgaggtgagtgtgagttcggcgggggcgggcgcgcggggcgtagattttttcggcgtagatttttttttgcgcgttgtttttgtgttcggttttttcgcggtgttgtaggcgtgggttcgtttcgttattagcggtattttttgttcgagggatttttcggataaggtttcgagtacggattgcgtttcgtcgttttttgttagttttggggtcgttttttacggggtttttttcgttttcgagtttttgataatttttttgttttacgcggggttttttggatttttgtcgtatagagcggtttttgcgtttcgatgcgttttagattttttggttttagcggttcgaggttttttatttcggtttttttttacgttttttttttgttagttttttaggggcggggttcgtgcgtttcgcggtttttttagttttttgcgaatgtcgttttttttgtttttagcgttcgcgtttcgttagtgtttttttttttgtttgtgtttttttttcgttttatttttttcgtttttggcgttttaaggttttttttttcgtagttaggtagt

SEQ ID NO: 37694 - DNA, 807 bp, Artificial Sequence
  chemically treated genomic DNA (Homo sapiens) CpG-island No: 37694
actacctaactacgaaaaaaaaaaccttaaaacgccaaaaacgaaaaaaataaaacgaaaaaaaaacacaaacaaaaaaaaaaacactaacgaaacgcgaacgctaaaaacaaaaaaaacgacattcgcaaaaaactaaaaaaaccgcgaaacgcacgaaccccgcccctaaaaaactaacaaaaaaaaaacgtaaaaaaaaaccgaaataaaaaacctcgaaccgctaaaaccaaaaaatctaaaacgcatcgaaacgcaaaaaccgctctatacgacaaaaatccaaaaaaccccgcgtaaaacaaaaaaattatcaaaaactcgaaaacgaaaaaaaccccgtaaaaaacgaccccaaaactaacaaaaaacgacgaaacgcaatccgtactcgaaaccttatccgaaaaatccctcgaacaaaaaataccgctaataacgaaacgaacccacgcctacaacaccgcgaaaaaaccgaacacaaaaacaacgcgcaaaaaaaaatctacgccgaaaaaatctacgccccgcgcgcccgcccccgccgaactcacactcacctcaacgccgccgaacaacacgacaacccaacctcgcccgttcgaccctccctccccgccaatcgaaaccgatccgaaaataacgtcaaccgactatctaaatccgaaacgccgtccgaaccgctctaaaaaactaaaacgccgcgtatcgactacccacctccctaacttacaataaaactccgaaaacccgcgaataacaaaaccgtaaaacgaaaatactaccaccgaataacaatccgaa

SEQ ID NO: 37695 - DNA, 807 bp, Artificial Sequence
  chemically treated genomic DNA (Homo sapiens) CpG-island No: 37695
gttgtttggttgcgggaagaaaagttttggagcgttagaagcgaggagggtggggcggagggaaggtataagtagagggaggagtattggcggagcgcggacgttaaaggtaggaggggcggtattcgtagagggttgggaggatcgcgagacgtacgagtttcgtttttgaaaagttgataggagaggagcgtgggagggagtcgggatgggaagtttcgggtcgttgggattaaggggtttggagcgtatcgggacgtagaagtcgttttgtgcggtaggagtttaggggatttcgcgtggggtaagggagttgttaggggttcgagagcggaaggagtttcgtgaggagcgattttagggttggtagagagcggcgaggcgtagttcgtattcggggttttgttcggggggtttttcgaataggaagtgtcgttgatggcgggacggatttacgtttgtagtatcgcgagaggatcgggtataggggtaacgcgtaggggagggtttgcgtcgggagggtttgcgtttcgcgcgttcgttttcgtcgggtttatatttattttagcgtcgtcgagtagtacggtagtttaatttcgttcgttcggtttttttttttcgttaatcggaatcgattcggaagtgacgttagtcgattgtttgggttcgaggcgtcgttcgggtcgttttgggaagttagaacgtcgcgtgtcggttgtttatttttttggtttgtagtaaggtttcggggattcgcgaatggtaaagtcgtaaagcgggaatgttgttatcgggtggtagttcgaa

SEQ ID NO: 37696 - DNA, 807 bp, Artificial Sequence
  chemically treated genomic DNA (Homo sapiens) CpG-island No: 37696
ttcgaactaccacccgataacaacattcccgctttacgactttaccattcgcgaatccccgaaaccttactacaaaccaaaaaaataaacaaccgacacgcgacgttctaacttcccaaaacgacccgaacgacgcctcgaacccaaacaatcgactaacgtcacttccgaatcgattccgattaacgaaaaaaaaaaaccgaacgaacgaaattaaactaccgtactactcgacgacgctaaaataaatataaacccgacgaaaacgaacgcgcgaaacgcaaaccctcccgacgcaaaccctcccctacgcgttacccctatacccgatcctctcgcgatactacaaacgtaaatccgtcccgccatcaacgacacttcctattcgaaaaaccccccgaacaaaaccccgaatacgaactacgcctcgccgctctctaccaaccctaaaatcgctcctcacgaaactccttccgctctcgaacccctaacaactcccttaccccacgcgaaatcccctaaactcctaccgcacaaaacgacttctacgtcccgatacgctccaaaccccttaatcccaacgacccgaaacttcccatcccgactccctcccacgctcctctcctatcaacttttcaaaaacgaaactcgtacgtctcgcgatcctcccaaccctctacgaataccgcccctcctacctttaacgtccgcgctccgccaatactcctccctctacttataccttccctccgccccaccctcctcgcttctaacgctccaaaacttttcttcccgcaaccaaacaac

SEQ ID NO: 37697 - DNA, 751 bp, Artificial Sequence
  chemically treated genomic DNA (Homo sapiens) CpG-island No: 37697
cgtaggcgcggtatcggtatggtttttcgtcgttgtggagtcggtagtgttcgtttagcgtgtagtttttgcggaacgttttgtcgtattcggtgtacgcgaagggtttttttttggtgtggattttttggtgtagagtgaggttggatttgcgatcgaaggttttgtcgtatttcgcgtattcgaacggtttttcgttcgtgtgtaggcgtaggtgtagtagtagtagggagttgtgtcggaacggtttttcgtatatcgggtattcgtggggcgggtttttcgtttggggtttttgcgtagtttcgagtagggcgttttgtttcgcgtcgtcgttttgggtatttttttgcgcgtgtagtcggtggtgttttaggagcgaggattttcggatgaagcgttgtttatatcgtaggtatcggtagggtcgtttttcgttgtggatgcggtcgtgttcgttgagggtgaatttgcggtagaacgttttgtcgtattttgtgtacgcgaagggttttttttcggtgtggaatttttggtgttgtagtagtcgggagttgcggttgaaggttttgtcgtattcgtcgtatgcgtagggtcgttcgcgggtgtggacgcggtggtgggtagttagttgcgtgttttgtcggaaggttttttcgtattcgtcgtattggaacggtttttttttagtgtggattagttggtgtcgtagtaggatggagttttgtttgaaggttttttcgtattttgt

SEQ ID NO: 37698 - DNA, 751 bp, Artificial Sequence
  chemically treated genomic DNA (Homo sapiens) CpG-island No: 37698
acaaaatacgaaaaaaccttcaaacaaaactccatcctactacgacaccaactaatccacactaaaaaaaaaccgttccaatacgacgaatacgaaaaaaccttccgacaaaacacgcaactaactacccaccaccgcgtccacacccgcgaacgaccctacgcatacgacgaatacgacaaaaccttcaaccgcaactcccgactactacaacaccaaaaattccacaccgaaaaaaaacccttcgcgtacacaaaatacgacaaaacgttctaccgcaaattcaccctcaacgaacacgaccgcatccacaacgaaaaacgaccctaccgatacctacgatataaacaacgcttcatccgaaaatcctcgctcctaaaacaccaccgactacacgcgcaaaaaaatacccaaaacgacgacgcgaaacaaaacgccctactcgaaactacgcaaaaaccccaaacgaaaaacccgccccacgaatacccgatatacgaaaaaccgttccgacacaactccctactactactacacctacgcctacacacgaacgaaaaaccgttcgaatacgcgaaatacgacaaaaccttcgatcgcaaatccaacctcactctacaccaaaaaatccacaccaaaaaaaaacccttcgcgtacaccgaatacgacaaaacgttccgcaaaaactacacgctaaacgaacactaccgactccacaacgacgaaaaaccataccgataccgcgcctacg

SEQ ID NO: 37699 - DNA, 751 bp, Artificial Sequence
  chemically treated genomic DNA (Homo sapiens) CpG-island No: 37699
atagagtgcgggaaggtttttaagtaaagttttattttgttgcggtattagttgatttatattgaggagaagtcgttttagtgcggcgagtgcgggaaggtttttcggtagagtacgtagttggttgtttattatcgcgtttatattcgcgagcggttttacgtatgcggcgagtgcggtaaggtttttagtcgtagttttcggttgttgtagtattagaagttttatatcggggagaagtttttcgcgtgtatagagtgcggtaaggcgttttgtcgtaggtttatttttaacgagtacggtcgtatttatagcggggagcggttttatcggtgtttgcggtgtgggtagcgttttattcgagggttttcgtttttgaagtattatcggttgtacgcgtaggagggtgtttaggacggcggcgcggggtagggcgttttgttcggagttgcgtagaggttttaggcgggggattcgttttacgagtgttcggtgtgcgggaggtcgtttcgatataattttttgttgttgttgtatttgcgtttatatacgggcgagaagtcgttcgagtgcgcggagtgcggtaaggttttcggtcgtaagtttaattttattttgtattagaagatttatattaaggagaagtttttcgcgtgtatcgagtgcggtaaggcgtttcgtaggagttatacgttgaacgagtattatcggttttatagcggcgagaggttatatcggtgtcgcgtttgcg

SEQ ID NO: 37700 - DNA, 751 bp, Artificial Sequence
  chemically treated genomic DNA (Homo sapiens) CpG-island No: 37700
cgcaaacgcgacaccgatataacctctcgccgctataaaaccgataatactcgttcaacgtataactcctacgaaacgccttaccgcactcgatacacgcgaaaaacttctccttaatataaatcttctaatacaaaataaaattaaacttacgaccgaaaaccttaccgcactccgcgcactcgaacgacttctcgcccgtatataaacgcaaatacaacaacaacaaaaaattatatcgaaacgacctcccgcacaccgaacactcgtaaaacgaatcccccgcctaaaacctctacgcaactccgaacaaaacgccctaccccgcgccgccgtcctaaacaccctcctacgcgtacaaccgataatacttcaaaaacgaaaaccctcgaataaaacgctacccacaccgcaaacaccgataaaaccgctccccgctataaatacgaccgtactcgttaaaaataaacctacgacaaaacgccttaccgcactctatacacgcgaaaaacttctccccgatataaaacttctaatactacaacaaccgaaaactacgactaaaaaccttaccgcactcgccgcatacgtaaaaccgctcgcgaatataaacgcgataataaacaaccaactacgtactctaccgaaaaaccttcccgcactcgccgcactaaaacgacttctcctcaatataaatcaactaataccgcaacaaaataaaactttacttaaaaaccttcccgcactctat

SEQ ID NO: 37701 - DNA, 730 bp, Artificial Sequence
  chemically treated genomic DNA (Homo sapiens) CpG-island No: 37701
atttttgcgtaatcgttcggttcggcggagcgggtttcgggggttcggtcgtacgttttcgattatagttagtatggatcggggcgtagggtttttcgtttcgataagggttcggaatttaaggcgagcggaggcgatagtgacggttgcgggttcgttttttgtcgagtttcgcgcgtttattgcgggggttatagtttttattaggtcgggttcggaggatcgcgttttttttagttttcgtttcgcggtcgcggtcgatttattttgggtcgtcgagatagcgcggggaggagcgtacggcgttcggtttttaggtttcggtttttttttcgttttcggaaacggtcgttgcgtcgttttgggaggtttggaggatcgcgcgtttcgatggcgttcgcgtttcgacggtttttagtttttgcggcgcggcggtcgttagggttttagttaggggcgcgtttggggggtttcgggttagatcgggtattagttttaggttcgacgggcgcggaagggcgtcgacgttttcggcgtttcgtttttttcgggatcggaggtagcgaacgtttattttttgcgtttattttttgttttcgggtggtttgcgggggttggggagtacggtgcgggatcgattttcggattcgtaggaagggcggagcgggggcgttcggttagggtcggttttatataaatttatgatattgtttagtatgatttttttttt

SEQ ID NO: 37702 - DNA, 730 bp, Artificial Sequence
  chemically treated genomic DNA (Homo sapiens) CpG-island No: 37702
aaaaaaaaaatcatactaaacaatatcataaatttatataaaaccgaccctaaccgaacgcccccgctccgcccttcctacgaatccgaaaatcgatcccgcaccgtactccccaacccccgcaaaccacccgaaaacaaaaaataaacgcaaaaaataaacgttcgctacctccgatcccgaaaaaaacgaaacgccgaaaacgtcgacgcccttccgcgcccgtcgaacctaaaactaatacccgatctaacccgaaaccccccaaacgcgcccctaactaaaaccctaacgaccgccgcgccgcaaaaactaaaaaccgtcgaaacgcgaacgccatcgaaacgcgcgatcctccaaacctcccaaaacgacgcaacgaccgtttccgaaaacgaaaaaaaaaccgaaacctaaaaaccgaacgccgtacgctcctccccgcgctatctcgacgacccaaaataaatcgaccgcgaccgcgaaacgaaaactaaaaaaaacgcgatcctccgaacccgacctaataaaaactataacccccgcaataaacgcgcgaaactcgacaaaaaacgaacccgcaaccgtcactatcgcctccgctcgccttaaattccgaacccttatcgaaacgaaaaaccctacgccccgatccatactaactataatcgaaaacgtacgaccgaacccccgaaacccgctccgccgaaccgaacgattacgcaaaaat

SEQ ID NO: 37703 - DNA, 730 bp, Artificial Sequence
  chemically treated genomic DNA (Homo sapiens) CpG-island No: 37703
aaaaaaaaagttatattaaataatgttataaatttatatgagatcgattttggtcggacgttttcgtttcgttttttttgcgggttcgggagtcgatttcgtatcgtgttttttaattttcgtaggttattcgggggtagagagtgggcgtaaggggtgaacgttcgttgttttcgatttcgggggaaacggagcgtcgagaacgtcgacgttttttcgcgttcgtcgggtttgggattgatattcggtttggttcggaattttttaggcgcgtttttagttggggttttggcgatcgtcgcgtcgtaggggttagaagtcgtcgagacgcgagcgttatcgaggcgcgcggttttttaggttttttagagcggcgtagcggtcgttttcgggggcggggaaggaatcggagtttgagagtcgggcgtcgtgcgttttttttcgcgttgtttcggcggtttagggtgagtcggtcgcggtcgcggggcggggattgggaggggcgcggtttttcgagttcggtttggtggaggttgtagttttcgtagtgggcgcgcggagttcggtagggagcggattcgtagtcgttattgtcgttttcgttcgttttgggtttcgaatttttatcggggcgaagggttttgcgtttcggtttatgttggttgtggtcgggggcgtgcggtcgggttttcgagattcgtttcgtcgagtcggacggttgcgtagagat

SEQ ID NO: 37704 - DNA, 730 bp, Artificial Sequence
  chemically treated genomic DNA (Homo sapiens) CpG-island No: 37704
atctctacgcaaccgtccgactcgacgaaacgaatctcgaaaacccgaccgcacgcccccgaccacaaccaacataaaccgaaacgcaaaacccttcgccccgataaaaattcgaaacccaaaacgaacgaaaacgacaataacgactacgaatccgctccctaccgaactccgcgcgcccactacgaaaactacaacctccaccaaaccgaactcgaaaaaccgcgcccctcccaatccccgccccgcgaccgcgaccgactcaccctaaaccgccgaaacaacgcgaaaaaaaacgcacgacgcccgactctcaaactccgattccttccccgcccccgaaaacgaccgctacgccgctctaaaaaacctaaaaaaccgcgcgcctcgataacgctcgcgtctcgacgacttctaacccctacgacgcgacgatcgccaaaaccccaactaaaaacgcgcctaaaaaattccgaaccaaaccgaatatcaatcccaaacccgacgaacgcgaaaaaacgtcgacgttctcgacgctccgtttcccccgaaatcgaaaacaacgaacgttcaccccttacgcccactctctacccccgaataacctacgaaaattaaaaaacacgatacgaaatcgactcccgaacccgcaaaaaaaacgaaacgaaaacgtccgaccaaaatcgatctcatataaatttataacattatttaatataacttttttttt

SEQ ID NO: 37705 - DNA, 658 bp, Artificial Sequence
  chemically treated genomic DNA (Homo sapiens) CpG-island No: 37705
gtcgcgtcgcggtcgttttttttcggtttttgtagttcgtcggtggttttcgcggtatttagaataggttttttttggaatggtcgtcgttttttcgcgtttttttcgcgtttttttcgtttgtttgttcgtttggcgtttttttttggttcgatattgttttatttgtttgttcgattcggggaagttatcgaggaagcgtcgaggagttgcgtagtcgtatcgagttcggaacggatttttttatagaatcgggtttagagtcggggagggggcgggttaggatgaagagggcgggtcgggtcgagttgcgtatacgtaggttttttcgttttttgcggggttttagtacgttttcgagaacgtcgggaatcggaagttagtcgcggtttcgttcggattttttcggggtcgttttgggatgattggaggtttgcgtcgtttatggtcggggagggggagagtttacggtagttgagcggagggtttggcgcggtgacgttgcgtattcgggtcgcgtcgcgttcgtttcgattttaaatttttatttgaattttaatttcgttgggttttcggttttttcgtcggttattatatatcgtgtgtttcgatttattataattattagaaagtcgtttatgaagatgttataattatt

SEQ ID NO: 37706 - DNA, 658 bp, Artificial Sequence
  chemically treated genomic DNA (Homo sapiens) CpG-island No: 37706
aataattataacatcttcataaacgactttctaataattataataaatcgaaacacacgatatataataaccgacgaaaaaaccgaaaacccaacgaaattaaaattcaaataaaaatttaaaatcgaaacgaacgcgacgcgacccgaatacgcaacgtcaccgcgccaaaccctccgctcaactaccgtaaactctccccctccccgaccataaacgacgcaaacctccaatcatcccaaaacgaccccgaaaaaatccgaacgaaaccgcgactaacttccgattcccgacgttctcgaaaacgtactaaaaccccgcaaaaaacgaaaaaacctacgtatacgcaactcgacccgacccgccctcttcatcctaacccgccccctccccgactctaaacccgattctataaaaaaatccgttccgaactcgatacgactacgcaactcctcgacgcttcctcgataacttccccgaatcgaacaaacaaataaaacaatatcgaaccaaaaaaaaacgccaaacgaacaaacaaacgaaaaaaacgcgaaaaaaacgcgaaaaaacgacgaccattccaaaaaaaacctattctaaataccgcgaaaaccaccgacgaactacaaaaaccgaaaaaaaacgaccgcgacgcgac

SEQ ID NO: 37707 - DNA, 658 bp, Artificial Sequence
  chemically treated genomic DNA (Homo sapiens) CpG-island No: 37707
gataattgtaatatttttataagcgattttttggtggttatggtgaatcgggatatacgatgtatggtgatcgacgggggagtcgggagtttagcggggttagggtttaggtgagggtttagggtcggggcgagcgcggcgcggttcggatgcgtagcgttatcgcgttagatttttcgtttagttgtcgtgggtttttttttttttcgattatagacggcgtaggtttttagttattttagagcggtttcggaagaattcgggcggaatcgcggttggttttcggttttcggcgttttcggaggcgtattgaggtttcgtagggggcggggaagtttgcgtgtgcgtagttcggttcggttcgttttttttattttagttcgtttttttttcggttttggattcggttttgtgggagggttcgtttcgggttcggtgcgattgcgtagtttttcggcgttttttcggtggttttttcgggtcgagtaaataggtggggtagtgtcggattaggaaggagcgttaagcgggtaggtaggcggggagggcgcggggagggcgcggggaggcggcggttattttaggaggagtttgttttgggtgtcgcgggagttatcgacgggttgtagaggtcgggaggaggcgatcgcggcgcggt

SEQ ID NO: 37708 - DNA, 658 bp, Artificial Sequence
  chemically treated genomic DNA (Homo sapiens) CpG-island No: 37708
accgcgccgcgatcgcctcctcccgacctctacaacccgtcgataactcccgcgacacccaaaacaaactcctcctaaaataaccgccgcctccccgcgccctccccgcgccctccccgcctacctacccgcttaacgctccttcctaatccgacactaccccacctatttactcgacccgaaaaaaccaccgaaaaaacgccgaaaaactacgcaatcgcaccgaacccgaaacgaaccctcccacaaaaccgaatccaaaaccgaaaaaaaaacgaactaaaataaaaaaaacgaaccgaaccgaactacgcacacgcaaacttccccgccccctacgaaacctcaatacgcctccgaaaacgccgaaaaccgaaaaccaaccgcgattccgcccgaattcttccgaaaccgctctaaaataactaaaaacctacgccgtctataatcgaaaaaaaaaaaaacccacgacaactaaacgaaaaatctaacgcgataacgctacgcatccgaaccgcgccgcgctcgccccgaccctaaaccctcacctaaaccctaaccccgctaaactcccgactcccccgtcgatcaccatacatcgtatatcccgattcaccataaccaccaaaaaatcgcttataaaaatattacaattatc

SEQ ID NO: 37709 - DNA, 650 bp, Artificial Sequence
  chemically treated genomic DNA (Homo sapiens) CpG-island No: 37709
acgtatttgtataatgttttcgcgtttcgtatagatgtttgtaaaggttgttaaattgatgttacgggcgagattttcgttgttttattattatcgttttcgagtagggttaaaaatcgtggcgtaatagtagtggtttgttgtatgaatttttattttcgttagtagcggttttagtattcggcggataaaattcgtagtgcggcgtcgacggtgttatcggtgtcgtcgtttattttaatacgcgaaggtttatcggttaaattatagcgcgggtagtatcgtttgtagtattagcgtataattttcggcgttatcgtatagtaaagcggtaatcgtcgtcgcgtacggtgtcgggtcggaagagtagacgttgcgattttagtttcgcgttttttacggttgtttcgtaaattttcgtcgtcgtttttatcgcggttagatgttggcgtaatagtttcggtttcgttcgttcggtacgaatgttggtgatggtaaatggttggtcggttattatcgataggtttagcgtcgagcgtaggatttgttcgttattttcgttttgtgcgttatttagcgtaattattttttttattatttatttttttacgtatattatttgacgtagggtatagataatttttattaga

SEQ ID NO: 37710 - DNA, 650 bp, Artificial Sequence
  chemically treated genomic DNA (Homo sapiens) CpG-island No: 37710
tctaataaaaattatctataccctacgtcaaataatatacgtaaaaaaataaataataaaaaaaataattacgctaaataacgcacaaaacgaaaataacgaacaaatcctacgctcgacgctaaacctatcgataataaccgaccaaccatttaccatcaccaacattcgtaccgaacgaacgaaaccgaaactattacgccaacatctaaccgcgataaaaacgacgacgaaaatttacgaaacaaccgtaaaaaacgcgaaactaaaatcgcaacgtctactcttccgacccgacaccgtacgcgacgacgattaccgctttactatacgataacgccgaaaattatacgctaatactacaaacgatactacccgcgctataatttaaccgataaaccttcgcgtattaaaataaacgacgacaccgataacaccgtcgacgccgcactacgaattttatccgccgaatactaaaaccgctactaacgaaaataaaaattcatacaacaaaccactactattacgccacgatttttaaccctactcgaaaacgataataataaaacaacgaaaatctcgcccgtaacatcaatttaacaacctttacaaacatctatacgaaacgcgaaaacattatacaaatacgt

SEQ ID NO: 37711 - DNA, 650 bp, Artificial Sequence
  chemically treated genomic DNA (Homo sapiens) CpG-island No: 37711
tttggtggaagttatttatattttgcgttaggtggtgtgcgtaaaaggataaatgatgaaaaggatgattgcgttggatggcgtatagggcgaaggtggcgggtagattttgcgttcggcgttgagtttgtcgatgataatcggttagttatttattattattagtattcgtgtcgggcgggcgaaatcggggttgttgcgttagtatttgatcgcggtaaaggcggcgacggaaatttgcggagtaatcgtggaaggcgcggagttggggtcgtagcgtttgttttttcggttcggtatcgtgcgcggcggcgattatcgttttgttatgcggtagcgtcggaagttgtacgttggtgttgtaaacggtgttgttcgcgttgtggtttgatcgatggattttcgcgtgttgaagtgagcggcggtatcgataatatcgtcggcgtcgtattgcggattttattcgtcgggtgttggagtcgttgttggcgaaaataggaatttatgtagtaaattattgttgttacgttacggtttttaattttgttcggaggcggtagtggtaggataacggaagtttcgttcgtggtattagtttaatagtttttgtaagtatttgtgcgagacgcgggaatattgtgtagatgcgt

SEQ ID NO: 37712 - DNA, 650 bp, Artificial Sequence
  chemically treated genomic DNA (Homo sapiens) CpG-island No: 37712
acgcatctacacaatattcccgcgtctcgcacaaatacttacaaaaactattaaactaataccacgaacgaaacttccgttatcctaccactaccgcctccgaacaaaattaaaaaccgtaacgtaacaacaataatttactacataaattcctattttcgccaacaacgactccaacacccgacgaataaaatccgcaatacgacgccgacgatattatcgataccgccgctcacttcaacacgcgaaaatccatcgatcaaaccacaacgcgaacaacaccgtttacaacaccaacgtacaacttccgacgctaccgcataacaaaacgataatcgccgccgcgcacgataccgaaccgaaaaaacaaacgctacgaccccaactccgcgccttccacgattactccgcaaatttccgtcgccgcctttaccgcgatcaaatactaacgcaacaaccccgatttcgcccgcccgacacgaatactaataataataaataactaaccgattatcatcgacaaactcaacgccgaacgcaaaatctacccgccaccttcgccctatacgccatccaacgcaatcatccttttcatcatttatccttttacgcacaccacctaacgcaaaatataaataacttccaccaaa

SEQ ID NO: 37713 - DNA, 618 bp, Artificial Sequence
  chemically treated genomic DNA (Homo sapiens) CpG-island No: 37713
ggcgcgaggattgcgcggtcgtcgattaatgagtggatgtattgatatttgtcgcgaagaaagtttgatatttagtgagcggcggtaagtgggtgtagtatatacgtaagcgtattcgtttttttaacgacgtttttttttatatcgcgtttaacgttttcgtatataggtcggtattcgttgagaatttttgcgcgttattagttatcgcgtttaatttttcgtcgcgatcgcggagattcgcgtgtttcgtaacggagggtaatgagttaagattttattgggagattttcgttattgatagatttcgatatgttgtagaaagtggagaacgttggagttagacgattttgtttcgtttattcgtagtttttttatcgcgcgataagtcgcgcgacgcgcgtttcgcgttatatttcgataattcggattagttggaagtttatatatagcgtttagagtttttgtatttcgtttttgatacgcgcggcgtcgaggagtttattcgtttagacgcgtcgggcgcgtcgatcgcgttacgagcgcgcgcgcggggcggtacgaattaacgttttttatcgttgaattgataatagtttagtagtattgagcgtttgt

SEQ ID NO: 37714 - DNA, 618 bp, Artificial Sequence
  chemically treated genomic DNA (Homo sapiens) CpG-island No: 37714
acaaacgctcaatactactaaactattatcaattcaacgataaaaaacgttaattcgtaccgccccgcgcgcgcgctcgtaacgcgatcgacgcgcccgacgcgtctaaacgaataaactcctcgacgccgcgcgtatcaaaaacgaaatacaaaaactctaaacgctatatataaacttccaactaatccgaattatcgaaatataacgcgaaacgcgcgtcgcgcgacttatcgcgcgataaaaaaactacgaataaacgaaacaaaatcgtctaactccaacgttctccactttctacaacatatcgaaatctatcaataacgaaaatctcccaataaaatcttaactcattaccctccgttacgaaacacgcgaatctccgcgatcgcgacgaaaaattaaacgcgataactaataacgcgcaaaaattctcaacgaataccgacctatatacgaaaacgttaaacgcgatataaaaaaaaacgtcgttaaaaaaacgaatacgcttacgtatatactacacccacttaccgccgctcactaaatatcaaactttcttcgcgacaaatatcaatacatccactcattaatcgacgaccgcgcaatcctcgcgcc

SEQ ID NO: 37715 - DNA, 618 bp, Artificial Sequence
  chemically treated genomic DNA (Homo sapiens) CpG-island No: 37715
gtagacgtttaatattgttggattgttgttagtttagcgatgggaggcgttggttcgtgtcgtttcgcgcgcgcgttcgtagcgcggtcggcgcgttcgacgcgtttgggcgggtagatttttcggcgtcgcgcgtgttaaagacggggtgtaggagttttggacgttatgtatggatttttagttgattcgaattgtcggggtgtgacgcgagacgcgcgtcgcgcggtttgtcgcgcggtgagggagttgcggatggacggggtagggtcgtttgattttaacgttttttattttttataatatatcggagtttgttaatagcggaggttttttagtgagattttggtttattatttttcgttgcggggtacgcggattttcgcggtcgcggcgggggattaggcgcggtggttggtggcgcgtaagaatttttagcgagtgtcggtttatgtgcgggagcgttaggcgcggtataggagagggcgtcgttagagggacgaatgcgtttacgtgtatgttatatttatttatcgtcgtttattagatgttagatttttttcgcggtaagtattagtatatttatttattagtcggcggtcgcgtagttttcgcgtt

SEQ ID NO: 37716 - DNA, 618 bp, Artificial Sequence
  chemically treated genomic DNA (Homo sapiens) CpG-island No: 37716
aacgcgaaaactacgcgaccgccgactaataaataaatatactaatacttaccgcgaaaaaaatctaacatctaataaacgacgataaataaatataacatacacgtaaacgcattcgtccctctaacgacgccctctcctataccgcgcctaacgctcccgcacataaaccgacactcgctaaaaattcttacgcgccaccaaccaccgcgcctaatcccccgccgcgaccgcgaaaatccgcgtaccccgcaacgaaaaataataaaccaaaatctcactaaaaaacctccgctattaacaaactccgatatattataaaaaataaaaaacgttaaaatcaaacgaccctaccccgtccatccgcaactccctcaccgcgcgacaaaccgcgcgacgcgcgtctcgcgtcacaccccgacaattcgaatcaactaaaaatccatacataacgtccaaaactcctacaccccgtctttaacacgcgcgacgccgaaaaatctacccgcccaaacgcgtcgaacgcgccgaccgcgctacgaacgcgcgcgcgaaacgacacgaaccaacgcctcccatcgctaaactaacaacaatccaacaatattaaacgtctac

SEQ ID NO: 37717 - DNA, 616 bp, Artificial Sequence
  chemically treated genomic DNA (Homo sapiens) CpG-island No: 37717
  unsure (117, 551)
gcggtattattatttcgcggggtcgtttttaggattttcgtaattatgttgtttcgtatttataggtatatgttgatatcgttattatcgttaatttaggcgtattagttcgttaantcgttggagtatagtattttcgtttaagtcgtgtattatgtttacgtatagatagagtcggtgttagcgcgaggcggagtggtgtaatttcgtattcgtatagcgttcgtagtatggtttcgtttttttataacgaagtgtagatacgtaagtcgtattcgcgacgggcggttagttgtcgatgtttatcgttttttttttacgttttcgtttcgacgcggcggtttattcgcgcgacgtttggagacgattcggcggtttcggacgcgcgggcgtcgttacggatgtgtttttcgtcgtatagcggtattcgtcgtatttcgaacgtcgtattttcgtttttgcggttttttgtcggcggagtatcgattatttcggtattttattcgcggtttcgatcgtcgtacgagtcgcgcgtcgatcgttcgtaaatnagtagataacgataatagttgaagatagttttttaggagcgcgtaggtttagttttaacggttcg

SEQ ID NO: 37718 - DNA, 616 bp, Artificial Sequence
  chemically treated genomic DNA (Homo sapiens) CpG-island No: 37718
  unsure (66, 500)
cgaaccgttaaaactaaacctacgcgctcctaaaaaactatcttcaactattatcgttatctactnatttacgaacgatcgacgcgcgactcgtacgacgatcgaaaccgcgaataaaataccgaaataatcgatactccgccgacaaaaaaccgcaaaaacgaaaatacgacgttcgaaatacgacgaataccgctatacgacgaaaaacacatccgtaacgacgcccgcgcgtccgaaaccgccgaatcgtctccaaacgtcgcgcgaataaaccgccgcgtcgaaacgaaaacgtaaaaaaaaaacgataaacatcgacaactaaccgcccgtcgcgaatacgacttacgtatctacacttcgttataaaaaaacgaaaccatactacgaacgctatacgaatacgaaattacaccactccgcctcgcgctaacaccgactctatctatacgtaaacataatacacgacttaaacgaaaatactatactccaacganttaacgaactaatacgcctaaattaacgataataacgatatcaacatatacctataaatacgaaacaacataattacgaaaatcctaaaaacgaccccgcgaaataataataccgc

SEQ ID NO: 37719 - DNA, 616 bp, Artificial Sequence
  chemically treated genomic DNA (Homo sapiens) CpG-island No: 37719
  unsure (66, 500)
cgagtcgttggagttgggtttacgcgtttttagggagttgtttttagttgttgtcgttgtttgttnatttacgagcggtcggcgcgcggttcgtacggcggtcgggatcgcgggtgaggtgtcggggtggtcggtgtttcgtcggtagaagatcgtaagggcgaaggtacgacgttcggagtgcgacgggtgtcgttgtgcggcggaggatatattcgtggcggcgttcgcgcgttcgaagtcgtcggatcgtttttaaacgtcgcgcgaatgaatcgtcgcgtcggagcgagggcgtagaggggaagcggtaggtatcggtagttagtcgttcgtcgcgagtgcggtttacgtgtttgtatttcgttgtaggagggcggggttatgttgcggacgttgtacggatgcgaagttgtattatttcgtttcgcgttgatatcggttttgtttgtgcgtggatatagtgtacggtttgagcgggggtattatgttttagcggnttggcgggttagtacgtttgaattaacgatggtggcggtgttaatatgtgtttatgaatacggagtaatatagttgcgagggttttagaggcggtttcgcgaggtaatgatatcgt

SEQ ID NO: 37720 - DNA, 616 bp, Artificial Sequence
  chemically treated genomic DNA (Homo sapiens) CpG-island No: 37720
  unsure (117, 551)
acgatatcattacctcgcgaaaccgcctctaaaaccctcgcaactatattactccgtattcataaacacatattaacaccgccaccatcgttaattcaaacgtactaacccgccaanccgctaaaacataatacccccgctcaaaccgtacactatatccacgcacaaacaaaaccgatatcaacgcgaaacgaaataatacaacttcgcatccgtacaacgtccgcaacataaccccgccctcctacaacgaaatacaaacacgtaaaccgcactcgcgacgaacgactaactaccgatacctaccgcttcccctctacgccctcgctccgacgcgacgattcattcgcgcgacgtttaaaaacgatccgacgacttcgaacgcgcgaacgccgccacgaatatatcctccgccgcacaacgacacccgtcgcactccgaacgtcgtaccttcgcccttacgatcttctaccgacgaaacaccgaccaccccgacacctcacccgcgatcccgaccgccgtacgaaccgcgcgccgaccgctcgtaaatnaacaaacaacgacaacaactaaaaacaactccctaaaaacgcgtaaacccaactccaacgactcg

SEQ ID NO: 37721 - DNA, 703 bp, Artificial Sequence
  chemically treated genomic DNA (Homo sapiens) CpG-island No: 37721
ttgcggaaggtaacgagaagtagcgcggtttagtcgtttggttcgttcgtttttagtacgtcggggatttacggttaatttcgcgttttaatttttcgttataagttttttttgtatcggtaaaaagagaaattttatttattttttcgttaatacgtcggattcgtttttggtaaacgtgagtagaaggggacgttttgtttttatttttagcggggaaaaaagaattaaacgcggaagtagcgattttgttcgggtcggagttgaggttcgggggttgggacggttcggagttttcggtatttaatttcgacggtagttttttttcgagcggggtcgcggtttcggtattgtaagcggaggtgtcgttcgttatttaagattttagagtaagagattgatcgggttttaggatttttcgtcgtcgggtcgcgcgtatcgttttttatttgtcgttgcgacgaggcggagttttcgggtttatagtttcgcggggaggcgggtttagtattcgagtttgttttttttaggatttgtttaatttttttttagttgcgtcggtttcgtagtgtagcggttcgcggagttttatataggtcgtagtcggttttttttagcggtttgtttacgtttcggagacgtttaggggaaggagagggcgcggttatatggggaatgggagttgtgttattatttttatttt

SEQ ID NO: 37722 - DNA, 703 bp, Artificial Sequence
  chemically treated genomic DNA (Homo sapiens) CpG-island No: 37722
aaaataaaaataataacacaactcccattccccatataaccgcgccctctccttcccctaaacgtctccgaaacgtaaacaaaccgctaaaaaaaaccgactacgacctatataaaactccgcgaaccgctacactacgaaaccgacgcaactaaaaaaaaattaaacaaatcctaaaaaaaacaaactcgaatactaaacccgcctccccgcgaaactataaacccgaaaactccgcctcgtcgcaacgacaaataaaaaacgatacgcgcgacccgacgacgaaaaatcctaaaacccgatcaatctcttactctaaaatcttaaataacgaacgacacctccgcttacaataccgaaaccgcgaccccgctcgaaaaaaaactaccgtcgaaattaaataccgaaaactccgaaccgtcccaacccccgaacctcaactccgacccgaacaaaatcgctacttccgcgtttaattcttttttccccgctaaaaataaaaacaaaacgtccccttctactcacgtttaccaaaaacgaatccgacgtattaacgaaaaaataaataaaatttctctttttaccgatacaaaaaaaacttataacgaaaaattaaaacgcgaaattaaccgtaaatccccgacgtactaaaaacgaacgaaccaaacgactaaaccgcgctacttctcgttaccttccgcaa

SEQ ID NO: 37723 - DNA, 703 bp, Artificial Sequence
  chemically treated genomic DNA (Homo sapiens) CpG-island No: 37723
agggtggaggtagtaatatagtttttattttttatgtagtcgcgtttttttttttttttgggcgttttcggggcgtggataggtcgttgaaaggaatcggttgcggtttgtgtgaggtttcgcgggtcgttgtattgcgaggtcgacgtagttggagagaagttaggtaggttttagggagggtaggttcgagtgttgggttcgttttttcgcgggattgtaggttcgggggtttcgtttcgtcgtagcggtaggtaggaggcggtgcgcgcggttcggcgacgggggattttgaggttcggttagttttttgttttggggttttgggtggcgggcggtattttcgtttgtagtgtcggagtcgcggtttcgttcggaaaagggttgtcgtcggagttagatgtcggggatttcgggtcgttttagttttcgggttttagtttcggttcgggtagagtcgttgttttcgcgtttggttttttttttttcgttgggagtgagaataaggcgtttttttttatttacgtttgttaaaagcgggttcgacgtgttagcggaaaagtgggtggagtttttttttttgtcggtgtagagagaatttgtggcgggaagttggggcgcggggttggtcgtaggttttcggcgtgttaagggcggacggattaggcggttgggtcgcgttgtttttcgttatttttcgtag

SEQ ID NO: 37724 - DNA, 703 bp, Artificial Sequence
  chemically treated genomic DNA (Homo sapiens) CpG-island No: 37724
ctacgaaaaataacgaaaaacaacgcgacccaaccgcctaatccgtccgcccttaacacgccgaaaacctacgaccaaccccgcgccccaacttcccgccacaaattctctctacaccgacaaaaaaaaaaactccacccacttttccgctaacacgtcgaacccgcttttaacaaacgtaaataaaaaaaaacgccttattctcactcccaacgaaaaaaaaaaaaccaaacgcgaaaacaacgactctacccgaaccgaaactaaaacccgaaaactaaaacgacccgaaatccccgacatctaactccgacgacaacccttttccgaacgaaaccgcgactccgacactacaaacgaaaataccgcccgccacccaaaaccccaaaacaaaaaactaaccgaacctcaaaatcccccgtcgccgaaccgcgcgcaccgcctcctacctaccgctacgacgaaacgaaacccccgaacctacaatcccgcgaaaaaacgaacccaacactcgaacctaccctccctaaaacctacctaacttctctccaactacgtcgacctcgcaatacaacgacccgcgaaacctcacacaaaccgcaaccgattcctttcaacgacctatccacgccccgaaaacgcccaaaaaaaaaaaaaaacgcgactacataaaaaataaaaactatattactacctccaccct

SEQ ID NO: 37725 - DNA, 981 bp, Artificial Sequence
  chemically treated genomic DNA (Homo sapiens) CpG-island No: 37725
  unsure (547)
agcgggggcgttttcgatttcggtagtttcgatgtacgcgcgttcgtacgcgtttcggatacgtttttcggttttttcgtcgcgtttttatataggcgtggtttttttgttgagcgtgttggtgttggaggcggcggttttttggttagggtttcgggggcggcgtagagggtcggggtggcgtggcgcgggcggggcgggcggtcgggtgaacgtgatcgtgacgtcgtcgttcgtttttttggggaaggcgttgtgtagcgtgaggaagtcggacgatttttcgcggtttcgttcggtattcgttcgtcgtcgttttcgtcgtcgttttcgcgttttcggtcgcgcgtcgcgaacgtttttacgggtcggtcgtcgtcgtcgcgtttcgttagtttcgcgttatcgtgtttttggaggggtcgcggttgagtgttatatggagatgttcgtggaggtaaatcgggttttcggtttcggtagacgcgtttcgacggcgacggttcgttggacgagtttagagcgggagtcggcgttaggatagttnaattgggtagacggaggatggcgagggcgttttcgtattgtcgttcgcgttttcgtcggttttgagtaggttcgagcgagattggtagtgcgtttcggttggttcgatgtagatgttgacggttagtacgtttattatttcggttaggatgaacgatagttcgtcgaagtagaaggattagtcgtacgagtagtggtttttttttttttcgtttcgtttcggttcggttcgttcgcgttggcggagatgtatacgattacgtcgatgatgttgtttaggtttgggcggggacggttagacgggagtttcgagttattttcggtttcgtttcgttttcggtttcgatttttgttcgtttgcgttagcggtttaggcgttatttttaggcggtttaggttttatttcgagtggtttagattttcgttttggatttg

SEQ ID NO: 37726 - DNA, 981 bp, Artificial Sequence
  chemically treated genomic DNA (Homo sapiens) CpG-island No: 37726
  unsure (435)
caaatccaaaacgaaaatctaaaccactcgaaataaaacctaaaccgcctaaaaataacgcctaaaccgctaacgcaaacgaacaaaaatcgaaaccgaaaacgaaacgaaaccgaaaataactcgaaactcccgtctaaccgtccccgcccaaacctaaacaacatcatcgacgtaatcgtatacatctccgccaacgcgaacgaaccgaaccgaaacgaaacgaaaaaaaaaaaaaccactactcgtacgactaatccttctacttcgacgaactatcgttcatcctaaccgaaataataaacgtactaaccgtcaacatctacatcgaaccaaccgaaacgcactaccaatctcgctcgaacctactcaaaaccgacgaaaacgcgaacgacaatacgaaaacgccctcgccatcctccgtctacccaattnaactatcctaacgccgactcccgctctaaactcgtccaacgaaccgtcgccgtcgaaacgcgtctaccgaaaccgaaaacccgatttacctccacgaacatctccatataacactcaaccgcgacccctccaaaaacacgataacgcgaaactaacgaaacgcgacgacgacgaccgacccgtaaaaacgttcgcgacgcgcgaccgaaaacgcgaaaacgacgacgaaaacgacgacgaacgaataccgaacgaaaccgcgaaaaatcgtccgacttcctcacgctacacaacgccttccccaaaaaaacgaacgacgacgtcacgatcacgttcacccgaccgcccgccccgcccgcgccacgccaccccgaccctctacgccgcccccgaaaccctaaccaaaaaaccgccgcctccaacaccaacacgctcaacaaaaaaaccacgcctatataaaaacgcgacgaaaaaaccgaaaaacgtatccgaaacgcgtacgaacgcgcgtacatcgaaactaccgaaatcgaaaacgcccccgct

SEQ ID NO: 37727 - DNA, 981 bp, Artificial Sequence
  chemically treated genomic DNA (Homo sapiens) CpG-island No: 37727
  unsure (435)
tagatttaggacgggggtttagattattcggggtggggtttagatcgtttgggggtggcgtttgggtcgttggcgtaggcgggtaggggtcggggtcgggggcggggcggggtcgggggtggttcgaggttttcgtttgatcgttttcgtttaggtttgagtaatattatcggcgtgatcgtgtatattttcgttaacgcgggcgagtcgggtcgaagcgggacgaggagaagaaaaattattattcgtacggttggtttttttatttcggcgggttgtcgtttattttggtcgaggtgataggcgtgttggtcgttaatatttatatcgagttagtcgaggcgtattgttagtttcgttcggatttgtttaaggtcggcgggggcgcgggcggtagtgcgggagcgttttcgttatttttcgtttgtttagttnagttgttttagcgtcggttttcgttttgagttcgtttagcgagtcgtcgtcgtcgggacgcgtttatcgagatcgggggttcggtttgtttttacggatatttttatgtagtatttagtcgcgatttttttaagggtacggtggcgcggggttggcggggcgcggcggcggcggtcggttcgtgggggcgttcgcggcgcgcggtcgggagcgcgggggcggcggcggaggcggcggcgggcgggtgtcgagcgggatcgcggggggtcgttcggtttttttacgttgtataacgttttttttaaggaggcgggcggcggcgttacggttacgtttattcggtcgttcgtttcgttcgcgttacgttatttcggttttttgcgtcgttttcgggattttggttaaggagtcgtcgtttttaatattaatacgtttaataggaaaattacgtttgtgtaggggcgcggcgggggagtcgaggggcgtgttcggggcgcgtgcgggcgcgcgtgtatcgaggttgtcggggtcgggggcgttttcgtt

SEQ ID NO: 37728 - DNA, 981 bp, Artificial Sequence
  chemically treated genomic DNA (Homo sapiens) CpG-island No: 37728
  unsure (547)
aacgaaaacgcccccgaccccgacaacctcgatacacgcgcgcccgcacgcgccccgaacacgcccctcgactcccccgccgcgcccctacacaaacgtaattttcctattaaacgtattaatattaaaaacgacgactccttaaccaaaatcccgaaaacgacgcaaaaaaccgaaataacgtaacgcgaacgaaacgaacgaccgaataaacgtaaccgtaacgccgccgcccgcctccttaaaaaaaacgttatacaacgtaaaaaaaccgaacgaccccccgcgatcccgctcgacacccgcccgccgccgcctccgccgccgcccccgcgctcccgaccgcgcgccgcgaacgcccccacgaaccgaccgccgccgccgcgccccgccaaccccgcgccaccgtacccttaaaaaaatcgcgactaaatactacataaaaatatccgtaaaaacaaaccgaacccccgatctcgataaacgcgtcccgacgacgacgactcgctaaacgaactcaaaacgaaaaccgacgctaaaacaactnaactaaacaaacgaaaaataacgaaaacgctcccgcactaccgcccgcgcccccgccgaccttaaacaaatccgaacgaaactaacaatacgcctcgactaactcgatataaatattaacgaccaacacgcctatcacctcgaccaaaataaacgacaacccgccgaaataaaaaaaccaaccgtacgaataataatttttcttctcctcgtcccgcttcgacccgactcgcccgcgttaacgaaaatatacacgatcacgccgataatattactcaaacctaaacgaaaacgatcaaacgaaaacctcgaaccacccccgaccccgccccgcccccgaccccgacccctacccgcctacgccaacgacccaaacgccacccccaaacgatctaaaccccaccccgaataatctaaacccccgtcctaaatcta

SEQ ID NO: 37729 - DNA, 552 bp, Artificial Sequence
  chemically treated genomic DNA (Homo sapiens) CpG-island No: 37729
tattcgtagaggttttgcggtcggcgtttttagttaggcgcgtcggatttttttttattagtgtgtatagtatcggattcggattcggttttagcgttagttttatttttttttttatcgttcgcgttatagttgggaatcgcggtttagacgtggtagcgttaacgtttttatttcgtttttgtttttttacgtagggtcgcgcgtaggcgagcggaggcggaggttaaggcgttattcgtttaggttcggagagcgaggggcggggttcggagagcgggggcgggattaggagggcgaggggcggggttcggagagcgggggcgggattaggagggcgaggggcggggtttgaggttcgagtcgcggcgtttggggcggtggtcgtcggattaaagttggtttttttcggtttttttttttcgttttttaaggttttttttatcgcgttattgtttcggtttatttgtagatacgtttatttagtagttagtttagtagcgtaagtggtgattagtgtgggtttttttgattttgagatcgaaggttcgg

SEQ ID NO: 37730 - DNA, 552 bp, Artificial Sequence
  chemically treated genomic DNA (Homo sapiens) CpG-island No: 37730
ccgaaccttcgatctcaaaatcaaaaaaacccacactaatcaccacttacgctactaaactaactactaaataaacgtatctacaaataaaccgaaacaataacgcgataaaaaaaaccttaaaaaacgaaaaaaaaaaaccgaaaaaaaccaactttaatccgacgaccaccgccccaaacgccgcgactcgaacctcaaaccccgcccctcgccctcctaatcccgcccccgctctccgaaccccgcccctcgccctcctaatcccgcccccgctctccgaaccccgcccctcgctctccgaacctaaacgaataacgccttaacctccgcctccgctcgcctacgcgcgaccctacgtaaaaaaacaaaaacgaaataaaaacgttaacgctaccacgtctaaaccgcgattcccaactataacgcgaacgataaaaaaaaaaataaaactaacgctaaaaccgaatccgaatccgatactatacacactaataaaaaaaaatccgacgcgcctaactaaaaacgccgaccgcaaaacctctacgaata

SEQ ID NO: 37731 - DNA, 552 bp, Artificial Sequence
  chemically treated genomic DNA (Homo sapiens) CpG-island No: 37731
tcgagttttcggttttaggattaaagaggtttatattggttattatttacgttgttgggttgattgttaggtagacgtatttgtagataaatcgagataatgacgcggtgggaaaggttttggggagcgaggaggaggagtcgggagaggttagttttggttcggcggttatcgttttaggcgtcgcgattcgagttttaggtttcgtttttcgtttttttggtttcgttttcgtttttcgagtttcgtttttcgtttttttggtttcgttttcgtttttcgggtttcgtttttcgtttttcgggtttgggcgggtggcgttttggttttcgttttcgttcgtttgcgcgcggttttgcgtgagggggtagaggcgaggtggaggcgttggcgttgttacgtttgggtcgcggtttttaattgtggcgcgggcggtggaggaggaggtggggttggcgttgaagtcggattcggattcggtgttgtgtatattggtgggggagagttcgacgcgtttggttaggagcgtcgatcgtagggtttttacgggtg

SEQ ID NO: 37732 - DNA, 552 bp, Artificial Sequence
  chemically treated genomic DNA (Homo sapiens) CpG-island No: 37732
cacccgtaaaaaccctacgatcgacgctcctaaccaaacgcgtcgaactctcccccaccaatatacacaacaccgaatccgaatccgacttcaacgccaaccccacctcctcctccaccgcccgcgccacaattaaaaaccgcgacccaaacgtaacaacgccaacgcctccacctcgcctctaccccctcacgcaaaaccgcgcgcaaacgaacgaaaacgaaaaccaaaacgccacccgcccaaacccgaaaaacgaaaaacgaaacccgaaaaacgaaaacgaaaccaaaaaaacgaaaaacgaaactcgaaaaacgaaaacgaaaccaaaaaaacgaaaaacgaaacctaaaactcgaatcgcgacgcctaaaacgataaccgccgaaccaaaactaacctctcccgactcctcctcctcgctccccaaaacctttcccaccgcgtcattatctcgatttatctacaaatacgtctacctaacaatcaacccaacaacgtaaataataaccaatataaacctctttaatcctaaaaccgaaaactcga

SEQ ID NO: 37733 - DNA, 530 bp, Artificial Sequence
  chemically treated genomic DNA (Homo sapiens) CpG-island No: 37733
tcgtattcgttttttatttcgtatttttagtttttcgtttttcggtttgcgtttcgggttatttcgcgggcggttttgtttgttatttttttaaacgttacggttgttttagcgttggttttcggttttttgttttttttattcgacggcgttttttttgggcgatagtttttattttttgtagttagagtgattttttagtattaaaaagcggttacgtgacgttttcgattaaaggttgtcgaatagattttattttaaatttcgtagttaggtatcgggattttggatcgcgttttttttaggttttatcgtcgtcgtttttcgtttcgttttaggagcgtttatattcgtcgcgtacgttgtttttttcgtttggatcgttcgcgtcggcgtcgattggtttagttcgtttcgtatttacgcgtgcgtttttcgagggtaggcggtttttattattatgacggttttgtatacggtgttttatttgtttagcgaagttttttttttttttttcggttagcggggtt

SEQ ID NO: 37734 - DNA, 530 bp, Artificial Sequence
  chemically treated genomic DNA (Homo sapiens) CpG-island No: 37734
aaccccgctaaccgaaaaaaaaaaaaaaaacttcgctaaacaaataaaacaccgtatacaaaaccgtcataataataaaaaccgcctaccctcgaaaaacgcacgcgtaaatacgaaacgaactaaaccaatcgacgccgacgcgaacgatccaaacgaaaaaaacaacgtacgcgacgaatataaacgctcctaaaacgaaacgaaaaacgacgacgataaaacctaaaaaaaacgcgatccaaaatcccgatacctaactacgaaatttaaaataaaatctattcgacaacctttaatcgaaaacgtcacgtaaccgctttttaatactaaaaaatcactctaactacaaaaaataaaaactatcgcccaaaaaaaacgccgtcgaataaaaaaaacaaaaaaccgaaaaccaacgctaaaacaaccgtaacgtttaaaaaaataacaaacaaaaccgcccgcgaaataacccgaaacgcaaaccgaaaaacgaaaaactaaaaatacgaaataaaaaacgaatacga

SEQ ID NO: 37735 - DNA, 530 bp, Artificial Sequence
  chemically treated genomic DNA (Homo sapiens) CpG-island No: 37735
gatttcgttggtcggagggagagggagagatttcgttgggtagatgggatatcgtgtgtagggtcgttatggtagtaggggtcgtttgttttcgggagacgtacgcgtgaatgcggagcgggttgagttagtcggcgtcggcgcgggcggtttaggcggaggaagtagcgtgcgcggcgggtgtggacgtttttggagcgaggcggggggcggcggcggtgaggtttagggagggcgcggtttagggtttcggtgtttggttgcggaatttagggtagagtttgttcggtagtttttaatcggagacgttacgtggtcgttttttaatgttgaaaaattattttggttgtagggagtggaggttgtcgtttagagagagcgtcgtcgggtgagaggagtagaaagtcggaagttaacgttggggtagtcgtggcgtttaggagagtgataggtagagtcgttcgcgaggtggttcgagacgtagatcggagggcggagggttgggggtgcgaggtagggagcgggtgcga

SEQ ID NO: 37736 - DNA, 530 bp, Artificial Sequence
  chemically treated genomic DNA (Homo sapiens) CpG-island No: 37736
tcgcacccgctccctacctcgcacccccaaccctccgccctccgatctacgtctcgaaccacctcgcgaacgactctacctatcactctcctaaacgccacgactaccccaacgttaacttccgactttctactcctctcacccgacgacgctctctctaaacgacaacctccactccctacaaccaaaataatttttcaacattaaaaaacgaccacgtaacgtctccgattaaaaactaccgaacaaactctaccctaaattccgcaaccaaacaccgaaaccctaaaccgcgccctccctaaacctcaccgccgccgccccccgcctcgctccaaaaacgtccacacccgccgcgcacgctacttcctccgcctaaaccgcccgcgccgacgccgactaactcaacccgctccgcattcacgcgtacgtctcccgaaaacaaacgacccctactaccataacgaccctacacacgatatcccatctacccaacgaaatctctccctctccctccgaccaacgaaatc

SEQ ID NO: 37737 - DNA, 1139 bp, Artificial Sequence
  chemically treated genomic DNA (Homo sapiens) CpG-island No: 37737
gggtacgcggtcgtcgttttttaggtttggacgtttaggtttaagttttaggtcggaagtatttcgcgaattcgttcgggtttgggtggaatggagttcgcgcgcggcgggcgtttttttaggaagggttaagttattttttttttatttcgagaggcgagggggcgagttcggtagaaggttttgtttatcgtagtttcgcgcggggtcgggttttgggagaggggttgtcgtggtaatcggtcgggcgttcgttagttgcggattagtttattgggtcgggcgggatgggtcgggaggagggggcgcgcgtcgcgtagatcgtcgcggagttacggtaggaggaggtaggggtcgcgggcgagtttgcgttgggtcggtcgagggaagcgcgtcgttggggtcgggggcggcggggattttacgggagcgcgcgcggcggggatttttaggggtttgcgggcggtcgggggaggttcggcggataaaggggcggagggcggagggttatggcgttttcggtattcgtcgtcgttcgttttcgagtcgcgtcgttagtcgtttcggttcgtttcggagtttttaagatgcgttttagagttcgcggagtcgtcgttcgcggggaggtagggtcgggtcgggttagggggtgtagggtcgagttggggagggaaaggggacggaggaggggacgcgcgggggagggaggaaacggttcgcgcggtttgagttttgacgggggaagcggttttgtagacgggagtttgagttttcgtttggtttcgggattgtgtagagcgcgatttaggcgtttttttcgggttcgggttgatttttaggattgagttcggacgtcgtcgtttcgcgtttcggggatttgtagaaagtcggtagattttcgttttgcgtcgtgttgggtttttcggggcgcgagtgtgagtgtgtgtgtgttcgcgcgcgcgcgtgtgtgtgcgcgtttgtgtgtttgtgtgtgagtgtgtttgtgcgagtgtgtgtgagtgtgtgcgtgcgcgtgtaagcgcggggtatcgaggcggttgagtagtcgggttttttttatagcggttagtatttgtagttttgggaaagtaagaaggtaaagatgattgaatggtttt

SEQ ID NO: 37738 - DNA, 1139 bp, Artificial Sequence
  chemically treated genomic DNA (Homo sapiens) CpG-island No: 37738
aaaaccattcaatcatctttaccttcttactttcccaaaactacaaatactaaccgctataaaaaaaacccgactactcaaccgcctcgataccccgcgcttacacgcgcacgcacacactcacacacactcgcacaaacacactcacacacaaacacacaaacgcgcacacacacgcgcgcgcgcgaacacacacacactcacactcgcgccccgaaaaacccaacacgacgcaaaacgaaaatctaccgactttctacaaatccccgaaacgcgaaacgacgacgtccgaactcaatcctaaaaatcaacccgaacccgaaaaaaacgcctaaatcgcgctctacacaatcccgaaaccaaacgaaaactcaaactcccgtctacaaaaccgcttcccccgtcaaaactcaaaccgcgcgaaccgtttcctccctcccccgcgcgtcccctcctccgtcccctttccctccccaactcgaccctacaccccctaacccgacccgaccctacctccccgcgaacgacgactccgcgaactctaaaacgcatcttaaaaactccgaaacgaaccgaaacgactaacgacgcgactcgaaaacgaacgacgacgaataccgaaaacgccataaccctccgccctccgcccctttatccgccgaacctcccccgaccgcccgcaaacccctaaaaatccccgccgcgcgcgctcccgtaaaatccccgccgcccccgaccccaacgacgcgcttccctcgaccgacccaacgcaaactcgcccgcgacccctacctcctcctaccgtaactccgcgacgatctacgcgacgcgcgccccctcctcccgacccatcccgcccgacccaataaactaatccgcaactaacgaacgcccgaccgattaccacgacaacccctctcccaaaacccgaccccgcgcgaaactacgataaacaaaaccttctaccgaactcgccccctcgcctctcgaaataaaaaaaaaataacttaacccttcctaaaaaaacgcccgccgcgcgcgaactccattccacccaaacccgaacgaattcgcgaaatacttccgacctaaaacttaaacctaaacgtccaaacctaaaaaacgacgaccgcgtaccc

SEQ ID NO: 37739 - DNA, 1139 bp, Artificial Sequence
  chemically treated genomic DNA (Homo sapiens) CpG-island No: 37739
aagattatttaattatttttatttttttgtttttttaagattgtaaatgttgatcgttgtgaggggggttcggttgtttagtcgtttcgatgtttcgcgtttgtacgcgtacgtatatatttatatatattcgtatagatatatttatatatagatatataagcgcgtatatatacgcgcgcgcgcggatatatatatatttatattcgcgtttcgagggatttagtacggcgtagggcgggggtttatcggttttttgtaggttttcgaggcgcgagacggcggcgttcgggtttagttttgggagttagttcgagttcgggaggaacgtttggatcgcgttttgtatagtttcgggattaggcgggaatttagattttcgtttgtagagtcgtttttttcgttagggtttaggtcgcgcgagtcgttttttttttttttcgcgcgttttttttttcgttttttttttttttttagttcgattttgtattttttggttcggttcggttttattttttcgcgggcggcggtttcgcgggttttggggcgtattttgggggtttcggggcgggtcgggacggttggcggcgcggttcgggggcgggcggcggcgggtgtcggggacgttatggtttttcgtttttcgtttttttgttcgtcgagtttttttcggtcgttcgtaagtttttgggggttttcgtcgcgcgcgttttcgtggggttttcgtcgttttcggttttagcggcgcgtttttttcggtcggtttagcgtaggttcgttcgcggtttttgtttttttttgtcgtggtttcgcgacgatttgcgcgacgcgcgtttttttttttcgatttatttcgttcggtttagtgagttaattcgtagttggcgggcgttcggtcggttgttacggtaattttttttttagggttcggtttcgcgcggagttgcggtaaataggattttttgtcggattcgttttttcgtttttcggggtgggggagaggtggtttaattttttttgggaggacgttcgtcgcgcgcgggttttattttatttaggttcgggcggattcgcgaggtgttttcggtttgaggtttagatttggacgtttaagtttggggaacggcggtcgcgtgttt

SEQ ID NO: 37740 - DNA, 1139 bp, Artificial Sequence
  chemically treated genomic DNA (Homo sapiens) CpG-island No: 37740
aaacacgcgaccgccgttccccaaacttaaacgtccaaatctaaacctcaaaccgaaaacacctcgcgaatccgcccgaacctaaataaaataaaacccgcgcgcgacgaacgtcctcccaaaaaaaattaaaccacctctcccccaccccgaaaaacgaaaaaacgaatccgacaaaaaatcctatttaccgcaactccgcgcgaaaccgaaccctaaaaaaaaaattaccgtaacaaccgaccgaacgcccgccaactacgaattaactcactaaaccgaacgaaataaatcgaaaaaaaaaaacgcgcgtcgcgcaaatcgtcgcgaaaccacgacaaaaaaaaacaaaaaccgcgaacgaacctacgctaaaccgaccgaaaaaaacgcgccgctaaaaccgaaaacgacgaaaaccccacgaaaacgcgcgcgacgaaaacccccaaaaacttacgaacgaccgaaaaaaactcgacgaacaaaaaaacgaaaaacgaaaaaccataacgtccccgacacccgccgccgcccgcccccgaaccgcgccgccaaccgtcccgacccgccccgaaacccccaaaatacgccccaaaacccgcgaaaccgccgcccgcgaaaaaataaaaccgaaccgaaccaaaaaatacaaaatcgaactaaaaaaaaaaaaaaaacgaaaaaaaaaacgcgcgaaaaaaaaaaaaaacgactcgcgcgacctaaaccctaacgaaaaaaacgactctacaaacgaaaatctaaattcccgcctaatcccgaaactatacaaaacgcgatccaaacgttcctcccgaactcgaactaactcccaaaactaaacccgaacgccgccgtctcgcgcctcgaaaacctacaaaaaaccgataaacccccgccctacgccgtactaaatccctcgaaacgcgaatataaatatatatatatccgcgcgcgcgcgtatatatacgcgcttatatatctatatataaatatatctatacgaatatatataaatatatacgtacgcgtacaaacgcgaaacatcgaaacgactaaacaaccgaacccccctcacaacgatcaacatttacaatcttaaaaaaacaaaaaaataaaaataattaaataatctt

SEQ ID NO: 37741 - DNA, 1395 bp, Artificial Sequence
  chemically treated genomic DNA (Homo sapiens) CpG-island No: 37741
tcgacgtaattatttcgggatggtgattaacgcgcggttgttgcgggtagagggattgaagagaatcggtggtttcgacgttggtttcgagttcgaggagttaaattaataaagagtttttcgagtcgcgaaattttttagagcggaagcgacgttttttcgtcgtcgtcgtcgcgtcgcgattttttttaagtttagggttcggtagtggattcgttgcggggtttgcggttaggacggcgtcgggttcgtagtcgggatgcgggaaataggtagaggttagaatacgagttttaaagagaagagtgggcgtttttttaaacgggtcggcgtagcggaaaaggttaattgaagtaagcgggaggtttcgtatcgaggttttgtttttcggggagtagttaggtatagcggataggggggtcgcgttttgttatcggttgagagaagtttcggtcgtcgtcgtcgttatcgttttcgtttcggggcgtcgtttttcggcggttttcgtttttttcggtcgagtagtcgattttttttttttcggttttgagacgtttggtttggttttcgtattttcggtttttttcgtacgtttttttgggggaggaagaggaggaggatatggcggcggtcggagggatcggttggtaggcgggtgggggtggcggtggggcgcgcgtttcggatgtcgtcggttagttttcgtcgtcggtagcgttttttttgcgagggttttcgcggttcggtcgttcgcggggattgcgcggttaggagattggcggttgagaagcgcggacggattgaggggggcgtttcgggaggaagttttggagcggtcgttttttttaattatcgagttaatatttagtttttttttttttttttttcgttttcgttttttgttcggaggagcgaatttaaggatggggacgtaatcgtggttttcggttttttttttttttttaagtcgtttttagtcgcgtaggtcgagttttcgttttcgttttcgcggtcgtcgcgtaggatcgaatttagtcgtagtttgcgggaagcgtttttttcggttcgggttttgttttttattggtaggggcgggaaagtcgatcgggttttttattggttgtgagggtcgttcgttaaaagtcgttcgttgttcgattttattttttttttcgcgttttttgaattcgtcgcggttttgggaggttcggcgcgtaaggcgcgtcgtttgggagtagttgcgattcgtaatcgttggcgttatgcggtttttattcgaggttaggcgtggagtgaatacggacgagcgacgagaagtgcggagaggttagggttgcgggtgttaatcgttttgtcgttaatttaaatgttttttattattttttaaaaagagaa

SEQ ID NO: 37742 - DNA, 1395 bp, Artificial Sequence
  chemically treated genomic DNA (Homo sapiens) CpG-island No: 37742
ttctctttttaaaaaataataaaaaacatttaaattaacgacaaaacgattaacacccgcaaccctaacctctccgcacttctcgtcgctcgtccgtattcactccacgcctaacctcgaataaaaaccgcataacgccaacgattacgaatcgcaactactcccaaacgacgcgccttacgcgccgaacctcccaaaaccgcgacgaattcaaaaaacgcgaaaaaaaaaataaaatcgaacaacgaacgacttttaacgaacgaccctcacaaccaataaaaaacccgatcgactttcccgcccctaccaataaaaaacaaaacccgaaccgaaaaaaacgcttcccgcaaactacgactaaattcgatcctacgcgacgaccgcgaaaacgaaaacgaaaactcgacctacgcgactaaaaacgacttaaaaaaaaaaaaaaaaccgaaaaccacgattacgtccccatccttaaattcgctcctccgaacaaaaaacgaaaacgaaaaaaaaaaaaaaaaaaactaaatattaactcgataattaaaaaaaacgaccgctccaaaacttcctcccgaaacgcccccctcaatccgtccgcgcttctcaaccgccaatctcctaaccgcgcaatccccgcgaacgaccgaaccgcgaaaaccctcgcaaaaaaaacgctaccgacgacgaaaactaaccgacgacatccgaaacgcgcgccccaccgccacccccacccgcctaccaaccgatccctccgaccgccgccatatcctcctcctcttcctcccccaaaaaaacgtacgaaaaaaaccgaaaatacgaaaaccaaaccaaacgtctcaaaaccgaaaaaaaaaaaatcgactactcgaccgaaaaaaacgaaaaccgccgaaaaacgacgccccgaaacgaaaacgataacgacgacgacgaccgaaacttctctcaaccgataacaaaacgcgacccccctatccgctatacctaactactccccgaaaaacaaaacctcgatacgaaacctcccgcttacttcaattaaccttttccgctacgccgacccgtttaaaaaaacgcccactcttctctttaaaactcgtattctaacctctacctatttcccgcatcccgactacgaacccgacgccgtcctaaccgcaaaccccgcaacgaatccactaccgaaccctaaacttaaaaaaaatcgcgacgcgacgacgacgacgaaaaaacgtcgcttccgctctaaaaaatttcgcgactcgaaaaactctttattaatttaactcctcgaactcgaaaccaacgtcgaaaccaccgattctcttcaatccctctacccgcaacaaccgcgcgttaatcaccatcccgaaataattacgtcga

SEQ ID NO: 37743 - DNA, 1395 bp, Artificial Sequence
  chemically treated genomic DNA (Homo sapiens) CpG-island No: 37743
ttttttttttaagaggtgataaaaagtatttaaattagcggtagggcggttaatattcgtagttttagttttttcgtatttttcgtcgttcgttcgtgtttattttacgtttggtttcgggtaggagtcgtatagcgttaacggttgcgggtcgtaattatttttaggcggcgcgttttgcgcgtcgggttttttaggatcgcggcgagtttagaaggcgcggggagagaagtgaggtcgagtagcgggcggtttttgacgaacggtttttatagttaatgggaagttcggtcgattttttcgtttttgttaatagggagtagaattcgggtcggggggggcgtttttcgtaggttgcggttggattcgattttgcgcgacggtcgcgaaggcgggggcggaggttcggtttgcgcggttgggagcggtttaggggaggagggaagatcggaagttacggttgcgtttttatttttagattcgttttttcgggtagggagcggagacggaggaggaggagggagaggttgaatgttggttcggtaattgagaggagcggtcgttttagagttttttttcggggcgttttttttagttcgttcgcgttttttagtcgttagttttttggtcgcgtagttttcgcggacggtcgggtcgcggagattttcgtagaagaggcgttgtcggcggcgaggattggtcggcggtattcgaggcgcgcgttttatcgttatttttattcgtttgttagtcggttttttcggtcgtcgttatgtttttttttttttttttttttagggagacgtacgaggaggatcgggagtacgagagttaggttaagcgttttaagatcgaggagggggagatcgattattcggtcgaggaaggcgagaatcgtcgggaagcgacgtttcggggcgggggcgatggcggcggcggcggtcggagttttttttagtcggtaataaagcgcggtttttttgttcgttgtgtttggttgtttttcgggaagtagggtttcggtgcggggtttttcgtttgttttagttagtttttttcgttgcgtcgattcgtttggggaagcgtttatttttttttttggggttcgtattttggtttttatttgtttttcgtatttcgattgcgaattcggcgtcgttttggtcgtaggtttcgtagcgagtttattgtcgggttttgaatttggggagggtcgcggcgcggcggcggcggcggggaggcgtcgttttcgttttggggggtttcgcggttcggggagttttttgttagtttaatttttcgggttcggggttagcgtcgggattatcggttttttttagtttttttgttcgtagtagtcgcgcgttggttattatttcgggatggttgcgtcgg

SEQ ID NO: 37744 - DNA, 1395 bp, Artificial Sequence
  chemically treated genomic DNA (Homo sapiens) CpG-island No: 37744
ccgacgcaaccatcccgaaataataaccaacgcgcgactactacgaacaaaaaaactaaaaaaaaccgataatcccgacgctaaccccgaacccgaaaaattaaactaacaaaaaactccccgaaccgcgaaaccccccaaaacgaaaacgacgcctccccgccgccgccgccgcgccgcgaccctccccaaattcaaaacccgacaataaactcgctacgaaacctacgaccaaaacgacgccgaattcgcaatcgaaatacgaaaaacaaataaaaaccaaaatacgaaccccaaaaaaaaaaataaacgcttccccaaacgaatcgacgcaacgaaaaaaactaactaaaacaaacgaaaaaccccgcaccgaaaccctacttcccgaaaaacaaccaaacacaacgaacaaaaaaaccgcgctttattaccgactaaaaaaaactccgaccgccgccgccgccatcgcccccgccccgaaacgtcgcttcccgacgattctcgccttcctcgaccgaataatcgatctccccctcctcgatcttaaaacgcttaacctaactctcgtactcccgatcctcctcgtacgtctccctaaaaaaaaaaaaaaaaaaaaacataacgacgaccgaaaaaaccgactaacaaacgaataaaaataacgataaaacgcgcgcctcgaataccgccgaccaatcctcgccgccgacaacgcctcttctacgaaaatctccgcgacccgaccgtccgcgaaaactacgcgaccaaaaaactaacgactaaaaaacgcgaacgaactaaaaaaaacgccccgaaaaaaaactctaaaacgaccgctcctctcaattaccgaaccaacattcaacctctccctcctcctcctccgtctccgctccctacccgaaaaaacgaatctaaaaataaaaacgcaaccgtaacttccgatcttccctcctcccctaaaccgctcccaaccgcgcaaaccgaacctccgcccccgccttcgcgaccgtcgcgcaaaatcgaatccaaccgcaacctacgaaaaacgccccccccgacccgaattctactccctattaacaaaaacgaaaaaatcgaccgaacttcccattaactataaaaaccgttcgtcaaaaaccgcccgctactcgacctcacttctctccccgcgccttctaaactcgccgcgatcctaaaaaacccgacgcgcaaaacgcgccgcctaaaaataattacgacccgcaaccgttaacgctatacgactcctacccgaaaccaaacgtaaaataaacacgaacgaacgacgaaaaatacgaaaaaactaaaactacgaatattaaccgccctaccgctaatttaaatactttttatcacctcttaaaaaaaaaa

SEQ ID NO: 37745 - DNA, 533 bp, Artificial Sequence
  chemically treated genomic DNA (Homo sapiens) CpG-island No: 37745
gtttttttttttgtttcgtcggttgttgagggagcggcggtcgttttgcgtttggaggtcgttttttcgtttttttcgggtcgcgggtagcgagaggcggcggcggtcggagtcggtgtgggcggtttgaggcgaaagttcggtcggtttttaggggaatgaaataattatcggttattagagtaataacggttttcgcggttgtatcgtcgatttttcggaggagcgaaggcgtttcgtaaaaatacgtcgtagagcggaattcgggtttcgtcgttttagtagggggtagtagcgacgtagataggaagtttaggttttgggcgttggatatttcggcggttttcgcgattaatgagcgttatattaatttttaggcggcgtttttatcgtatttgtcgtcgtcgtcgtttcggggcgagaattgcgtcgtcggttttgttacgttgattcgtggggtttcggtcgtcgttttagggtgacgaggaggagtaggacggggttttagagaagggtaagagtttagagttcgg

SEQ ID NO: 37746 - DNA, 533 bp, Artificial Sequence
  chemically treated genomic DNA (Homo sapiens) CpG-island No: 37746
ccgaactctaaactcttacccttctctaaaaccccgtcctactcctcctcgtcaccctaaaacgacgaccgaaaccccacgaatcaacgtaacaaaaccgacgacgcaattctcgccccgaaacgacgacgacgacaaatacgataaaaacgccgcctaaaaattaatataacgctcattaatcgcgaaaaccgccgaaatatccaacgcccaaaacctaaacttcctatctacgtcgctactaccccctactaaaacgacgaaacccgaattccgctctacgacgtatttttacgaaacgccttcgctcctccgaaaaatcgacgatacaaccgcgaaaaccgttattactctaataaccgataattatttcattcccctaaaaaccgaccgaactttcgcctcaaaccgcccacaccgactccgaccgccgccgcctctcgctacccgcgacccgaaaaaaacgaaaaaacgacctccaaacgcaaaacgaccgccgctccctcaacaaccgacgaaacaaaaaaaaaaac

SEQ ID NO: 37747 - DNA, 533 bp, Artificial Sequence
  chemically treated genomic DNA (Homo sapiens) CpG-island No: 37747
tcgagttttgagtttttgtttttttttggggtttcgttttgttttttttcgttattttggggcggcggtcggggttttacgggttaacgtggtagggtcgacggcgtagttttcgtttcggggcggcggcggcggtaagtgcggtgggagcgtcgtttggaggttggtgtggcgtttattggtcgcggaggtcgtcgaggtgtttagcgtttaggatttgggttttttgtttgcgtcgttgttgttttttgttggggcggcggggttcgggtttcgttttgcggcgtgtttttgcggggcgttttcgttttttcgggaagtcggcggtgtagtcgcggaggtcgttgttgttttggtagtcggtggttgttttatttttttaggggtcggtcgggttttcgttttaggtcgtttatatcggtttcggtcgtcgtcgtttttcgttattcgcggttcggaggaggcgagggaacgatttttaggcgtagggcggtcgtcgtttttttagtagtcggcggggtagagggaaagat

SEQ ID NO: 37748 - DNA, 533 bp, Artificial Sequence
  chemically treated genomic DNA (Homo sapiens) CpG-island No: 37748
atctttccctctaccccgccgactactaaaaaaacgacgaccgccctacgcctaaaaatcgttccctcgcctcctccgaaccgcgaataacgaaaaacgacgacgaccgaaaccgatataaacgacctaaaacgaaaacccgaccgacccctaaaaaaataaaacaaccaccgactaccaaaacaacaacgacctccgcgactacaccgccgacttcccgaaaaaacgaaaacgccccgcaaaaacacgccgcaaaacgaaacccgaaccccgccgccccaacaaaaaacaacaacgacgcaaacaaaaaacccaaatcctaaacgctaaacacctcgacgacctccgcgaccaataaacgccacaccaacctccaaacgacgctcccaccgcacttaccgccgccgccgccccgaaacgaaaactacgccgtcgaccctaccacgttaacccgtaaaaccccgaccgccgccccaaaataacgaaaaaaaacaaaacgaaaccccaaaaaaaaacaaaaactcaaaactcga

SEQ ID NO: 37749 - DNA, 696 bp, Artificial Sequence
  chemically treated genomic DNA (Homo sapiens) CpG-island No: 37749
ttttgttacgacgcgggtaagaggggtttcgggggttagagttgtgtttcgagcgtacgtgtgtcgggttcggagtttttagcgggtttttagaggcgcgcgtgtttgatgcggatggggggcggcgattgggatttttagttttttagttcgtgatagcgtttcgggagagcgcggttcgggtattcgaaggttgcgtattagtcgggtggatatgcggggcggttgtttttcgtgggtcgcgcgagttatttatttgggcgggtaaggcgtgcgtcgtagtttagagttttagttcgacggttagcgcggtttagacggcgacgggcgttatgggtgcgggcggggttcggttgttttttgttttcgcgttttcgcgttttcgtagtttagcgttttttttttaggtttcgttgcgttcgttagttttcgattgaaagcgaaagttcgcgttttagcgggttagaggttaggcggcggggcggggcggggttagtcggttttggatacgttttttttacgtttttttttagacgttgttgttgggttttcgattcgattattttagtatcgttgggtcgatatttttagcgttatttttagtattcgggtgattttttaatttttttttatcgttttttttttttcgaattattatttttatttgttcggtttttatttgtttttttagttttt

SEQ ID NO: 37750 - DNA, 696 bp, Artificial Sequence
  chemically treated genomic DNA (Homo sapiens) CpG-island No: 37750
aaaaactaaaaaaacaaataaaaaccgaacaaataaaaataataattcgaaaaaaaaaaaacgataaaaaaaaattaaaaaatcacccgaatactaaaaataacgctaaaaatatcgacccaacgatactaaaataatcgaatcgaaaacccaacaacaacgtctaaaaaaaaacgtaaaaaaaacgtatccaaaaccgactaaccccgccccgccccgccgcctaacctctaacccgctaaaacgcgaactttcgctttcaatcgaaaactaacgaacgcaacgaaacctaaaaaaaaaacgctaaactacgaaaacgcgaaaacgcgaaaacaaaaaacaaccgaaccccgcccgcacccataacgcccgtcgccgtctaaaccgcgctaaccgtcgaactaaaactctaaactacgacgcacgccttacccgcccaaataaataactcgcgcgacccacgaaaaacaaccgccccgcatatccacccgactaatacgcaaccttcgaatacccgaaccgcgctctcccgaaacgctatcacgaactaaaaaactaaaaatcccaatcgccgccccccatccgcatcaaacacgcgcgcctctaaaaacccgctaaaaactccgaacccgacacacgtacgctcgaaacacaactctaacccccgaaacccctcttacccgcgtcgtaacaaaa

SEQ ID NO: 37751 - DNA, 696 bp, Artificial Sequence
  chemically treated genomic DNA (Homo sapiens) CpG-island No: 37751
gggagttgggagggtaggtggaggtcgggtaggtggagatggtgattcgaagaggaggggacgataggaggaggttgaggggttattcgagtgttgggagtgacgttggaggtatcggtttagcgatgttggagtggtcgggtcggaggtttagtagtagcgtttggggaggggcgtgggggaggcgtgtttaaggtcggttggtttcgtttcgtttcgtcgtttggtttttggttcgttggggcgcgggttttcgtttttagtcgagggttagcgagcgtagcggagtttggagagaaggcgttgggttgcgagggcgcgagggcgcgagggtagggggtaatcggatttcgttcgtatttatggcgttcgtcgtcgtttgggtcgcgttggtcgtcggattggagttttgggttgcggcgtacgttttgttcgtttaggtgggtgattcgcgcggtttacgggggatagtcgtttcgtatgtttattcggttggtgcgtagttttcgggtgttcgggtcgcgttttttcggggcgttgttacgggttgggaggttgggagttttagtcgtcgttttttattcgtattagatacgcgcgtttttggggattcgttggggatttcgggttcggtatacgtgcgttcggggtataattttggttttcgaagttttttttattcgcgtcgtgataggg

SEQ ID NO: 37752 - DNA, 696 bp, Artificial Sequence
  chemically treated genomic DNA (Homo sapiens) CpG-island No: 37752
ccctatcacgacgcgaataaaaaaaacttcgaaaaccaaaattataccccgaacgcacgtataccgaacccgaaatccccaacgaatccccaaaaacgcgcgtatctaatacgaataaaaaacgacgactaaaactcccaacctcccaacccgtaacaacgccccgaaaaaacgcgacccgaacacccgaaaactacgcaccaaccgaataaacatacgaaacgactatcccccgtaaaccgcgcgaatcacccacctaaacgaacaaaacgtacgccgcaacccaaaactccaatccgacgaccaacgcgacccaaacgacgacgaacgccataaatacgaacgaaatccgattaccccctaccctcgcgccctcgcgccctcgcaacccaacgccttctctccaaactccgctacgctcgctaaccctcgactaaaaacgaaaacccgcgccccaacgaaccaaaaaccaaacgacgaaacgaaacgaaaccaaccgaccttaaacacgcctcccccacgcccctccccaaacgctactactaaacctccgacccgaccactccaacatcgctaaaccgatacctccaacgtcactcccaacactcgaataacccctcaacctcctcctatcgtcccctcctcttcgaatcaccatctccacctacccgacctccacctaccctcccaactccc

SEQ ID NO: 37753 - DNA, 911 bp, Artificial Sequence
  chemically treated genomic DNA (Homo sapiens) CpG-island No: 37753
atttttgcgttcggcgtcgcgtttcggagcgagttgatagtcgcggtaggcgaaggcgcggtagagaggggggagaaaggttttttttttcgttcgtaagattattatggttttacgttttttggttttcgcggcgtacggtagtattgcgacggcgcgaggggtcgttttacggtagggtcgcgaagttcgaggaagcgcggcggcgcggtcgatcgtgcgtttttttagcggtgcgacggggtgagggggcggcgggcggcgcgggttgattcgggcggtcgttttttggtcgcggttattttaggttgtttcgttgcgtcgttggcggtgggcgtggcgttgtcggcggttaggcgcggacgtcggaggaggtgttttcgggtttaggggtgttcggttaggggcggggttgtcgggttcgggcgattgtcggagttgcggaagtcgtggaagcgtcggcgacgtatcgcgcgatggcgcgggcgggataggtgagcgaagcgcggtttgtagttttttttttttttcggggggacgagtggggtattattttcgcgcggggtttttcgttgggttattttttcgttagcgtttagtttcgtgcggtttgtcggattaggtagggtagagtcggtttcggcgttgttttcgtttttggggtcggaagcgatcggggttggtcgggtttggtttttggtgttttcggtcgggtttcggttttttttttttttcggtttttttcggtcgggtcgagtttttttcgcgcgtttattgtgaggttacgttttgtaggcgcgttttggtattcgggttaagacgttcggagcggttgttgtagttagtagcggtttttttatcggttgtttcgtttagatttagtcgggaggggtgcgaggtatgtagttggg

SEQ ID NO: 37754 - DNA, 911 bp, Artificial Sequence
  chemically treated genomic DNA (Homo sapiens) CpG-island No: 37754
cccaactacatacctcgcacccctcccgactaaatctaaacgaaacaaccgataaaaaaaccgctactaactacaacaaccgctccgaacgtcttaacccgaataccaaaacgcgcctacaaaacgtaacctcacaataaacgcgcgaaaaaaactcgacccgaccgaaaaaaaccgaaaaaaaaaaaaaaccgaaacccgaccgaaaacaccaaaaaccaaacccgaccaaccccgatcgcttccgaccccaaaaacgaaaacaacgccgaaaccgactctaccctacctaatccgacaaaccgcacgaaactaaacgctaacgaaaaaataacccaacgaaaaaccccgcgcgaaaataataccccactcgtccccccgaaaaaaaaaaaaaactacaaaccgcgcttcgctcacctatcccgcccgcgccatcgcgcgatacgtcgccgacgcttccacgacttccgcaactccgacaatcgcccgaacccgacaaccccgcccctaaccgaacacccctaaacccgaaaacacctcctccgacgtccgcgcctaaccgccgacaacgccacgcccaccgccaacgacgcaacgaaacaacctaaaataaccgcgaccaaaaaacgaccgcccgaatcaacccgcgccgcccgccgccccctcaccccgtcgcaccgctaaaaaaacgcacgatcgaccgcgccgccgcgcttcctcgaacttcgcgaccctaccgtaaaacgacccctcgcgccgtcgcaatactaccgtacgccgcgaaaaccaaaaaacgtaaaaccataataatcttacgaacgaaaaaaaaaacctttctcccccctctctaccgcgccttcgcctaccgcgactatcaactcgctccgaaacgcgacgccgaacgcaaaaat

SEQ ID NO: 37755 - DNA, 911 bp, Artificial Sequence
  chemically treated genomic DNA (Homo sapiens) CpG-island No: 37755
tttagttgtatgtttcgtatttttttcgattaggtttgagcggggtagtcggtgaaggggtcgttattggttgtagtagtcgtttcgggcgttttggttcgggtgttagggcgcgtttgtaggacgtgattttataatgggcgcgcgaggggagttcggttcggtcgggggaagtcgggggaggaggggaatcgaggttcggtcggagatattagagattaggttcggttagtttcggtcgttttcgattttaggggcggggatagcgtcgagatcgattttgttttgtttgattcgataggtcgtacggggttgggcgttggcgaaggggtggtttagcggggagtttcgcgcggaggtggtgttttattcgttttttcgagagagggaaaaggttataagtcgcgtttcgtttatttgtttcgttcgcgttatcgcgcgatgcgtcgtcgacgtttttacgattttcgtagtttcggtagtcgttcgggttcggtagtttcgtttttggtcgaatatttttaaattcggggatatttttttcggcgttcgcgtttagtcgtcggtagcgttacgtttatcgttagcggcgtagcgaggtagtttggagtgatcgcgattaaggagcggtcgttcgggttagttcgcgtcgttcgtcgtttttttatttcgtcgtatcgttgggaaagcgtacggtcggtcgcgtcgtcgcgttttttcgggtttcgcgattttgtcgtaaagcggtttttcgcgtcgtcgtaatgttgtcgtgcgtcgcgggagttagggggcgtggggttatggtggttttgcgggcggggaagaagattttttttttttttttttgtcgcgttttcgtttgtcgcggttgttaattcgtttcggagcgcggcgtcgagcgtagggat

SEQ ID NO: 37756 - DNA, 911 bp, Artificial Sequence
  chemically treated genomic DNA (Homo sapiens) CpG-island No: 37756
atccctacgctcgacgccgcgctccgaaacgaattaacaaccgcgacaaacgaaaacgcgacaaaaaaaaaaaaaaaaaatcttcttccccgcccgcaaaaccaccataaccccacgccccctaactcccgcgacgcacgacaacattacgacgacgcgaaaaaccgctttacgacaaaatcgcgaaacccgaaaaaacgcgacgacgcgaccgaccgtacgctttcccaacgatacgacgaaataaaaaaacgacgaacgacgcgaactaacccgaacgaccgctccttaatcgcgatcactccaaactacctcgctacgccgctaacgataaacgtaacgctaccgacgactaaacgcgaacgccgaaaaaaatatccccgaatttaaaaatattcgaccaaaaacgaaactaccgaacccgaacgactaccgaaactacgaaaatcgtaaaaacgtcgacgacgcatcgcgcgataacgcgaacgaaacaaataaacgaaacgcgacttataaccttttccctctctcgaaaaaacgaataaaacaccacctccgcgcgaaactccccgctaaaccaccccttcgccaacgcccaaccccgtacgacctatcgaatcaaacaaaacaaaatcgatctcgacgctatccccgcccctaaaatcgaaaacgaccgaaactaaccgaacctaatctctaatatctccgaccgaacctcgattcccctcctcccccgacttcccccgaccgaaccgaactcccctcgcgcgcccattataaaatcacgtcctacaaacgcgccctaacacccgaaccaaaacgcccgaaacgactactacaaccaataacgaccccttcaccgactaccccgctcaaacctaatcgaaaaaaatacgaaacatacaactaaa

SEQ ID NO: 37757 - DNA, 1346 bp, Artificial Sequence
  chemically treated genomic DNA (Homo sapiens) CpG-island No: 37757
tatttggttattgaaaataaggggtcgttaaggaggtaaagcggagttagttttcgggagggattcggtttttcgtcgttcgcgagaatgataggcgcgttcgtttagggcggtgtcgggagaggcgggggtggaaggaagaggaggaatcggataaagttagtttcgtcgggttttcggttttttcgttcgtcgcgatttcggggttagttattttttttgtcgcgggttttcggggtttatagttgttttcgggaacggtcgtcgtcgttcgtagtagggttaagtcggggatgcggggttagggcggggttttgggtagggtcggggatcggaatttgtagtgggacgcggatggggaggacgcgcggcgtcgggagtcggggttggtaaaagggtcggggataagaattcgatttgaatttggaaggggtcgcggatcggtcggggcggtgaattggggcgggtatcggggtgggaacggagaggggtcgggatttaaatcgggaaggaggtttggatggggatagagttacggttcggggcgggttcgaagaggagcgggatagggacggggcggaggatgaggagggggtcgcggttcggggcgtacgtcggggatttatcgttttgtttttgagggtcgcgttttttcgcgttgttagtatttggagcgtcgtcgggcgcgcgcgcggagtagcgattgtgcgtcgagttcgtttcggttgtgtgaggtacggcgtagtagttattagttaggggcgtcggagttatcgtttcgtagtattttcggttatttacgcgttgtttttttggtcgtcgagtatagtttcgcggtttttcgtattagtagtttagtcgatttagttagtttcgttcggtcgtttgcgtcgttttcgtcgtcgaaaatggcgttttagtgttgtttttttcggcgtttcgtttcgtttcgttttataatgtcgcgcgtcggtatgacgttatcgtttttcgtttcgttcggggttggggaaattgaggttgggtggtttttcgtaagcgttcggcgagttggggattggaggggcgagaaagttgtttgggtattaggtgggcggttatagggaggagggtgacggtgtaggatttagcgggtttttcggttgtaacgcggacgggggtggggcgttcggggtagggcgcggttcgcggggtgggcggttaggttttggttttttcgatttcgtagtcgcgatgatcgagcgtttcggtagttttttttttagtcggattgtgggttttattagaatgcggtcggggacggtgtaggttcggtcgtagtcgttattattgggttttcgttttat

SEQ ID NO: 37758 - DNA, 1346 bp, Artificial Sequence
  chemically treated genomic DNA (Homo sapiens) CpG-island No: 37758
ataaaacgaaaacccaataataacgactacgaccgaacctacaccgtccccgaccgcattctaataaaacccacaatccgactaaaaaaaaaactaccgaaacgctcgatcatcgcgactacgaaatcgaaaaaaccaaaacctaaccgcccaccccgcgaaccgcgccctaccccgaacgccccacccccgtccgcgttacaaccgaaaaacccgctaaatcctacaccgtcaccctcctccctataaccgcccacctaatacccaaacaactttctcgcccctccaatccccaactcgccgaacgcttacgaaaaaccacccaacctcaatttccccaaccccgaacgaaacgaaaaacgataacgtcataccgacgcgcgacattataaaacgaaacgaaacgaaacgccgaaaaaaacaacactaaaacgccattttcgacgacgaaaacgacgcaaacgaccgaacgaaactaactaaatcgactaaactactaatacgaaaaaccgcgaaactatactcgacgaccaaaaaaacaacgcgtaaataaccgaaaatactacgaaacgataactccgacgcccctaactaataactactacgccgtacctcacacaaccgaaacgaactcgacgcacaatcgctactccgcgcgcgcgcccgacgacgctccaaatactaacaacgcgaaaaaacgcgaccctcaaaaacaaaacgataaatccccgacgtacgccccgaaccgcgaccccctcctcatcctccgccccgtccctatcccgctcctcttcgaacccgccccgaaccgtaactctatccccatccaaacctccttcccgatttaaatcccgacccctctccgttcccaccccgatacccgccccaattcaccgccccgaccgatccgcgaccccttccaaattcaaatcgaattcttatccccgacccttttaccaaccccgactcccgacgccgcgcgtcctccccatccgcgtcccactacaaattccgatccccgaccctacccaaaaccccgccctaaccccgcatccccgacttaaccctactacgaacgacgacgaccgttcccgaaaacaactataaaccccgaaaacccgcgacaaaaaaaataactaaccccgaaatcgcgacgaacgaaaaaaccgaaaacccgacgaaactaactttatccgattcctcctcttccttccacccccgcctctcccgacaccgccctaaacgaacgcgcctatcattctcgcgaacgacgaaaaaccgaatccctcccgaaaactaactccgctttacctccttaacgaccccttattttcaataaccaaata

SEQ ID NO: 37759 - DNA, 1346 bp, Artificial Sequence
  chemically treated genomic DNA (Homo sapiens) CpG-island No: 37759
gtggggcgggagtttagtggtggcggttgcggtcgggtttgtatcgttttcggtcgtattttggtagggtttatagttcggttggaagggaagttgtcgaagcgttcggttatcgcggttgcggagtcggagaggttagggtttggtcgtttatttcgcgagtcgcgttttgtttcgagcgttttattttcgttcgcgttataatcgggaggttcgttgggttttgtatcgttatttttttttttgtgatcgtttatttgatatttaaataattttttcgtttttttagtttttagttcgtcgagcgtttgcggggagttatttagttttagtttttttagtttcgggcggggcgaggggcgatgacgttatgtcggcgcgcggtattgtggggcggggcgaggcggggcgtcggggggagtaatattgagacgttattttcggcggcgggagcggcgtaggcggtcgagcgggattggttgggtcggttgggttgttggtgcgaggagtcgcggggttgtgttcggcggttaaggggatagcgcgtgggtggtcgaggatgttgcggggcggtagtttcggcgtttttagttggtgattgttgcgtcgtgttttatatagtcgaggcgggttcggcgtatagtcgttgtttcgcgcgcgcgttcggcggcgttttaggtgttgatagcgcgagagagcgcggtttttaggagtaaggcggtgagttttcggcgtgcgtttcggatcgcggttttttttttatttttcgtttcgtttttgtttcgttttttttcggattcgtttcgggtcgtaattttgtttttatttaggtttttttttcggtttgggtttcggttttttttcgtttttatttcggtattcgttttagtttatcgtttcggtcggttcgcgattttttttaggtttaggtcgggtttttgttttcggtttttttgttagtttcggttttcggcgtcgcgcgttttttttattcgcgttttattgtaggtttcggttttcggttttgtttagggtttcgttttggtttcgtattttcggtttggttttgttgcgggcggcggcggtcgttttcggggatagttgtggatttcgggaattcgcgataggggaggtggttgatttcgggatcgcggcgggcggggaggtcggaggttcggcggggttggttttgttcgatttttttttttttttttattttcgtttttttcggtatcgttttgagcggacgcgtttgttattttcgcgggcggcggggggtcgggtttttttcgagagttggtttcgttttgtttttttggcgattttttatttttagtaattagatg

SEQ ID NO: 37760 - DNA, 1346 bp, Artificial Sequence
  chemically treated genomic DNA (Homo sapiens) CpG-island No: 37760
catctaattactaaaaataaaaaatcgccaaaaaaacaaaacgaaaccaactctcgaaaaaaacccgaccccccgccgcccgcgaaaataacaaacgcgtccgctcaaaacgataccgaaaaaaacgaaaataaaaaaaaaaaaaaaaatcgaacaaaaccaaccccgccgaacctccgacctccccgcccgccgcgatcccgaaatcaaccacctcccctatcgcgaattcccgaaatccacaactatccccgaaaacgaccgccgccgcccgcaacaaaaccaaaccgaaaatacgaaaccaaaacgaaaccctaaacaaaaccgaaaaccgaaacctacaataaaacgcgaataaaaaaaacgcgcgacgccgaaaaccgaaactaacaaaaaaaccgaaaacaaaaacccgacctaaacctaaaaaaaatcgcgaaccgaccgaaacgataaactaaaacgaataccgaaataaaaacgaaaaaaaaccgaaacccaaaccgaaaaaaaaacctaaataaaaacaaaattacgacccgaaacgaatccgaaaaaaaacgaaacaaaaacgaaacgaaaaataaaaaaaaaaccgcgatccgaaacgcacgccgaaaactcaccgccttactcctaaaaaccgcgctctctcgcgctatcaacacctaaaacgccgccgaacgcgcgcgcgaaacaacgactatacgccgaacccgcctcgactatataaaacacgacgcaacaatcaccaactaaaaacgccgaaactaccgccccgcaacatcctcgaccacccacgcgctatccccttaaccgccgaacacaaccccgcgactcctcgcaccaacaacccaaccgacccaaccaatcccgctcgaccgcctacgccgctcccgccgccgaaaataacgtctcaatattactccccccgacgccccgcctcgccccgccccacaataccgcgcgccgacataacgtcatcgcccctcgccccgcccgaaactaaaaaaactaaaactaaataactccccgcaaacgctcgacgaactaaaaactaaaaaaacgaaaaaattatttaaatatcaaataaacgatcacaaaaaaaaaaataacgatacaaaacccaacgaacctcccgattataacgcgaacgaaaataaaacgctcgaaacaaaacgcgactcgcgaaataaacgaccaaaccctaacctctccgactccgcaaccgcgataaccgaacgcttcgacaacttcccttccaaccgaactataaaccctaccaaaatacgaccgaaaacgatacaaacccgaccgcaaccgccaccactaaactcccgccccac

SEQ ID NO: 37761 - DNA, 820 bp, Artificial Sequence
  chemically treated genomic DNA (Homo sapiens) CpG-island No: 37761
ggggcgttgaattatttgggcgggaatcgttcggcgattgtttcgcgcgttttcgtttgagttagttcggtcgggagtttgatagtcggaagtttatcgtaagttcggcgacgcgcgtacgcgttgttttcgttagattttcgcgtttgcgtagttaggaagtgaggtcgcggcggaggggacggggttaggtcgggtcgtcgtttgacgcgacgttttttacgggcgtttacgttacggcgtcgaggcggaagatggtgtattttcgggtcggcggttgttgagttgattcggacggcgagggagcgggagttcgagttcgattatttcggttgtcgcggggtgcggcgtagttatcgttatgtcgttgttgtagtcggcgttcgattttttggcgggtttaggttttttgggcggtgttttcggtcgcgattagagtgatttcgtggggtagacggtggaattgggcgagttgcggttgcgggtgcggcgggttttggtcgaaggtgaggtttcgggtcggtagcgcgggtgcggtcgcggagtgttgttttcgggacgttgggggtagcgttagttcggagtggaagggcgtgggttagggttggggagggttttagcgggatcgtgggttagggtcggttaggggagggtttttgtcgagggcgtgggttagggttaggcgaaggttatagcgcgggcgtaggtgagtgtttgttggcggtgattgcggagggcgaggttgggatcgggtcggggtatttttttgttataagagtagggttaagtcggagtaaggtttggggtttggggaattttt

SEQ ID NO: 37762 - DNA, 820 bp, Artificial Sequence
  chemically treated genomic DNA (Homo sapiens) CpG-island No: 37762
aaaaattccccaaaccccaaaccttactccgacttaaccctactcttataacaaaaaaataccccgacccgatcccaacctcgccctccgcaatcaccgccaacaaacactcacctacgcccgcgctataaccttcgcctaaccctaacccacgccctcgacaaaaaccctcccctaaccgaccctaacccacgatcccgctaaaaccctccccaaccctaacccacgcccttccactccgaactaacgctacccccaacgtcccgaaaacaacactccgcgaccgcacccgcgctaccgacccgaaacctcaccttcgaccaaaacccgccgcacccgcaaccgcaactcgcccaattccaccgtctaccccacgaaatcactctaatcgcgaccgaaaacaccgcccaaaaaacctaaacccgccaaaaaatcgaacgccgactacaacaacgacataacgataactacgccgcaccccgcgacaaccgaaataatcgaactcgaactcccgctccctcgccgtccgaatcaactcaacaaccgccgacccgaaaatacaccatcttccgcctcgacgccgtaacgtaaacgcccgtaaaaaacgtcgcgtcaaacgacgacccgacctaaccccgtcccctccgccgcgacctcacttcctaactacgcaaacgcgaaaatctaacgaaaacaacgcgtacgcgcgtcgccgaacttacgataaacttccgactatcaaactcccgaccgaactaactcaaacgaaaacgcgcgaaacaatcgccgaacgattcccgcccaaataattcaacgcccc

SEQ ID NO: 37763 - DNA, 820 bp, Artificial Sequence
  chemically treated genomic DNA (Homo sapiens) CpG-island No: 37763
gggggttttttaagttttaggttttgtttcgatttgattttatttttatgataagaaagtatttcgattcggttttagtttcgtttttcgtaattatcgttagtaggtatttatttacgttcgcgttatgattttcgtttggttttgatttacgttttcggtagagatttttttttggtcgattttgatttacgatttcgttgggattttttttagttttaatttacgtttttttatttcgggttgacgttgtttttagcgtttcggagataatatttcgcggtcgtattcgcgttgtcgattcggggttttattttcggttaggattcgtcgtattcgtagtcgtagttcgtttagttttatcgtttgttttacgaagttattttggtcgcggtcggaagtatcgtttagggagtttggattcgttaagaagtcgagcgtcgattgtagtagcgatatggcggtggttgcgtcgtatttcgcggtagtcggagtggtcgggttcgggttttcgttttttcgtcgttcgggttagtttagtaatcgtcggttcggaggtgtattatttttcgtttcgacgtcgtgacgtaggcgttcgtgaggagcgtcgcgttaggcggcgattcggtttagtttcgtttttttcgtcgcggttttattttttggttgcgtaggcgcggaggtttgacggagatagcgcgtgcgcgcgtcgtcgggtttgcgatgaattttcggttgttaagttttcggtcgggttgatttaagcggaggcgcgcggaatagtcgtcgagcgattttcgtttaggtagtttagcgtttt

SEQ ID NO: 37764 - DNA, 820 bp, Artificial Sequence
  chemically treated genomic DNA (Homo sapiens) CpG-island No: 37764
aaaacgctaaactacctaaacgaaaatcgctcgacgactattccgcgcgcctccgcttaaatcaacccgaccgaaaacttaacaaccgaaaattcatcgcaaacccgacgacgcgcgcacgcgctatctccgtcaaacctccgcgcctacgcaaccaaaaaataaaaccgcgacgaaaaaaacgaaactaaaccgaatcgccgcctaacgcgacgctcctcacgaacgcctacgtcacgacgtcgaaacgaaaaataatacacctccgaaccgacgattactaaactaacccgaacgacgaaaaaacgaaaacccgaacccgaccactccgactaccgcgaaatacgacgcaaccaccgccatatcgctactacaatcgacgctcgacttcttaacgaatccaaactccctaaacgatacttccgaccgcgaccaaaataacttcgtaaaacaaacgataaaactaaacgaactacgactacgaatacgacgaatcctaaccgaaaataaaaccccgaatcgacaacgcgaatacgaccgcgaaatattatctccgaaacgctaaaaacaacgtcaacccgaaataaaaaaacgtaaattaaaactaaaaaaaatcccaacgaaatcgtaaatcaaaatcgaccaaaaaaaaatctctaccgaaaacgtaaatcaaaaccaaacgaaaatcataacgcgaacgtaaataaatacctactaacgataattacgaaaaacgaaactaaaaccgaatcgaaatactttcttatcataaaaataaaatcaaatcgaaacaaaacctaaaacttaaaaaaccccc

SEQ ID NO: 37765 - DNA, 798 bp, Artificial Sequence
  chemically treated genomic DNA (Homo sapiens) CpG-island No: 37765
  unsure (80, 690)
ttacggttcggtatattgttttcgattgcgtttgttttattgcgtaggcggggtcgcggggcggggcggaggcgttgttnggtgggcggatttgggggttggcggggcggggtttgttaagggtcgtagtcgtgtttcgtcgatgagcgggttgtggggcgggtttgtgatcgggcggggcggggttgttaaggggcggggttgtgcgcggaggtcgttcgcgaattagtcgtggggaattggtttacgtgggttcggtttgatcgtagtcgggttagattttttcggacgtcgtacgcgcgagttgatttgcggggtttcggttcgcggttgttagataggcgtttttacgcgagacgcgatgttgttcgaggttttcggcgcgtaggacgttttcggagggggtagcgttgcggttttttatagtgggtttcggaaagcggggtttgcggtgtttgggcggtttcgttcgtggggttttcgtacgcgtagatttggttttgttcgaggtttaggattttcggcgttcgatcgttgtttttattgtaacgggggatcgtttgcggttcggggttgttcgttcgcgatttttattcgggttttacgtcgagcgtttagtttttttgtttcgtgcgcgttacgggttttgtttaggtggcgttggtgttttttgagagtcgcgtttacggnttaattttttttcgtcgttggagtagtttgggtttttgtttcgtggtttaattgtggataggagtttgcgaacgggggatttatttcgggttatcgagcggggatttg

SEQ ID NO: 37766 - DNA, 798 bp, Artificial Sequence
  chemically treated genomic DNA (Homo sapiens) CpG-island No: 37766
  unsure (109, 719)
caaatccccgctcgataacccgaaataaatcccccgttcgcaaactcctatccacaattaaaccacgaaacaaaaacccaaactactccaacgacgaaaaaaaattaanccgtaaacgcgactctcaaaaaacaccaacgccacctaaacaaaacccgtaacgcgcacgaaacaaaaaaactaaacgctcgacgtaaaacccgaataaaaatcgcgaacgaacaaccccgaaccgcaaacgatcccccgttacaataaaaacaacgatcgaacgccgaaaatcctaaacctcgaacaaaaccaaatctacgcgtacgaaaaccccacgaacgaaaccgcccaaacaccgcaaaccccgctttccgaaacccactataaaaaaccgcaacgctaccccctccgaaaacgtcctacgcgccgaaaacctcgaacaacatcgcgtctcgcgtaaaaacgcctatctaacaaccgcgaaccgaaaccccgcaaatcaactcgcgcgtacgacgtccgaaaaaatctaacccgactacgatcaaaccgaacccacgtaaaccaattccccacgactaattcgcgaacgacctccgcgcacaaccccgccccttaacaaccccgccccgcccgatcacaaacccgccccacaacccgctcatcgacgaaacacgactacgacccttaacaaaccccgccccgccaacccccaaatccgcccaccnaacaacgcctccgccccgccccgcgaccccgcctacgcaataaaacaaacgcaatcgaaaacaatataccgaaccgtaa

SEQ ID NO: 37767 - DNA, 798 bp, Artificial Sequence
  chemically treated genomic DNA (Homo sapiens) CpG-island No: 37767
  unsure (109, 719)
taggttttcgttcggtggttcggggtgggtttttcgttcgtagatttttatttatagttaggttacggggtaaggatttagattgttttagcggcggggaggggttgantcgtggacgcggtttttaaaggatattagcgttatttgaataagattcgtggcgcgtacgaggtaggagagttgggcgttcggcgtgaggttcgggtgggggtcgcgagcggatagtttcgggtcgtaggcggtttttcgttgtagtgaggatagcggtcgggcgtcgggggttttgggtttcgggtagggttaagtttgcgcgtgcgaagattttacggacggagtcgtttaagtatcgtaaatttcgtttttcgggatttattgtgggaggtcgtagcgttgtttttttcgggggcgttttgcgcgtcgggggtttcggatagtatcgcgtttcgcgtgggagcgtttgtttggtagtcgcgggtcgggatttcgtaggttaattcgcgcgtgcggcgttcggagaagtttggttcggttgcggttaaatcgagtttacgtggattagttttttacggttggttcgcgagcggttttcgcgtatagtttcgttttttagtagtttcgtttcgttcgattataggttcgttttatagttcgtttatcgacggggtacggttgcgatttttagtaggtttcgtttcgttagtttttagattcgtttattnagtagcgttttcgtttcgtttcgcggtttcgtttgcgtagtggggtaggcgtagtcggaagtagtgtatcgggtcgtgg

SEQ ID NO: 37768 - DNA, 798 bp, Artificial Sequence
  chemically treated genomic DNA (Homo sapiens) CpG-island No: 37768
  unsure (80, 690)
ccacgacccgatacactacttccgactacgcctaccccactacgcaaacgaaaccgcgaaacgaaacgaaaacgctactnaataaacgaatctaaaaactaacgaaacgaaacctactaaaaatcgcaaccgtaccccgtcgataaacgaactataaaacgaacctataatcgaacgaaacgaaactactaaaaaacgaaactatacgcgaaaaccgctcgcgaaccaaccgtaaaaaactaatccacgtaaactcgatttaaccgcaaccgaaccaaacttctccgaacgccgcacgcgcgaattaacctacgaaatcccgacccgcgactaccaaacaaacgctcccacgcgaaacgcgatactatccgaaacccccgacgcgcaaaacgcccccgaaaaaaacaacgctacgacctcccacaataaatcccgaaaaacgaaatttacgatacttaaacgactccgtccgtaaaatcttcgcacgcgcaaacttaaccctacccgaaacccaaaacccccgacgcccgaccgctatcctcactacaacgaaaaaccgcctacgacccgaaactatccgctcgcgacccccacccgaacctcacgccgaacgcccaactctcctacctcgtacgcgccacgaatcttattcaaataacgctaatatcctttaaaaaccgcgtccacgantcaacccctccccgccgctaaaacaatctaaatccttaccccgtaacctaactataaataaaaatctacgaacgaaaaacccaccccgaaccaccgaacgaaaaccta

SEQ ID NO: 37769 - DNA, 702 bp, Artificial Sequence
  chemically treated genomic DNA (Homo sapiens) CpG-island No: 37769
  unsure (394, 427, 455, 473, 484, 610)
gggtcgggcgggaagggggcggcgttggcggaggttaggttggtcggttgggcgttagaatttatttcgggcggcggcggtcggcgggaaggtttttagtagtagcggcggtagtaggagtagtaatagggggttcggcgttatttcggtttgttcggatttggggatattgggggcgtcgttattaatacgtggaattgggagatatcgtttttttcggtttcgagtcgcggtgattaggggtttggtcgttttttttataggtttttttcgtacgcgttttaggcggaggaagtcgtagcgagtgagaagttgtgggttttaaaggtagataaagggtttatattaattatcgggttttttcgtcgttttttttttttttttttcgtttggntttttggcgtttgtttttgggggggtgttcgtngggttttttgttttttgcgtttcgttgnttttcgtttgcgtttttngtcggtttttntgcgttgggttttttttttttttgggcgcgggggcgggggcggggtcggacgggggttcgttggggcggtttttttttttttggttcgtttttttttttgcgttttttttcggcgttcggtttttntttttttttgtgttttcgtttttttgtgtcgttttttggttttttttttttttttttttttttcgtttgtgttgtttttgttttcgtttttt

SEQ ID NO: 37770 - DNA, 702 bp, Artificial Sequence
  chemically treated genomic DNA (Homo sapiens) CpG-island No: 37770
  unsure (93, 219, 230, 248, 276, 309)
aaaaaacgaaaacaaaaacaacacaaacgaaaaaaaaaaaaaaaaaaaaaaaaccaaaaaacgacacaaaaaaacgaaaacacaaaaaaaaanaaaaaccgaacgccgaaaaaaaacgcaaaaaaaaaaacgaaccaaaaaaaaaaaaaccgccccaacgaacccccgtccgaccccgcccccgcccccgcgcccaaaaaaaaaaaaaacccaacgcanaaaaaccgacnaaaaacgcaaacgaaaancaacgaaacgcaaaaaacaaaaaacccnacgaacacccccccaaaaacaaacgccaaaaanccaaacgaaaaaaaaaaaaaaaaaacgacgaaaaaacccgataattaatataaaccctttatctacctttaaaacccacaacttctcactcgctacgacttcctccgcctaaaacgcgtacgaaaaaaacctataaaaaaaacgaccaaacccctaatcaccgcgactcgaaaccgaaaaaaacgatatctcccaattccacgtattaataacgacgcccccaatatccccaaatccgaacaaaccgaaataacgccgaaccccctattactactcctactaccgccgctactactaaaaaccttcccgccgaccgccgccgcccgaaataaattctaacgcccaaccgaccaacctaacctccgccaacgccgcccccttcccgcccgaccc

SEQ ID NO: 37771 - DNA, 702 bp, Artificial Sequence
  chemically treated genomic DNA (Homo sapiens) CpG-island No: 37771
  unsure (93, 219, 230, 248, 276, 309)
aagagacgaaaataagaatagtataaacgagggggaggaggggagagaagaagttagaaggcgatatagaggagcgagaatataaagagaaanaagggtcgagcgtcggaagagggcgtaaaaaagaaaacgggttaaggggggggaggtcgttttagcgggttttcgttcggtttcgttttcgttttcgcgtttaaagaggaggaaaatttagcgtanagaggtcggtnaaaggcgtaggcgaaaantagcggggcgtagagagtagagagtttngcgggtatttttttagaaataagcgttaggaanttagacggaaaaaaaagagggggggcggcgggggagttcggtaattagtgtaaattttttgtttgtttttgaaatttatagttttttattcgttgcggtttttttcgtttggagcgcgtgcggggagggtttgtggggagggcggttagatttttgattatcgcgattcgggatcggggagggcggtattttttagttttacgtgttagtgacggcgtttttaatgtttttaggttcggataggtcgagatgacgtcgagttttttgttgttgtttttgttgtcgtcgttgttgttgggggttttttcgtcggtcgtcgtcgttcgaggtgagttttggcgtttagtcggttagtttggttttcgttagcgtcgtttttttttcgttcggttt

SEQ ID NO: 37772 - DNA, 702 bp, Artificial Sequence
  chemically treated genomic DNA (Homo sapiens) CpG-island No: 37772
  unsure (394, 427, 455, 473, 484, 610)
aaaccgaacgaaaaaaaaacgacgctaacgaaaaccaaactaaccgactaaacgccaaaactcacctcgaacgacgacgaccgacgaaaaaacccccaacaacaacgacgacaacaaaaacaacaacaaaaaactcgacgtcatctcgacctatccgaacctaaaaacattaaaaacgccgtcactaacacgtaaaactaaaaaataccgccctccccgatcccgaatcgcgataatcaaaaatctaaccgccctccccacaaaccctccccgcacgcgctccaaacgaaaaaaaccgcaacgaataaaaaactataaatttcaaaaacaaacaaaaaatttacactaattaccgaactcccccgccgccccccctcttttttttccgtctaanttcctaacgcttatttctaaaaaaatacccgcnaaactctctactctctacgccccgctanttttcgcctacgcctttnaccgacctctntacgctaaattttcctcctctttaaacgcgaaaacgaaaacgaaaccgaacgaaaacccgctaaaacgacctccccccccttaacccgttttcttttttacgccctcttccgacgctcgacccttntttctctttatattctcgctcctctatatcgccttctaacttcttctctcccctcctccccctcgtttatactattcttattttcgtctctt

SEQ ID NO: 37773 - DNA, 1126 bp, Artificial Sequence
  chemically treated genomic DNA (Homo sapiens) CpG-island No: 37773
tacgcgggtattcggagtgataacgattaagtggtatttaggagtcggacggtttttattgtatgataatcgttgtttaaataggagttaaaggttagatttattgaacgtatttcgagtaggttcgaggggcggtcggcgttcggggttgtttagtaggggtttcgcgcggttgagttttacggggttaaagtttcgatcgacgggagagaggggcgggtattggtttcggattcgaaatttcgtttttagtaaaaagcggttttcgggaattggaagtttggcgaggtgggggtgggggcgggggaggggggcgaggggcggcgaggggcgagtaggggggcggagggcgagtaggggggcgggggtacggttcgtttcgggtgtcgggtcgatggtagtcggggttggggagggataggtttagtaagcgggcggtcgggagtttcggggggttcgttcgagaggcgtcggattttacggagatcgggatcggggcgagggcgtattcggattcgtcgcgacgacgcgtttattttttgttagaaaggtcgggtttgggatacggggtggcgaggggcgtttatatcggcggtttcgcggggtagtttcggttttattgtttcgcgatcgtagttcgatcgtcggtttcggggagggggtcggggaggcgggagggggaaggggcgcggcgacggtatttgtggttgttacgggtgacggggtgggcggggtcgggcgtcgggaggggcgcgcgtgcgcggtcgcggtcgagggagcgggggcgggagcgggcgatggttgttaagaaaggggaggggggaggatattcggggttcgaattgcgtaggcgcgagtttcgattcgcgagcgtgggaggagttcggagaaggcgtcggtttcgtcgtattgttggatgtgttcgaggttttcgtggttttttttagttttgcgttatttgttgggggcggggtcgggttgggtttcgcgagtagcgggcggaggcggagtgaagttttaaggggttgtcggcgtgtaggggaggggttcggttgagcgggaaaagggaagtttgcgggaggttaaaattatcggggttttttcgtatggttgttgttttgaggtt

SEQ ID NO: 37774 - DNA, 1126 bp, Artificial Sequence
  chemically treated genomic DNA (Homo sapiens) CpG-island No: 37774
aacctcaaaacaacaaccatacgaaaaaaccccgataattttaacctcccgcaaacttcccttttcccgctcaaccgaacccctcccctacacgccgacaaccccttaaaacttcactccgcctccgcccgctactcgcgaaacccaacccgaccccgcccccaacaaataacgcaaaactaaaaaaaaccacgaaaacctcgaacacatccaacaatacgacgaaaccgacgccttctccgaactcctcccacgctcgcgaatcgaaactcgcgcctacgcaattcgaaccccgaatatcctcccccctcccctttcttaacaaccatcgcccgctcccgcccccgctccctcgaccgcgaccgcgcacgcgcgcccctcccgacgcccgaccccgcccaccccgtcacccgtaacaaccacaaataccgtcgccgcgccccttccccctcccgcctccccgaccccctccccgaaaccgacgatcgaactacgatcgcgaaacaataaaaccgaaactaccccgcgaaaccgccgatataaacgcccctcgccaccccgtatcccaaacccgacctttctaacaaaaaataaacgcgtcgtcgcgacgaatccgaatacgccctcgccccgatcccgatctccgtaaaatccgacgcctctcgaacgaaccccccgaaactcccgaccgcccgcttactaaacctatccctccccaaccccgactaccatcgacccgacacccgaaacgaaccgtacccccgcccccctactcgccctccgcccccctactcgcccctcgccgcccctcgcccccctcccccgcccccacccccacctcgccaaacttccaattcccgaaaaccgctttttactaaaaacgaaatttcgaatccgaaaccaatacccgcccctctctcccgtcgatcgaaactttaaccccgtaaaactcaaccgcgcgaaacccctactaaacaaccccgaacgccgaccgcccctcgaacctactcgaaatacgttcaataaatctaacctttaactcctatttaaacaacgattatcatacaataaaaaccgtccgactcctaaataccacttaatcgttatcactccgaatacccgcgta

SEQ ID NO: 37775 - DNA, 1126 bp, Artificial Sequence
  chemically treated genomic DNA (Homo sapiens) CpG-island No: 37775
ggttttagagtagtagttatacgggagggtttcggtggttttgatttttcgtaaattttttttttttcgtttagtcgaattttttttttgtacgtcggtagttttttggggttttatttcgttttcgttcgttattcgcgaagtttagttcggtttcgtttttaataagtgacgtaaaattgggaggggttacgaggatttcgggtatatttagtagtgcgacggggtcggcgtttttttcgagttttttttacgttcgcgggtcggagttcgcgtttgcgtagttcgggtttcgggtgtttttttttttttttttttttagtaattatcgttcgttttcgttttcgttttttcggtcgcggtcgcgtacgcgcgtttttttcggcgttcggtttcgtttatttcgttattcgtaataattataagtgtcgtcgtcgcgttttttttttttttcgttttttcggtttttttttcggaatcggcggtcgagttacggtcgcggagtagtggaatcgagattgtttcgcggagtcgtcggtatgagcgtttttcgttatttcgtgttttaggttcggtttttttgataagaggtaggcgcgtcgtcgcggcgggttcgagtgcgttttcgtttcggtttcggttttcgtggagttcggcgtttttcgggcgggtttttcggaattttcggtcgttcgtttgttgagtttgtttttttttagtttcggttgttatcggttcggtattcgaaacgggtcgtgttttcgtttttttgttcgtttttcgtttttttgttcgtttttcgtcgtttttcgtttttttttttcgtttttatttttatttcgttaggtttttagttttcgggagtcgttttttgttgagagcggagtttcgggttcggagttagtgttcgtttttttttttcgtcggtcggggttttggtttcgtggggtttagtcgcgcgggatttttgttgagtagtttcgggcgtcggtcgtttttcgagtttgttcgggatgcgtttagtgggtttggtttttggtttttgtttaaatagcgattgttatgtaatggaggtcgttcggtttttggatgttatttggtcgttgttatttcggatgttcgcgta

SEQ ID NO: 37776 - DNA, 1126 bp, Artificial Sequence
  chemically treated genomic DNA (Homo sapiens) CpG-island No: 37776
tacgcgaacatccgaaataacaacgaccaaataacatccaaaaaccgaacgacctccattacataacaatcgctatttaaacaaaaaccaaaaaccaaacccactaaacgcatcccgaacaaactcgaaaaacgaccgacgcccgaaactactcaacaaaaatcccgcgcgactaaaccccacgaaaccaaaaccccgaccgacgaaaaaaaaaaacgaacactaactccgaacccgaaactccgctctcaacaaaaaacgactcccgaaaactaaaaacctaacgaaataaaaataaaaacgaaaaaaaaaaacgaaaaacgacgaaaaacgaacaaaaaaacgaaaaacgaacaaaaaaacgaaaacacgacccgtttcgaataccgaaccgataacaaccgaaactaaaaaaaaacaaactcaacaaacgaacgaccgaaaattccgaaaaacccgcccgaaaaacgccgaactccacgaaaaccgaaaccgaaacgaaaacgcactcgaacccgccgcgacgacgcgcctacctcttatcaaaaaaaccgaacctaaaacacgaaataacgaaaaacgctcataccgacgactccgcgaaacaatctcgattccactactccgcgaccgtaactcgaccgccgattccgaaaaaaaaaccgaaaaaacgaaaaaaaaaaaaaacgcgacgacgacacttataattattacgaataacgaaataaacgaaaccgaacgccgaaaaaaacgcgcgtacgcgaccgcgaccgaaaaaacgaaaacgaaaacgaacgataattactaaaaaaaaaaaaaaaaaaaaacacccgaaacccgaactacgcaaacgcgaactccgacccgcgaacgtaaaaaaaactcgaaaaaaacgccgaccccgtcgcactactaaatatacccgaaatcctcgtaacccctcccaattttacgtcacttattaaaaacgaaaccgaactaaacttcgcgaataacgaacgaaaacgaaataaaaccccaaaaaactaccgacgtacaaaaaaaaaattcgactaaacgaaaaaaaaaaaatttacgaaaaatcaaaaccaccgaaaccctcccgtataactactactctaaaacc

SEQ ID NO: 37777 - DNA, 678 bp, Artificial Sequence
  chemically treated genomic DNA (Homo sapiens) CpG-island No: 37777
agatggcggcgttcgtgaagaattcgtaattaggtcgtcgttatatgtcgtttaggaacgtacggaattcgatttacgtacggaatcggattttaagatgacggtatttatgaggaagttacgtagtaggtgtagttatgttgtttgtacgtcgaggtcgtataagtagtcgtcgtacggattttattgataaggtggcggcgttttcgggaaagttatattagagcgcggttatgttttcggcgaatatatggattcggttattatacggatacgataagtaagatggcggcgtttgaggggttttgggggttttaggtcggttatttattggtttgtagcggagacgacgtatggggtttgcgtaataggagtacgttgtttgggaggcgtgattagaagcggaagtagttgtgggcgtttttgtaatcgtttgggacgtcgtcgagtggtttgtgtaggttcgcgggtcgttggcgggggtcgtgagggagtgcgtcgggagcggagatatggtaagtagcgggtttagggaggggttcggcggtggaggtcggtcggttggtaatagtggggtttgtcggtcgatttaggggtttgtggtgagttataatcggagtttgtggattgaacggcgggagtttatgggtagaatgatgaattatttgggagttttat

SEQ ID NO: 37778 - DNA, 678 bp, Artificial Sequence
  chemically treated genomic DNA (Homo sapiens) CpG-island No: 37778
ataaaactcccaaataattcatcattctacccataaactcccgccgttcaatccacaaactccgattataactcaccacaaacccctaaatcgaccgacaaaccccactattaccaaccgaccgacctccaccgccgaacccctccctaaacccgctacttaccatatctccgctcccgacgcactccctcacgacccccgccaacgacccgcgaacctacacaaaccactcgacgacgtcccaaacgattacaaaaacgcccacaactacttccgcttctaatcacgcctcccaaacaacgtactcctattacgcaaaccccatacgtcgtctccgctacaaaccaataaataaccgacctaaaacccccaaaacccctcaaacgccgccatcttacttatcgtatccgtataataaccgaatccatatattcgccgaaaacataaccgcgctctaatataactttcccgaaaacgccgccaccttatcaataaaatccgtacgacgactacttatacgacctcgacgtacaaacaacataactacacctactacgtaacttcctcataaataccgtcatcttaaaatccgattccgtacgtaaatcgaattccgtacgttcctaaacgacatataacgacgacctaattacgaattcttcacgaacgccgccatct

SEQ ID NO: 37779 - DNA, 678 bp, Artificial Sequence
  chemically treated genomic DNA (Homo sapiens) CpG-island No: 37779
atagaatttttagatggtttattattttgtttatagattttcgtcgtttagtttatagatttcggttatggtttattatagatttttgagtcggtcgatagattttattgttgttaatcgatcgatttttatcgtcgaatttttttttggattcgttatttattatattttcgttttcggcgtatttttttacgattttcgttagcgattcgcgaatttgtatagattattcggcggcgttttaggcggttgtaaaggcgtttataattattttcgtttttagttacgttttttaggtagcgtatttttattgcgtaggttttatgcgtcgttttcgttgtaaattagtaggtggtcggtttagagtttttaagattttttaggcgtcgttattttgtttatcgtattcgtatggtggtcgaatttatatgttcgtcgggaatatggtcgcgttttaatgtggttttttcgagggcgtcgttattttgttagtagagttcgtacggcggttgtttgtacggtttcgacgtataggtaatatggttgtatttattgcgtgatttttttatagatgtcgttattttggaattcgatttcgtacgtgggtcgaatttcgtacgtttttaggcgatatatgacggcgatttaattgcggattttttacgggcgtcgttattt

SEQ ID NO: 37780 - DNA, 678 bp, Artificial Sequence
  chemically treated genomic DNA (Homo sapiens) CpG-island No: 37780
aaataacgacgcccgtaaaaaatccgcaattaaatcgccgtcatatatcgcctaaaaacgtacgaaattcgacccacgtacgaaatcgaattccaaaataacgacatctataaaaaaatcacgcaataaatacaaccatattacctatacgtcgaaaccgtacaaacaaccgccgtacgaactctactaacaaaataacgacgccctcgaaaaaaccacattaaaacgcgaccatattcccgacgaacatataaattcgaccaccatacgaatacgataaacaaaataacgacgcctaaaaaatcttaaaaactctaaaccgaccacctactaatttacaacgaaaacgacgcataaaacctacgcaataaaaatacgctacctaaaaaacgtaactaaaaacgaaaataattataaacgcctttacaaccgcctaaaacgccgccgaataatctatacaaattcgcgaatcgctaacgaaaatcgtaaaaaaatacgccgaaaacgaaaatataataaataacgaatccaaaaaaaaattcgacgataaaaatcgatcgattaacaacaataaaatctatcgaccgactcaaaaatctataataaaccataaccgaaatctataaactaaacgacgaaaatctataaacaaaataataaaccatctaaaaattctat

SEQ ID NO: 37781 - DNA, 521 bp, Artificial Sequence
  chemically treated genomic DNA (Homo sapiens) CpG-island No: 37781
gtaggcgcgaagtagtttttttgtcgcgttcggtatcggttgtggagatcgcgggagggaagggagggcgtaggcgtaagtttttttcgatcgtttttttttaggttgaggttggaaagcgtatgcgttagttagatgggtagcgaggagagtcgtaattgttagtttttcggaaggggttagttgtcgttgaacgttagtacgtagatgtaattggttttcggtaggggggcgcgcgtatcgttgcggagcgtcggttcgtaggcgcgggagtttttttattaagggtacgcgatatcgaggtaatagtgcgtaggtgtttagttagaggcggagttcgagaggtaggtagcggattttcggtttcgggagtaacgaatagtcgcggaggcgatagttatcgttttagaggaggcggtcgcggaggaggaggaaggggaggagggcgaggcgggaggtgtaggagggattttcgttatgggtttacgggtttagagtggcggaagatatcggtttggtgt

SEQ ID NO: 37782 - DNA, 521 bp, Artificial Sequence
  chemically treated genomic DNA (Homo sapiens) CpG-island No: 37782
acaccaaaccgatatcttccgccactctaaacccgtaaacccataacgaaaatccctcctacacctcccgcctcgccctcctccccttcctcctcctccgcgaccgcctcctctaaaacgataactatcgcctccgcgactattcgttactcccgaaaccgaaaatccgctacctacctctcgaactccgcctctaactaaacacctacgcactattacctcgatatcgcgtacccttaataaaaaaactcccgcgcctacgaaccgacgctccgcaacgatacgcgcgcccccctaccgaaaaccaattacatctacgtactaacgttcaacgacaactaaccccttccgaaaaactaacaattacgactctcctcgctacccatctaactaacgcatacgctttccaacctcaacctaaaaaaaaacgatcgaaaaaaacttacgcctacgccctcccttccctcccgcgatctccacaaccgataccgaacgcgacaaaaaaactacttcgcgcctac

SEQ ID NO: 37783 - DNA, 521 bp, Artificial Sequence
  chemically treated genomic DNA (Homo sapiens) CpG-island No: 37783
gtattaggtcggtatttttcgttattttaggttcgtggatttatggcgagggttttttttgtatttttcgtttcgtttttttttttttttttttttttcgcggtcgttttttttgaagcggtagttgtcgttttcgcggttgttcgttgttttcggaatcggaagttcgttgtttgtttttcgggtttcgtttttggttaagtatttgcgtattattgtttcgatgtcgcgtgtttttaatagggaggttttcgcgtttacgggtcggcgtttcgtagcggtgcgcgcgtttttttgtcgagagttagttgtatttgcgtgttgacgtttaacgatagttaatttttttcgagggattggtagttgcggtttttttcgttgtttatttagttggcgtatgcgttttttagttttaatttgaagggaagcggtcggggagggtttgcgtttgcgtttttttttttttttcgcggtttttatagtcgatatcgaacgcggtaaggaagttgtttcgcgtttgt

SEQ ID NO: 37784 - DNA, 521 bp, Artificial Sequence
  chemically treated genomic DNA (Homo sapiens) CpG-island No: 37784
acaaacgcgaaacaacttccttaccgcgttcgatatcgactataaaaaccgcgaaaaaaaaaaaaaaacgcaaacgcaaaccctccccgaccgcttcccttcaaattaaaactaaaaaacgcatacgccaactaaataaacaacgaaaaaaaccgcaactaccaatccctcgaaaaaaattaactatcgttaaacgtcaacacgcaaatacaactaactctcgacaaaaaaacgcgcgcaccgctacgaaacgccgacccgtaaacgcgaaaacctccctattaaaaacacgcgacatcgaaacaataatacgcaaatacttaaccaaaaacgaaacccgaaaaacaaacaacgaacttccgattccgaaaacaacgaacaaccgcgaaaacgacaactaccgcttcaaaaaaaacgaccgcgaaaaaaaaaaaaaaaaaaaaaaacgaaacgaaaaatacaaaaaaaaccctcgccataaatccacgaacctaaaataacgaaaaataccgacctaatac

SEQ ID NO: 37785 - DNA, 548 bp, Artificial Sequence
  chemically treated genomic DNA (Homo sapiens) CpG-island No: 37785
ttgggttacggttaagaagttcggcgtttagttgcgtttggattacgttcggggttacggttaagaagttcggcgtttagttgcgtttggattacgttcggggttacggttaagaagttcggcgtttagttgtcgtttggattattttcggggttacggttaagaagttcggcgtttagttgcgtttggattacgttcggggttacggttaagaagttcggcgtttagttgcgtttggattacgttcggggttacggttaagaagttcggcgtttagttgtgtttggattacgtttgcggttattgttaagaagtttagtacgtttaacgttcgaggtttaattttagtacgggttagttatcgtttttttttattttatggttatagaatttatttttaaattagattatttgcggtatagtacgaggttatacgaggtattagacgggagtgtgagcggttttattacgttacgttttttttcgtttttaagtttattttttttaataggttggtgaatagtagttatttttaaaattggtagaat

SEQ ID NO: 37786 - DNA, 548 bp, Artificial Sequence
  chemically treated genomic DNA (Homo sapiens) CpG-island No: 37786
attctaccaattttaaaaataactactattcaccaacctattaaaaaaaataaacttaaaaacgaaaaaaaacgtaacgtaataaaaccgctcacactcccgtctaatacctcgtataacctcgtactataccgcaaataatctaatttaaaaataaattctataaccataaaataaaaaaaaacgataactaacccgtactaaaattaaacctcgaacgttaaacgtactaaacttcttaacaataaccgcaaacgtaatccaaacacaactaaacgccgaacttcttaaccgtaaccccgaacgtaatccaaacgcaactaaacgccgaacttcttaaccgtaaccccgaacgtaatccaaacgcaactaaacgccgaacttcttaaccgtaaccccgaaaataatccaaacgacaactaaacgccgaacttcttaaccgtaaccccgaacgtaatccaaacgcaactaaacgccgaacttcttaaccgtaaccccgaacgtaatccaaacgcaactaaacgccgaacttcttaaccgtaacccaa

SEQ ID NO: 37787 - DNA, 548 bp, Artificial Sequence
  chemically treated genomic DNA (Homo sapiens) CpG-island No: 37787
attttgttaattttgaagatggttgttatttattaatttattaagagaagtaggtttgggagcgggaaaaggcgtgacgtggtggagtcgtttatattttcgtttggtatttcgtgtggtttcgtgttgtgtcgtaagtggtttggtttgggggtagattttgtgattatgaaatgaagggagacggtaattgattcgtattgaggttgagtttcgggcgttgggcgtgttgagttttttgatagtggtcgtagacgtgatttaggtatagttgggcgtcgagttttttgatcgtggtttcggacgtgatttaggcgtagttgggcgtcgagttttttgatcgtggtttcggacgtgatttaggcgtagttgggcgtcgagttttttgatcgtggtttcggaggtgatttaggcggtagttgggcgtcgagttttttgatcgtggtttcggacgtgatttaggcgtagttgggcgtcgagttttttgatcgtggtttcggacgtgatttaggcgtagttgggcgtcgagttttttgatcgtggtttaa

SEQ ID NO: 37788 - DNA, 548 bp, Artificial Sequence
  chemically treated genomic DNA (Homo sapiens) CpG-island No: 37788
ttaaaccacgatcaaaaaactcgacgcccaactacgcctaaatcacgtccgaaaccacgatcaaaaaactcgacgcccaactacgcctaaatcacgtccgaaaccacgatcaaaaaactcgacgcccaactaccgcctaaatcacctccgaaaccacgatcaaaaaactcgacgcccaactacgcctaaatcacgtccgaaaccacgatcaaaaaactcgacgcccaactacgcctaaatcacgtccgaaaccacgatcaaaaaactcgacgcccaactatacctaaatcacgtctacgaccactatcaaaaaactcaacacgcccaacgcccgaaactcaacctcaatacgaatcaattaccgtctcccttcatttcataatcacaaaatctacccccaaaccaaaccacttacgacacaacacgaaaccacacgaaataccaaacgaaaatataaacgactccaccacgtcacgccttttcccgctcccaaacctacttctcttaataaattaataaataacaaccatcttcaaaattaacaaaat

SEQ ID NO: 37789 - DNA, 586 bp, Artificial Sequence
  chemically treated genomic DNA (Homo sapiens) CpG-island No: 37789
cgttcgttattaagtttaagttatttagagggacgcgtatagattttagttttgtttcgggattttacggagggggcgggagcgggattttattagttttcgtagttttcgtagtttttcgagtttcgtagcgttttcgagtttttatttttcggaatttttagttttcgcgggtattttgtttcggagtagtttgttgcgtacgcggttttagagtcgggcgtcggtgttgggggggcgtttgtttttcgatttttttagcgttaggggttcgcgtttcgttttcgggttgtagtcgggttggggtaggacgtcggttatgtcgggggggacgggacgcggcgttggagagaaggcgtttgtggagcgtttagtttcggttgttagtttcgttagttttttagtttcgtcggtttttttcgcgttcgttttttttttttttttttttttcgcgttttttttttttttttttttcgttcgcgtttttttttttttttttttttttcgtattttttttttttcgtttttcgcgaggttgtagtttaggttgagcgtcgttttttaggtttagggtcgtttttttaag

SEQ ID NO: 37790 - DNA, 586 bp, Artificial Sequence
  chemically treated genomic DNA (Homo sapiens) CpG-island No: 37790
cttaaaaaaacgaccctaaacctaaaaaacgacgctcaacctaaactacaacctcgcgaaaaacgaaaaaaaaaaaatacgaaaaaaaaaaaaaaaaaaaaaaacgcgaacgaaaaaaaaaaaaaaaaaaaacgcgaaaaaaaaaaaaaaaaaaaaaacgaacgcgaaaaaaaccgacgaaactaaaaaactaacgaaactaacaaccgaaactaaacgctccacaaacgccttctctccaacgccgcgtcccgtcccccccgacataaccgacgtcctaccccaacccgactacaacccgaaaacgaaacgcgaacccctaacgctaaaaaaatcgaaaaacaaacgcccccccaacaccgacgcccgactctaaaaccgcgtacgcaacaaactactccgaaacaaaatacccgcgaaaactaaaaattccgaaaaataaaaactcgaaaacgctacgaaactcgaaaaactacgaaaactacgaaaactaataaaatcccgctcccgccccctccgtaaaatcccgaaacaaaactaaaatctatacgcgtccctctaaataacttaaacttaataacgaacg

SEQ ID NO: 37791 - DNA, 586 bp, Artificial Sequence
  chemically treated genomic DNA (Homo sapiens) CpG-island No: 37791
tttggaggggcggttttgggtttgggaggcggcgtttagtttgggttgtagtttcgcggagggcggggaaggagggatgcggaggagggaggagggaggagggacgcggacggagggagggagggaggggagcgcggggagggagggagggagggaggcgagcgcggggaaagtcggcgggattagggaattagcgggattggtagtcgggattgagcgttttataggcgttttttttttagcgtcgcgtttcgtttttttcggtatgatcgacgttttgttttagttcgattgtagttcgaaggcggggcgcgaatttttggcgttggaggagtcggggagtaagcgtttttttaatatcggcgttcggttttggggtcgcgtgcgtaataagttgtttcgaaataaggtgttcgcgggggttggaggtttcggggggtgggggttcgggggcgttgcggggttcggggggttgcgggggttgcgggggttgatggggtttcgttttcgtttttttcgtggagtttcgggatagagttggggtttgtgcgcgtttttttaagtggtttgaatttgatggcgaacg

SEQ ID NO: 37792 - DNA, 586 bp, Artificial Sequence
  chemically treated genomic DNA (Homo sapiens) CpG-island No: 37792
cgttcgccatcaaattcaaaccacttaaaaaaacgcgcacaaaccccaactctatcccgaaactccacgaaaaaaacgaaaacgaaaccccatcaacccccgcaacccccgcaaccccccgaaccccgcaacgcccccgaacccccaccccccgaaacctccaacccccgcgaacaccttatttcgaaacaacttattacgcacgcgaccccaaaaccgaacgccgatattaaaaaaacgcttactccccgactcctccaacgccaaaaattcgcgccccgccttcgaactacaatcgaactaaaacaaaacgtcgatcataccgaaaaaaacgaaacgcgacgctaaaaaaaaaacgcctataaaacgctcaatcccgactaccaatcccgctaattccctaatcccgccgactttccccgcgctcgcctccctccctccctccctccccgcgctcccctccctccctccctccgtccgcgtccctcctccctcctccctcctccgcatccctccttccccgccctccgcgaaactacaacccaaactaaacgccgcctcccaaacccaaaaccgcccctccaaa

SEQ ID NO: 37793 - DNA, 604 bp, Artificial Sequence
  chemically treated genomic DNA (Homo sapiens) CpG-island No: 37793
ggttcggtcgcgcgcggggaatgaagatgcgtttgggaagcggttttttcgttttattttatttcggttcggtcgcggttttttcgtttttttttcgtcgtagaagttttcgttagtcgcggtttcgtaattttagaggacgggcggttttatttcgcgacgcgcgttttttgtgtgttcggagcgagcgcgagttcgagtttcggagttcgggaagggcgggttttgcggggtcgggcgggatacggaggagggcgttgggttgttgtgcggcgggttcgttttcgttacgggtcgggtacggcgttaggggttgttcgggttttgttttttttttcgtcgggcgaggacgcgcgaggcggcggcggcggcggcggagcgggttggattaggttcgggatgtagtttcgggtcgggagttttaggtcgggcgcgcgggtgtagatttgttttttttttcgttcgttttttttttttttttttttttcgtcgtcgttgcgtggatttcgttttttgtttgtttttcgcgggtttcggttgttatggaggaggaagaggaggcgataggtttgttggataaggttttggaggacgaagatgtgtt

SEQ ID NO: 37794 - DNA, 604 bp, Artificial Sequence
  chemically treated genomic DNA (Homo sapiens) CpG-island No: 37794
aacacatcttcgtcctccaaaaccttatccaacaaacctatcgcctcctcttcctcctccataacaaccgaaacccgcgaaaaacaaacaaaaaacgaaatccacgcaacgacgacgaaaaaaaaaaaaaaaaaaaaaacgaacgaaaaaaaaaacaaatctacacccgcgcgcccgacctaaaactcccgacccgaaactacatcccgaacctaatccaacccgctccgccgccgccgccgccgcctcgcgcgtcctcgcccgacgaaaaaaaaaacaaaacccgaacaacccctaacgccgtacccgacccgtaacgaaaacgaacccgccgcacaacaacccaacgccctcctccgtatcccgcccgaccccgcaaaacccgcccttcccgaactccgaaactcgaactcgcgctcgctccgaacacacaaaaaacgcgcgtcgcgaaataaaaccgcccgtcctctaaaattacgaaaccgcgactaacgaaaacttctacgacgaaaaaaaaacgaaaaaaccgcgaccgaaccgaaataaaataaaacgaaaaaaccgcttcccaaacgcatcttcattccccgcgcgcgaccgaacc

SEQ ID NO: 37795 - DNA, 604 bp, Artificial Sequence
  chemically treated genomic DNA (Homo sapiens) CpG-island No: 37795
aatatattttcgttttttagaattttgtttagtaagtttatcgtttttttttttttttttatggtagtcggagttcgcggagggtagataggaagcggggtttacgtagcggcggcgggaggagggaggagggaggaggcgggcgggagggggggtaggtttatattcgcgcgttcggtttggggttttcgattcgggattgtatttcggatttagtttagttcgtttcgtcgtcgtcgtcgtcgtttcgcgcgttttcgttcggcgaaagggggagtaaggttcgggtagtttttgacgtcgtgttcggttcgtggcggaggcgaattcgtcgtatagtagtttagcgttttttttcgtgtttcgttcggtttcgtagggttcgtttttttcgggtttcggggttcgggttcgcgttcgtttcgaatatataggaaacgcgcgtcgcgaggtggagtcgttcgttttttggggttgcggggtcgcggttggcggaggtttttgcggcggaggaggagcgaggaggtcgcggtcgggtcggggtggggtggagcggggaggtcgttttttagacgtatttttatttttcgcgcgcggtcgagtt

SEQ ID NO: 37796 - DNA, 604 bp, Artificial Sequence
  chemically treated genomic DNA (Homo sapiens) CpG-island No: 37796
aactcgaccgcgcgcgaaaaataaaaatacgtctaaaaaacgacctccccgctccaccccaccccgacccgaccgcgacctcctcgctcctcctccgccgcaaaaacctccgccaaccgcgaccccgcaaccccaaaaaacgaacgactccacctcgcgacgcgcgtttcctatatattcgaaacgaacgcgaacccgaaccccgaaacccgaaaaaaacgaaccctacgaaaccgaacgaaacacgaaaaaaaacgctaaactactatacgacgaattcgcctccgccacgaaccgaacacgacgtcaaaaactacccgaaccttactccccctttcgccgaacgaaaacgcgcgaaacgacgacgacgacgacgaaacgaactaaactaaatccgaaatacaatcccgaatcgaaaaccccaaaccgaacgcgcgaatataaacctaccccccctcccgcccgcctcctccctcctccctcctcccgccgccgctacgtaaaccccgcttcctatctaccctccgcgaactccgactaccataaaaaaaaaaaaaaaaacgataaacttactaaacaaaattctaaaaaacgaaaatatatt

SEQ ID NO: 37797 - DNA, 759 bp, Artificial Sequence
  chemically treated genomic DNA (Homo sapiens) CpG-island No: 37797
ggagagaaaatgcgggtcgggttgtagttcgggaaagcgtcggtttagcgggttttttttttttttttatttcggtcgtgggttttttagggagagtgcggcgtttcgggttcggtttttcgtttaagtagttatttcgcgtatcgcggtcggtagttgcggatttcgtttgggcggagagttttggttatcgtcggtcgtaaacggggcgtggcgagggcggagggggcgtggcgagggcgggcggaggggcgtggcgagggtagtcgaaggggcgtggcgcgggtcgcggagggggcgtggtagggcgggggaaggggcgtggcgcgggtaggcggagggggcgtggcgtgggcggttttattgggtcgggttttgttttttttagcgtttgtcgtcgacgtcgtcgttttttttcgtcgcgcggatcgtggagcggggtcgtagtcgtttgttcgttttgcggtgggttaggatgtcgggttttttggaggagttgttcggcgagaagttggtgacgggcggcggcgaggaggtggacgtgtattcgttgggcgttcgcggtatttcgttgttgggtttttatttcggttgtagttttagcgttttttgcgcgtagtttagcgttagtttggtcgttttttacgggcgtttgcggggggacgcggcggtcgggtcggggtcgggagcgggggtcggggcggcggcggagttcgagtcgcggcggcgtttggagatcgttttcgtgttttcggatta

SEQ ID NO: 37798 - DNA, 759 bp, Artificial Sequence
  chemically treated genomic DNA (Homo sapiens) CpG-island No: 37798
taatccgaaaacacgaaaacgatctccaaacgccgccgcgactcgaactccgccgccgccccgacccccgctcccgaccccgacccgaccgccgcgtccccccgcaaacgcccgtaaaaaacgaccaaactaacgctaaactacgcgcaaaaaacgctaaaactacaaccgaaataaaaacccaacaacgaaataccgcgaacgcccaacgaatacacgtccacctcctcgccgccgcccgtcaccaacttctcgccgaacaactcctccaaaaaacccgacatcctaacccaccgcaaaacgaacaaacgactacgaccccgctccacgatccgcgcgacgaaaaaaaacgacgacgtcgacgacaaacgctaaaaaaaacaaaacccgacccaataaaaccgcccacgccacgccccctccgcctacccgcgccacgccccttcccccgccctaccacgccccctccgcgacccgcgccacgccccttcgactaccctcgccacgcccctccgcccgccctcgccacgccccctccgccctcgccacgccccgtttacgaccgacgataaccaaaactctccgcccaaacgaaatccgcaactaccgaccgcgatacgcgaaataactacttaaacgaaaaaccgaacccgaaacgccgcactctccctaaaaaacccacgaccgaaataaaaaaaaaaaaaaaacccgctaaaccgacgctttcccgaactacaacccgacccgcattttctctcc

SEQ ID NO: 37799 - DNA, 759 bp, Artificial Sequence
  chemically treated genomic DNA (Homo sapiens) CpG-island No: 37799
tggttcgaggatacgaagacgatttttaggcgtcgtcgcggttcgggtttcgtcgtcgtttcggttttcgttttcggtttcggttcggtcgtcgcgttttttcgtaggcgttcgtagaaggcggttaggttggcgttgagttgcgcgtagggggcgttgaggttgtagtcgaagtagagatttagtagcgagatgtcgcgggcgtttagcgagtgtacgtttattttttcgtcgtcgttcgttattagtttttcgtcgagtagtttttttaggaagttcgatattttggtttatcgtagggcgggtaggcggttgcgatttcgttttacggttcgcgcggcgggaggaggcggcggcgtcggcggtaggcgttggggagagtagagttcggtttagtagggtcgtttacgttacgtttttttcgtttgttcgcgttacgttttttttttcgttttgttacgtttttttcgcggttcgcgttacgttttttcggttgttttcgttacgttttttcgttcgttttcgttacgtttttttcgttttcgttacgtttcgtttgcggtcggcggtggttagagtttttcgtttaggcggggttcgtagttgtcggtcgcggtgcgcggggtgattgtttgggcgagaagtcggattcgaaacgtcgtattttttttggaaagtttacggtcgaagtgaagaaaggagaagggttcgttgagtcggcgttttttcgggttgtagttcggttcgtatttttttttt

SEQ ID NO: 37800 - DNA, 759 bp, Artificial Sequence
  chemically treated genomic DNA (Homo sapiens) CpG-island No: 37800
aaaaaaaaaatacgaaccgaactacaacccgaaaaaacgccgactcaacgaacccttctcctttcttcacttcgaccgtaaactttccaaaaaaaatacgacgtttcgaatccgacttctcgcccaaacaatcaccccgcgcaccgcgaccgacaactacgaaccccgcctaaacgaaaaactctaaccaccgccgaccgcaaacgaaacgtaacgaaaacgaaaaaaacgtaacgaaaacgaacgaaaaaacgtaacgaaaacaaccgaaaaaacgtaacgcgaaccgcgaaaaaaacgtaacaaaacgaaaaaaaaaacgtaacgcgaacaaacgaaaaaaacgtaacgtaaacgaccctactaaaccgaactctactctccccaacgcctaccgccgacgccgccgcctcctcccgccgcgcgaaccgtaaaacgaaatcgcaaccgcctacccgccctacgataaaccaaaatatcgaacttcctaaaaaaactactcgacgaaaaactaataacgaacgacgacgaaaaaataaacgtacactcgctaaacgcccgcgacatctcgctactaaatctctacttcgactacaacctcaacgccccctacgcgcaactcaacgccaacctaaccgccttctacgaacgcctacgaaaaaacgcgacgaccgaaccgaaaccgaaaacgaaaaccgaaacgacgacgaaacccgaaccgcgacgacgcctaaaaatcgtcttcgtatcctcgaacca

SEQ ID NO: 37801 - DNA, 604 bp, Artificial Sequence
  chemically treated genomic DNA (Homo sapiens) CpG-island No: 37801
cggtcggcggattttttagggcgcggatcgtcgttttaggcgtcgttcgcggtcgtggggtttcggtcgggatttatgtttcggcgcgcgggttgcggaggcggcgggaggagtggagggtttcgcggggtcgtagtttggggaagtttcgtcgggcgtttagcgtcgcgtttcgtcgtttagagcgcgtatttcgtcgtcgttcgcgtttttcgatggggtttcgcgaggtttgtcgtcgtttttcgtttcgcgtattttttttttttttttttttttcgtatgtttttttttttttttttttttttttttttcgttcgtaagttttttttttttttcgttattttttgggtttcggtttagattaatttttttggtatttttaaaattgtcgcggtcggtttttttgtgtcgtcgcgggggtttcgcgtttcgtttatttcgttcgtgcgttttcgtagttttagagtttagtttcgaattcgggttttcgcggcgttttttttgttcgcgttgcggtcgtaatgggggggtttatcgggagagttttttgattttagtttattttattatcgggatcgttaagtggttggggtaggggtgg

SEQ ID NO: 37802 - DNA, 604 bp, Artificial Sequence
  chemically treated genomic DNA (Homo sapiens) CpG-island No: 37802
ccacccctaccccaaccacttaacgatcccgataataaaataaactaaaatcaaaaaactctcccgataaacccccccattacgaccgcaacgcgaacaaaaaaaacgccgcgaaaacccgaattcgaaactaaactctaaaactacgaaaacgcacgaacgaaataaacgaaacgcgaaacccccgcgacgacacaaaaaaaccgaccgcgacaattttaaaaataccaaaaaaattaatctaaaccgaaacccaaaaaataacgaaaaaaaaaaaaaacttacgaacgaaaaaaaaaaaaaaaaaaaaaaaaaaaaacatacgaaaaaaaaaaaaaaaaaaaaaatacgcgaaacgaaaaacgacgacaaacctcgcgaaaccccatcgaaaaacgcgaacgacgacgaaatacgcgctctaaacgacgaaacgcgacgctaaacgcccgacgaaacttccccaaactacgaccccgcgaaaccctccactcctcccgccgcctccgcaacccgcgcgccgaaacataaatcccgaccgaaaccccacgaccgcgaacgacgcctaaaacgacgatccgcgccctaaaaaatccgccgaccg

SEQ ID NO: 37803 - DNA, 604 bp, Artificial Sequence
  chemically treated genomic DNA (Homo sapiens) CpG-island No: 37803
ttatttttgttttagttatttggcggtttcgatagtgaaatggattaagattaaggagttttttcggtgagtttttttattgcggtcgtagcgcgggtagggaggacgtcgcgggagttcgggttcgaggttgggttttggggttgcgggggcgtacgggcgaggtaggcggggcgcggggttttcgcggcggtataaagaggtcggtcgcggtagttttgaaaatattaaggaagttgatttgggtcggggtttaagaagtgacgaggagggagggaggtttgcgagcgagggaggaaaggagggagagggagaggagtatgcgggaaggagggagggaggaagggtgcgcggggcgaggggcggcggtagatttcgcggggttttatcgggaagcgcgggcggcggcgggatgcgcgttttgggcggcggggcgcggcgttaggcgttcggcggggtttttttaggttgcgatttcgcgggattttttatttttttcgtcgttttcgtagttcgcgcgtcggagtatgagtttcggtcggagttttacggtcgcgggcggcgtttaggacggcgattcgcgttttggaggattcgtcggtcg

SEQ ID NO: 37804 - DNA, 604 bp, Artificial Sequence
  chemically treated genomic DNA (Homo sapiens) CpG-island No: 37804
cgaccgacgaatcctccaaaacgcgaatcgccgtcctaaacgccgcccgcgaccgtaaaactccgaccgaaactcatactccgacgcgcgaactacgaaaacgacgaaaaaaataaaaaatcccgcgaaatcgcaacctaaaaaaaccccgccgaacgcctaacgccgcgccccgccgcccaaaacgcgcatcccgccgccgcccgcgcttcccgataaaaccccgcgaaatctaccgccgcccctcgccccgcgcacccttcctccctccctccttcccgcatactcctctccctctccctcctttcctccctcgctcgcaaacctccctccctcctcgtcacttcttaaaccccgacccaaatcaacttccttaatattttcaaaactaccgcgaccgacctctttataccgccgcgaaaaccccgcgccccgcctacctcgcccgtacgcccccgcaaccccaaaacccaacctcgaacccgaactcccgcgacgtcctccctacccgcgctacgaccgcaataaaaaaactcaccgaaaaaactccttaatcttaatccatttcactatcgaaaccgccaaataactaaaacaaaaataa

SEQ ID NO: 37805 - DNA, 1082 bp, Artificial Sequence
  chemically treated genomic DNA (Homo sapiens) CpG-island No: 37805
tacggtagcggaaattgttttttaagttatttgggttattcggttttttttttcgcgtttggggtcgggatttcggtcgttcgtttcgttttttttttcgtcgcggtttcgtttttttttcgtttcgtttcgtttcgtttcgtttagtttcgttttcgtcgggtcgggtatgtttagtgggtcgggtcggtaggtttgcgtggtcgttgagttgtcggcgtcggttgagttagcggacgtcgcgttttttggcggtcgtcggttttcgggaagttacgtggcgaagtcggttttcgaggagacgtcgggaggttacgggtgttgttgacgggcgggcgatcgggcgaggtcgacgtggtcgggttgcgaaagttgcgggaggtcgagtgggtggtcgcgttcggagggaggtgtcggtcgggcgcgtttcgtggagaagattcgggcggggcgggcgtttttcggatttttgttcgagttgaattttttttttttgggtcgggttttttcggtcgttttcgttcgtgtttcgttcgttttcgggagatgtttatttgggttgtggcgtgaggagcgggcgggttagcgtcgcggagtttcgggttcgaggagtttcgcgcggcgttggagagagataagatgttcgttagagttgcggtcgttaaggtgagcgttttcgcggtcgttagggttagatcgggtcgatcgtcgtcgttcgtttatcggtatttggttcgcgtttcgttttttttcgttggcggttgtttgggtttcggggcggcggggtgggtagggttggcgcggggtcgcgggtcgcgggtcgcgggtcgcggggagtttttcgggcgggggcggcgcgggtcgtattgggggcggtcggggagggggttgcgggcgttcggtcgtcgtattgggtaggtgtatagttgtcggcgtttgtgtttggttgcggttcgttgagggcggggatacgtaataggtttttcgcggagaaattcggttttagtgagggttcgggggttggaagtcggtttttagcgggtcggggtttggggtgttattttttgttggtcgggagttgt

SEQ ID NO: 37806 - DNA, 1082 bp, Artificial Sequence
  chemically treated genomic DNA (Homo sapiens) CpG-island No: 37806
acaactcccgaccaacaaaaaataacaccccaaaccccgacccgctaaaaaccgacttccaacccccgaaccctcactaaaaccgaatttctccgcgaaaaacctattacgtatccccgccctcaacgaaccgcaaccaaacacaaacgccgacaactatacacctacccaatacgacgaccgaacgcccgcaaccccctccccgaccgcccccaatacgacccgcgccgcccccgcccgaaaaactccccgcgacccgcgacccgcgacccgcgaccccgcgccaaccctacccaccccgccgccccgaaacccaaacaaccgccaacgaaaaaaaacgaaacgcgaaccaaataccgataaacgaacgacgacgatcgacccgatctaaccctaacgaccgcgaaaacgctcaccttaacgaccgcaactctaacgaacatcttatctctctccaacgccgcgcgaaactcctcgaacccgaaactccgcgacgctaacccgcccgctcctcacgccacaacccaaataaacatctcccgaaaacgaacgaaacacgaacgaaaacgaccgaaaaaacccgacccaaaaaaaaaaaattcaactcgaacaaaaatccgaaaaacgcccgccccgcccgaatcttctccacgaaacgcgcccgaccgacacctccctccgaacgcgaccacccactcgacctcccgcaactttcgcaacccgaccacgtcgacctcgcccgatcgcccgcccgtcaacaacacccgtaacctcccgacgtctcctcgaaaaccgacttcgccacgtaacttcccgaaaaccgacgaccgccaaaaaacgcgacgtccgctaactcaaccgacgccgacaactcaacgaccacgcaaacctaccgacccgacccactaaacatacccgacccgacgaaaacgaaactaaacgaaacgaaacgaaacgaaacgaaaaaaaaacgaaaccgcgacgaaaaaaaaaacgaaacgaacgaccgaaatcccgaccccaaacgcgaaaaaaaaaaccgaataacccaaataacttaaaaaacaatttccgctaccgta

SEQ ID NO: 37807 - DNA, 1082 bp, Artificial Sequence
  chemically treated genomic DNA (Homo sapiens) CpG-island No: 37807
gtagttttcggttagtaggaggtggtattttaagtttcgattcgttgagagtcggtttttagttttcgaatttttattggagtcgagttttttcgcgagggatttgttgcgtgttttcgtttttagcgagtcgtagttaggtataggcgtcggtagttatgtatttgtttagtacggcggtcgggcgttcgtagtttttttttcggtcgtttttagtgcggttcgcgtcgttttcgttcgaggggtttttcgcggttcgcggttcgcggttcgcggtttcgcgttagttttgtttatttcgtcgtttcggggtttagatagtcgttagcgagggagggcgggacgcgggttagatgtcggtgggcgggcggcgacggtcggttcggtttggttttggcggtcgcggaggcgtttattttggcggtcgtagttttggcggatattttgtttttttttagcgtcgcgcgaggtttttcggattcgaaatttcgcggcgttggttcgttcgttttttacgttatagtttaaataaatatttttcgagagcgagcggggtacgggcgggggcggtcggaagggttcggtttagggggagggaatttaattcggataaaagttcgggaagcgttcgtttcgttcgggttttttttacggggcgcgttcgatcggtattttttttcgagcgcggttatttattcggtttttcgtagttttcgtagttcggttacgtcggtttcgttcggtcgttcgttcgttagtagtattcgtggtttttcggcgttttttcggaagtcggtttcgttacgtaatttttcgggaatcggcggtcgttaaggaacgcggcgttcgttggtttagtcggcgtcggtaatttagcggttacgtaaatttgtcggttcggtttattgagtatgttcggttcggcgggggcggggttggacgaggcgaggcgaggcgaggcggggagggggcggggtcgcggcgggggagggggcgggacgagcggtcggggtttcgattttaagcgcggaaggaaaagtcgggtaatttaagtaatttggaagatagttttcgttgtcgtg

SEQ ID NO: 37808 - DNA, 1082 bp, Artificial Sequence
  chemically treated genomic DNA (Homo sapiens) CpG-island No: 37808
cacgacaacgaaaactatcttccaaattacttaaattacccgacttttccttccgcgcttaaaatcgaaaccccgaccgctcgtcccgccccctcccccgccgcgaccccgccccctccccgcctcgcctcgcctcgcctcgtccaaccccgcccccgccgaaccgaacatactcaataaaccgaaccgacaaatttacgtaaccgctaaattaccgacgccgactaaaccaacgaacgccgcgttccttaacgaccgccgattcccgaaaaattacgtaacgaaaccgacttccgaaaaaacgccgaaaaaccacgaatactactaacgaacgaacgaccgaacgaaaccgacgtaaccgaactacgaaaactacgaaaaaccgaataaataaccgcgctcgaaaaaaaataccgatcgaacgcgccccgtaaaaaaaacccgaacgaaacgaacgcttcccgaacttttatccgaattaaattccctccccctaaaccgaacccttccgaccgcccccgcccgtaccccgctcgctctcgaaaaatatttatttaaactataacgtaaaaaacgaacgaaccaacgccgcgaaatttcgaatccgaaaaacctcgcgcgacgctaaaaaaaaacaaaatatccgccaaaactacgaccgccaaaataaacgcctccgcgaccgccaaaaccaaaccgaaccgaccgtcgccgcccgcccaccgacatctaacccgcgtcccgccctccctcgctaacgactatctaaaccccgaaacgacgaaataaacaaaactaacgcgaaaccgcgaaccgcgaaccgcgaaccgcgaaaaacccctcgaacgaaaacgacgcgaaccgcactaaaaacgaccgaaaaaaaaactacgaacgcccgaccgccgtactaaacaaatacataactaccgacgcctatacctaactacgactcgctaaaaacgaaaacacgcaacaaatccctcgcgaaaaaactcgactccaataaaaattcgaaaactaaaaaccgactctcaacgaatcgaaacttaaaataccacctcctactaaccgaaaactac

SEQ ID NO: 37809 - DNA, 748 bp, Artificial Sequence
  chemically treated genomic DNA (Homo sapiens) CpG-island No: 37809
tgttagacgcggtgggttcgttcgtgttagatacggagggttcgttcgtgttagatatagtgggttcgttcgtgttagatacggtggattcgttcgtgttagacgcggtgggttcgttcgtgttagatacggagggttcgttcgtgttagatacggtggattcgttcgtgttagatacggtgggttcgttcgtgttagatacggtgggttcgttcgtgttagatacggagggttcgttcgtgttagatacggagggttcgttcgtgttagacgcggtgggttcgttcgtgttagacgcggtgggttcgttcgtgttagacgcggagggttcgttcgtgttagacgcggtgggttcgttggtgttagacgcggtgggttcgttcgtgttagacgcggtgggttcgttcgtgttagacgcggtgggttcgttcgtgttagacgcggtgggttcgttcgtgttagacgcggtggattcgttcgtgttgtgttagatacggtggattcgttcgtgttagacgcggtggattcgttcgtgttgtgttagatacggtggattcgttcgtgttagatacggtggattcgttcgtgttagatacggtgggttcgttcgtgttagatacggtgggttcgttcgtgttagacgcggtggattttttcgtgttgtgttagatacggtggattcgttcgtgttgtgttagatacggtggattcgttcgtgttgtgttagatacggtggattcgtttgtgt

SEQ ID NO: 37810 - DNA, 748 bp, Artificial Sequence
  chemically treated genomic DNA (Homo sapiens) CpG-island No: 37810
acacaaacgaatccaccgtatctaacacaacacgaacgaatccaccgtatctaacacaacacgaacgaatccaccgtatctaacacaacacgaaaaaatccaccgcgtctaacacgaacgaacccaccgtatctaacacgaacgaacccaccgtatctaacacgaacgaatccaccgtatctaacacgaacgaatccaccgtatctaacacaacacgaacgaatccaccgcgtctaacacgaacgaatccaccgtatctaacacaacacgaacgaatccaccgcgtctaacacgaacgaacccaccgcgtctaacacgaacgaacccaccgcgtctaacacgaacgaacccaccgcgtctaacacgaacgaacccaccgcgtctaacaccaacgaacccaccgcgtctaacacgaacgaaccctccgcgtctaacacgaacgaacccaccgcgtctaacacgaacgaacccaccgcgtctaacacgaacgaaccctccgtatctaacacgaacgaaccctccgtatctaacacgaacgaacccaccgtatctaacacgaacgaacccaccgtatctaacacgaacgaatccaccgtatctaacacgaacgaaccctccgtatctaacacgaacgaacccaccgcgtctaacacgaacgaatccaccgtatctaacacgaacgaacccactatatctaacacgaacgaaccctccgtatctaacacgaacgaacccaccgcgtctaaca

SEQ ID NO: 37811 - DNA, 748 bp, Artificial Sequence
  chemically treated genomic DNA (Homo sapiens) CpG-island No: 37811
atataaacgagtttatcgtgtttaatataatacgaacgagtttatcgtgtttaatataatacgaacgagtttatcgtgtttaatataatacgaaggagtttatcgcgtttaatacgaacgaatttatcgtgtttaatacgaacgaatttatcgtgtttaatacgaacgagtttatcgtgtttaatacgaacgagtttatcgtgtttaatataatacgaacgagtttatcgcgtttaatacgaacgagtttatcgtgtttaatataatacgaacgagtttatcgcgtttaatacgaacgagtttatcgcgtttaatacgaacgagtttatcgcgtttaatacgaacgagtttatcgcgtttaatacgaacgagtttatcgcgtttaatattaacgagtttatcgcgtttaatacgaacgaatttttcgcgtttaatacgaacgagtttatcgcgtttaatacgaacgagtttatcgcgtttaatacgaacgagtttttcgtgtttaatacgaacgagtttttcgtgtttaatacgaacgaatttatcgtgtttaatacgaacgaatttatcgtgtttaatacgaacgagtttatcgtgtttaatacgaacgagtttttcgtgtttaatacgaacgaatttatcgcgtttaatacgaacgagtttatcgtgtttaatacgaacgagtttattgtgtttaatacgaacgagtttttcgtgtttaatacgaacgaatttatcgcgtttaata

SEQ ID NO: 37812 - DNA, 748 bp, Artificial Sequence
  chemically treated genomic DNA (Homo sapiens) CpG-island No: 37812
tattaaacgcgataaattcgttcgtattaaacacgaaaaactcgttcgtattaaacacaataaactcgttcgtattaaacacgataaactcgttcgtattaaacgcgataaattcgttcgtattaaacacgaaaaactcgttcgtattaaacacgataaactcgttcgtattaaacacgataaattcgttcgtattaaacacgataaattcgttcgtattaaacacgaaaaactcgttcgtattaaacacgaaaaactcgttcgtattaaacgcgataaactcgttcgtattaaacgcgataaactcgttcgtattaaacgcgaaaaattcgttcgtattaaacgcgataaactcgttaatattaaacgcgataaactcgttcgtattaaacgcgataaactcgttcgtattaaacgcgataaactcgttcgtattaaacgcgataaactcgttcgtattaaacgcgataaactcgttcgtattatattaaacacgataaactcgttcgtattaaacgcgataaactcgttcgtattatattaaacacgataaactcgttcgtattaaacacgataaactcgttcgtattaaacacgataaattcgttcgtattaaacacgataaattcgttcgtattaaacgcgataaactccttcgtattatattaaacacgataaactcgttcgtattatattaaacacgataaactcgttcgtattatattaaacacgataaactcgtttatat

SEQ ID NO: 37813 - DNA, 1068 bp, Artificial Sequence
  chemically treated genomic DNA (Homo sapiens) CpG-island No: 37813
ggtgaagacggtggtgaattgcgcggggaaggggcgaagacggtggtgaattgcgaattgtgcggggtaggggtgaagacggtggtgaattgcgcggggaaggtgtgaagacggtggtgaattgcgcggagaaggggcgaagacggtggtgaattgcggggaaggggtgaagacggtggtgaattgtagggaaggggtgaagacggtgaattgcggggaaggggcgaagacggtggtgaattgtagggaaggggtgaagacggtggtgaattgcgtggggaaggggtgaagacggtggtgaattgcgaattgcgcggggtaggggtgaagacggtggtgaattgcgcggggaaggtgtgaagacggtgaattgcgcggagaaggggtgaagacggtggtgaattgtagggaaggggtgaagacggtggtgaattgcgtggggaaggggtgaagacggtggtgaattgcgaattgcgcggggtaggggtgaagacggtggtgaattgcggggaaggggtgaagacggtggtgaattgcgcggagaaggggcgaagacggtggtgaattgcgcggggaaggggcgaagacggtggtgaattgcgcggggaaggggcgaagatagtggtgaattgtagggaaggggtgaagacggtggtgaattgcggggaaggggtgaagacggtggtgaattgcggggaaggggcgaagacggtggtgaattgcgcggggaaggggcgaagatagtggtgaattgtagggaaggggtgaagacggtggtgaattgcggggaaggggtgaagacggtggtgaattgcggggaaggggcgaagacggtggtgaattgcgcggggaaggggcgaagacggtggtgaattgcgcggggaaggggcgaagacggtggtgaattgcgcggggaagggttaagacggtggttaatgttcggggaaagggtaaaacggtggttaattgcggggaaggtgtgaagacggtggtgaattgcgcggggaaggaggaggcgagtgtcgtttgtaggagtcggagtagttgagggtttattagtgttttggg

SEQ ID NO: 37814 - DNA, 1068 bp, Artificial Sequence
  chemically treated genomic DNA (Homo sapiens) CpG-island No: 37814
cccaaaacactaataaaccctcaactactccgactcctacaaacgacactcgcctcctccttccccgcgcaattcaccaccgtcttcacaccttccccgcaattaaccaccgttttaccctttccccgaacattaaccaccgtcttaacccttccccgcgcaattcaccaccgtcttcgccccttccccgcgcaattcaccaccgtcttcgccccttccccgcgcaattcaccaccgtcttcgccccttccccgcaattcaccaccgtcttcaccccttccccgcaattcaccaccgtcttcaccccttccctacaattcaccactatcttcgccccttccccgcgcaattcaccaccgtcttcgccccttccccgcaattcaccaccgtcttcaccccttccccgcaattcaccaccgtcttcaccccttccctacaattcaccactatcttcgccccttccccgcgcaattcaccaccgtcttcgccccttccccgcgcaattcaccaccgtcttcgccccttctccgcgcaattcaccaccgtcttcaccccttccccgcaattcaccaccgtcttcacccctaccccgcgcaattcgcaattcaccaccgtcttcaccccttccccacgcaattcaccaccgtcttcaccccttccctacaattcaccaccgtcttcaccccttctccgcgcaattcaccgtcttcacaccttccccgcgcaattcaccaccgtcttcacccctaccccgcgcaattcgcaattcaccaccgtcttcaccccttccccacgcaattcaccaccgtcttcaccccttccctacaattcaccaccgtcttcgccccttccccgcaattcaccgtcttcaccccttccctacaattcaccaccgtcttcaccccttccccgcaattcaccaccgtcttcgccccttctccgcgcaattcaccaccgtcttcacaccttccccgcgcaattcaccaccgtcttcacccctaccccgcacaattcgcaattcaccaccgtcttcgccccttccccgcgcaattcaccaccgtcttcacc

SEQ ID NO: 37815 - DNA, 1068 bp, Artificial Sequence
  chemically treated genomic DNA (Homo sapiens) CpG-island No: 37815
tttagggtattggtgggtttttagttgtttcggtttttgtaggcggtattcgtttttttttttttcgcgtagtttattatcgtttttatatttttttcgtagttaattatcgttttgtttttttttcgggtattaattatcgttttaattttttttcgcgtagtttattatcgttttcgtttttttttcgcgtagtttattatcgttttcgtttttttttcgcgtagtttattatcgttttcgtttttttttcgtagtttattatcgtttttatttttttttcgtagtttattatcgtttttattttttttttgtagtttattattgttttcgtttttttttcgcgtagtttattatcgttttcgtttttttttcgtagtttattatcgtttttatttttttttcgtagtttattatcgtttttattttttttttgtagtttattattgttttcgtttttttttcgcgtagtttattatcgttttcgtttttttttcgcgtagtttattatcgttttcgtttttttttcgcgtagtttattatcgtttttatttttttttcgtagtttattatcgtttttatttttatttcgcgtagttcgtagtttattatcgtttttattttttttttacgtagtttattatcgtttttattttttttttgtagtttattatcgtttttatttttttttcgcgtagtttatcgtttttatatttttttcgcgtagtttattatcgtttttatttttatttcgcgtagttcgtagtttattatcgtttttattttttttttacgtagtttattatcgtttttattttttttttgtagtttattatcgttttcgtttttttttcgtagtttatcgtttttattttttttttgtagtttattatcgtttttatttttttttcgtagtttattatcgttttcgtttttttttcgcgtagtttattatcgtttttatatttttttcgcgtagtttattatcgtttttatttttatttcgtatagttcgtagtttattatcgttttcgtttttttttcgcgtagtttattatcgtttttatt

SEQ ID NO: 37816 - DNA, 1068 bp, Artificial Sequence
  chemically treated genomic DNA (Homo sapiens) CpG-island No: 37816
aataaaaacgataataaactacgcgaaaaaaaaacgaaaacgataataaactacgaactatacgaaataaaaataaaaacgataataaactacgcgaaaaaaatataaaaacgataataaactacgcgaaaaaaaaacgaaaacgataataaactacgaaaaaaaaataaaaacgataataaactacaaaaaaaaaataaaaacgataaactacgaaaaaaaaacgaaaacgataataaactacaaaaaaaaaataaaaacgataataaactacgtaaaaaaaaaataaaaacgataataaactacgaactacgcgaaataaaaataaaaacgataataaactacgcgaaaaaaatataaaaacgataaactacgcgaaaaaaaaataaaaacgataataaactacaaaaaaaaaataaaaacgataataaactacgtaaaaaaaaaataaaaacgataataaactacgaactacgcgaaataaaaataaaaacgataataaactacgaaaaaaaaataaaaacgataataaactacgcgaaaaaaaaacgaaaacgataataaactacgcgaaaaaaaaacgaaaacgataataaactacgcgaaaaaaaaacgaaaacaataataaactacaaaaaaaaaataaaaacgataataaactacgaaaaaaaaataaaaacgataataaactacgaaaaaaaaacgaaaacgataataaactacgcgaaaaaaaaacgaaaacaataataaactacaaaaaaaaaataaaaacgataataaactacgaaaaaaaaataaaaacgataataaactacgaaaaaaaaacgaaaacgataataaactacgcgaaaaaaaaacgaaaacgataataaactacgcgaaaaaaaaacgaaaacgataataaactacgcgaaaaaaaattaaaacgataattaatacccgaaaaaaaaacaaaacgataattaactacgaaaaaaatataaaaacgataataaactacgcgaaaaaaaaaaaaacgaataccgcctacaaaaaccgaaacaactaaaaacccaccaataccctaaa

SEQ ID NO: 37817 - DNA, 598 bp, Artificial Sequence
  chemically treated genomic DNA (Homo sapiens) CpG-island No: 37817
cgtgacgttagtacgtcgggcggggatcgggagatttttggggcggtggggggttagcggtagttttcggcggttttcggggcgggcgggcgggcgggtggtggcggcggttggggttcggcgttcgttcgttcgttgggcgggcgggcggtgcgatgttcggagaggatggttcggcggttggttcggggggcggcggcggcggttgttcgggagcggcgacgggagtagttgcggtagtggggggcgcgggcgggcgtcgagtttggtttcggagagcgtcgcgttcgtatcgttcgtttcgagcgcgtcgtcgagtttttggcggtttgtgcgggcggcgatttggacgaggcgcgtttgatgttgcgcgtcgtcgattttggtttcggcgtcgagttcgattttcgtcgcgtcgtcgttcgttcgcgtcgtgttggattttattaacgtcgacggtattagcgttttgtattaggttagcgtttttcgttcggcgtttttcggggttaggtttattttttgttgcgttatttggggtatttttttttttcgttgttagtttcgattcgtttcgtcgtttttggttttggttttg

SEQ ID NO: 37818 - DNA, 598 bp, Artificial Sequence
  chemically treated genomic DNA (Homo sapiens) CpG-island No: 37818
caaaaccaaaaccaaaaacgacgaaacgaatcgaaactaacaacgaaaaaaaaaaataccccaaataacgcaacaaaaaataaacctaaccccgaaaaacgccgaacgaaaaacgctaacctaatacaaaacgctaataccgtcgacgttaataaaatccaacacgacgcgaacgaacgacgacgcgacgaaaatcgaactcgacgccgaaaccaaaatcgacgacgcgcaacatcaaacgcgcctcgtccaaatcgccgcccgcacaaaccgccaaaaactcgacgacgcgctcgaaacgaacgatacgaacgcgacgctctccgaaaccaaactcgacgcccgcccgcgccccccactaccgcaactactcccgtcgccgctcccgaacaaccgccgccgccgccccccgaaccaaccgccgaaccatcctctccgaacatcgcaccgcccgcccgcccaacgaacgaacgaacgccgaaccccaaccgccgccaccacccgcccgcccgcccgccccgaaaaccgccgaaaactaccgctaaccccccaccgccccaaaaatctcccgatccccgcccgacgtactaacgtcacg

SEQ ID NO: 37819 - DNA, 598 bp, Artificial Sequence
  chemically treated genomic DNA (Homo sapiens) CpG-island No: 37819
taaagttagggttaggaacgacggggcggatcgagattggtaacggggaaggaggatgttttaggtggcgtagtagagggtggatttggtttcgggagacgtcgggcggggggcgttgatttggtgtagggcgttgatatcgtcggcgttggtggagtttagtacggcgcgggcgggcggcggcgcggcggaggtcgagttcggcgtcggggttagggtcggcggcgcgtagtattagacgcgtttcgtttaggtcgtcgttcgtataggtcgttaggaattcggcggcgcgttcgaagcggacggtgcgggcgcggcgtttttcggggttaggttcggcgttcgttcgcgttttttattgtcgtagttgttttcgtcgtcgttttcgggtagtcgtcgtcgtcgtttttcgggttagtcgtcgggttatttttttcggatatcgtatcgttcgttcgtttagcgagcgagcgagcgtcgagttttaatcgtcgttattattcgttcgttcgttcgtttcgggggtcgtcgggaattgtcgttggttttttatcgttttaaggatttttcggttttcgttcggcgtgttgacgttacg

SEQ ID NO: 37820 - DNA, 598 bp, Artificial Sequence
  chemically treated genomic DNA (Homo sapiens) CpG-island No: 37820
cgtaacgtcaacacgccgaacgaaaaccgaaaaatccttaaaacgataaaaaaccaacgacaattcccgacgacccccgaaacgaacgaacgaacgaataataacgacgattaaaactcgacgctcgctcgctcgctaaacgaacgaacgatacgatatccgaaaaaaataacccgacgactaacccgaaaaacgacgacgacgactacccgaaaacgacgacgaaaacaactacgacaataaaaaacgcgaacgaacgccgaacctaaccccgaaaaacgccgcgcccgcaccgtccgcttcgaacgcgccgccgaattcctaacgacctatacgaacgacgacctaaacgaaacgcgtctaatactacgcgccgccgaccctaaccccgacgccgaactcgacctccgccgcgccgccgcccgcccgcgccgtactaaactccaccaacgccgacgatatcaacgccctacaccaaatcaacgccccccgcccgacgtctcccgaaaccaaatccaccctctactacgccacctaaaacatcctccttccccgttaccaatctcgatccgccccgtcgttcctaaccctaacttta

SEQ ID NO: 37821 - DNA, 555 bp, Artificial Sequence
  chemically treated genomic DNA (Homo sapiens) CpG-island No: 37821
gtttataggtttttgaaattattaattttagttgtgatagcgtttaggatcgatgtttataggtttcgtttttaggattttcgtttttttcgttcgcgtttcgtttttcgtagtttagtttcggacgcgggtttagtcgcgttatcgttttcgttcgtttgtggttgcgtcgcgcgttttttttcggagttatttaggcggttggtgtgtagtaagtttcgcgtcgatttcggacgtttgacgtttgacgtttgacgtttgtattcggtttcgtatgagtcgttatttgttgtcgttgtcggcgttgggtacggtagtaggcgtcgtcgtgttgtttaagtgagtatattttagtttcgcgtgcgcggttaaggcggtttttagcgtaggggtcgggaaggcggcggagattttcgtttttcgtattcgggtttaggtttcgtagttttcgattcgtagtgttcgttcggagtggggtaaatttgcgttttggtcggttaggttatcggtttaaggttattcggagggaagggcgagtttgggtttttgtaaatg

SEQ ID NO: 37822 - DNA, 555 bp, Artificial Sequence
  chemically treated genomic DNA (Homo sapiens) CpG-island No: 37822
catttacaaaaacccaaactcgcccttccctccgaataaccttaaaccgataacctaaccgaccaaaacgcaaatttaccccactccgaacgaacactacgaatcgaaaactacgaaacctaaacccgaatacgaaaaacgaaaatctccgccgccttcccgacccctacgctaaaaaccgccttaaccgcgcacgcgaaactaaaatatactcacttaaacaacacgacgacgcctactaccgtacccaacgccgacaacgacaacaaataacgactcatacgaaaccgaatacaaacgtcaaacgtcaaacgtcaaacgtccgaaatcgacgcgaaacttactacacaccaaccgcctaaataactccgaaaaaaaacgcgcgacgcaaccacaaacgaacgaaaacgataacgcgactaaacccgcgtccgaaactaaactacgaaaaacgaaacgcgaacgaaaaaaacgaaaatcctaaaaacgaaacctataaacatcgatcctaaacgctatcacaactaaaattaataatttcaaaaacctataaac

SEQ ID NO: 37823 - DNA, 555 bp, Artificial Sequence
  chemically treated genomic DNA (Homo sapiens) CpG-island No: 37823
tatttataagggtttaggttcgttttttttttcgagtgattttgggtcggtgatttggtcggttagagcgtaggtttgttttatttcgggcgggtattgcgggtcgggagttacggggtttggattcgggtgcgaggggcgggggttttcgtcgttttttcggtttttgcgttgggggtcgttttgatcgcgtacgcggggttagaatgtatttatttgagtagtacggcggcgtttgttatcgtgtttagcgtcgatagcggtagtaggtagcggtttatgcggggtcgggtataggcgttaggcgttaggcgttaggcgttcggggtcggcgcggagtttgttgtatattagtcgtttggatagtttcgaggaagagcgcgcgacgtagttataggcgagcggaggcgatggcgcggttgggttcgcgttcggaattgggttgcgaggggcggggcgcgggcggagggggcggggattttagggacgggatttatgagtatcggttttgagcgttgttatagttgggattggtggttttaggagtttgtgggt

SEQ ID NO: 37824 - DNA, 555 bp, Artificial Sequence
  chemically treated genomic DNA (Homo sapiens) CpG-island No: 37824
acccacaaactcctaaaaccaccaatcccaactataacaacgctcaaaaccgatactcataaatcccgtccctaaaatccccgccccctccgcccgcgccccgcccctcgcaacccaattccgaacgcgaacccaaccgcgccatcgcctccgctcgcctataactacgtcgcgcgctcttcctcgaaactatccaaacgactaatatacaacaaactccgcgccgaccccgaacgcctaacgcctaacgcctaacgcctatacccgaccccgcataaaccgctacctactaccgctatcgacgctaaacacgataacaaacgccgccgtactactcaaataaatacattctaaccccgcgtacgcgatcaaaacgacccccaacgcaaaaaccgaaaaaacgacgaaaacccccgcccctcgcacccgaatccaaaccccgtaactcccgacccgcaatacccgcccgaaataaaacaaacctacgctctaaccgaccaaatcaccgacccaaaatcactcgaaaaaaaaaacgaacctaaacccttataaata

SEQ ID NO: 37825 - DNA, 582 bp, Artificial Sequence
  chemically treated genomic DNA (Homo sapiens) CpG-island No: 37825
ttaattgtaggcgttgggtattaaaggcgatagtgatgagaaacgtcgtgtatcggtcgatatcggtatttttcgtttgttgtaaatgtaacgtgataacggcggttttgcgttgtgggataaaaacggtgacgaagagtattggttgacggtttacgtgatggattttttggttcgcgtaggcgaatagggttatagcgtgtcgatagacgttattaatcggggtaatgagcgtttgttgcgttatttataagattcgggtatgatgtcgatttcgtacgcggataattttaaagttagtaaattcgtcgtatagttttacgttgcgttggtgttggttcgttagtaaaaggtttcgttgggtgcgttgcgtgaaatttgggagtatcgtgtagatgtcgtttttggtttatcgttgttgtaatttggcgttgcgttgaaaattatgggtgatgcgacgcgtggtgaagaagcgattgcgttggcgttgaaaacgtcgcgtaatagtgatgagcggatatggttgggtgattacggtagtttattgcgcgataacgcgttaatgttttttttgttggaaga

SEQ ID NO: 37826 - DNA, 582 bp, Artificial Sequence
  chemically treated genomic DNA (Homo sapiens) CpG-island No: 37826
tcttccaacaaaaaaaacattaacgcgttatcgcgcaataaactaccgtaatcacccaaccatatccgctcatcactattacgcgacgttttcaacgccaacgcaatcgcttcttcaccacgcgtcgcatcacccataattttcaacgcaacgccaaattacaacaacgataaaccaaaaacgacatctacacgatactcccaaatttcacgcaacgcacccaacgaaaccttttactaacgaaccaacaccaacgcaacgtaaaactatacgacgaatttactaactttaaaattatccgcgtacgaaatcgacatcatacccgaatcttataaataacgcaacaaacgctcattaccccgattaataacgtctatcgacacgctataaccctattcgcctacgcgaaccaaaaaatccatcacgtaaaccgtcaaccaatactcttcgtcaccgtttttatcccacaacgcaaaaccgccgttatcacgttacatttacaacaaacgaaaaataccgatatcgaccgatacacgacgtttctcatcactatcgcctttaatacccaacgcctacaattaa

SEQ ID NO: 37827 - DNA, 582 bp, Artificial Sequence
  chemically treated genomic DNA (Homo sapiens) CpG-island No: 37827
ttttttagtaaggagagtattaacgcgttgtcgcgtagtgaattatcgtaattatttagttatattcgtttattattattacgcggcgtttttagcgttagcgtaatcgtttttttattacgcgtcgtattatttatggtttttagcgtaacgttaagttgtagtagcggtaaattagaagcggtatttgtacgatgtttttagattttacgtagcgtatttagcggagttttttgttgacgggttaatattagcgtagcgtaagattgtacggcgaatttattggttttgagattattcgcgtacgggatcgatattatgttcggattttgtaaatagcgtagtagacgtttattatttcggttaatggcgtttgtcggtacgttgtaattttgttcgtttgcgcggattaggaaatttattacgtaagtcgttagttagtatttttcgttatcgtttttattttatagcgtaaagtcgtcgttattacgttgtatttgtagtaaacgggaaatgtcgatatcgatcgatgtacggcgttttttattattgtcgtttttgatgtttaacgtttgtagttgg

SEQ ID NO: 37828 - DNA, 582 bp, Artificial Sequence
  chemically treated genomic DNA (Homo sapiens) CpG-island No: 37828
ccaactacaaacgttaaacatcaaaaacgacaataataaaaaacgccgtacatcgatcgatatcgacatttcccgtttactacaaatacaacgtaataacgacgactttacgctataaaataaaaacgataacgaaaaatactaactaacgacttacgtaataaatttcctaatccgcgcaaacgaacaaaattacaacgtaccgacaaacgccattaaccgaaataataaacgtctactacgctatttacaaaatccgaacataatatcgatcccgtacgcgaataatctcaaaaccaataaattcgccgtacaatcttacgctacgctaatattaacccgtcaacaaaaaactccgctaaatacgctacgtaaaatctaaaaacatcgtacaaataccgcttctaatttaccgctactacaacttaacgttacgctaaaaaccataaataatacgacgcgtaataaaaaaacgattacgctaacgctaaaaacgccgcgtaataataataaacgaatataactaaataattacgataattcactacgcgacaacgcgttaatactctccttactaaaaaa

SEQ ID NO: 37829 - DNA, 567 bp, Artificial Sequence
  chemically treated genomic DNA (Homo sapiens) CpG-island No: 37829
atcgtcgttacgacggttagagattatattcgtcgagatgttcgcggtttagggtttataatttttttcggttagtttttttggtcgcgtaagcgtagtggggtcggcgggaagcgtaggcgtgtgacgttattaggcggcgcgggttagttaggtgtacgtgattaaggttttgggcgcggtaggtggtagttttttcgtttttttggtttttttattttttgttgcgggggatcgcgtaagcgtagtgagtattgtacgttgtcgcgggttagtaacgttattagacgtgtgtgtgtttttgcggcgttaagaaggggagattgaggttgaggttggggaatatcgggtagtatgagcggttgcgggttttttttgcgtattacggttgcggttcgtgtttgtcggggtttggtggtttttatcgcgaatcggcggttattgcgtattagttcgtttgtacgagttttcgttaaagagttttttttaggtaaaattaagaaggtaacgcgagttttgggcgaatttttgttgtttggttttcgttttttatttttagttgtaaga

SEQ ID NO: 37830 - DNA, 567 bp, Artificial Sequence
  chemically treated genomic DNA (Homo sapiens) CpG-island No: 37830
tcttacaactaaaaataaaaaacgaaaaccaaacaacaaaaattcgcccaaaactcgcgttaccttcttaattttacctaaaaaaaactctttaacgaaaactcgtacaaacgaactaatacgcaataaccgccgattcgcgataaaaaccaccaaaccccgacaaacacgaaccgcaaccgtaatacgcaaaaaaaacccgcaaccgctcatactacccgatattccccaacctcaacctcaatctccccttcttaacgccgcaaaaacacacacacgtctaataacgttactaacccgcgacaacgtacaatactcactacgcttacgcgatcccccgcaacaaaaaataaaaaaaccaaaaaaacgaaaaaactaccacctaccgcgcccaaaaccttaatcacgtacacctaactaacccgcgccgcctaataacgtcacacgcctacgcttcccgccgaccccactacgcttacgcgaccaaaaaaactaaccgaaaaaaattataaaccctaaaccgcgaacatctcgacgaatataatctctaaccgtcgtaacgacgat

SEQ ID NO: 37831 - DNA, 567 bp, Artificial Sequence
  chemically treated genomic DNA (Homo sapiens) CpG-island No: 37831
ttttgtagttgagggtgaaaagcgggagttagatagtaagggttcgtttagggttcgcgttatttttttgattttgtttaggaaaagttttttggcgaaagttcgtataggcgggttggtgcgtagtagtcgtcggttcgcggtagagattattagatttcggtaggtacgagtcgtagtcgtggtgcgtaggaagagttcgtagtcgtttatgttgttcgatgttttttagttttagttttagttttttttttttagcgtcgtagggatatatatacgtttgatgacgttattggttcgcgataacgtgtagtatttattgcgtttgcgcggtttttcgtagtaggggatggagaggttagaagggcgggaaggttattatttgtcgcgtttaaggttttagttacgtgtatttggttggttcgcgtcgtttgatgacgttatacgtttacgtttttcgtcggttttattgcgtttgcgcggttaaaggagttggtcggaggaaattgtaggttttgggtcgcgggtatttcggcgggtataatttttggtcgtcgtgacggcggt

SEQ ID NO: 37832 - DNA, 567 bp, Artificial Sequence
  chemically treated genomic DNA (Homo sapiens) CpG-island No: 37832
accgccgtcacgacgaccaaaaattatacccgccgaaatacccgcgacccaaaacctacaatttcctccgaccaactcctttaaccgcgcaaacgcaataaaaccgacgaaaaacgtaaacgtataacgtcatcaaacgacgcgaaccaaccaaatacacgtaactaaaaccttaaacgcgacaaataataaccttcccgcccttctaacctctccatcccctactacgaaaaaccgcgcaaacgcaataaatactacacgttatcgcgaaccaataacgtcatcaaacgtatatatatccctacgacgctaaaaaaaaaaaactaaaactaaaactaaaaaacatcgaacaacataaacgactacgaactcttcctacgcaccacgactacgactcgtacctaccgaaatctaataatctctaccgcgaaccgacgactactacgcaccaacccgcctatacgaactttcgccaaaaaacttttcctaaacaaaatcaaaaaaataacgcgaaccctaaacgaacccttactatctaactcccgcttttcaccctcaactacaaaa

SEQ ID NO: 37833 - DNA, 918 bp, Artificial Sequence
  chemically treated genomic DNA (Homo sapiens) CpG-island No: 37833
ttttcgtggtcggcgcgtatttgtagtgttaggtagcgcgtattattgttttgtagcgcggcgcgtaggttttttattaattcgcgtaagttgttattttttttttttagtcgcgtaacgcgtttatagttaggatcgttgtcggggttaggcgcgtagggcgggcggcggcggcggcgcggacggcgtaggcggatttgcgtttcgatgtgttcgttgagagcgtcgcggggtagtcggggtttcgtacgggtgtcgaagtagttatagaggcgcgcgtggaattggcggaaggtgagtttcggcggttcggcgcgtagcgttaggcgcgtttttttatcggtatttgagttttcgttcgtggttaatttagcggtcgtattttcgggggttatatttttggagttttcgttatttgttgtttgttcggtcgtggtggtttttttcgcgcgtagttttagtatagcgtagagcgttcggaagtcggcgcggggtagacggtcggcgtcgcggtagtttaggtggtggaagattttttgtaggtattggtttaggtcggtggttagtattacgatttcgttttttacgtcgcggtttagttcgtagtggtgcgttagggcgtttagtagttattgcgtgcgtcgcgtaggtcgtcggtacgggttatttttcgcgttttttatgtcggttttcgcgttcgtgttgatcggttttatcgttgcgtcgcgcgtttcgttttttcggtttttttttcggttttttcgtttcgttatttttaggggcggttttagagtttttcgaaaggaggggtttagcggtcgcggtttggttggagcggcgtcggggatcgtgtttagtagttgcgttggttttatagtgcgtttggtttattttagttgttttggaggggtttggggt

SEQ ID NO: 37834 - DNA, 918 bp, Artificial Sequence
  chemically treated genomic DNA (Homo sapiens) CpG-island No: 37834
accccaaacccctccaaaacaactaaaataaaccaaacgcactataaaaccaacgcaactactaaacacgatccccgacgccgctccaaccaaaccgcgaccgctaaacccctcctttcgaaaaactctaaaaccgcccctaaaaataacgaaacgaaaaaaccgaaaaaaaaaccgaaaaaacgaaacgcgcgacgcaacgataaaaccgatcaacacgaacgcgaaaaccgacataaaaaacgcgaaaaataacccgtaccgacgacctacgcgacgcacgcaataactactaaacgccctaacgcaccactacgaactaaaccgcgacgtaaaaaacgaaatcgtaatactaaccaccgacctaaaccaatacctacaaaaaatcttccaccacctaaactaccgcgacgccgaccgtctaccccgcgccgacttccgaacgctctacgctatactaaaactacgcgcgaaaaaaaccaccacgaccgaacaaacaacaaataacgaaaactccaaaaatataacccccgaaaatacgaccgctaaattaaccacgaacgaaaactcaaataccgataaaaaaacgcgcctaacgctacgcgccgaaccgccgaaactcaccttccgccaattccacgcgcgcctctataactacttcgacacccgtacgaaaccccgactaccccgcgacgctctcaacgaacacatcgaaacgcaaatccgcctacgccgtccgcgccgccgccgccgcccgccctacgcgcctaaccccgacaacgatcctaactataaacgcgttacgcgactaaaaaaaaaaaataacaacttacgcgaattaataaaaaacctacgcgccgcgctacaaaacaataatacgcgctacctaacactacaaatacgcgccgaccacgaaaa

SEQ ID NO: 37835 - DNA, 918 bp, Artificial Sequence
  chemically treated genomic DNA (Homo sapiens) CpG-island No: 37835
attttaggtttttttaaagtaattggggtaaattagacgtattgtgaggttagcgtagttgttggatacggttttcggcgtcgttttaattagatcgcgatcgttaagttttttttttcgagaaattttggggtcgtttttggaagtggcggggcgaagggatcggaggagggatcggaggagcgaggcgcgcggcgtagcgatggagtcggttagtacgggcgcggaggtcggtatggagggcgcgggaggtgattcgtatcggcgatttgcgcggcgtacgtagtggttgttgagcgttttggcgtattattacgggttggatcgcggcgtggagaacgagatcgtggtgttggttatcggtttggattagtatttgtaggaggttttttattatttggattgtcgcggcgtcggtcgtttgtttcgcgtcgattttcgagcgttttgcgttgtgttggggttgcgcgcggagggggttattacggtcgggtaggtagtaggtgacgggaattttagagatgtgattttcggggatgcggtcgttgagttggttacggacggggatttagatatcgatgaagaggcgcgtttggcgttgcgcgtcgagtcgtcggagtttatttttcgttagttttacgcgcgtttttgtggttatttcggtattcgtgcggggtttcggttgtttcgcggcgtttttagcgagtatatcgagacgtagattcgtttgcgtcgttcgcgtcgtcgtcgtcgttcgttttgcgcgtttggtttcgatagcggttttgattgtgagcgcgttgcgcggttggaggaggagaatagtagtttgcgcgagttggtggaggatttgcgcgtcgcgttgtagagtagtgatgcgcgttgtttagtattgtaggtgcgcgtcggttacgaagg

SEQ ID NO: 37836 - DNA, 918 bp, Artificial Sequence
  chemically treated genomic DNA (Homo sapiens) CpG-island No: 37836
ccttcgtaaccgacgcgcacctacaatactaaacaacgcgcatcactactctacaacgcgacgcgcaaatcctccaccaactcgcgcaaactactattctcctcctccaaccgcgcaacgcgctcacaatcaaaaccgctatcgaaaccaaacgcgcaaaacgaacgacgacgacgacgcgaacgacgcaaacgaatctacgtctcgatatactcgctaaaaacgccgcgaaacaaccgaaaccccgcacgaataccgaaataaccacaaaaacgcgcgtaaaactaacgaaaaataaactccgacgactcgacgcgcaacgccaaacgcgcctcttcatcgatatctaaatccccgtccgtaaccaactcaacgaccgcatccccgaaaatcacatctctaaaattcccgtcacctactacctacccgaccgtaataaccccctccgcgcgcaaccccaacacaacgcaaaacgctcgaaaatcgacgcgaaacaaacgaccgacgccgcgacaatccaaataataaaaaacctcctacaaatactaatccaaaccgataaccaacaccacgatctcgttctccacgccgcgatccaacccgtaataatacgccaaaacgctcaacaaccactacgtacgccgcgcaaatcgccgatacgaatcacctcccgcgccctccataccgacctccgcgcccgtactaaccgactccatcgctacgccgcgcgcctcgctcctccgatccctcctccgatcccttcgccccgccacttccaaaaacgaccccaaaatttctcgaaaaaaaaaacttaacgatcgcgatctaattaaaacgacgccgaaaaccgtatccaacaactacgctaacctcacaatacgtctaatttaccccaattactttaaaaaaacctaaaat

SEQ ID NO: 37837 - DNA, 557 bp, Artificial Sequence
  chemically treated genomic DNA (Homo sapiens) CpG-island No: 37837
gttcgtcgaggcggtataaatcgtcgtgacgattagcggtttaatgatcgaagttaggttggtaagagtcgcgagcgatttttgaagttgtttttgatggtcgttatttatttgtttggatagtatggtttgtaacgcgggtatttcgatgtcgtcggaagcgagaagaattataatggggaaggttatttagtttcgcgtcgcgaacgttagtaagacgtagtttagcgcgtcggtcgttatgtcggcgataatggtttgtttttcgtcgaaacgtttggtggcgggattagtgacgaaggtttgagcgagggcgtgtaagatttcgaatatcgtaagcgataggtcgattatcgtcgcgttttagcgaaagcggttttcgtcgaaaatgatttagagcgttgtcggtatttgttttacgagttgtatgataaagaagatagttataagtgcggcgacgatagttatgtttcgcgtttatcggaaggagttgattgggttgaaggtttttaagggtatcggtcgatttttgaggaatattttaaatttttaaaaaa

SEQ ID NO: 37838 - DNA, 557 bp, Artificial Sequence
  chemically treated genomic DNA (Homo sapiens) CpG-island No: 37838
ttttttaaaaatttaaaatattcctcaaaaatcgaccgatacccttaaaaaccttcaacccaatcaactccttccgataaacgcgaaacataactatcgtcgccgcacttataactatcttctttatcatacaactcgtaaaacaaataccgacaacgctctaaatcattttcgacgaaaaccgctttcgctaaaacgcgacgataatcgacctatcgcttacgatattcgaaatcttacacgccctcgctcaaaccttcgtcactaatcccgccaccaaacgtttcgacgaaaaacaaaccattatcgccgacataacgaccgacgcgctaaactacgtcttactaacgttcgcgacgcgaaactaaataaccttccccattataattcttctcgcttccgacgacatcgaaatacccgcgttacaaaccatactatccaaacaaataaataacgaccatcaaaaacaacttcaaaaatcgctcgcgactcttaccaacctaacttcgatcattaaaccgctaatcgtcacgacgatttataccgcctcgacgaac

SEQ ID NO: 37839 - DNA, 557 bp, Artificial Sequence
  chemically treated genomic DNA (Homo sapiens) CpG-island No: 37839
ttttttgaaaatttgaaatattttttaggagtcgatcgatgtttttgagagtttttaatttagttagtttttttcggtgggcgcggggtatgattatcgtcgtcgtatttatgattgttttttttattatgtaattcgtaggataggtgtcggtagcgttttgggttattttcggcgaggatcgttttcgttggagcgcgacgatgatcggtttgtcgtttgcggtattcggaattttgtacgttttcgtttaagttttcgttattggtttcgttattaaacgtttcggcgagaagtaggttattatcgtcggtatggcggtcgacgcgttgggttacgttttgttggcgttcgcgacgcgaggttggatggttttttttattatgatttttttcgttttcggcggtatcgggatgttcgcgttgtaggttatgttgtttaggtaggtagatgacgattattagggatagttttaaggatcgttcgcggtttttattagtttaatttcgattattggatcgttgatcgttacggcgatttatgtcgtttcggcgagt

SEQ ID NO: 37840 - DNA, 557 bp, Artificial Sequence
  chemically treated genomic DNA (Homo sapiens) CpG-island No: 37840
actcgccgaaacgacataaatcgccgtaacgatcaacgatccaataatcgaaattaaactaataaaaaccgcgaacgatccttaaaactatccctaataatcgtcatctacctacctaaacaacataacctacaacgcgaacatcccgataccgccgaaaacgaaaaaaatcataataaaaaaaaccatccaacctcgcgtcgcgaacgccaacaaaacgtaacccaacgcgtcgaccgccataccgacgataataacctacttctcgccgaaacgtttaataacgaaaccaataacgaaaacttaaacgaaaacgtacaaaattccgaataccgcaaacgacaaaccgatcatcgtcgcgctccaacgaaaacgatcctcgccgaaaataacccaaaacgctaccgacacctatcctacgaattacataataaaaaaaacaatcataaatacgacgacgataatcataccccgcgcccaccgaaaaaaactaactaaattaaaaactctcaaaaacatcgatcgactcctaaaaaatatttcaaattttcaaaaaa

SEQ ID NO: 37841 - DNA, 669 bp, Artificial Sequence
  chemically treated genomic DNA (Homo sapiens) CpG-island No: 37841
ggttcgggcggggcgcgttaggatcgagcgagcggagggagcgagtcgggcggagttagcgtttttcgttttcgtcggcggtttttttttttcggtcgttgcgtcgttcggttcgcgacgttgtagaggtttcgaggcggcggcggcgatttttttttttttttttttttttttcgttcgttcgttcgttcgcgcgtttgttcgttcggttcggttcggttcgaagtatggtcggcgttagttttagcgttatcgtttggagttgttggcggtttacgaggaggtgattcgagaggagagcgcggtcgattggtgagtttttcgttttcgttttcggtttttttgttttcgcgtcgtcgtcgcgtttttgtttttttttcgtttcgtcgtttcgtcgtcgggaagggagggggatttcgaaatggtgtagcgggtcgggagggtcgggaggggttgtttttgtgcgcgtcgggggaggggtcggcgggttaggcggggtattgcgggtttcgagcgttcggaggcggtttaaggcgcgcggtgggagcggcggtcggacgcggttcggaggcgcggggtttcgatgtggggttcgggtcgcgtggtttgcgggagtttattttttattttatttttcgggttcgggggataggtgtgtacggggcggtt

SEQ ID NO: 37842 - DNA, 669 bp, Artificial Sequence
  chemically treated genomic DNA (Homo sapiens) CpG-island No: 37842
aaccgccccgtacacacctatcccccgaacccgaaaaataaaataaaaaataaactcccgcaaaccacgcgacccgaaccccacatcgaaaccccgcgcctccgaaccgcgtccgaccgccgctcccaccgcgcgccttaaaccgcctccgaacgctcgaaacccgcaataccccgcctaacccgccgacccctcccccgacgcgcacaaaaacaacccctcccgaccctcccgacccgctacaccatttcgaaatccccctcccttcccgacgacgaaacgacgaaacgaaaaaaaaacaaaaacgcgacgacgacgcgaaaacaaaaaaaccgaaaacgaaaacgaaaaactcaccaatcgaccgcgctctcctctcgaatcacctcctcgtaaaccgccaacaactccaaacgataacgctaaaactaacgccgaccatacttcgaaccgaaccgaaccgaacgaacaaacgcgcgaacgaacgaacgaacgaaaaaaaaaaaaaaaaaaaaaaaaatcgccgccgccgcctcgaaacctctacaacgtcgcgaaccgaacgacgcaacgaccgaaaaaaaaaaaccgccgacgaaaacgaaaaacgctaactccgcccgactcgctccctccgctcgctcgatcctaacgcgccccgcccgaacc

SEQ ID NO: 37843 - DNA, 669 bp, Artificial Sequence
  chemically treated genomic DNA (Homo sapiens) CpG-island No: 37843
ggtcgtttcgtgtatatttgtttttcgggttcggggggtagggtgggggatgggttttcgtaggttacgcggttcgggttttatatcgggatttcgcgttttcgggtcgcgttcggtcgtcgtttttatcgcgcgttttgggtcgttttcgggcgttcggggttcgtagtgtttcgtttggttcgtcggtttttttttcggcgcgtataaaggtagtttttttcggttttttcggttcgttgtattatttcggggttttttttttttttcggcggcggggcggcggggcgggagagaaataaaggcgcggcggcggcgcggggataaaggggtcgggggcgggggcggggggtttattagtcggtcgcgtttttttttcggattattttttcgtaagtcgttagtagttttaggcggtggcgttgaagttgacgtcggttatgtttcgggtcggatcgggtcgaacggatagacgcgcggacggacgggcggacggaggaggagggagggaaagagggagtcgtcgtcgtcgtttcggagtttttgtagcgtcgcgagtcgagcgacgtagcggtcgggggaggggagtcgtcggcgggggcggggggcgttggtttcgttcggttcgtttttttcgttcgttcggttttagcgcgtttcgttcggatt

SEQ ID NO: 37844 - DNA, 669 bp, Artificial Sequence
  chemically treated genomic DNA (Homo sapiens) CpG-island No: 37844
aatccgaacgaaacgcgctaaaaccgaacgaacgaaaaaaacgaaccgaacgaaaccaacgccccccgcccccgccgacgactcccctcccccgaccgctacgtcgctcgactcgcgacgctacaaaaactccgaaacgacgacgacgactccctctttccctccctcctcctccgtccgcccgtccgtccgcgcgtctatccgttcgacccgatccgacccgaaacataaccgacgtcaacttcaacgccaccgcctaaaactactaacgacttacgaaaaaataatccgaaaaaaaaacgcgaccgactaataaaccccccgcccccgcccccgacccctttatccccgcgccgccgccgcgcctttatttctctcccgccccgccgccccgccgccgaaaaaaaaaaaaaaccccgaaataatacaacgaaccgaaaaaaccgaaaaaaactacctttatacgcgccgaaaaaaaaaccgacgaaccaaacgaaacactacgaaccccgaacgcccgaaaacgacccaaaacgcgcgataaaaacgacgaccgaacgcgacccgaaaacgcgaaatcccgatataaaacccgaaccgcgtaacctacgaaaacccatcccccaccctaccccccgaacccgaaaaacaaatatacacgaaacgacc

SEQ ID NO: 37845 - DNA, 1767 bp, Artificial Sequence
  chemically treated genomic DNA (Homo sapiens) CpG-island No: 37845
gagttcgtcggtggggttcggggcgtcgcgtttttttatacggttgtagttttttcgaataaggggatggagatcggtagacgttaagtttcgtgttttaggggttcgcggttgttgagttttgagtcggtttagttggggaagattcggcggttacggtcggtttgtaggtagagggttgggtagggcggcgcgggtcgaggggcgttgggtaggtgtagcgtcgaggtgtagtttcggtttaggaagagcggtttgtagttgggaggcggttgtttttgttttttcgttgtcgcggcgatttaggaagggcgtgacgattttgcggtagaggtcgcgcgtgttcgtgagtatttcgttatagggcggcggcggttttgttattagtatcgttttttcgtaatacggtggtttggatatgttcgatttcgttgcggagtgggaggcggtcggaggaggtgaggtcgtcggtttttagttttcgtagagtttcggtagttgtcgcgcgttttagttttagttcgaattcgagttcgtcgtcgttcgtgttttttcggaggttgcggatggaagttttgagggtaagtagcgagttttttaacgttcgtttattttcggcggttcggatagttttttgggggaggtcggtatttattttggcgcgggtagttttagggtcgtggcggtatcgatacggtaaaggcggcgggtgcgggagcgtggtggtgcgggtgtgggtgcgcgtgcgtgcggttgcgcgggttcgtggtgtagtagcgggtgtacgtgtacgtcggatgcgagtgcgcgtgatcggcgtttttagcggttacggtgtggtggtggttgcggtagcgtaggttcggggggtttcggttagattgttttcgagttcgaggggttttagttttagggcgcgtaggttttgttcgcgtagtcgttttttttggcgtcgtttgaggcgcggcgtaggaagttgtagaagtatagagtaggacgatgagattttagatgagttagaagtcggcgaacgacgtgaggaacgtgtaggtgttttgggatattattatggcggcggtacgggcggcgggtttttagacgttttattggatattgggtttcgttgcgtggtttcgggttcgcgttatatttttaggtgtcgttagcgttattcggggattcgcggtcgggggttgttcgtggtaggttttaagtcgtgcgcgcgtcggcgggggatagtagcggcgttcgtttttttttatggcgtcggcggcgtcgggcgtgttttattcggggtcgcgcgggatttgtagggtagatacggggcgtagtgaaggcgcgtcgcggtttttaacgatttttcggttttcgttcgcgttttgcgagttcggggaaagtttttttcgtgggaatttcgcgtttttcgggggttcggtgacgttatcgaggagggtgacgttacgtttcgaggttttttcggtaggttttttcgatttgagtttcggtcgtcgtcgcgagttcgggcgtcgaggggagtcgaggcgggttagtagggggcgcgcgaaggacggattttagttttgagttcgaacgagagattcgttattcgtagtttcggggttaaagggttttaggagtttgtgcgtattaggtttttgaagaggcgtttcggcgtcgttgttgtgcggcggggaaagggtggtatattttttagagttttatagatagttattcgacgttttgtatagacgtttggtagtttttggt

SEQ ID NO: 37846 - DNA, 1767 bp, Artificial Sequence
  chemically treated genomic DNA (Homo sapiens) CpG-island No: 37846
accaaaaactaccaaacgtctatacaaaacgtcgaataactatctataaaactctaaaaaatataccaccctttccccgccgcacaacaacgacgccgaaacgcctcttcaaaaacctaatacgcacaaactcctaaaaccctttaaccccgaaactacgaataacgaatctctcgttcgaactcaaaactaaaatccgtccttcgcgcgccccctactaacccgcctcgactcccctcgacgcccgaactcgcgacgacgaccgaaactcaaatcgaaaaaacctaccgaaaaaacctcgaaacgtaacgtcaccctcctcgataacgtcaccgaacccccgaaaaacgcgaaattcccacgaaaaaaactttccccgaactcgcaaaacgcgaacgaaaaccgaaaaatcgttaaaaaccgcgacgcgccttcactacgccccgtatctaccctacaaatcccgcgcgaccccgaataaaacacgcccgacgccgccgacgccataaaaaaaaacgaacgccgctactatcccccgccgacgcgcgcacgacttaaaacctaccacgaacaacccccgaccgcgaatccccgaataacgctaacgacacctaaaaatataacgcgaacccgaaaccacgcaacgaaacccaatatccaataaaacgtctaaaaacccgccgcccgtaccgccgccataataatatcccaaaacacctacacgttcctcacgtcgttcgccgacttctaactcatctaaaatctcatcgtcctactctatacttctacaacttcctacgccgcgcctcaaacgacgccaaaaaaaacgactacgcgaacaaaacctacgcgccctaaaactaaaacccctcgaactcgaaaacaatctaaccgaaaccccccgaacctacgctaccgcaaccaccaccacaccgtaaccgctaaaaacgccgatcacgcgcactcgcatccgacgtacacgtacacccgctactacaccacgaacccgcgcaaccgcacgcacgcgcacccacacccgcaccaccacgctcccgcacccgccgcctttaccgtatcgataccgccacgaccctaaaactacccgcgccaaaataaataccgacctcccccaaaaaactatccgaaccgccgaaaataaacgaacgttaaaaaactcgctacttaccctcaaaacttccatccgcaacctccgaaaaaacacgaacgacgacgaactcgaattcgaactaaaactaaaacgcgcgacaactaccgaaactctacgaaaactaaaaaccgacgacctcacctcctccgaccgcctcccactccgcaacgaaatcgaacatatccaaaccaccgtattacgaaaaaacgatactaataacaaaaccgccgccgccctataacgaaatactcacgaacacgcgcgacctctaccgcaaaatcgtcacgcccttcctaaatcgccgcgacaacgaaaaaacaaaaacaaccgcctcccaactacaaaccgctcttcctaaaccgaaactacacctcgacgctacacctacccaacgcccctcgacccgcgccgccctacccaaccctctacctacaaaccgaccgtaaccgccgaatcttccccaactaaaccgactcaaaactcaacaaccgcgaacccctaaaacacgaaacttaacgtctaccgatctccatccccttattcgaaaaaactacaaccgtataaaaaaacgcgacgccccgaaccccaccgacgaactc

SEQ ID NO: 37847 - DNA, 1767 bp, Artificial Sequence
  chemically treated genomic DNA (Homo sapiens) CpG-island No: 37847
gttaggggttgttaggcgtttgtatagggcgtcgggtggttgtttgtggggttttaggagatgtattatttttttttcgtcgtatagtaacggcgtcgagacgtttttttagggatttggtgcgtataggtttttgaaattttttggtttcgggattgcggatggcgaatttttcgttcggatttagagttggagttcgtttttcgcgcgttttttgttggttcgtttcggtttttttcggcgttcgggttcgcggcggcggtcggggtttagatcggggaaatttatcggggaaatttcgaggcgtgacgttatttttttcggtgacgttatcgggttttcggggagcgcgaggtttttacggaggaggtttttttcggattcgtagggcgcgggcgggggtcgggaagtcgttgggggtcgcggcgcgtttttattgcgtttcgtgtttgttttataggtttcgcgcggtttcgggtgaggtacgttcggcgtcgtcggcgttatgggaaggagcgggcgtcgttgttgtttttcgtcggcgcgcgtacgatttgagatttgttacgggtagttttcggtcgcgggttttcgagtgacgttggcggtatttgagagtgtggcgcgggttcggggttacgtagcggagtttagtgtttagtgaagcgtttgaggattcgtcgttcgtgtcgtcgttatggtgatgttttagggtatttatacgttttttacgtcgttcgtcggtttttggtttatttggggttttatcgttttgttttgtgtttttgtagttttttgcgtcgcgttttaaacggcgttaggaggagcgattgcgcgagtagaatttgcgcgttttagagttggagtttttcgaattcgagggtagtttggtcgggatttttcgggtttgcgttgtcgtagttattattatatcgtagtcgttggaggcgtcggttacgcgtattcgtattcgacgtgtacgtgtattcgttgttgtattacgggttcgcgtagtcgtacgtacgcgtatttatattcgtattattacgttttcgtattcgtcgtttttatcgtgtcggtgtcgttacggttttggagttattcgcgttaaggtgagtatcgattttttttagggggttattcgggtcgtcggaagtgggcgggcgttggagggttcgttgtttatttttagggtttttattcgtagttttcgggagaatacgggcggcggcgggttcgggttcgggttagggttggggcgcgcggtagttgtcggggttttgcgagggttgggaatcggcggttttatttttttcgatcgttttttatttcgtagcggaatcggatatgtttaaattatcgtgttacgaagaggcggtgttgatggtagagtcgtcgtcgttttatagcgaggtgtttacggatacgcgcggtttttatcgtaagatcgttacgttttttttgagtcgtcgcgatagcggagaagtaggagtagtcgttttttagttataagtcgttttttttggatcggggttatatttcggcgttgtatttgtttagcgtttttcggttcgcgtcgttttgtttagttttttgtttgtaggtcgatcgtggtcgtcgggttttttttagttggatcgatttagagtttagtagtcgcgagtttttggagtacggagtttggcgtttgtcggtttttatttttttgttcgggaggattatagtcgtatagaggggcgcggcgtttcgggttttatcggcggattt

SEQ ID NO: 37848 - DNA, 1767 bp, Artificial Sequence
  chemically treated genomic DNA (Homo sapiens) CpG-island No: 37848
aaatccgccgataaaacccgaaacgccgcgcccctctatacgactataatcctcccgaacaaaaaaataaaaaccgacaaacgccaaactccgtactccaaaaactcgcgactactaaactctaaatcgatccaactaaaaaaaacccgacgaccacgatcgacctacaaacaaaaaactaaacaaaacgacgcgaaccgaaaaacgctaaacaaatacaacgccgaaatataaccccgatccaaaaaaaacgacttataactaaaaaacgactactcctacttctccgctatcgcgacgactcaaaaaaaacgtaacgatcttacgataaaaaccgcgcgtatccgtaaacacctcgctataaaacgacgacgactctaccatcaacaccgcctcttcgtaacacgataatttaaacatatccgattccgctacgaaataaaaaacgatcgaaaaaaataaaaccgccgattcccaaccctcgcaaaaccccgacaactaccgcgcgccccaaccctaacccgaacccgaacccgccgccgcccgtattctcccgaaaactacgaataaaaaccctaaaaataaacaacgaaccctccaacgcccgcccacttccgacgacccgaataaccccctaaaaaaaatcgatactcaccttaacgcgaataactccaaaaccgtaacgacaccgacacgataaaaacgacgaatacgaaaacgtaataatacgaatataaatacgcgtacgtacgactacgcgaacccgtaatacaacaacgaatacacgtacacgtcgaatacgaatacgcgtaaccgacgcctccaacgactacgatataataataactacgacaacgcaaacccgaaaaatcccgaccaaactaccctcgaattcgaaaaactccaactctaaaacgcgcaaattctactcgcgcaatcgctcctcctaacgccgtttaaaacgcgacgcaaaaaactacaaaaacacaaaacaaaacgataaaaccccaaataaaccaaaaaccgacgaacgacgtaaaaaacgtataaataccctaaaacatcaccataacgacgacacgaacgacgaatcctcaaacgcttcactaaacactaaactccgctacgtaaccccgaacccgcgccacactctcaaataccgccaacgtcactcgaaaacccgcgaccgaaaactacccgtaacaaatctcaaatcgtacgcgcgccgacgaaaaacaacaacgacgcccgctccttcccataacgccgacgacgccgaacgtacctcacccgaaaccgcgcgaaacctataaaacaaacacgaaacgcaataaaaacgcgccgcgacccccaacgacttcccgacccccgcccgcgccctacgaatccgaaaaaaacctcctccgtaaaaacctcgcgctccccgaaaacccgataacgtcaccgaaaaaaataacgtcacgcctcgaaatttccccgataaatttccccgatctaaaccccgaccgccgccgcgaacccgaacgccgaaaaaaaccgaaacgaaccaacaaaaaacgcgcgaaaaacgaactccaactctaaatccgaacgaaaaattcgccatccgcaatcccgaaaccaaaaaatttcaaaaacctatacgcaccaaatccctaaaaaaacgtctcgacgccgttactatacgacgaaaaaaaaataatacatctcctaaaaccccacaaacaaccacccgacgccctatacaaacgcctaacaacccctaac

SEQ ID NO: 37849 - DNA, 687 bp, Artificial Sequence
  chemically treated genomic DNA (Homo sapiens) CpG-island No: 37849
gtcgtcgttcgtagtcgtgttgtcggggagcgtaatttcgttgttgtggtaatcgtttttaagcgaattggtggcggttcgcgttcgtttcggttttttcgtttattggcgtttttttttttttcggtgtggattgggggaggggttgttcgcggttcgggcgggggatcggggcggcgattcggggttagggcgttgagcgtcgcggggaagggtttagttttgggattatttttcgttcgcgtttcgtgttcgttcggttcgtagtcgtcgcggtatttacgggtttaggtatttttttcgagttcgtttttttggttcggggcgagtagcgcgggtttagcggatagagtttcgggtttgcggggggaggcggcggcggttcgggggagtagatagtggtagcgaaagcggtttcgagcgttgggttggaggcgcggggcgcgtacgggcgcgtatacggcgggtgttgagttcggcgtgcgcgcgcgcggtagtcggtagagggtttcgtatttttagttatacgtcgcgaggaggttgttttcggagggaaggagggggaggacggttatttatttgcggcgtcgagattcggttttttagttcgtcgggtttatattcgttagggtatttttataggggaggtatacgtcggtcgattcggtttatattttaggttggagt

SEQ ID NO: 37850 - DNA, 687 bp, Artificial Sequence
  chemically treated genomic DNA (Homo sapiens) CpG-island No: 37850
actccaacctaaaatataaaccgaatcgaccgacgtatacctcccctataaaaataccctaacgaatataaacccgacgaactaaaaaaccgaatctcgacgccgcaaataaataaccgtcctccccctccttccctccgaaaacaacctcctcgcgacgtataactaaaaatacgaaaccctctaccgactaccgcgcgcgcgcacgccgaactcaacacccgccgtatacgcgcccgtacgcgccccgcgcctccaacccaacgctcgaaaccgctttcgctaccactatctactcccccgaaccgccgccgcctccccccgcaaacccgaaactctatccgctaaacccgcgctactcgccccgaaccaaaaaaacgaactcgaaaaaaatacctaaacccgtaaataccgcgacgactacgaaccgaacgaacacgaaacgcgaacgaaaaataatcccaaaactaaacccttccccgcgacgctcaacgccctaaccccgaatcgccgccccgatcccccgcccgaaccgcgaacaacccctcccccaatccacaccgaaaaaaaaaaaaacgccaataaacgaaaaaaccgaaacgaacgcgaaccgccaccaattcgcttaaaaacgattaccacaacaacgaaattacgctccccgacaacacgactacgaacgacgac

SEQ ID NO: 37851 - DNA, 687 bp, Artificial Sequence
  chemically treated genomic DNA (Homo sapiens) CpG-island No: 37851
gttttagtttggagtgtggatcgggtcggtcggcgtgtgttttttttgtgagggtgttttggcgggtgtgagttcggcgggttggagaatcgggtttcggcgtcgtaggtgggtgatcgtttttttttttttttttttcgggggtagttttttcgcggcgtgtggttgggggtgcggggttttttgtcggttgtcgcgcgcgcgtacgtcgggtttagtattcgtcgtgtacgcgttcgtgcgcgtttcgcgtttttagtttagcgttcggagtcgttttcgttgttattgtttgttttttcgggtcgtcgtcgttttttttcgtaggttcggggttttgttcgttgggttcgcgttgttcgtttcgagttaggagaacgagttcgaggaggatgtttgggttcgtgagtatcgcggcggttgcgggtcgggcgggtacggagcgcgggcggaagatggttttaggattgagttttttttcgcggcgtttagcgttttggtttcgggtcgtcgtttcggtttttcgttcgggtcgcgagtagttttttttttagtttatatcggagggagggagagcgttagtgagcgagggagtcggaacgggcgcgagtcgttattagttcgtttggaaacggttgttatagtaacggggttgcgtttttcggtaatacgattgcgggcggcgat

SEQ ID NO: 37852 - DNA, 687 bp, Artificial Sequence
  chemically treated genomic DNA (Homo sapiens) CpG-island No: 37852
atcgccgcccgcaatcgtattaccgaaaaacgcaaccccgttactataacaaccgtttccaaacgaactaataacgactcgcgcccgttccgactccctcgctcactaacgctctccctccctccgatataaactaaaaaaaaaactactcgcgacccgaacgaaaaaccgaaacgacgacccgaaaccaaaacgctaaacgccgcgaaaaaaaactcaatcctaaaaccatcttccgcccgcgctccgtacccgcccgacccgcaaccgccgcgatactcacgaacccaaacatcctcctcgaactcgttctcctaactcgaaacgaacaacgcgaacccaacgaacaaaaccccgaacctacgaaaaaaaacgacgacgacccgaaaaaacaaacaataacaacgaaaacgactccgaacgctaaactaaaaacgcgaaacgcgcacgaacgcgtacacgacgaatactaaacccgacgtacgcgcgcgcgacaaccgacaaaaaaccccgcacccccaaccacacgccgcgaaaaaactacccccgaaaaaaaaaaaaaaaaaaacgatcacccacctacgacgccgaaacccgattctccaacccgccgaactcacacccgccaaaacaccctcacaaaaaaaacacacgccgaccgacccgatccacactccaaactaaaac

SEQ ID NO: 37853 - DNA, 580 bp, Artificial Sequence
  chemically treated genomic DNA (Homo sapiens) CpG-island No: 37853
attgtcgcgtaattatttatgaaagcgtttatgtttcgtcgtgcgatagtattttcggaataaatttgtttttttgcgcgattcggaatttcgaggtcgtttttacgcgtcgtcgttcgtttttttatatcggattggattttacgtaaggatgaggcggggtttcgtcgtggcgcgtatgcgtgtagtaaagaatggaggagtcggaattcgaacggaaggtaggagagaggcgagatttcgcgcgtgtgggagcgggcgtgaagaggggagtaggtcgtgtttgattggcgtgtgtttgtagcgggttcgtatcgacgaggtgttgtcggaggaagtcgtttcgaggcggaagatgaggacgacgaggattacgtgttttatgtgtcgttacgtagcgtcggtagttattggtgaggggtacgcgttcggggagggatggggtcgtgatcgcggggtcgtagggggcgggcgtggtttcggttttcgtggggaggagggtagtttgaggagtgagttttagtatattagggcgcggtttttagataaacgagggatcgacggtttgatttgaggggta

SEQ ID NO: 37854 - DNA, 580 bp, Artificial Sequence
  chemically treated genomic DNA (Homo sapiens) CpG-island No: 37854
tacccctcaaatcaaaccgtcgatccctcgtttatctaaaaaccgcgccctaatatactaaaactcactcctcaaactaccctcctccccacgaaaaccgaaaccacgcccgccccctacgaccccgcgatcacgaccccatccctccccgaacgcgtacccctcaccaataactaccgacgctacgtaacgacacataaaacacgtaatcctcgtcgtcctcatcttccgcctcgaaacgacttcctccgacaacacctcgtcgatacgaacccgctacaaacacacgccaatcaaacacgacctactcccctcttcacgcccgctcccacacgcgcgaaatctcgcctctctcctaccttccgttcgaattccgactcctccattctttactacacgcatacgcgccacgacgaaaccccgcctcatccttacgtaaaatccaatccgatataaaaaaacgaacgacgacgcgtaaaaacgacctcgaaattccgaatcgcgcaaaaaaacaaatttattccgaaaatactatcgcacgacgaaacataaacgctttcataaataattacgcgacaat

SEQ ID NO: 37855 - DNA, 580 bp, Artificial Sequence
  chemically treated genomic DNA (Homo sapiens) CpG-island No: 37855
tattttttagattaagtcgtcggtttttcgtttgtttgggggtcgcgttttggtgtattgaagtttattttttagattgtttttttttttacggaggtcgaggttacgttcgttttttgcgatttcgcggttacggttttattttttttcggacgcgtgttttttattagtagttgtcggcgttgcgtaacggtatatagggtacgtagttttcgtcgtttttatttttcgtttcggagcggtttttttcggtagtatttcgtcggtgcgagttcgttgtaagtatacgttagttaggtacggtttgtttttttttttacgttcgtttttatacgcgcggggtttcgttttttttttatttttcgttcgggtttcgatttttttattttttgttgtacgtatgcgcgttacggcgaaatttcgttttatttttgcgtgagatttaattcgatgtgaagaggcgaacgacggcgcgtaggaacgatttcggagtttcggatcgcgtagagggataaatttgtttcggagatattatcgtacggcgaggtatggacgtttttatgggtggttacgcgatagt

SEQ ID NO: 37856 - DNA, 580 bp, Artificial Sequence
  chemically treated genomic DNA (Homo sapiens) CpG-island No: 37856
actatcgcgtaaccacccataaaaacgtccatacctcgccgtacgataatatctccgaaacaaatttatccctctacgcgatccgaaactccgaaatcgttcctacgcgccgtcgttcgcctcttcacatcgaattaaatctcacgcaaaaataaaacgaaatttcgccgtaacgcgcatacgtacaacaaaaaataaaaaaatcgaaacccgaacgaaaaataaaaaaaaaacgaaaccccgcgcgtataaaaacgaacgtaaaaaaaaaaacaaaccgtacctaactaacgtatacttacaacgaactcgcaccgacgaaatactaccgaaaaaaaccgctccgaaacgaaaaataaaaacgacgaaaactacgtaccctatataccgttacgcaacgccgacaactactaataaaaaacacgcgtccgaaaaaaaataaaaccgtaaccgcgaaatcgcaaaaaacgaacgtaacctcgacctccgtaaaaaaaaaaacaatctaaaaaataaacttcaatacaccaaaacgcgacccccaaacaaacgaaaaaccgacgacttaatctaaaaaata

SEQ ID NO: 37857 - DNA, 665 bp, Artificial Sequence
  chemically treated genomic DNA (Homo sapiens) CpG-island No: 37857
ttaatttcgttttattttcgttttcgttcggggaaggtgaaagcgttcgagtcgtcgaagttttttcgttcgtttttatttgcgggtcgggtattaggttgggttcgttattttttttggggtcgtcgtggtcgggtttcgtcggcgttttcggagggtttgtattcgttttcgtttttaggtttggcggcggcgggggttcgggcgtttggggtttttgcggtttcgcggttcgagttcgttcgcgtttgttcgtatcgtcgttcggtttgtttcgttttcgcgttatgtcgtcgttcgcgtcgttttttcgttttatacgtcgcgtcgtcgtcgtcgttatcgtcgtcgtcgtcgtcgtcgttatcgttttttttataggataatagttaatatggcggcgttcggtttttttttttcgtttgttgttaataggttagagggtacgcgtagttcgcgtcgtcgtattagttttcgaggtcgtttgcgttattttgaataaggttattattcggagttcgttgggagaaaaatttggtggggagacgtttttttttttttacgcgggacgggaaggatgtaatttgttggaggaacgcgtgtaatgcggtggtaatcgcgttgtattattttagtatttaataattgtttgttaaatggatgag

SEQ ID NO: 37858 - DNA, 665 bp, Artificial Sequence
  chemically treated genomic DNA (Homo sapiens) CpG-island No: 37858
ctcatccatttaacaaacaattattaaatactaaaataatacaacgcgattaccaccgcattacacgcgttcctccaacaaattacatccttcccgtcccgcgtaaaaaaaaaaaaacgtctccccaccaaatttttctcccaacgaactccgaataataaccttattcaaaataacgcaaacgacctcgaaaactaatacgacgacgcgaactacgcgtaccctctaacctattaacaacaaacgaaaaaaaaaaaccgaacgccgccatattaactattatcctataaaaaaaacgataacgacgacgacgacgacgacgataacgacgacgacgacgcgacgtataaaacgaaaaaacgacgcgaacgacgacataacgcgaaaacgaaacaaaccgaacgacgatacgaacaaacgcgaacgaactcgaaccgcgaaaccgcaaaaaccccaaacgcccgaacccccgccgccgccaaacctaaaaacgaaaacgaatacaaaccctccgaaaacgccgacgaaacccgaccacgacgaccccaaaaaaaataacgaacccaacctaatacccgacccgcaaataaaaacgaacgaaaaaacttcgacgactcgaacgctttcaccttccccgaacgaaaacgaaaataaaacgaaattaa

SEQ ID NO: 37859 - DNA, 665 bp, Artificial Sequence
  chemically treated genomic DNA (Homo sapiens) CpG-island No: 37859
tttatttatttaataggtaattattaagtgttagggtggtgtagcgcgattattatcgtattatacgcgtttttttagtaggttgtatttttttcgtttcgcgtagggggggaagggcgtttttttattaagttttttttttagcgaatttcgggtggtgattttatttaaaatggcgtaggcggtttcgggggttagtgcggcggcgcggattgcgcgtgttttttgatttgttggtagtaggcggagggggggaatcgggcgtcgttatattggttgttgttttgtgaggggagcggtagcggcggcggcggcggcggcggtggcggcggcggcggcgcggcgtgtggagcgagggagcggcgcgagcggcggtatgacgcggaggcggagtaggtcgagcggcggtgcgggtaggcgcgagcgggttcgggtcgcggggtcgtagaagttttaggcgttcgagttttcgtcgtcgttaagtttggaggcgggagcgggtgtaggtttttcggaggcgtcggcggagttcgattacgacggttttagggaggatgacgaatttaatttggtgttcggttcgtaggtaggagcgagcggggagatttcggcggttcgggcgtttttatttttttcgagcgggagcgggagtggggcggggttgg

SEQ ID NO: 37860 - DNA, 665 bp, Artificial Sequence
  chemically treated genomic DNA (Homo sapiens) CpG-island No: 37860
ccaaccccgccccactcccgctcccgctcgaaaaaaataaaaacgcccgaaccgccgaaatctccccgctcgctcctacctacgaaccgaacaccaaattaaattcgtcatcctccctaaaaccgtcgtaatcgaactccgccgacgcctccgaaaaacctacacccgctcccgcctccaaacttaacgacgacgaaaactcgaacgcctaaaacttctacgaccccgcgacccgaacccgctcgcgcctacccgcaccgccgctcgacctactccgcctccgcgtcataccgccgctcgcgccgctccctcgctccacacgccgcgccgccgccgccgccaccgccgccgccgccgccgccgctaccgctcccctcacaaaacaacaaccaatataacgacgcccgattccccccctccgcctactaccaacaaatcaaaaaacacgcgcaatccgcgccgccgcactaacccccgaaaccgcctacgccattttaaataaaatcaccacccgaaattcgctaaaaaaaaaacttaataaaaaaacgcccttccccccctacgcgaaacgaaaaaaatacaacctactaaaaaaacgcgtataatacgataataatcgcgctacaccaccctaacacttaataattacctattaaataaataaa

SEQ ID NO: 37861 - DNA, 795 bp, Artificial Sequence
  chemically treated genomic DNA (Homo sapiens) CpG-island No: 37861
  unsure (17, 19)
tgggtagttagggcggngncgtttgtatagggcgtcgggtggttgtttgtggggttttaggagatgtattatttttttttcgtcgtatagtaacggcgtcgagacgtttttttagggatttggtgcgtataggtttttgaaattttttggtttcgggattgcggatggcgaatttttcgttcggatttagagttggagttcgtttttcgcgcgttttttgttggttcgtttcggtttttttcggcgttcgggtttcgcggcgggtcggggtttagatcggggaaattttatcggggaaatttcgaggcgtgacgttatttttttcggtgacgttatcgggttttcggggagcgcgaggtttttacggaggaggtttttttcggattgcgtagggcgggcgggggtcgggaagtcgttgggggtcgcggcgttattttattgcgtttcgtgtttgttttataggtttcgcgcggtttcgggtgaggtacgttcgcgcgttcgtcggcgttatgggaaggagcgggcgtcgttgttgtttttcgtcggcgcgcgtacgatttgagatttgttacgggtagttttcggtcgcgggttttcgagtgacgttggcggtatttgagagtgtggcgcgggttcggggttacgtagcggagtttagtgtttagtgaagcgtttgaggattcgtcgttcgtgtcgtcgttatggtgatgttttagggtatttatacgttttttacgtgtttcgtcggtttttggtttatttggggttttatcgttttgttttgttgtttttgta

SEQ ID NO: 37862 - DNA, 795 bp, Artificial Sequence
  chemically treated genomic DNA (Homo sapiens) CpG-island No: 37862
  unsure (777, 779)
tacaaaaacaacaaaacaaaacgataaaaccccaaataaaccaaaaaccgacgaaacacgtaaaaaacgtataaataccctaaaacatcaccataacgacgacacgaacgacgaatcctcaaacgcttcactaaacactaaactccgctacgtaaccccgaacccgcgccacactctcaaataccgccaacgtcactcgaaaacccgcgaccgaaaactacccgtaacaaatctcaaatcgtacgcgcgccgacgaaaaacaacaacgacgcccgctccttcccataacgccgacgaacgcgcgaacgtacctcacccgaaaccgcgcgaaacctataaaacaaacacgaaacgcaataaaataacgccgcgacccccaacgacttcccgacccccgcccgccctacgcaatccgaaaaaaacctcctccgtaaaaacctcgcgctccccgaaaacccgataacgtcaccgaaaaaaataacgtcacgcctcgaaatttccccgataaaatttccccgatctaaaccccgacccgccgcgaaacccgaacgccgaaaaaaaccgaaacgaaccaacaaaaaacgcgcgaaaaacgaactccaactctaaatccgaacgaaaaattcgccatccgcaatcccgaaaccaaaaaatttcaaaaacctatacgcaccaaatccctaaaaaaacgtctcgacgccgttactatacgacgaaaaaaaaataatacatctcctaaaaccccacaaacaaccacccgacgccctatacaaacgncnccgccctaactaccca

SEQ ID NO: 37863 - DNA, 795 bp, Artificial Sequence
  chemically treated genomic DNA (Homo sapiens) CpG-island No: 37863
  unsure (777, 779)
tgtagaagtagtagagtaggacgatgagattttagatgagttagaagtcggcgaagtacgtgaggaacgtgtaggtgttttgggatattattatggcggcggtacgggcggcgggtttttagacgttttattggatattgggtttcgttgcgtggtttcgggttcgcgttatatttttaggtgtcgttagcgttattcggggattcgcggtcgggggttgttcgtggtaggttttaagtcgtgcgcgcgtcggcgggggatagtagcggcgttcgtttttttttatggcgtcggcgggcgcgcgggcgtgttttattcggggtcgcgcgggatttgtagggtagatacggggcgtagtgaagtggcgtcgcggtttttaacgatttttcggttttcgttcgttttgcgtagttcggggaaagtttttttcgtgggaatttcgcgtttttcgggggttcggtgacgttatcgaggagggtgacgttacgtttcgaggttttttcggtagggttttttcgatttgagtttcggttcgtcgcggagttcgggcgtcgaggggagtcgaggcgggttagtagggggcgcgcgaaggacggattttagttttgagttcgaacgagagattcgttattcgtagtttcggggttaaagggttttaggagtttgtgcgtattaggtttttgaagaggcgtttcggcgtcgttgttgtgcggcggggaaagggtggtatattttttagagttttatagatagttattcgacgttttgtatagacgntntcgttttggttgttta

SEQ ID NO: 37864 - DNA, 795 bp, Artificial Sequence
  chemically treated genomic DNA (Homo sapiens) CpG-island No: 37864
  unsure (17, 19)
taaacaaccaaaacganancgtctatacaaaacgtcgaataactatctataaaactctaaaaaatataccaccctttccccgccgcacaacaacgacgccgaaacgcctcttcaaaaacctaatacgcacaaactcctaaaaccctttaaccccgaaactacgaataacgaatctctcgttcgaactcaaaactaaaatccgtccttcgcgcgccccctactaacccgcctcgactcccctcgacgcccgaactccgcgacgaaccgaaactcaaatcgaaaaaaccctaccgaaaaaacctcgaaacgtaacgtcaccctcctcgataacgtcaccgaacccccgaaaaacgcgaaattcccacgaaaaaaactttccccgaactacgcaaaacgaacgaaaaccgaaaaatcgttaaaaaccgcgacgccacttcactacgccccgtatctaccctacaaatcccgcgcgaccccgaataaaacacgcccgcgcgcccgccgacgccataaaaaaaaacgaacgccgctactatcccccgccgacgcgcgcacgacttaaaacctaccacgaacaacccccgaccgcgaatccccgaataacgctaacgacacctaaaaatataacgcgaacccgaaaccacgcaacgaaacccaatatccaataaaacgtctaaaaacccgccgcccgtaccgccgccataataatatcccaaaacacctacacgttcctcacgtacttcgccgacttctaactcatctaaaatctcatcgtcctactctactacttctaca

SEQ ID NO: 37865 - DNA, 1057 bp, Artificial Sequence
  chemically treated genomic DNA (Homo sapiens) CpG-island No: 37865
tttttgcgtcgtcgttttaaacggcgttaggaggagcgattgcgcgacgaaatttgcgcgttttagagttggagtttttcgaattcgagggtagtttggtcgggagtttttcggcgttggcgtcgtcgtagttattattatatcgtagtcgtttggaggttcggtttacgcgtattcgtattcgtacgtgtacgttattcgttgttgtattacgggttcgcgtatcgtacgcgtacggtatttatattcgtattattacgcgttttcgtattcgtcgtttacgtatttgtcggtgtcgttacggttttggagttattcgcgttaaggtgagtatcgattttcgttagggggcgattcgggtcgtcggaagtgggcggcgttggagggttcgttgtttatttttagggtttttattcgtagttttcgggagaatacgggcggcggcgggttcgggttcgggttagggttggggcgcgggaggtttttgtcggggtttttgcgagaggttgggaatcggcggttttatttttttcgatcgttttttatttcgtagcggaatcggatatgtttaaattatcgtgttacgaagaggcggtgttgatggtagagtcgtcgtcgttttatagcgaggtgtttacggatacgcgcggtttttatcgtaagatcgttacgttttttttgagtcgtcgcgatagcgcggagaagtaggagtagtcgttttttagttataagtcgttttttttggatcggggttatatttcggcgttgtatttgtttagcgtttttcggttcgcgtcgttttgtttagttttttgtttgtaggtcgatcgtggtcgtcgggttttttttagttggatcgatttagagtttagtagtcgcgagtttttggagtacggagtttggcgtttgtcggtttttatttttttgttcgggaggattatagtcgtatagaggttcggcgtttcgggttttatcggcggatttttggtttgattgcggggttttttaaatgtttttttggattgcggggaggggcggggggagggagggatttttt

SEQ ID NO: 37866 - DNA, 1057 bp, Artificial Sequence
  chemically treated genomic DNA (Homo sapiens) CpG-island No: 37866
aaaaaatccctccctccccccgcccctccccgcaatccaaaaaaacatttaaaaaaccccgcaatcaaaccaaaaatccgccgataaaacccgaaacgccgaacctctatacgactataatcctcccgaacaaaaaaataaaaaccgacaaacgccaaactccgtactccaaaaactcgcgactactaaactctaaatcgatccaactaaaaaaaacccgacgaccacgatcgacctacaaacaaaaaactaaacaaaacgacgcgaaccgaaaaacgctaaacaaatacaacgccgaaatataaccccgatccaaaaaaaacgacttataactaaaaaacgactactcctacttctccgcgctatcgcgacgactcaaaaaaaacgtaacgatcttacgataaaaaccgcgcgtatccgtaaacacctcgctataaaacgacgacgactctaccatcaacaccgcctcttcgtaacacgataatttaaacatatccgattccgctacgaaataaaaaacgatcgaaaaaaataaaaccgccgattcccaacctctcgcaaaaaccccgacaaaaacctcccgcgccccaaccctaacccgaacccgaacccgccgccgcccgtattctcccgaaaactacgaataaaaaccctaaaaataaacaacgaaccctccaacgccgcccacttccgacgacccgaatcgccccctaacgaaaatcgatactcaccttaacgcgaataactccaaaaccgtaacgacaccgacaaatacgtaaacgacgaatacgaaaacgcgtaataatacgaatataaataccgtacgcgtacgatacgcgaacccgtaatacaacaacgaataacgtacacgtacgaatacgaatacgcgtaaaccgaacctccaaacgactacgatataataataactacgacgacgccaacgccgaaaaactcccgaccaaactaccctcgaattcgaaaaactccaactctaaaacgcgcaaatttcgtcgcgcaatcgctcctcctaacgccgtttaaaacgacgacgcaaaaa

SEQ ID NO: 37867 - DNA, 1057 bp, Artificial Sequence
  chemically treated genomic DNA (Homo sapiens) CpG-island No: 37867
aagaaattttttttttttttcgttttttttcgtagtttagggaagtatttaaaaagtttcgtagttaggttaggagttcgtcggtggggttcggggcgtcgggtttttatacggttgtagttttttcgaataaggggatggagatcggtagacgttaagtttcgtgttttaggggttcgcggttgttgagttttgagtcggtttagttggggaagattcggcggttacggtcggtttgtaggtagagggttgggtagggcggcgcgggtcgaggggcgttgggtaggtgtagcgtcgaggtgtagtttcggtttaggaagagcggtttgtagttgggaggcggttgtttttgttttttcgcgttgtcgcggcgatttaggaagggcgtgacgattttgcggtagaggtcgcgcgtgttcgtgagtatttcgttatagggcggcggcggttttgttattagtatcgttttttcgtaatacggtggtttggatatgttcgatttcgttgcggagtgggaggcggtcggaggaggtgaggtcgtcggtttttagtttttcgtagaggtttcggtaggggtttttcgcgttttagttttagttcgaattcgagttcgtcgtcgttcgtgttttttcggaggttgcggatggaagttttgagggtaagtagcgagttttttaacgtcgtttattttcggcggttcggatcgttttttggcggaggtcggtatttattttggcgcgggtagttttagggtcgtggcggtatcgataggtgcgtaggcggcgggtgcgggagcgcgtggtggtgcgggtgtgggtgtcgtgcgcgtgcggtgcgcgggttcgtggtgtagtagcgggtgacgtgtacgtgcggatgcgagtgcgcgtgagtcgggtttttaggcggttacggtgtggtggtggttgcggcggcgttagcgtcggggggttttcggttagattgttttcgagttcgaggggttttagttttagggcgcgtaggtttcgtcgcgtagtcgttttttttggcgtcgtttgaggcggcggcgtaggaa

SEQ ID NO: 37868 - DNA, 1057 bp, Artificial Sequence
  chemically treated genomic DNA (Homo sapiens) CpG-island No: 37868
ttcctacgccgccgcctcaaacgacgccaaaaaaaacgactacgcgacgaaacctacgcgccctaaaactaaaacccctcgaactcgaaaacaatctaaccgaaaaccccccgacgctaacgccgccgcaaccaccaccacaccgtaaccgcctaaaaacccgactcacgcgcactcgcatccgcacgtacacgtcacccgctactacaccacgaacccgcgcaccgcacgcgcacgacacccacacccgcaccaccacgcgctcccgcacccgccgcctacgcacctatcgataccgccacgaccctaaaactacccgcgccaaaataaataccgacctccgccaaaaaacgatccgaaccgccgaaaataaacgacgttaaaaaactcgctacttaccctcaaaacttccatccgcaacctccgaaaaaacacgaacgacgacgaactcgaattcgaactaaaactaaaacgcgaaaaacccctaccgaaacctctacgaaaaactaaaaaccgacgacctcacctcctccgaccgcctcccactccgcaacgaaatcgaacatatccaaaccaccgtattacgaaaaaacgatactaataacaaaaccgccgccgccctataacgaaatactcacgaacacgcgcgacctctaccgcaaaatcgtcacgcccttcctaaatcgccgcgacaacgcgaaaaaacaaaaacaaccgcctcccaactacaaaccgctcttcctaaaccgaaactacacctcgacgctacacctacccaacgcccctcgacccgcgccgccctacccaaccctctacctacaaaccgaccgtaaccgccgaatcttccccaactaaaccgactcaaaactcaacaaccgcgaacccctaaaacacgaaacttaacgtctaccgatctccatccccttattcgaaaaaactacaaccgtataaaaacccgacgccccgaaccccaccgacgaactcctaacctaactacgaaactttttaaatacttccctaaactacgaaaaaaaacgaaaaaaaaaaaaaatttctt

SEQ ID NO: 37869 - DNA, 523 bp, Artificial Sequence
  chemically treated genomic DNA (Homo sapiens) CpG-island No: 37869
gattttgtcgtagaatagagcgatggtgaagtgttgattattagtcgtatagttattgtttcgtcggtgtttgatttcgggatgcgttgtatttatatttggcgtatcgttgtcgatggttaggttaacgtggcgtttttcggcgagcgttacggcgattattcgtatattatttcgtgtatcggttttattatgggaattaacggcgaatacgattaggtggcgtattacggtcgtggatcgggcgaaaattacgtcgatagttagtagttaatattatcgatatttggcgttatcgtcgatgttatgttcgagaattattttttttcgtagaataacggtaatcgttagtatgttcgttggacggtattgattaatcgttacggtaacggtttgttggtggtttcgtagcgtttaattaattttagcgtttggtattatatttaggaaaatatttacgttgtttagtattgtaacgagttgtagcgtagtgatgatattattttgaatttcgattattagt

SEQ ID NO: 37870 - DNA, 523 bp, Artificial Sequence
  chemically treated genomic DNA (Homo sapiens) CpG-island No: 37870
actaataatcgaaattcaaaataatatcatcactacgctacaactcgttacaatactaaacaacgtaaatattttcctaaatataataccaaacgctaaaattaattaaacgctacgaaaccaccaacaaaccgttaccgtaacgattaatcaataccgtccaacgaacatactaacgattaccgttattctacgaaaaaaaataattctcgaacataacatcgacgataacgccaaatatcgataatattaactactaactatcgacgtaattttcgcccgatccacgaccgtaatacgccacctaatcgtattcgccgttaattcccataataaaaccgatacacgaaataatatacgaataatcgccgtaacgctcgccgaaaaacgccacgttaacctaaccatcgacaacgatacgccaaatataaatacaacgcatcccgaaatcaaacaccgacgaaacaataactatacgactaataatcaacacttcaccatcgctctattctacgacaaaatc

SEQ ID NO: 37871 - DNA, 523 bp, Artificial Sequence
  chemically treated genomic DNA (Homo sapiens) CpG-island No: 37871
gttggtgatcgaggtttagggtgatgttattattgcgttgtagttcgttatagtgttgggtagcgtggatgtttttttgggtatagtgttaggcgttgaagttaattgggcgttgcggaattattagtagatcgttatcgtggcggttagttagtgtcgtttagcggatatgttgacggttatcgttgttttgcgggaagggatagttttcgaatatggtatcgacggtggcgttagatatcgatgatgttagttgttggttgtcggcgtagttttcgttcggtttacgatcgtaatacgttatttgatcgtattcgtcgttaatttttatggtgaaatcgatgtacggaatgatgtgcggatagtcgtcgtaacgttcgtcggaaagcgttacgttaatttggttatcggtagcgatgcgttagatgtaggtgtagcgtatttcgaagttaaatatcggcggggtaataattgtgcggttgatgattagtattttattatcgttttgttttacggtaaagtt

SEQ ID NO: 37872 - DNA, 523 bp, Artificial Sequence
  chemically treated genomic DNA (Homo sapiens) CpG-island No: 37872
aactttaccgtaaaacaaaacgataataaaatactaatcatcaaccgcacaattattaccccgccgatatttaacttcgaaatacgctacacctacatctaacgcatcgctaccgataaccaaattaacgtaacgctttccgacgaacgttacgacgactatccgcacatcattccgtacatcgatttcaccataaaaattaacgacgaatacgatcaaataacgtattacgatcgtaaaccgaacgaaaactacgccgacaaccaacaactaacatcatcgatatctaacgccaccgtcgataccatattcgaaaactatcccttcccgcaaaacaacgataaccgtcaacatatccgctaaacgacactaactaaccgccacgataacgatctactaataattccgcaacgcccaattaacttcaacgcctaacactatacccaaaaaaacatccacgctacccaacactataacgaactacaacgcaataataacatcaccctaaacctcgatcaccaac

SEQ ID NO: 37873 - DNA, 809 bp, Artificial Sequence
  chemically treated genomic DNA (Homo sapiens) CpG-island No: 37873
gtgtgtgcgagtgtgtttgcgtgtttgcgtttgggcggatagttcggagcggtagtgcgattcgtcgggagaggcgttttcgtagaggcgtttcgttcgttgtcgttgcgttgcgggggtcgttttgtaaatttgcggcgagcgtcgttagttttcgcggttttatagtttcgcgatttgtcggtaaaggcgtcgggcgcgcgtgtcgggcgcggtgttcgcggtcggtcggggcggcgggagcgggtcgcgttttcgtttttggtcggcgttttggcgagttttatgtagtttcggcgttcgcggtcgtagttattcggttgttcggttgcgcgcggtaggtttaggattcgaatttcgttttttagcgtttgagcgtttgtaagtcgtcggcgggatgtcgcgcgtcgtttgagagagtcgcgtcggggcgggagtagggagcgggtcggttcgggcgtattcgggagcgtagggcgttttacgtcgtagtcgtagtcgagcgcgtcggcgttcgtttttttcgttcggttcgtaggtttcggttttttaagtttcgagggtcgcggggtcgttagttagttatacgtttcggcgttaggggtatggaggaacggcgggtttcgagtcgcgtttcggagttcgcgaaattttcgagcgggcgttcgttcgttttgtcgtcgtcgtcgtcgtcgtttcgtttgtcggtttgagagcgggattatggatgaaaggtttaataagtggttgttgacgtcggtgtttattttttttttcgtggttattatgtattagtacgtgtttttttt

SEQ ID NO: 37874 - DNA, 809 bp, Artificial Sequence
  chemically treated genomic DNA (Homo sapiens) CpG-island No: 37874
aaaaaaaacacgtactaatacataataaccacgaaaaaaaaaataaacaccgacgtcaacaaccacttattaaacctttcatccataatcccgctctcaaaccgacaaacgaaacgacgacgacgacgacgacaaaacgaacgaacgcccgctcgaaaatttcgcgaactccgaaacgcgactcgaaacccgccgttcctccatacccctaacgccgaaacgtataactaactaacgaccccgcgaccctcgaaacttaaaaaaccgaaacctacgaaccgaacgaaaaaaacgaacgccgacgcgctcgactacgactacgacgtaaaacgccctacgctcccgaatacgcccgaaccgacccgctccctactcccgccccgacgcgactctctcaaacgacgcgcgacatcccgccgacgacttacaaacgctcaaacgctaaaaaacgaaattcgaatcctaaacctaccgcgcgcaaccgaacaaccgaataactacgaccgcgaacgccgaaactacataaaactcgccaaaacgccgaccaaaaacgaaaacgcgacccgctcccgccgccccgaccgaccgcgaacaccgcgcccgacacgcgcgcccgacgcctttaccgacaaatcgcgaaactataaaaccgcgaaaactaacgacgctcgccgcaaatttacaaaacgacccccgcaacgcaacgacaacgaacgaaacgcctctacgaaaacgcctctcccgacgaatcgcactaccgctccgaactatccgcccaaacgcaaacacgcaaacacactcgcacacac

SEQ ID NO: 37875 - DNA, 809 bp, Artificial Sequence
  chemically treated genomic DNA (Homo sapiens) CpG-island No: 37875
gagggggatacgtattggtatatgatgattacgaagaggagagtgagtatcggcgttagtagttatttgttgaattttttatttatggtttcgtttttaggtcggtaggcgaagcggcggcggcggcggcggtagggcggacgggcgttcgttcggaagtttcgcggatttcggggcgcggttcggagttcgtcgtttttttatgtttttgacgtcgaggcgtgtggttggttggcggtttcgcggttttcggggtttgaggagtcggggtttgcgagtcgggcgggggaggcgggcgtcggcgcgttcggttgcggttgcggcgtggggcgttttgcgttttcgggtgcgttcgggtcggttcgttttttgttttcgtttcggcgcggtttttttaggcgacgcgcggtatttcgtcggcggtttgtaggcgtttaggcgttggggagcggggttcgggttttggatttgtcgcgcgtagtcgggtagtcgggtagttgcggtcgcgagcgtcggggttgtatgaggttcgttagggcgtcggttaagggcgaaggcgcggttcgttttcgtcgtttcggtcggtcgcgggtatcgcgttcggtacgcgcgttcggcgtttttgtcggtaggtcgcggggttgtggagtcgcgagggttgacggcgttcgtcgtaagtttgtagagcggttttcgtagcgtagcggtagcgggcgaggcgtttttgcggagacgtttttttcggcgagtcgtattgtcgtttcgggttgttcgtttaggcgtaggtacgtagatatattcgtatatat

SEQ ID NO: 37876 - DNA, 809 bp, Artificial Sequence
  chemically treated genomic DNA (Homo sapiens) CpG-island No: 37876
atatatacgaatatatctacgtacctacgcctaaacgaacaacccgaaacgacaatacgactcgccgaaaaaaacgtctccgcaaaaacgcctcgcccgctaccgctacgctacgaaaaccgctctacaaacttacgacgaacgccgtcaaccctcgcgactccacaaccccgcgacctaccgacaaaaacgccgaacgcgcgtaccgaacgcgatacccgcgaccgaccgaaacgacgaaaacgaaccgcgccttcgcccttaaccgacgccctaacgaacctcatacaaccccgacgctcgcgaccgcaactacccgactacccgactacgcgcgacaaatccaaaacccgaaccccgctccccaacgcctaaacgcctacaaaccgccgacgaaataccgcgcgtcgcctaaaaaaaccgcgccgaaacgaaaacaaaaaacgaaccgacccgaacgcacccgaaaacgcaaaacgccccacgccgcaaccgcaaccgaacgcgccgacgcccgcctcccccgcccgactcgcaaaccccgactcctcaaaccccgaaaaccgcgaaaccgccaaccaaccacacgcctcgacgtcaaaaacataaaaaaacgacgaactccgaaccgcgccccgaaatccgcgaaacttccgaacgaacgcccgtccgccctaccgccgccgccgccgccgcttcgcctaccgacctaaaaacgaaaccataaataaaaaattcaacaaataactactaacgccgatactcactctcctcttcgtaatcatcatataccaatacgtatccccctc

SEQ ID NO: 37877 - DNA, 684 bp, Artificial Sequence
  chemically treated genomic DNA (Homo sapiens) CpG-island No: 37877
cgtttcgggtcgggaaggaaggaggtggtgatgtttagggttagagcgggggcgtttggagaattcgggtgggagttagatattcgttgcgagtacgaagaaagcgcggttgagggtggtagcgcgtttatattcgttcggacgagggttcggttcgtatttattttgtttttagtagtagcggggtttcgggttatttcgcggttaagtgggtagttatcgatttggacgcggcgatcgtttcggagtcgagttgcgaaagttatagcgttgtggagtttagtagtagtcgtattacgttcgtggttttcgttggcgttatggtacggagagaaaagcgcgagtttttcggattcggtatttatagtttgtggtcgttacgtttcggtcggtttttttcgttgcgcggttgtttattttcggtgggaggagttcgagttcgttattgggtgtcgggtttagatcggcgtatgcgtgtttcgtttcggcgcggtttagtgggtgcggtttggagagtttacgttagtcggatattgggttacgtcggagtcgtcggggcggcgtcgggttgttgagcggcgttatagatgttttcgcgggtttatttttaggattttgggttttcggatagaggttttaggatacggggcgggaagttggttttttagatcgaattagggtttt

SEQ ID NO: 37878 - DNA, 684 bp, Artificial Sequence
  chemically treated genomic DNA (Homo sapiens) CpG-island No: 37878
aaaaccctaattcgatctaaaaaaccaacttcccgccccgtatcctaaaacctctatccgaaaacccaaaatcctaaaaataaacccgcgaaaacatctataacgccgctcaacaacccgacgccgccccgacgactccgacgtaacccaatatccgactaacgtaaactctccaaaccgcacccactaaaccgcgccgaaacgaaacacgcatacgccgatctaaacccgacacccaataacgaactcgaactcctcccaccgaaaataaacaaccgcgcaacgaaaaaaaccgaccgaaacgtaacgaccacaaactataaataccgaatccgaaaaactcgcgcttttctctccgtaccataacgccaacgaaaaccacgaacgtaatacgactactactaaactccacaacgctataactttcgcaactcgactccgaaacgatcgccgcgtccaaatcgataactacccacttaaccgcgaaataacccgaaaccccgctactactaaaaacaaaataaatacgaaccgaaccctcgtccgaacgaatataaacgcgctaccaccctcaaccgcgctttcttcgtactcgcaacgaatatctaactcccacccgaattctccaaacgcccccgctctaaccctaaacatcaccacctccttccttcccgacccgaaacg

SEQ ID NO: 37879 - DNA, 684 bp, Artificial Sequence
  chemically treated genomic DNA (Homo sapiens) CpG-island No: 37879
agagttttagttcggtttggagagttagtttttcgtttcgtgttttaaggtttttgttcgagaatttaaagttttgggaatggattcgcgggagtatttgtgacgtcgtttagtaattcggcgtcgtttcggcggtttcgacgtggtttagtgttcggttggcgtgggttttttaggtcgtatttattaaatcgcgtcggagcgggatacgtatgcgtcggtttggattcggtatttagtaacggattcgagttttttttatcggaagtgggtagtcgcgtagcgggaagagtcggtcgaagcgtggcggttatagattgtgggtatcgggttcgagggattcgcgttttttttttcgtgttatggcgttagcgaaagttacgaacgtggtgcggttgttattaggttttatagcgttgtggttttcgtagttcggtttcgggacggtcgtcgcgtttaagtcggtgattgtttatttggtcgcgaagtggttcgagatttcgttgttgttggaggtaaggtgggtgcgggtcgggttttcgttcgggcgggtgtgggcgcgttgttatttttagtcgcgtttttttcgtgttcgtagcgggtgtttggtttttattcgggttttttagacgttttcgttttggttttgagtattattatttttttttttttcgattcggggcg

SEQ ID NO: 37880 - DNA, 684 bp, Artificial Sequence
  chemically treated genomic DNA (Homo sapiens) CpG-island No: 37880
cgccccgaatcgaaaaaaaaaaaaataataatactcaaaaccaaaacgaaaacgtctaaaaaacccgaataaaaaccaaacacccgctacgaacacgaaaaaaacgcgactaaaaataacaacgcgcccacacccgcccgaacgaaaacccgacccgcacccaccttacctccaacaacaacgaaatctcgaaccacttcgcgaccaaataaacaatcaccgacttaaacgcgacgaccgtcccgaaaccgaactacgaaaaccacaacgctataaaacctaataacaaccgcaccacgttcgtaactttcgctaacgccataacacgaaaaaaaaaacgcgaatccctcgaacccgatacccacaatctataaccgccacgcttcgaccgactcttcccgctacgcgactacccacttccgataaaaaaaactcgaatccgttactaaataccgaatccaaaccgacgcatacgtatcccgctccgacgcgatttaataaatacgacctaaaaaacccacgccaaccgaacactaaaccacgtcgaaaccgccgaaacgacgccgaattactaaacgacgtcacaaatactcccgcgaatccattcccaaaactttaaattctcgaacaaaaaccttaaaacacgaaacgaaaaactaactctccaaaccgaactaaaactct

SEQ ID NO: 37881 - DNA, 622 bp, Artificial Sequence
  chemically treated genomic DNA (Homo sapiens) CpG-island No: 37881
ttcgttttttcgttcgttcgagatatttttcggcgttttttttcgatttcggcgatattgcgtttggatacgttaggtaggggggtagggtgggcgagtcgtttttcgacgcgggttagttggggtttttcgtgaatttcgttcgggatatttatagtagtcgcgtttttatttttttttttttaaatcgtttcggtttttgtcgtcgttattttttgttaaatcgtttttatttttttagcggagttaatagcggggtcggcgtatataaagggggtcggagggtggagagtatagaaggagggagagatttcgttagggttcgttggtacgggtttgggagtagttatttattcgatttttttttcgatttttgagatgtttgcgaagatgaggaagattatagagtagcgtgcgtttttagtatttagtttcggaattgtagttgtatggttgggttgcgttcgttagatttaagcggtcgtttcgaggattagtgggtggagtttatttacggatcgatgtttttcgcgtttgtagtttgtgtagatatgttgtttttcgtacgtgtcgttacgtttggtattttttatagtttattgtttgattatatgttgtttta

SEQ ID NO: 37882 - DNA, 622 bp, Artificial Sequence
  chemically treated genomic DNA (Homo sapiens) CpG-island No: 37882
taaaacaacatataatcaaacaataaactataaaaaataccaaacgtaacgacacgtacgaaaaacaacatatctacacaaactacaaacgcgaaaaacatcgatccgtaaataaactccacccactaatcctcgaaacgaccgcttaaatctaacgaacgcaacccaaccatacaactacaattccgaaactaaatactaaaaacgcacgctactctataatcttcctcatcttcgcaaacatctcaaaaatcgaaaaaaaaatcgaataaataactactcccaaacccgtaccaacgaaccctaacgaaatctctccctccttctatactctccaccctccgaccccctttatatacgccgaccccgctattaactccgctaaaaaaataaaaacgatttaacaaaaaataacgacgacaaaaaccgaaacgatttaaaaaaaaaaaaataaaaacgcgactactataaatatcccgaacgaaattcacgaaaaaccccaactaacccgcgtcgaaaaacgactcgcccaccctacccccctacctaacgtatccaaacgcaatatcgccgaaatcgaaaaaaaacgccgaaaaatatctcgaacgaacgaaaaaacgaa

SEQ ID NO: 37883 - DNA, 622 bp, Artificial Sequence
  chemically treated genomic DNA (Homo sapiens) CpG-island No: 37883
tagagtaatatataattaagtagtgaattgtgaaaaatattaagcgtggcgatacgtacggagagtagtatgtttgtatagattgtaggcgcggaggatatcgattcgtagatgagttttatttattgattttcgagacggtcgtttgggtttggcgggcgtaatttaattatgtagttgtagtttcggagttggatgttgagaacgtacgttgttttgtggttttttttattttcgtagatattttagagatcgaagaagaaatcgggtaaatagttgtttttaggttcgtgttaacgagttttggcgggatttttttttttttttgtattttttatttttcgattttttttgtgtgcgtcggtttcgttgttagtttcgttggagagatggggacggtttggtagaaggtggcggcgataggggtcgggacggtttggggagaggagggtgggggcgcggttgttgtgggtgtttcgggcggggtttacgggaagttttagttggttcgcgtcgggaagcgattcgtttattttgtttttttgtttggcgtgtttaagcgtagtgtcgtcggggtcgagggagggcgtcggggagtgtttcgggcgggcggaggggcgag

SEQ ID NO: 37884 - DNA, 622 bp, Artificial Sequence
  chemically treated genomic DNA (Homo sapiens) CpG-island No: 37884
ctcgcccctccgcccgcccgaaacactccccgacgccctccctcgaccccgacgacactacgcttaaacacgccaaacaaaaaaacaaaataaacgaatcgcttcccgacgcgaaccaactaaaacttcccgtaaaccccgcccgaaacacccacaacaaccgcgcccccaccctcctctccccaaaccgtcccgacccctatcgccgccaccttctaccaaaccgtccccatctctccaacgaaactaacaacgaaaccgacgcacacaaaaaaaatcgaaaaataaaaaatacaaaaaaaaaaaaaaatcccgccaaaactcgttaacacgaacctaaaaacaactatttacccgatttcttcttcgatctctaaaatatctacgaaaataaaaaaaaccacaaaacaacgtacgttctcaacatccaactccgaaactacaactacataattaaattacgcccgccaaacccaaacgaccgtctcgaaaatcaataaataaaactcatctacgaatcgatatcctccgcgcctacaatctatacaaacatactactctccgtacgtatcgccacgcttaatatttttcacaattcactacttaattatatattactcta

SEQ ID NO: 37885 - DNA, 1107 bp, Artificial Sequence
  chemically treated genomic DNA (Homo sapiens) CpG-island No: 37885
ggggagtcggcgtgttcggggtatttcggggtacgtggtttgtagggcgtagttattacgttttagtatgtgcgtatttacgagagtcggtaagaaggtttcggtatagtagttttggtgggaatttcgcggcgttttttagtttagatttttttatcgtaaaggttttaaagattcgtagcgatatttattttttgtttagtttcggttcgttgttatttatttttatttcggtcgtttgtacggtcgttattttttcggagggttcgatttaaaagtaaggaggatagtacgttaatttttaggttaaggtgcgaagttttatttttttcgggggagagggggcgggtattttcgatgcgtcgcggttgttgttgcgtaggtttagtgttgcgtttcgcggtagaggcgtttgcggtgatagtttagttagttgagttttgtgtgttaggcgttcgcgagggggtagtttttttagtagtgttcggcgttagatatggcggaggcgatggatttgggtaaagattttaacgggtttatttatttttcgattttgttcgtgagggacgacggtagttttatgtttttttacgtgcggtttagttcggttaagcgtcggttgtcgacgtttattttgtacggcggcggtatcgtgtgtcgagtgtaggagttcggggtcgtgttgttggtttagttcggggaggcgttggtcgaggtttcgggtgattttatttttacgtagtatattttggattgcgtggagcgtaacgagaggttggagttggaggtttatcggttgggtttcgtttcggcggcggatatcggttcggaagtaaagttcggggttttggtcgagggcgtcgcggagtcggagtcgtagcggtacgtcgggcggatcgtttttacggatgcggacgacgtagttatttttatttacgtgaaggaaaatgttcgttcgtttagtttcgttatcggtaacgttttgtggaaagcgatggagaagagttcgtttacgtagtattcgtggtagtttttgaaggatcgttattttaagtatttgcggggttaggagtataagtatttgttgggggacgcgtcggtgagttt

SEQ ID NO: 37886 - DNA, 1107 bp, Artificial Sequence
  chemically treated genomic DNA (Homo sapiens) CpG-island No: 37886
aaactcaccgacgcgtcccccaacaaatacttatactcctaaccccgcaaatacttaaaataacgatccttcaaaaactaccacgaatactacgtaaacgaactcttctccatcgctttccacaaaacgttaccgataacgaaactaaacgaacgaacattttccttcacgtaaataaaaataactacgtcgtccgcatccgtaaaaacgatccgcccgacgtaccgctacgactccgactccgcgacgccctcgaccaaaaccccgaactttacttccgaaccgatatccgccgccgaaacgaaacccaaccgataaacctccaactccaacctctcgttacgctccacgcaatccaaaatatactacgtaaaaataaaatcacccgaaacctcgaccaacgcctccccgaactaaaccaacaacacgaccccgaactcctacactcgacacacgataccgccgccgtacaaaataaacgtcgacaaccgacgcttaaccgaactaaaccgcacgtaaaaaaacataaaactaccgtcgtccctcacgaacaaaatcgaaaaataaataaacccgttaaaatctttacccaaatccatcgcctccgccatatctaacgccgaacactactaaaaaaactaccccctcgcgaacgcctaacacacaaaactcaactaactaaactatcaccgcaaacgcctctaccgcgaaacgcaacactaaacctacgcaacaacaaccgcgacgcatcgaaaatacccgccccctctcccccgaaaaaaataaaacttcgcaccttaacctaaaaattaacgtactatcctccttacttttaaatcgaaccctccgaaaaaataacgaccgtacaaacgaccgaaataaaaataaataacaacgaaccgaaactaaacaaaaaataaatatcgctacgaatctttaaaacctttacgataaaaaaatctaaactaaaaaacgccgcgaaattcccaccaaaactactataccgaaaccttcttaccgactctcgtaaatacgcacatactaaaacgtaataactacgccctacaaaccacgtaccccgaaataccccgaacacgccgactcccc

SEQ ID NO: 37887 - DNA, 1107 bp, Artificial Sequence
  chemically treated genomic DNA (Homo sapiens) CpG-island No: 37887
gggtttatcggcgcgttttttagtaggtatttatgtttttggtttcgtaggtgtttgaggtagcggttttttagggattgttacgagtgttgcgtgagcgagtttttttttatcgttttttataaggcgttatcggtgacggagttgggcgagcgggtatttttttttacgtaggtaaggatggttacgtcgttcgtattcgtgaaggcgattcgttcggcgtgtcgttgcggtttcggtttcgcggcgttttcggttagggtttcgggttttgttttcgagtcggtgttcgtcgtcgaggcggggtttagtcgataggtttttagttttagtttttcgttgcgttttacgtagtttaggatgtattgcgtggagatgaaattattcgaggtttcggttagcgttttttcgggttgggttagtagtacggtttcgggtttttgtattcggtatacggtgtcgtcgtcgtgtaggatgagcgtcgatagtcgacgtttggtcgggttgggtcgtacgtagaaggatatggagttgtcgtcgttttttacgaatagagtcgaggaatgggtgggttcgttggggtttttgtttaaatttatcgttttcgttatgtttgacgtcgagtattattagaagagttattttttcgcgagcgtttggtatatagagtttaattgattgagttgttatcgtagacgtttttgtcgcgaagcgtagtattgggtttgcgtagtagtagtcgcggcgtatcgagagtgttcgttttttttttttcggaagaggtggggtttcgtattttgatttggaaattaacgtattattttttttatttttgggtcgggtttttcgggaagatggcggtcgtgtaggcggtcgaggtgaaagtggatggtagcgagtcgaaattgagtaagaagtgagtgtcgttgcgagtttttaaagtttttgcggtaggagagtttgggttgggaagcgtcgcgaggtttttattaaggttgttgtgtcggggtttttttgtcggttttcgtgggtacgtatatgttgagacgtggtggttgcgttttgtagattacgtatttcgggatatttcgggtacgtcggtttttt

SEQ ID NO: 37888 - DNA, 1107 bp, Artificial Sequence
  chemically treated genomic DNA (Homo sapiens) CpG-island No: 37888
aaaaaaccgacgtacccgaaatatcccgaaatacgtaatctacaaaacgcaaccaccacgtctcaacatatacgtacccacgaaaaccgacaaaaaaaccccgacacaacaaccttaataaaaacctcgcgacgcttcccaacccaaactctcctaccgcaaaaactttaaaaactcgcaacgacactcacttcttactcaatttcgactcgctaccatccactttcacctcgaccgcctacacgaccgccatcttcccgaaaaacccgacccaaaaataaaaaaaataatacgttaatttccaaatcaaaatacgaaaccccacctcttccgaaaaaaaaaaaacgaacactctcgatacgccgcgactactactacgcaaacccaatactacgcttcgcgacaaaaacgtctacgataacaactcaatcaattaaactctatataccaaacgctcgcgaaaaaataactcttctaataatactcgacgtcaaacataacgaaaacgataaatttaaacaaaaaccccaacgaacccacccattcctcgactctattcgtaaaaaacgacgacaactccatatccttctacgtacgacccaacccgaccaaacgtcgactatcgacgctcatcctacacgacgacgacaccgtataccgaatacaaaaacccgaaaccgtactactaacccaacccgaaaaaacgctaaccgaaacctcgaataatttcatctccacgcaatacatcctaaactacgtaaaacgcaacgaaaaactaaaactaaaaacctatcgactaaaccccgcctcgacgacgaacaccgactcgaaaacaaaacccgaaaccctaaccgaaaacgccgcgaaaccgaaaccgcaacgacacgccgaacgaatcgccttcacgaatacgaacgacgtaaccatccttacctacgtaaaaaaaaatacccgctcgcccaactccgtcaccgataacgccttataaaaaacgataaaaaaaaactcgctcacgcaacactcgtaacaatccctaaaaaaccgctacctcaaacacctacgaaaccaaaaacataaatacctactaaaaaacgcgccgataaaccc

SEQ ID NO: 37889 - DNA, 685 bp, Artificial Sequence
  chemically treated genomic DNA (Homo sapiens) CpG-island No: 37889
ttaggtcgatcgttttcggtagcgttacgttcgttaatttcgttttcgttattggtttttttcggtgcggttttgttattggtttttttttgtgagtcgtcggttgtcgtggagatcgaggcgatggtaattaggagaagttaaatttggtttttcggttcgcggagtgtttgcgagcggtgtttatggcgttttatgagttttttttttattcggtcgagcgtagttatcgcgcggggttttgttttaaagtcgcgttgtttttgttgttggtcgttgcgtttacgtatatttcgtcgttgttggtggtttttcggagttacggtgagtttgtttcggtcgttgtgttacgaggtttttcgggcgcgttcggttagggtcggtttttttaatcgtttttttatcgttttttttaatttagggttttggttgaagcggagtagttacgaggagtagtcgatcgtgcgtttttaatattaggtgttgttcgtggttttgttcggattcgaaagcgacgggtttttcgtttggagtacgtttttcgtttttaatcggttgtaaggggatcgtttgcgcgtttcgttcgtttcggtgcgtggttttcgtttgggtttggggtagagtcggggatagggtggggatggggattggaatgaggatgtggggcgagcggtttcggttttgg

SEQ ID NO: 37890 - DNA, 685 bp, Artificial Sequence
  chemically treated genomic DNA (Homo sapiens) CpG-island No: 37890
ccaaaaccgaaaccgctcgccccacatcctcattccaatccccatccccaccctatccccgactctaccccaaacccaaacgaaaaccacgcaccgaaacgaacgaaacgcgcaaacgatccccttacaaccgattaaaaacgaaaaacgtactccaaacgaaaaacccgtcgctttcgaatccgaacaaaaccacgaacaacacctaatattaaaaacgcacgatcgactactcctcgtaactactccgcttcaaccaaaaccctaaattaaaaaaaacgataaaaaaacgattaaaaaaaccgaccctaaccgaacgcgcccgaaaaacctcgtaacacaacgaccgaaacaaactcaccgtaactccgaaaaaccaccaacaacgacgaaatatacgtaaacgcaacgaccaacaacaaaaacaacgcgactttaaaacaaaaccccgcgcgataactacgctcgaccgaataaaaaaaaaactcataaaacgccataaacaccgctcgcaaacactccgcgaaccgaaaaaccaaatttaacttctcctaattaccatcgcctcgatctccacgacaaccgacgactcacaaaaaaaaaccaataacaaaaccgcaccgaaaaaaaccaataacgaaaacgaaattaacgaacgtaacgctaccgaaaacgatcgacctaa

SEQ ID NO: 37891 - DNA, 685 bp, Artificial Sequence
  chemically treated genomic DNA (Homo sapiens) CpG-island No: 37891
ttagggtcggggtcgttcgttttatatttttattttagtttttatttttattttattttcgattttgttttaggtttaggcgggaattacgtatcgaaacgagcgggacgcgtaggcgatttttttgtagtcggttgaaggcggggaacgtgttttaggcgaggaattcgtcgttttcgggttcgagtagggttacgagtagtatttggtgttggaagcgtacggtcggttgtttttcgtagttgtttcgttttagttaaaattttgagttaaagagggcggtagggaggcggttagggaggtcggttttggtcgagcgcgttcggggagtttcgtggtatagcggtcggggtaggtttatcgtggtttcggaaggttattagtagcggcgggatgtacgtgagcgtagcggttagtagtaggaatagcgcggttttggagtagagtttcgcgcggtaattgcgttcgatcgggtgagagaagagtttatagagcgttatgagtatcgttcgtaggtatttcgcgagtcgggggattaagtttggttttttttggttgttatcgtttcggtttttacggtaatcgacggtttatagaaaggagttaatagtaaggtcgtatcgaaaggagttagtggcgggggcggggttagcgggcgtggcgttgtcggggacggtcggtttag

SEQ ID NO: 37892 - DNA, 685 bp, Artificial Sequence
  chemically treated genomic DNA (Homo sapiens) CpG-island No: 37892
ctaaaccgaccgtccccgacaacgccacgcccgctaaccccgcccccgccactaactcctttcgatacgaccttactattaactcctttctataaaccgtcgattaccgtaaaaaccgaaacgataacaaccaaaaaaaaccaaacttaatcccccgactcgcgaaatacctacgaacgatactcataacgctctataaactcttctctcacccgatcgaacgcaattaccgcgcgaaactctactccaaaaccgcgctattcctactactaaccgctacgctcacgtacatcccgccgctactaataaccttccgaaaccacgataaacctaccccgaccgctataccacgaaactccccgaacgcgctcgaccaaaaccgacctccctaaccgcctccctaccgccctctttaactcaaaattttaactaaaacgaaacaactacgaaaaacaaccgaccgtacgcttccaacaccaaatactactcgtaaccctactcgaacccgaaaacgacgaattcctcgcctaaaacacgttccccgccttcaaccgactacaaaaaaatcgcctacgcgtcccgctcgtttcgatacgtaattcccgcctaaacctaaaacaaaatcgaaaataaaataaaaataaaaactaaaataaaaatataaaacgaacgaccccgaccctaa

SEQ ID NO: 37893 - DNA, 509 bp, Artificial Sequence
  chemically treated genomic DNA (Homo sapiens) CpG-island No: 37893
cgtcgattgtttttttttattcgttgggaagaggaaagtgtcgttcggcgttttcgaaattttcgattatttttattagagcgattcggcgtattcgttttttttcgtatatacgcgggcggggacgggtaggacgttatagtaattagcgcgcggggggaagggcgttttttcgtcggttttatcgggggttttcggtcgtttagaaattttttttttcgtttttcgtttttcgtttttttttttttttttttttgttttcgcggttgatggatgagtttcgaatgttgttcgagtttgtgttttttttcgggacgaggaggtcgagagagaaggggttaggggcgcggtcgggtttagcgtgttcgggttggggcggtttttgttttgggggaagcgcgagggagacgtgggtacgagttgcggggattcgtttttttaaacgaggttttttgaattttttagggttttttggaagagttggatttttatttggttttttggttttt

SEQ ID NO: 37894 - DNA, 509 bp, Artificial Sequence
  chemically treated genomic DNA (Homo sapiens) CpG-island No: 37894
aaaaaccaaaaaaccaaataaaaatccaactcttccaaaaaaccctaaaaaattcaaaaaacctcgtttaaaaaaacgaatccccgcaactcgtacccacgtctccctcgcgcttcccccaaaacaaaaaccgccccaacccgaacacgctaaacccgaccgcgcccctaaccccttctctctcgacctcctcgtcccgaaaaaaaacacaaactcgaacaacattcgaaactcatccatcaaccgcgaaaacaaaaaaaaaaaaaaaaaaaaacgaaaaacgaaaaacgaaaaaaaaaatttctaaacgaccgaaaacccccgataaaaccgacgaaaaaacgcccttccccccgcgcgctaattactataacgtcctacccgtccccgcccgcgtatatacgaaaaaaaacgaatacgccgaatcgctctaataaaaataatcgaaaatttcgaaaacgccgaacgacactttcctcttcccaacgaataaaaaaaaacaatcgacg

SEQ ID NO: 37895 - DNA, 509 bp, Artificial Sequence
  chemically treated genomic DNA (Homo sapiens) CpG-island No: 37895
aaagattaaggaattaaatgaaaatttaatttttttagggagttttggaaagtttaaaggatttcgtttgagggagcgagttttcgtagttcgtgtttacgtttttttcgcgttttttttaggataggggtcgttttaattcgggtacgttgagttcggtcgcgtttttagttttttttttttcggttttttcgtttcgaagggaagtataggttcgagtagtattcggggtttatttattagtcgcggaggtaaagggggaggagagaggaggcgggaggcgggaggcgggaggaggagtttttgggcggtcgagagttttcggtggggtcggcggaggagcgttttttttttcgcgcgttgattgttgtggcgttttgttcgttttcgttcgcgtgtgtgcgagggagggcgagtgcgtcgggtcgttttgatgggggtaatcgagggtttcggggacgtcgagcggtatttttttttttttagcgagtgaaggagggtagtcggcg

SEQ ID NO: 37896 - DNA, 509 bp, Artificial Sequence
  chemically treated genomic DNA (Homo sapiens) CpG-island No: 37896
cgccgactaccctccttcactcgctaaaaaaaaaaaaataccgctcgacgtccccgaaaccctcgattacccccatcaaaacgacccgacgcactcgccctccctcgcacacacgcgaacgaaaacgaacaaaacgccacaacaatcaacgcgcgaaaaaaaaaacgctcctccgccgaccccaccgaaaactctcgaccgcccaaaaactcctcctcccgcctcccgcctcccgcctcctctctcctccccctttacctccgcgactaataaataaaccccgaatactactcgaacctatacttcccttcgaaacgaaaaaaccgaaaaaaaaaaaactaaaaacgcgaccgaactcaacgtacccgaattaaaacgacccctatcctaaaaaaaacgcgaaaaaaacgtaaacacgaactacgaaaactcgctccctcaaacgaaatcctttaaactttccaaaactccctaaaaaaattaaattttcatttaattccttaatcttt

SEQ ID NO: 37897 - DNA, 1427 bp, Artificial Sequence
  chemically treated genomic DNA (Homo sapiens) CpG-island No: 37897
tgggtagaaatagtatacgtaagatcgggtgtgtacgaggagatgcgaatatcgggaatagtcgagtgggtagaaatagtatacgtaagattaggtgtgtacgaggagatgcgaatatcgggaatagtcgagtggatagaaatagtatacgtaagatcgggtgtgtacgaggagatgcgaatatcgggaatagtcgagtgggtagaaatagtatacgtaagatcgggtgtgtacgaggagatgtgaatatcgggaatagtcgagtgggtagaaatagtatacgtaaggtcgggtgtgtacgaggagatgtgaatattgggaatagtcgcgtgggtagaaatagtatacgtaaggtcgggtgtgtacgaggagatgtgaatattgggaatagtcgcgtggatagaaatagtatacgtaagatcgggtgtgcgtgaggagatgcgaatatcgggaatagtcgcgtgggtagaaatagtatacgtaagatcgggtgtgcgtgaggagatgcgaatatcgggaatagtcgagtggatagaaatagtatacgtaagatcgggtgtgtacgaggagatgcgaatatcgggaatagtcgcgtgggtagaaatagtatacgtaagatcgggtgtgcgtgaggagatgcgaatatcgggaatagtcgagtggatagaaatagtatacgtaagatcgggtgtgcgtgaggagatgcgaatatcgggaatagtcgagtggatagaaatagtatacgtaagatcgggtgtgcgtgaggagatgcgaatatcgggaatagtcgagtgggtagaaatagtatacgtaagatcgggtgtgcgtgaggagatgcgaatatcgggaatagtcgagtggatagaaatagtatacgtaagatcgggtgtgtacgaggagatgtgaatatcgggaacggtcgagtgggtagaaatagtatacgtaagatcgggtgtgcgtgaggagatgcgaatatcgggaatagtcgtgtgggtagaaatagtatacgtaagatcgggtgtgtacgaggagatgtgaatatcgggaatagtcgagtgggtagaaatagtatacgtaaggtcgggtgtgcgtgaggagatgcgaatatcgggaatagtcgtgtgggtagaaatagtatacgtaagatcgggtgtgtacgaggagatgcgaatatcgggaatagtcgagtgggtagaaatagtatacgtaagatcgggtgtgcgtgaggagatgcgaatatcgggaatagtcgcgtgggtagaaatagtatacgtaagatcgggtgtgcgtgaggagatgcgaatattaggaatagtcgagtgggtagaaatagtatacgtaaggtcgggtgtgcgtgaggagatgcgaatattcgtaggtttttgttttattttattagagggagaagatattgagtgtagattttt

SEQ ID NO: 37898 - DNA, 1427 bp, Artificial Sequence
  chemically treated genomic DNA (Homo sapiens) CpG-island No: 37898
aaaaatctacactcaatatcttctccctctaataaaataaaacaaaaacctacgaatattcgcatctcctcacgcacacccgaccttacgtatactatttctacccactcgactattcctaatattcgcatctcctcacgcacacccgatcttacgtatactatttctacccacgcgactattcccgatattcgcatctcctcacgcacacccgatcttacgtatactatttctacccactcgactattcccgatattcgcatctcctcgtacacacccgatcttacgtatactatttctacccacacgactattcccgatattcgcatctcctcacgcacacccgaccttacgtatactatttctacccactcgactattcccgatattcacatctcctcgtacacacccgatcttacgtatactatttctacccacacgactattcccgatattcgcatctcctcacgcacacccgatcttacgtatactatttctacccactcgaccgttcccgatattcacatctcctcgtacacacccgatcttacgtatactatttctatccactcgactattcccgatattcgcatctcctcacgcacacccgatcttacgtatactatttctacccactcgactattcccgatattcgcatctcctcacgcacacccgatcttacgtatactatttctatccactcgactattcccgatattcgcatctcctcacgcacacccgatcttacgtatactatttctatccactcgactattcccgatattcgcatctcctcacgcacacccgatcttacgtatactatttctacccacgcgactattcccgatattcgcatctcctcgtacacacccgatcttacgtatactatttctatccactcgactattcccgatattcgcatctcctcacgcacacccgatcttacgtatactatttctacccacgcgactattcccgatattcgcatctcctcacgcacacccgatcttacgtatactatttctatccacgcgactattcccaatattcacatctcctcgtacacacccgaccttacgtatactatttctacccacgcgactattcccaatattcacatctcctcgtacacacccgaccttacgtatactatttctacccactcgactattcccgatattcacatctcctcgtacacacccgatcttacgtatactatttctacccactcgactattcccgatattcgcatctcctcgtacacacccgatcttacgtatactatttctatccactcgactattcccgatattcgcatctcctcgtacacacctaatcttacgtatactatttctacccactcgactattcccgatattcgcatctcctcgtacacacccgatcttacgtatactatttctaccca

SEQ ID NO: 37899 - DNA, 1427 bp, Artificial Sequence
  chemically treated genomic DNA (Homo sapiens) CpG-island No: 37899
gagagtttatatttagtgttttttttttttagtggaatgagatagagatttgcgggtgttcgtatttttttacgtatattcgattttacgtgtgttgtttttatttattcgattgtttttggtgttcgtatttttttacgtatattcgattttacgtgtgttgtttttatttacgcgattgttttcggtgttcgtatttttttacgtatattcgattttacgtgtgttgtttttatttattcgattgttttcggtgttcgtattttttcgtgtatattcgattttacgtgtgttgtttttatttatacgattgttttcggtgttcgtatttttttacgtatattcgattttacgtgtgttgtttttatttattcgattgttttcggtgtttatattttttcgtgtatattcgattttacgtgtgttgtttttatttatacgattgttttcggtgttcgtatttttttacgtatattcgattttacgtgtgttgtttttatttattcgatcgttttcggtgtttatattttttcgtgtatattcgattttacgtgtgttgtttttatttattcgattgttttcggtgttcgtatttttttacgtatattcgattttacgtgtgttgtttttatttattcgattgttttcggtgttcgtatttttttacgtatattcgattttacgtgtgttgtttttatttattcgattgttttcggtgttcgtatttttttacgtatattcgattttacgtgtgttgtttttatttattcgattgttttcggtgttcgtatttttttacgtatattcgattttacgtgtgttgtttttatttacgcgattgttttcggtgttcgtattttttcgtgtatattcgattttacgtgtgttgtttttatttattcgattgttttcggtgttcgtatttttttacgtatattcgattttacgtgtgttgtttttatttacgcgattgttttcggtgttcgtatttttttacgtatattcgattttacgtgtgttgtttttatttacgcgattgtttttagtgtttatattttttcgtgtatattcgattttacgtgtgttgtttttatttacgcgattgtttttagtgtttatattttttcgtgtatattcgattttacgtgtgttgtttttatttattcgattgttttcggtgtttatattttttcgtgtatattcgattttacgtgtgttgtttttatttattcgattgttttcggtgttcgtattttttcgtgtatattcgattttacgtgtgttgtttttatttattcgattgttttcggtgttcgtattttttcgtgtatatttgattttacgtgtgttgtttttatttattcgattgttttcggtgttcgtattttttcgtgtatattcgattttacgtgtgttgtttttattta

SEQ ID NO: 37900 - DNA, 1427 bp, Artificial Sequence
  chemically treated genomic DNA (Homo sapiens) CpG-island No: 37900
taaataaaaacaacacacgtaaaatcgaatatacacgaaaaaatacgaacaccgaaaacaatcgaataaataaaaacaacacacgtaaaatcaaatatacacgaaaaaatacgaacaccgaaaacaatcgaataaataaaaacaacacacgtaaaatcgaatatacacgaaaaaatacgaacaccgaaaacaatcgaataaataaaaacaacacacgtaaaatcgaatatacacgaaaaaatataaacaccgaaaacaatcgaataaataaaaacaacacacgtaaaatcgaatatacacgaaaaaatataaacactaaaaacaatcgcgtaaataaaaacaacacacgtaaaatcgaatatacacgaaaaaatataaacactaaaaacaatcgcgtaaataaaaacaacacacgtaaaatcgaatatacgtaaaaaaatacgaacaccgaaaacaatcgcgtaaataaaaacaacacacgtaaaatcgaatatacgtaaaaaaatacgaacaccgaaaacaatcgaataaataaaaacaacacacgtaaaatcgaatatacacgaaaaaatacgaacaccgaaaacaatcgcgtaaataaaaacaacacacgtaaaatcgaatatacgtaaaaaaatacgaacaccgaaaacaatcgaataaataaaaacaacacacgtaaaatcgaatatacgtaaaaaaatacgaacaccgaaaacaatcgaataaataaaaacaacacacgtaaaatcgaatatacgtaaaaaaatacgaacaccgaaaacaatcgaataaataaaaacaacacacgtaaaatcgaatatacgtaaaaaaatacgaacaccgaaaacaatcgaataaataaaaacaacacacgtaaaatcgaatatacacgaaaaaatataaacaccgaaaacgatcgaataaataaaaacaacacacgtaaaatcgaatatacgtaaaaaaatacgaacaccgaaaacaatcgtataaataaaaacaacacacgtaaaatcgaatatacacgaaaaaatataaacaccgaaaacaatcgaataaataaaaacaacacacgtaaaatcgaatatacgtaaaaaaatacgaacaccgaaaacaatcgtataaataaaaacaacacacgtaaaatcgaatatacacgaaaaaatacgaacaccgaaaacaatcgaataaataaaaacaacacacgtaaaatcgaatatacgtaaaaaaatacgaacaccgaaaacaatcgcgtaaataaaaacaacacacgtaaaatcgaatatacgtaaaaaaatacgaacaccaaaaacaatcgaataaataaaaacaacacacgtaaaatcgaatatacgtaaaaaaatacgaacacccgcaaatctctatctcattccactaaaaaaaaaaaacactaaatataaactctc

SEQ ID NO: 37901 - DNA, 939 bp, Artificial Sequence
  chemically treated genomic DNA (Homo sapiens) CpG-island No: 37901
ggaagcgatttttgaattgttggagcgtataaatgaaaaatattattcgtattttcgaaacgtattcgttgatttgcgtttgcgcgatgataaatagttagtgtggttggacgaatatcgtagtaaaacggttacgaaggcgcgcgtaaggcgttgatcgggttgttttcggataaatcgttaattaggtaaaagacgttggtttgaaagggcgcggcggcgcggtttttcgattggtttgaaatggagtttgatgtcgaaagacgaatttagaatattcgttatttgttgtgtaatgtcgatgaaatggagtcgggtattataaagatcgtttgttgatggagtaattgtcgtatttgttggtggaaggatgtttattttcgcgtttgcgttgaaagtttatcgtggttatatttttcgcgtggcgaatatatcgaagcggtagtttatttgcgtcgtgttattgttaagttatcgaagcgggtttgtttggtaaaaatattgatgggaataggttcgatttcgaattgttcgtttatatcggggtagggcgttatatttgcgggaagaaatagcgttaattaattttttggaaggacgtcgtgttaatttacgtcgaagttatttttttcggtaattttcggcgtatggggtaaatcgagtttgttaataacgtcgaaaatttgtgtaacgtttcggcgattttcgttaacgcgtggagtggtattagagtttttcgatgagtaggatgttggtttaagcgatgggttttcggtcgggtgaatattcggattgtgcgattgcggtcggatatcgggcgagatttttagattcgcggggtttttgaggttgattattcgatcgcgcgggatgatttgcgaagttttttgcgggtttagttttaacgggattcggaggcgtatcggatttttacgttgt

SEQ ID NO: 37902 - DNA, 939 bp, Artificial Sequence
  chemically treated genomic DNA (Homo sapiens) CpG-island No: 37902
acaacgtaaaaatccgatacgcctccgaatcccgttaaaactaaacccgcaaaaaacttcgcaaatcatcccgcgcgatcgaataatcaacctcaaaaaccccgcgaatctaaaaatctcgcccgatatccgaccgcaatcgcacaatccgaatattcacccgaccgaaaacccatcgcttaaaccaacatcctactcatcgaaaaactctaataccactccacgcgttaacgaaaatcgccgaaacgttacacaaattttcgacgttattaacaaactcgatttaccccatacgccgaaaattaccgaaaaaaataacttcgacgtaaattaacacgacgtccttccaaaaaattaattaacgctatttcttcccgcaaatataacgccctaccccgatataaacgaacaattcgaaatcgaacctattcccatcaatatttttaccaaacaaacccgcttcgataacttaacaataacacgacgcaaataaactaccgcttcgatatattcgccacgcgaaaaatataaccacgataaactttcaacgcaaacgcgaaaataaacatccttccaccaacaaatacgacaattactccatcaacaaacgatctttataatacccgactccatttcatcgacattacacaacaaataacgaatattctaaattcgtctttcgacatcaaactccatttcaaaccaatcgaaaaaccgcgccgccgcgccctttcaaaccaacgtcttttacctaattaacgatttatccgaaaacaacccgatcaacgccttacgcgcgccttcgtaaccgttttactacgatattcgtccaaccacactaactatttatcatcgcgcaaacgcaaatcaacgaatacgtttcgaaaatacgaataatatttttcatttatacgctccaacaattcaaaaatcgcttcc

SEQ ID NO: 37903 - DNA, 939 bp, Artificial Sequence
  chemically treated genomic DNA (Homo sapiens) CpG-island No: 37903
atagcgtgaaggttcgatgcgttttcgggtttcgttaagattggattcgtaaaaggtttcgtagattatttcgcgcggtcgggtaattagttttaggaatttcgcggatttggggatttcgttcggtgttcgatcgtagtcgtatagttcggatgtttattcgatcgagaatttatcgtttgggttagtattttatttatcgagaggttttgatattattttacgcgttagcgaggatcgtcggaacgttatataggttttcgacgttgttgataagttcggtttattttatgcgtcggagattgtcgggaagggtggtttcgacgtgggttagtacgacgtttttttagggagttgattaacgttgttttttttcgtagatgtagcgttttgtttcggtatggacgaatagttcgaaatcgaatttgtttttattaatgtttttgttaagtagattcgtttcggtggtttggtaatggtacggcgtagatgaattgtcgtttcgatatattcgttacgcggaagatgtagttacggtaagtttttagcgtaaacgcggagatgagtatttttttattagtaggtgcggtagttgttttattaataggcggtttttatggtgttcggttttattttatcggtattatatagtaggtaacggatgttttggattcgtttttcggtattaggttttattttaggttagtcgagaagtcgcgtcgtcgcgtttttttagattagcgttttttatttgattaacgatttgttcggagatagttcggttagcgttttacgcgcgttttcgtaatcgttttgttgcggtattcgtttagttatattggttgtttgttatcgcgtagacgtaggttagcggatgcgtttcgggagtacggataatgttttttatttatacgttttagtagtttagggatcgttttt

SEQ ID NO: 37904 - DNA, 939 bp, Artificial Sequence
  chemically treated genomic DNA (Homo sapiens) CpG-island No: 37904
aaaaacgatccctaaactactaaaacgtataaataaaaaacattatccgtactcccgaaacgcatccgctaacctacgtctacgcgataacaaacaaccaatataactaaacgaataccgcaacaaaacgattacgaaaacgcgcgtaaaacgctaaccgaactatctccgaacaaatcgttaatcaaataaaaaacgctaatctaaaaaaacgcgacgacgcgacttctcgactaacctaaaataaaacctaataccgaaaaacgaatccaaaacatccgttacctactatataataccgataaaataaaaccgaacaccataaaaaccgcctattaataaaacaactaccgcacctactaataaaaaaatactcatctccgcgtttacgctaaaaacttaccgtaactacatcttccgcgtaacgaatatatcgaaacgacaattcatctacgccgtaccattaccaaaccaccgaaacgaatctacttaacaaaaacattaataaaaacaaattcgatttcgaactattcgtccataccgaaacaaaacgctacatctacgaaaaaaaacaacgttaatcaactccctaaaaaaacgtcgtactaacccacgtcgaaaccacccttcccgacaatctccgacgcataaaataaaccgaacttatcaacaacgtcgaaaacctatataacgttccgacgatcctcgctaacgcgtaaaataatatcaaaacctctcgataaataaaatactaacccaaacgataaattctcgatcgaataaacatccgaactatacgactacgatcgaacaccgaacgaaatccccaaatccgcgaaattcctaaaactaattacccgaccgcgcgaaataatctacgaaaccttttacgaatccaatcttaacgaaacccgaaaacgcatcgaaccttcacgctat

SEQ ID NO: 37905 - DNA, 649 bp, Artificial Sequence
  chemically treated genomic DNA (Homo sapiens) CpG-island No: 37905
tgacgacgggtaggttattttaatggatagtcggatgagttgttatttattttcgttagtttgttgttattcgtttaattagcgaagtgattcgttttttttataagggattcgtagattaaaaagacgttatatcgaattggtttggttcgattaggttttagtgatgttacgcgtaatgttaatcgtaagttgtggttatggttcggtcggattgggtatttcggttttcgttttgttaggtaataatttttaggaattaaggggttcggaaaaacggtaaagtacgcggatttttaggaaatcgtaaagtttatataaggttaaaaattatttatgcggcggatagtagttatacgcgaggggtaaaaagggtacggagaatattagcgtagaagcgagttattataagttttcgacgatttagaagttattattagtataatggcgcggtagtacgaaaaagcggagagacggtttattatagagagaaaattcgggtagttgttttatagttattggtttttagtagcggttttggcgtgttggcggtaaggtaggtttgcgatcggtttgtttttcgtttggtagcgttatgtaatttggtaggttttggatagtagttttaggttcgttagtttttgaatat

SEQ ID NO: 37906 - DNA, 649 bp, Artificial Sequence
  chemically treated genomic DNA (Homo sapiens) CpG-island No: 37906
atattcaaaaactaacgaacctaaaactactatccaaaacctaccaaattacataacgctaccaaacgaaaaacaaaccgatcgcaaacctaccttaccgccaacacgccaaaaccgctactaaaaaccaataactataaaacaactacccgaattttctctctataataaaccgtctctccgctttttcgtactaccgcgccattatactaataataacttctaaatcgtcgaaaacttataataactcgcttctacgctaatattctccgtaccctttttacccctcgcgtataactactatccgccgcataaataatttttaaccttatataaactttacgatttcctaaaaatccgcgtactttaccgtttttccgaaccccttaattcctaaaaattattacctaacaaaacgaaaaccgaaatacccaatccgaccgaaccataaccacaacttacgattaacattacgcgtaacatcactaaaacctaatcgaaccaaaccaattcgatataacgtctttttaatctacgaatcccttataaaaaaaacgaatcacttcgctaattaaacgaataacaacaaactaacgaaaataaataacaactcatccgactatccattaaaataacctacccgtcgtca

SEQ ID NO: 37907 - DNA, 649 bp, Artificial Sequence
  chemically treated genomic DNA (Homo sapiens) CpG-island No: 37907
atatttaggggttgacggatttggggttgttgtttagagtttgttaggttatatgacgttgttaagcgagaagtagatcgatcgtaaatttattttatcgttaatacgttaaaatcgttgttgaaggttagtaattatggggtaattattcgaattttttttttatgatggatcgttttttcgttttttcgtgttgtcgcgttattgtgttggtggtgatttttgggtcgtcggggatttgtggtggttcgtttttgcgttggtatttttcgtgttttttttgtttttcgcgtgtagttgttgttcgtcgtatgggtggtttttgattttgtgtgggttttacggttttttggaggttcgcgtgttttgtcgttttttcgggttttttggtttttgagggttgttgtttaataaggcgaagatcgaagtgtttaattcggtcgagttatggttatagtttgcggttggtattacgcgtggtattattgaggtttgatcgaattaggttaattcggtatagcgtttttttaatttgcgggttttttatagaagaagcggattatttcgttggttgggcgggtagtagtaagttggcgggagtgagtagtaatttattcggttgtttattgagataatttgttcgtcgtta

SEQ ID NO: 37908 - DNA, 649 bp, Artificial Sequence
  chemically treated genomic DNA (Homo sapiens) CpG-island No: 37908
taacgacgaacaaattatctcaataaacaaccgaataaattactactcactcccgccaacttactactacccgcccaaccaacgaaataatccgcttcttctataaaaaacccgcaaattaaaaaaacgctataccgaattaacctaattcgatcaaacctcaataataccacgcgtaataccaaccgcaaactataaccataactcgaccgaattaaacacttcgatcttcgccttattaaacaacaaccctcaaaaaccaaaaaacccgaaaaaacgacaaaacacgcgaacctccaaaaaaccgtaaaacccacacaaaatcaaaaaccacccatacgacgaacaacaactacacgcgaaaaacaaaaaaaacacgaaaaataccaacgcaaaaacgaaccaccacaaatccccgacgacccaaaaatcaccaccaacacaataacgcgacaacacgaaaaaacgaaaaaacgatccatcataaaaaaaaaattcgaataattaccccataattactaaccttcaacaacgattttaacgtattaacgataaaataaatttacgatcgatctacttctcgcttaacaacgtcatataacctaacaaactctaaacaacaaccccaaatccgtcaacccctaaatat

SEQ ID NO: 37909 - DNA, 1027 bp, Artificial Sequence
  chemically treated genomic DNA (Homo sapiens) CpG-island No: 37909
gtttatcgagaagcgtattcggaggcggttgaggggcgcgcggggtacgtagtagagtcgtagttcggttcggattcggagcgtcggagtcgtaggaaggcgaggagaaggaaaaaaaggaggttgtcgtcggtttttgttttattttttcgggtagcgttgattcgttggtcgtcgtcggatagggttggtcgtcgggcgcgggatttcgtgcgcgttgtttatgttttcgtttgtcgttggttaggtgtgcgcgtagtttgttggtttttgggcggtattcgggggttttttatgtttcgcgtcggggttcggcgggaggatttcggagaggtagcgcggagggaaagagagagagatagtatgagaacgcgtagagttgtatttcgcgggggtcgggcgttagtagtatcgcgttgttttatttacggcgcgtttgtttttcgcgttgcgcgtttagcggggcgtcgagttttagaaattttagtatatggtcggttcggcggttacggtggtcgtagttgttttgtttttcgagcgttttttattgttttttgttttaagttttagagcgtagtttattagcggcgatcgcgatcgtagcggcggggcgtttattcggtcgtaagtatagtagtgcgtatttgcgggaaaggaggaaggggttggcggcgtcggggtttttataggggaggggtatttcggcggtagtaatcggcgtaggttaaggtattttgggtcggggttgcgcgcgagttaggtggtggtaggtcgggattggggagggtttttgcgtttttcgtttcgcggcgtcgttgttgatgacgcgcgcgggttttttcggtttcgcgtttgcggagttagtttcgttatttagcgattcgtttcggggagttttcgttgacgcgcgttgcgagtcgggttgcggtagtcgaggggcggggagggaggggagggggagttttagtgcggggagggtcggcggttgcgggttaagttttttttttcgttttttttttcgcgttgg

SEQ ID NO: 37910 - DNA, 1027 bp, Artificial Sequence
  chemically treated genomic DNA (Homo sapiens) CpG-island No: 37910
ccaacgcgaaaaaaaaaacgaaaaaaaaaacttaacccgcaaccgccgaccctccccgcactaaaactccccctcccctccctccccgcccctcgactaccgcaacccgactcgcaacgcgcgtcaacgaaaactccccgaaacgaatcgctaaataacgaaactaactccgcaaacgcgaaaccgaaaaaacccgcgcgcgtcatcaacaacgacgccgcgaaacgaaaaacgcaaaaaccctccccaatcccgacctaccaccacctaactcgcgcgcaaccccgacccaaaataccttaacctacgccgattactaccgccgaaatacccctcccctataaaaaccccgacgccgccaaccccttcctcctttcccgcaaatacgcactactatacttacgaccgaataaacgccccgccgctacgatcgcgatcgccgctaataaactacgctctaaaacttaaaacaaaaaacaataaaaaacgctcgaaaaacaaaacaactacgaccaccgtaaccgccgaaccgaccatatactaaaatttctaaaactcgacgccccgctaaacgcgcaacgcgaaaaacaaacgcgccgtaaataaaacaacgcgatactactaacgcccgacccccgcgaaatacaactctacgcgttctcatactatctctctctctttccctccgcgctacctctccgaaatcctcccgccgaaccccgacgcgaaacataaaaaacccccgaataccgcccaaaaaccaacaaactacgcgcacacctaaccaacgacaaacgaaaacataaacaacgcgcacgaaatcccgcgcccgacgaccaaccctatccgacgacgaccaacgaatcaacgctacccgaaaaaataaaacaaaaaccgacgacaacctcctttttttccttctcctcgccttcctacgactccgacgctccgaatccgaaccgaactacgactctactacgtaccccgcgcgcccctcaaccgcctccgaatacgcttctcgataaac

SEQ ID NO: 37911 - DNA, 1027 bp, Artificial Sequence
  chemically treated genomic DNA (Homo sapiens) CpG-island No: 37911
ttaacgcggagagggaagcggagggaggagtttggttcgtagtcgtcggtttttttcgtattggagttttttttttttttttttttcgtttttcggttgtcgtagttcggttcgtagcgcgcgttagcgggggtttttcggagcgagtcgttaggtaacggggttggtttcgtagacgcggggtcggggaagttcgcgcgcgttattagtagcggcgtcgcggggcggggggcgtagagattttttttaatttcggtttgttattatttggttcgcgcgtagtttcggtttagaatgttttaatttgcgtcgattgttgtcgtcgaggtgttttttttttgtagggatttcgacgtcgttagttttttttttttttttcgtaggtgcgtattgttgtgtttgcggtcgggtgggcgtttcgtcgttgcggtcgcggtcgtcgttggtaagttgcgttttggggtttggggtaggaagtagtggggggcgttcgaagagtagggtagttacggttatcgtggtcgtcggatcggttatgtgttaaagtttttggggttcggcgtttcgttgggcgcgtagcgcggggagtagacgcgtcgtgggtggggtagcgcggtgttgttggcgttcggttttcgcggggtgtagttttgcgcgtttttatgttgttttttttttttttttttcgcgttgttttttcgaggttttttcgtcgagtttcggcgcggggtatgaggagttttcgggtgtcgtttagagattagtaggttgcgcgtatatttagttagcggtagacggggatatgagtagcgcgtacggggtttcgcgttcggcggttagttttattcggcggcggttagcgggttaacgttgttcgggagaatgaggtaggagtcggcggtagtttttttttttttttttttttcgtttttttgcggtttcggcgtttcgggttcgggtcgggttgcggttttgttgcgtgtttcgcgcgttttttaatcgttttcggatgcgtttttcggtaagt

SEQ ID NO: 37912 - DNA, 1027 bp, Artificial Sequence
  chemically treated genomic DNA (Homo sapiens) CpG-island No: 37912
acttaccgaaaaacgcatccgaaaacgattaaaaaacgcgcgaaacacgcaacaaaaccgcaacccgacccgaacccgaaacgccgaaaccgcaaaaaaacgaaaaaaaaaaaaaaaaaaaaactaccgccgactcctacctcattctcccgaacaacgttaacccgctaaccgccgccgaataaaactaaccgccgaacgcgaaaccccgtacgcgctactcatatccccgtctaccgctaactaaatatacgcgcaacctactaatctctaaacgacacccgaaaactcctcataccccgcgccgaaactcgacgaaaaaacctcgaaaaaacaacgcgaaaaaaaaaaaaaaaaaacaacataaaaacgcgcaaaactacaccccgcgaaaaccgaacgccaacaacaccgcgctaccccacccacgacgcgtctactccccgcgctacgcgcccaacgaaacgccgaaccccaaaaactttaacacataaccgatccgacgaccacgataaccgtaactaccctactcttcgaacgccccccactacttcctaccccaaaccccaaaacgcaacttaccaacgacgaccgcgaccgcaacgacgaaacgcccacccgaccgcaaacacaacaatacgcacctacgaaaaaaaaaaaaaaaactaacgacgtcgaaatccctacaaaaaaaaaacacctcgacgacaacaatcgacgcaaattaaaacattctaaaccgaaactacgcgcgaaccaaataataacaaaccgaaattaaaaaaaatctctacgccccccgccccgcgacgccgctactaataacgcgcgcgaacttccccgaccccgcgtctacgaaaccaaccccgttacctaacgactcgctccgaaaaacccccgctaacgcgcgctacgaaccgaactacgacaaccgaaaaacgaaaaaaaaaaaaaaaaaaaactccaatacgaaaaaaaccgacgactacgaaccaaactcctccctccgcttccctctccgcgttaa

SEQ ID NO: 37913 - DNA, 588 bp, Artificial Sequence
  chemically treated genomic DNA (Homo sapiens) CpG-island No: 37913
tacgcgaattataaggcgcgtttaatgaagtaatattggttatttcgataagtcgtttagcgacgcgttttttgggggtttggaatttttatcgggtttacgtcgttacggttacgttttttattcggattttatttttcgcgcgcgttttttaattcgggtaggtattcgattcgagtacgttcgggaggttttaattatcgaaatttttacgcgttattattttcgtttagaggaataattttttatttcgttttttcgattacgttttttatatttatcgcgttttcgttttatttagtttttttttttcgtttttcgtcgatttaatttttattattatattatatatgtttttttaatatatttttttataatttttttttattttttttattttttcgtttatattttttattatttattttttttttttttttatttttttttttattttttttttatttttttcgtttttttttttttattttatttcgttattttttttttatatttattttttttgtattttgtttttttttatttttttttttttatttttatttttttttttttattttttttttt

SEQ ID NO: 37914 - DNA, 588 bp, Artificial Sequence
  chemically treated genomic DNA (Homo sapiens) CpG-island No: 37914
aaaaaaaaaaataaaaaaaaaaaaataaaaataaaaaaaaaaaaataaaaaaaaacaaaatacaaaaaaaataaatataaaaaaaaaataacgaaataaaataaaaaaaaaaaaacgaaaaaaataaaaaaaaaataaaaaaaaaaataaaaaaaaaaaaaaaataaataataaaaaatataaacgaaaaaataaaaaaaataaaaaaaaattataaaaaaatatattaaaaaaacatatataatataataataaaaattaaatcgacgaaaaacgaaaaaaaaaaactaaataaaacgaaaacgcgataaatataaaaaacgtaatcgaaaaaacgaaataaaaaattattcctctaaacgaaaataataacgcgtaaaaatttcgataattaaaacctcccgaacgtactcgaatcgaatacctacccgaattaaaaaacgcgcgcgaaaaataaaatccgaataaaaaacgtaaccgtaacgacgtaaacccgataaaaattccaaacccccaaaaaacgcgtcgctaaacgacttatcgaaataaccaatattacttcattaaacgcgccttataattcgcgta

SEQ ID NO: 37915 - DNA, 588 bp, Artificial Sequence
  chemically treated genomic DNA (Homo sapiens) CpG-island No: 37915
gagaaagagagtaaggaggggagagtgaaggtagggaagaaagggtaagagagagtaaggtgtaagaagggtagatgtgaggagagaatggcggggtgggatggaggaggaaagacgagaaagatgagggagggataggaggaggggtgaggggagggaagagatgagtgatgggagatgtgagcggaggagtagggaaggtggagggaagttatgagggagtgtgttggagagatatatatggtatgatggtgagggttgggtcggcggggggcggggggggggagttgggtggagcggaggcgcggtgggtgtggggggcgtgatcgggggggcggggtggggggttatttttttgggcgggggtggtggcgcgtgagggtttcggtggttgggatttttcgggcgtgttcgagtcgagtgtttgttcggattggggggcgcgcgcgaggagtagggttcgagtggagggcgtggtcgtggcggcgtaggttcggtgggggttttaggtttttaagggacgcgtcgttaagcggtttgtcggagtggttagtgttattttattgggcgcgttttgtaattcgcgtg

SEQ ID NO: 37916 - DNA, 588 bp, Artificial Sequence
  chemically treated genomic DNA (Homo sapiens) CpG-island No: 37916
cacgcgaattacaaaacgcgcccaataaaataacactaaccactccgacaaaccgcttaacgacgcgtcccttaaaaacctaaaacccccaccgaacctacgccgccacgaccacgccctccactcgaaccctactcctcgcgcgcgccccccaatccgaacaaacactcgactcgaacacgcccgaaaaatcccaaccaccgaaaccctcacgcgccaccacccccgcccaaaaaaataaccccccaccccgcccccccgatcacgccccccacacccaccgcgcctccgctccacccaactccccccccccgccccccgccgacccaaccctcaccatcataccatatatatctctccaacacactccctcataacttccctccaccttccctactcctccgctcacatctcccatcactcatctcttccctcccctcacccctcctcctatccctccctcatctttctcgtctttcctcctccatcccaccccgccattctctcctcacatctacccttcttacaccttactctctcttaccctttcttccctaccttcactctcccctccttactctctttctc

SEQ ID NO: 37917 - DNA, 677 bp, Artificial Sequence
  chemically treated genomic DNA (Homo sapiens) CpG-island No: 37917
gtttcgcgatttcggcgtcgtttgcggttggattttttggtagcgggcgcggcgttagttaggacgacggtttcggaagtttttcgggcgcgtgagattcgggtcgtttttcgtttacgtacgattttttttttaggcgcgttttttatttcggtttcgcgtttcgtttagttcgggtgattaattatattttattttaaaggtttttacgttcgggcgtgtttttcgttcgttcgcggtaggtgggggtgtagggcggagggcgcgggcggttttagaaggcgttcggattttttcgagaatttcgggtcgcgtaggcgtattgaggtcggcgcgggggcgtgcgagaggcgcgcggcggcgattgagggaaggttgttcgggtcgggttacgagtagggtttgcgcgcgttcgtaggaaggcgcgggggcggggtgtcgcggtaacggcgtatgcgtaggcgcgcggtcgcggcggcggttggggagggttttttcggaaggttcgggaggtttttggaaaaagcgtcgcgcgttgggcgggttcgtcgttatataaggtaggcgcgggggtggcgcgttagttgttttagcgtttcggtgtggttgtgtcgttggttttgtgcggttatttagttaaggtgacgggtggttgtgggggtttgtggaggtggatt

SEQ ID NO: 37918 - DNA, 677 bp, Artificial Sequence
  chemically treated genomic DNA (Homo sapiens) CpG-island No: 37918
aatccacctccacaaacccccacaaccacccgtcaccttaactaaataaccgcacaaaaccaacgacacaaccacaccgaaacgctaaaacaactaacgcgccacccccgcgcctaccttatataacgacgaacccgcccaacgcgcgacgctttttccaaaaacctcccgaaccttccgaaaaaaccctccccaaccgccgccgcgaccgcgcgcctacgcatacgccgttaccgcgacaccccgcccccgcgccttcctacgaacgcgcgcaaaccctactcgtaacccgacccgaacaaccttccctcaatcgccgccgcgcgcctctcgcacgcccccgcgccgacctcaatacgcctacgcgacccgaaattctcgaaaaaatccgaacgccttctaaaaccgcccgcgccctccgccctacacccccacctaccgcgaacgaacgaaaaacacgcccgaacgtaaaaacctttaaaataaaatataattaatcacccgaactaaacgaaacgcgaaaccgaaataaaaaacgcgcctaaaaaaaaaatcgtacgtaaacgaaaaacgacccgaatctcacgcgcccgaaaaacttccgaaaccgtcgtcctaactaacgccgcgcccgctaccaaaaaatccaaccgcaaacgacgccgaaatcgcgaaac

SEQ ID NO: 37919 - DNA, 677 bp, Artificial Sequence
  chemically treated genomic DNA (Homo sapiens) CpG-island No: 37919
agtttatttttataggtttttataattattcgttattttggttaagtgatcgtataggattaacggtatagttatatcgggacgttgaagtaattgacgcgttattttcgcgtttgttttatatagcgacgggttcgtttagcgcgcggcgttttttttagaagtttttcgaatttttcggaagaattttttttagtcgtcgtcgcggtcgcgcgtttacgtatgcgtcgttgtcgcggtatttcgttttcgcgtttttttgcgggcgcgcgtaggttttgttcgtggttcggttcgggtaatttttttttaatcgtcgtcgcgcgtttttcgtacgttttcgcgtcggttttaatgcgtttgcgcggttcggaattttcgggaaggttcgggcgttttttggggtcgttcgcgtttttcgttttgtatttttatttgtcgcgggcgggcggagggtacgttcgggcgtgggggtttttgaagtgaggtgtagttggttattcgggttgagcggaacgcggggtcggggtgggaggcgcgtttggagggagggtcgtgcgtggacggagagcggttcgggttttacgcgttcgggagattttcggagtcgtcgttttgattggcgtcgcgttcgttgttaaagaatttagtcgtaagcggcgtcgggatcgcggggt

SEQ ID NO: 37920 - DNA, 677 bp, Artificial Sequence
  chemically treated genomic DNA (Homo sapiens) CpG-island No: 37920
accccgcgatcccgacgccgcttacgactaaattctttaacaacgaacgcgacgccaatcaaaacgacgactccgaaaatctcccgaacgcgtaaaacccgaaccgctctccgtccacgcacgaccctccctccaaacgcgcctcccaccccgaccccgcgttccgctcaacccgaataaccaactacacctcacttcaaaaacccccacgcccgaacgtaccctccgcccgcccgcgacaaataaaaatacaaaacgaaaaacgcgaacgaccccaaaaaacgcccgaaccttcccgaaaattccgaaccgcgcaaacgcattaaaaccgacgcgaaaacgtacgaaaaacgcgcgacgacgattaaaaaaaaattacccgaaccgaaccacgaacaaaacctacgcgcgcccgcaaaaaaacgcgaaaacgaaataccgcgacaacgacgcatacgtaaacgcgcgaccgcgacgacgactaaaaaaaattcttccgaaaaattcgaaaaacttctaaaaaaaacgccgcgcgctaaacgaacccgtcgctatataaaacaaacgcgaaaataacgcgtcaattacttcaacgtcccgatataactataccgttaatcctatacgatcacttaaccaaaataacgaataattataaaaacctataaaaataaact

SEQ ID NO: 37921 - DNA, 501 bp, Artificial Sequence
  chemically treated genomic DNA (Homo sapiens) CpG-island No: 37921
  unsure (14..15, 41, 444, 480)
gcgcgcgtcgcgtnncggtttcgcgtttttttcgtttcggnttttcgcgttcgcgcgcggcgtcgcgttcgcgtcgcggttcgcgcggcgtttcgtttttttttcgttcggcgcgttttcgcgtttttttcgggtcggtcgggttttcgtgttttttcgcgtcggcgcgcgtttttttgtttttttcgtttcgggttttttttttttttttttttttttttttttttttgtttttttttttttcgtttttcgtttttttttgtcgttttttttttttttttttttcgttttttttttgttttttttttttttttttttttttttttttttttttttcgtcgttttcgtgtcgttttttttttcgttttgttcgtcgtgtcgttttcgtgttttatttcgtttttttttttcgttgtgttttcgttttcgttttttcgtcggtgngtttttttttcggcgtttagttttttttgtcgtttncgggtgtttttttcgtcgttg

SEQ ID NO: 37922 - DNA, 501 bp, Artificial Sequence
  chemically treated genomic DNA (Homo sapiens) CpG-island No: 37922
  unsure (22, 58, 461, 487..)
caacgacgaaaaaaacacccgnaaacgacaaaaaaaactaaacgccgaaaaaaaaacncaccgacgaaaaaacgaaaacgaaaacacaacgaaaaaaaaaaacgaaataaaacacgaaaacgacacgacgaacaaaacgaaaaaaaaaacgacacgaaaacgacgaaaaaaaaaaaaaaaaaaaaaaaaaaaaaaaaaaaaaacaaaaaaaaaacgaaaaaaaaaaaaaaaaaaaacgacaaaaaaaaacgaaaaacgaaaaaaaaaaaaacaaaaaaaaaaaaaaaaaaaaaaaaaaaaaaaaaacccgaaacgaaaaaaacaaaaaaacgcgcgccgacgcgaaaaaacacgaaaacccgaccgacccgaaaaaaacgcgaaaacgcgccgaacgaaaaaaaaacgaaacgccgcgcgaaccgcgacgcgaacgcgacgccgcgcgcgaacgcgaaaanccgaaacgaaaaaaacgcgaaaccgnnacgcgacgcgcgc

SEQ ID NO: 37923 - DNA, 501 bp, Artificial Sequence
  chemically treated genomic DNA (Homo sapiens) CpG-island No: 37923
  unsure (22, 58, 461, 487..)
taacgacgggaggggtattcgngggcggtaggaagaattggacgtcggaaaagaggtntatcggcgaggggacgggaacgagggtatagcgaggaaagagagcgaagtggggtacgagggcgatacggcgaataaagcggaagaagaaacgatacgggggcgacgaggaggaggagagggaaaagggagggggagggaaagagtagggggagggcgggagggaaaggggagagaggcgatagagaagaacgggagacgagggaggggagggtagggaggggggagggagggaagaaagagggaagattcggggcggggagagtaagggggcgcgcgtcggcgcgggggggtacgggggttcggtcggttcggggggggcgcgggggcgcgtcgggcgaggggggggcggggcgtcgcgcgggtcgcggcgcgggcgcggcgtcgcgcgcgggcgcgggggntcggggcggggggggcgcggggtcgnngcgcggcgcgcgt

SEQ ID NO: 37924 - DNA, 501 bp, Artificial Sequence
  chemically treated genomic DNA (Homo sapiens) CpG-island No: 37924
  unsure (14..15, 41, 444, 480)
acgcgcgccgcgcnncgaccccgcgccccccccgccccgancccccgcgcccgcgcgcgacgccgcgcccgcgccgcgacccgcgcgacgccccgcccccccctcgcccgacgcgcccccgcgccccccccgaaccgaccgaacccccgtacccccccgcgccgacgcgcgcccccttactctccccgccccgaatcttccctctttcttccctccctcccccctccctaccctcccctccctcgtctcccgttcttctctatcgcctctctcccctttccctcccgccctccccctactctttccctccccctcccttttccctctcctcctcctcgtcgcccccgtatcgtttcttcttccgctttattcgccgtatcgccctcgtaccccacttcgctctctttcctcgctataccctcgttcccgtcccctcgccgatanacctcttttccgacgtccaattcttcctaccgcccncgaatacccctcccgtcgtta

SEQ ID NO: 37925 - DNA, 582 bp, Artificial Sequence
  chemically treated genomic DNA (Homo sapiens) CpG-island No: 37925
  unsure (107, 302, 373, 444)
gtttaagaaaatttcgcgtaggatcgcgttcgttttcgcgttcgcgttcgttttcgttttttcgcgttcgttttttcgcgttcgttttttcgcgttcgtcgtttcgngttcggttttcgcggttttttttttttcgtggtgttttttttcgttttcgtttttgcgttttcggttttgtcgtttttcgtttttcgtttttgtttttcgttttttttttttttcgcgtcgttttttcgttttttcgttgtttttttcgttttttttttttttttttttttttttcgttttgttcgtttcgtttntttcgcgtgttttttgttgtgttttttcgtttcgcgttcggtttcgttttttgtttttggtttttgttttnttttcgttttgcgcgttttttttcgttttttcgcggttcgtcgggcgcggtgtgcgttttttttttttttnttttttttcgtttttgttttttttgtttttttttttttttttttttcgtttgtttttttttgtgtttgttttttttttttttttcgttttttttcgtttttttttttgtttttttttttttgttttgttttttttttt

SEQ ID NO: 37926 - DNA, 582 bp, Artificial Sequence
  chemically treated genomic DNA (Homo sapiens) CpG-island No: 37926
  unsure (139, 210, 281, 476)
aaaaaaaaaaacaaaacaaaaaaaaaaaaacaaaaaaaaaaacgaaaaaaaacgaaaaaaaaaaaaaaaacaaacacaaaaaaaaacaaacgaaaaaaaaaaaaaaaaaaaaacaaaaaaaacaaaaacgaaaaaaaanaaaaaaaaaaaaaacgcacaccgcgcccgacgaaccgcgaaaaaacgaaaaaaaacgcgcaaaacgaaaanaaaacaaaaaccaaaaacaaaaaacgaaaccgaacgcgaaacgaaaaaacacaacaaaaaacacgcgaaanaaacgaaacgaacaaaacgaaaaaaaaaaaaaaaaaaaaaaaaaacgaaaaaaacaacgaaaaaacgaaaaaacgacgcgaaaaaaaaaaaaaacgaaaaacaaaaacgaaaaacgaaaaacgacaaaaccgaaaacgcaaaaacgaaaacgaaaaaaaacaccacgaaaaaaaaaaaaccgcgaaaaccgaacncgaaacgacgaacgcgaaaaaacgaacgcgaaaaaacgaacgcgaaaaaacgaaaacgaacgcgaacgcgaaaacgaacgcgatcctacgcgaaattttcttaaac

SEQ ID NO: 37927 - DNA, 582 bp, Artificial Sequence
  chemically treated genomic DNA (Homo sapiens) CpG-island No: 37927
  unsure (139, 210, 281, 476)
gggagaagggataaaataggggggagggggtagagaaggaaacggggaggagcgaggggagaaggaagggtaaatatagaaagggataaacgagagggagaaaggaaaagaggtaaaaaaaataggagcggggggaggnagaaagagaggaaacgtatatcgcgttcgacggatcgcggagagacgagagagaacgcgtagggcgaaganaaaataagagttaggagtaggggacgaaatcgaacgcgaagcggaagggtatagtaaaaagtacgcgaganaagcgaggcgggtagggcggggagggggggagagggaggggagggcggagggagtagcggagaagcggggggacgacgcgaaaaaaaggaaaggcgaaaggtaaggacgggggacgaaagacgatagggtcgagagcgtaggggcgggggcgggaggaaatattacggaaaaaaaaaggtcgcgggggtcgggtncggggcggcgggcgcgagggggcgggcgcgagggggcgggcgcgagggggcgggggcgggcgcgggcgcgggggcgggcgcggttttgcgcggggtttttttaaat

SEQ ID NO: 37928 - DNA, 582 bp, Artificial Sequence
  chemically treated genomic DNA (Homo sapiens) CpG-island No: 37928
  unsure (107, 302, 373, 444)
atttaaaaaaaccccgcgcaaaaccgcgcccgcccccgcgcccgcgcccgcccccgccccctcgcgcccgccccctcgcgcccgccccctcgcgcccgccgccccgnacccgacccccgcgacctttttttttccgtaatatttcctcccgcccccgcccctacgctctcgaccctatcgtctttcgtcccccgtccttacctttcgcctttcctttttttcgcgtcgtccccccgcttctccgctactccctccgccctcccctccctctccccccctccccgccctacccgcctcgcttntctcgcgtactttttactatacccttccgcttcgcgttcgatttcgtcccctactcctaactcttattttntcttcgccctacgcgttctctctcgtctctccgcgatccgtcgaacgcgatatacgtttcctctctttctncctccccccgctcctattttttttacctcttttcctttctccctctcgtttatccctttctatatttacccttccttctcccctcgctcctccccgtttccttctctaccccctcccccctattttatcccttctccc

SEQ ID NO: 37929 - DNA, 924 bp, Artificial Sequence
  chemically treated genomic DNA (Homo sapiens) CpG-island No: 37929
gtattttcgtgcgttgtttttttgtacgttttcgtttagtttcgatttttcgttttcgggcgtgggtttttttacgtttttattttcgttcgtatttttttaacgttttacgttattttgtttggcggcggttttagtcgattttgggttcggggaaaagaggttcgcgtttttttcgcggtagttttgttttttagtagtcggatagtttttatttaaagttagtcgtttttttagtttttcgttttttaggcggggttttcgtttttattttggcggttgcgcgggcgttcgggggttttatatgtcggggaggagcgttcggcgttggagtaaaagtttgcgcgtcggttgggtttttcgggtcgttgagtagaggattaggagcggcgttttcgtacggggcgtagggcgcggtggtttcggattgcgtttagtcgcgcgcggggcgggaggggcggtatttcgtttttagggttagggttggtcgtcgaggcggaggtagagggcggggaaagttttttttacgtcgtttggagtcggtcgcgcgagtttttttcgggttcgcgttggtttttcgttttttttggtggcgtcgcgcggttgttcggggtattggggtgttcgagttttttattatttttacgttggttcgcgagaggtagcggcgggaggcgtcggtagggagttttcgttggggtagtaaagtcgtgggtggaggcgaaataaataatttacgaaaaaggaaaatagacgtgagtcgagttagagtttttttcgtttttcgttcggggttgcgtttttttcgtcgtcgtcgttagcgtcgttgtagtgatttttcgtttttatttagcgaggttattgtgtattgggcgtttaattatttatttattttggaggtcgaggatttttatttttatgggg

SEQ ID NO: 37930 - DNA, 924 bp, Artificial Sequence
  chemically treated genomic DNA (Homo sapiens) CpG-island No: 37930
ccccataaaaataaaaatcctcgacctccaaaataaataaataattaaacgcccaatacacaataacctcgctaaataaaaacgaaaaatcactacaacgacgctaacgacgacgacgaaaaaaacgcaaccccgaacgaaaaacgaaaaaaactctaactcgactcacgtctattttcctttttcgtaaattatttatttcgcctccacccacgactttactaccccaacgaaaactccctaccgacgcctcccgccgctacctctcgcgaaccaacgtaaaaataataaaaaactcgaacaccccaataccccgaacaaccgcgcgacgccaccaaaaaaaacgaaaaaccaacgcgaacccgaaaaaaactcgcgcgaccgactccaaacgacgtaaaaaaaactttccccgccctctacctccgcctcgacgaccaaccctaaccctaaaaacgaaataccgcccctcccgccccgcgcgcgactaaacgcaatccgaaaccaccgcgccctacgccccgtacgaaaacgccgctcctaatcctctactcaacgacccgaaaaacccaaccgacgcgcaaacttttactccaacgccgaacgctcctccccgacatataaaacccccgaacgcccgcgcaaccgccaaaataaaaacgaaaaccccgcctaaaaaacgaaaaactaaaaaaacgactaactttaaataaaaactatccgactactaaaaaacaaaactaccgcgaaaaaaacgcgaacctcttttccccgaacccaaaatcgactaaaaccgccgccaaacaaaataacgtaaaacgttaaaaaaatacgaacgaaaataaaaacgtaaaaaaacccacgcccgaaaacgaaaaatcgaaactaaacgaaaacgtacaaaaaaacaacgcacgaaaatac

SEQ ID NO: 37931 - DNA, 924 bp, Artificial Sequence
  chemically treated genomic DNA (Homo sapiens) CpG-island No: 37931
ttttatggaagtgggaattttcggtttttagggtgaataaataattaagcgtttaatatataatagtttcgttagatggagacgaggaattattgtagcggcgttggcggcggcggcggggggagcgtaatttcgggcgggaggcgggagaggttttggttcggtttacgtttgtttttttttttcgtggattatttatttcgtttttatttacggttttgttgttttagcgggagttttttgtcggcgtttttcgtcgttgtttttcgcgggttagcgtgagggtagtagagagttcgggtattttagtgtttcgggtagtcgcgcggcgttattaggaaaggcggggagttaacgcgggttcggggagggttcgcgcggtcggttttaggcggcgtggaggagatttttttcgttttttgttttcgtttcggcggttagttttggttttgggagcggggtgtcgtttttttcgtttcgcgcgcggttaggcgtagttcggagttatcgcgttttgcgtttcgtgcgaggacgtcgtttttggttttttgtttagcggttcgggaggtttaatcggcgcgtaaatttttgttttagcgtcgggcgttttttttcggtatgtgaagttttcgggcgttcgcgtagtcgttaaggtgaggacggaggtttcgtttagagggcgggggattggggaggcggttggttttaaatgggggttgttcggttgttgggaaatagagttgtcgcggggggaacgcggatttttttttttcgagtttagggtcggttggggtcgtcgttaggtaaggtagcgtgaggcgttggaagggtgcgggcggagatggaggcgtgggggaatttacgttcgggagcgggagatcggggttgggcggaggcgtgtaaaggggtagcgtacggaggtgt

SEQ ID NO: 37932 - DNA, 924 bp, Artificial Sequence
  chemically treated genomic DNA (Homo sapiens) CpG-island No: 37932
acacctccgtacgctacccctttacacgcctccgcccaaccccgatctcccgctcccgaacgtaaattcccccacgcctccatctccgcccgcacccttccaacgcctcacgctaccttacctaacgacgaccccaaccgaccctaaactcgaaaaaaaaaaatccgcgttccccccgcgacaactctatttcccaacaaccgaacaacccccatttaaaaccaaccgcctccccaatcccccgccctctaaacgaaacctccgtcctcaccttaacgactacgcgaacgcccgaaaacttcacataccgaaaaaaaacgcccgacgctaaaacaaaaatttacgcgccgattaaacctcccgaaccgctaaacaaaaaaccaaaaacgacgtcctcgcacgaaacgcaaaacgcgataactccgaactacgcctaaccgcgcgcgaaacgaaaaaaacgacaccccgctcccaaaaccaaaactaaccgccgaaacgaaaacaaaaaacgaaaaaaatctcctccacgccgcctaaaaccgaccgcgcgaaccctccccgaacccgcgttaactccccgcctttcctaataacgccgcgcgactacccgaaacactaaaatacccgaactctctactaccctcacgctaacccgcgaaaaacaacgacgaaaaacgccgacaaaaaactcccgctaaaacaacaaaaccgtaaataaaaacgaaataaataatccacgaaaaaaaaaaacaaacgtaaaccgaaccaaaacctctcccgcctcccgcccgaaattacgctccccccgccgccgccgccaacgccgctacaataattcctcgtctccatctaacgaaactattatatattaaacgcttaattatttattcaccctaaaaaccgaaaattcccacttccataaaa

SEQ ID NO: 37933 - DNA, 783 bp, Artificial Sequence
  chemically treated genomic DNA (Homo sapiens) CpG-island No: 37933
cgttcgcggaaaaacgaaaacgttttttcgtttcgggtaggaaggggttgggagggggggttggcgtttcgttttagcgtcgtttgttcgatggggtttcgtttttttgcgcgcgtttttcgtttttttttttcggggcggcggcggcggcgtaggggaaggggcgggtaggggtcgtcgtcggtttttttttttatcgtttcgcgttagtttagtcgagtcgagtcgagtcgagcgggcgtcgcgtcgggttttcgtcgtagtcgcgtttttcggtatttagcgagcgagtgggtaggcgggcgggcgaggtagtcgcgggggtcgggttcggcgtttttttcgtcgttcgtagcgttttcgggcgggcgcgggtcgcgatggtagcggcggagtagggttgagttcgttgttcgttcgtagttttcggtttcgttggttttagttatggcgaagtagtacgatgtgttgtttcggttgttgttgatcggggatttcggggtgggtaagatttgtttgttgtgtcgttttatcgataacgagttttatttttcgtatatttttattatcggtaaggggcggtggttcggggcgttttttttttttcgttcgcggttttttttttcgtcgttttcgtttttagttggggaggaattgttagttttttcggttggaggcggtggcgtcggaggtcggagttcgggataaatttcggggtgagtataggttttggtaggtgagggtgtttttgttgtttgtcgttcggattaggggtggggtttt

SEQ ID NO: 37934 - DNA, 783 bp, Artificial Sequence
  chemically treated genomic DNA (Homo sapiens) CpG-island No: 37934
aaaaccccacccctaatccgaacgacaaacaacaaaaacaccctcacctaccaaaacctatactcaccccgaaatttatcccgaactccgacctccgacgccaccgcctccaaccgaaaaaactaacaattcctccccaactaaaaacgaaaacgacgaaaaaaaaaaccgcgaacgaaaaaaaaaaaacgccccgaaccaccgccccttaccgataataaaaatatacgaaaaataaaactcgttatcgataaaacgacacaacaaacaaatcttacccaccccgaaatccccgatcaacaacaaccgaaacaacacatcgtactacttcgccataactaaaaccaacgaaaccgaaaactacgaacgaacaacgaactcaaccctactccgccgctaccatcgcgacccgcgcccgcccgaaaacgctacgaacgacgaaaaaaacgccgaacccgacccccgcgactacctcgcccgcccgcctacccactcgctcgctaaataccgaaaaacgcgactacgacgaaaacccgacgcgacgcccgctcgactcgactcgactcgactaaactaacgcgaaacgataaaaaaaaaaaccgacgacgacccctacccgccccttcccctacgccgccgccgccgccccgaaaaaaaaaaacgaaaaacgcgcgcaaaaaaacgaaaccccatcgaacaaacgacgctaaaacgaaacgccaaccccccctcccaaccccttcctacccgaaacgaaaaaacgttttcgtttttccgcgaacg

SEQ ID NO: 37935 - DNA, 783 bp, Artificial Sequence
  chemically treated genomic DNA (Homo sapiens) CpG-island No: 37935
gagattttatttttggttcggacggtaggtagtagggatatttttatttgttaaaatttatgtttatttcgagatttatttcggatttcggttttcggcgttatcgtttttagtcggaggggttggtaatttttttttagttggggacgggggcggcggggaaaggggtcgcgggcggggagggaggggcgtttcgggttatcgttttttatcgatggtggagatgtgcgaggagtggaattcgttgtcggtgaagcggtatagtaggtaggttttgtttatttcggagttttcgattagtagtagtcggaatagtatatcgtattgtttcgttatgattggggttagcggggtcgggaattgcgggcgggtagcgggtttagttttgtttcgtcgttgttatcgcggttcgcgttcgttcggggacgttgcgggcggcgaggaggacgtcgggttcggttttcgcggttgtttcgttcgttcgtttgtttattcgttcgttgggtgtcgggaagcgcggttgcggcgggagttcggcgcggcgttcgttcggttcggttcggttcggttgggttggcgcgaggcggtgggaggagaaatcggcggcggtttttgttcgtttttttttttgcgtcgtcgtcgtcgtttcggagagagggggcggggagcgcgcgtaggagagcgggattttatcgagtaggcgacgttggggcggggcgttagtttttttttttaatttttttttgttcggggcgggggaacgttttcgttttttcgcggacg

SEQ ID NO: 37936 - DNA, 783 bp, Artificial Sequence
  chemically treated genomic DNA (Homo sapiens) CpG-island No: 37936
cgtccgcgaaaaaacgaaaacgttcccccgccccgaacaaaaaaaaattaaaaaaaaaaactaacgccccgccccaacgtcgcctactcgataaaatcccgctctcctacgcgcgctccccgccccctctctccgaaacgacgacgacgacgcaaaaaaaaaaacgaacaaaaaccgccgccgatttctcctcccaccgcctcgcgccaacccaaccgaaccgaaccgaaccgaacgaacgccgcgccgaactcccgccgcaaccgcgcttcccgacacccaacgaacgaataaacaaacgaacgaacgaaacaaccgcgaaaaccgaacccgacgtcctcctcgccgcccgcaacgtccccgaacgaacgcgaaccgcgataacaacgacgaaacaaaactaaacccgctacccgcccgcaattcccgaccccgctaaccccaatcataacgaaacaatacgatatactattccgactactactaatcgaaaactccgaaataaacaaaacctacctactataccgcttcaccgacaacgaattccactcctcgcacatctccaccatcgataaaaaacgataacccgaaacgcccctccctccccgcccgcgacccctttccccgccgcccccgtccccaactaaaaaaaaattaccaacccctccgactaaaaacgataacgccgaaaaccgaaatccgaaataaatctcgaaataaacataaattttaacaaataaaaatatccctactacctaccgtccgaaccaaaaataaaatctc

SEQ ID NO: 37937 - DNA, 581 bp, Artificial Sequence
  chemically treated genomic DNA (Homo sapiens) CpG-island No: 37937
cgcgttggaattcggcgtttagttgcgtttgggatttacgcgtcgcgttcgaagttcgttagcgacgtttagagagtagggttcgcgtcggttttcgaggagacgttgttttcggtataatttttttttatttttgcggtcgcggcggcgttgagaagtagttgttttttttttatttttagtatttaacgttatttcgtagtattttcgatcgttcggcgcggttttttagggcgtcgaacgaagttttcgcgttagtcgcggtttaagtagttagggttcggtcggtttaacggttttttatgcgttcgcgcggggcgtttatttggtcgggtttacggtttttttttttcgtagcgcgcgcgggttcgacgtttgttatttattcgttttagttcggcgttttcggtttcgagttcgtagttttttttaagttaggtttttagtacgttttttcgtagttatttcgtttttgttttcgttggcgcgtttggaagaagaggcgggagagagcgagagagagcggagacgcgatatagtagggcggatttttttatatatatttttgaaaaaataaaaat

SEQ ID NO: 37938 - DNA, 581 bp, Artificial Sequence
  chemically treated genomic DNA (Homo sapiens) CpG-island No: 37938
atttttattttttcaaaaatatatataaaaaaatccgccctactatatcgcgtctccgctctctctcgctctctcccgcctcttcttccaaacgcgccaacgaaaacaaaaacgaaataactacgaaaaaacgtactaaaaacctaacttaaaaaaaactacgaactcgaaaccgaaaacgccgaactaaaacgaataaataacaaacgtcgaacccgcgcgcgctacgaaaaaaaaaaaccgtaaacccgaccaaataaacgccccgcgcgaacgcataaaaaaccgttaaaccgaccgaaccctaactacttaaaccgcgactaacgcgaaaacttcgttcgacgccctaaaaaaccgcgccgaacgatcgaaaatactacgaaataacgttaaatactaaaaataaaaaaaaaacaactacttctcaacgccgccgcgaccgcaaaaataaaaaaaaattataccgaaaacaacgtctcctcgaaaaccgacgcgaaccctactctctaaacgtcgctaacgaacttcgaacgcgacgcgtaaatcccaaacgcaactaaacgccgaattccaacgcg

SEQ ID NO: 37939 - DNA, 581 bp, Artificial Sequence
  chemically treated genomic DNA (Homo sapiens) CpG-island No: 37939
gtttttatttttttagaaatatgtataagagggttcgttttattatgtcgcgttttcgttttttttcgttttttttcgtttttttttttaggcgcgttagcgggggtaagagcgaggtggttgcgaggaggcgtattgaaagtttgatttggggaaggttgcgggttcggagtcggagacgtcgagttggggcgggtgagtggtaggcgtcgggttcgcgcgcgttgcgggaggggagagtcgtgggttcggttaggtgggcgtttcgcgcgggcgtatggggagtcgttgggtcggtcgagttttggttgtttgagtcgcggttggcgcgggaatttcgttcggcgttttgggagatcgcgtcgagcggtcggaggtgttgcgggatggcgttgggtgttgggaatgggaagggaatagttgttttttagcgtcgtcgcggtcgtagaagtggaaaaaagttgtgtcgggaatagcgttttttcggaagtcggcgcgagttttgttttttgggcgtcgttggcgggtttcggacgcggcgcgtgggttttaggcgtagttgggcgtcgggttttagcgcg

SEQ ID NO: 37940 - DNA, 581 bp, Artificial Sequence
  chemically treated genomic DNA (Homo sapiens) CpG-island No: 37940
cgcgctaaaacccgacgcccaactacgcctaaaacccacgcgccgcgtccgaaacccgccaacgacgcccaaaaaacaaaactcgcgccgacttccgaaaaaacgctattcccgacacaacttttttccacttctacgaccgcgacgacgctaaaaaacaactattcccttcccattcccaacacccaacgccatcccgcaacacctccgaccgctcgacgcgatctcccaaaacgccgaacgaaattcccgcgccaaccgcgactcaaacaaccaaaactcgaccgacccaacgactccccatacgcccgcgcgaaacgcccacctaaccgaacccacgactctcccctcccgcaacgcgcgcgaacccgacgcctaccactcacccgccccaactcgacgtctccgactccgaacccgcaaccttccccaaatcaaactttcaatacgcctcctcgcaaccacctcgctcttacccccgctaacgcgcctaaaaaaaaaaacgaaaaaaaacgaaaaaaaacgaaaacgcgacataataaaacgaaccctcttatacatatttctaaaaaaataaaaac

SEQ ID NO: 37941 - DNA, 582 bp, Artificial Sequence
  chemically treated genomic DNA (Homo sapiens) CpG-island No: 37941
tcggtttttatatttaattttttcggtttcgggtttaagacgcgtgcgcgtatatttcgttgttgtgggcgggtattggggcggggcgatatcgggggtttattgtttggggaggggcgcgcgcgagtttagggttaacggacgcgcgggcggcgcgggggcgcgggggcgcgggggcgttggggttggaggggcggggcgcgcgcgttttttcgttggcggagcggttgggcggcgggtcgggttcggggtcgtttggaatggcgtttttttcgttttcgttttaattgttttttttggtagttttcgcgaggtttttgggttttagcgaggtaaggtgattcgtttttgggaaggtttcggttcgcgagtttaaagcgttttgttaaaagttcgttttggaaggagtggcgcgtcgagggggacgcggagttttttcgttggcgggttgggtttggggagagagagggtagggtttcgtcgcgtttagcgttttaatttttcgttttggatttataggtgatggttggatcggcggaggaggcgggagtttattgtttcgagagtttgtggtttttgttt

SEQ ID NO: 37942 - DNA, 582 bp, Artificial Sequence
  chemically treated genomic DNA (Homo sapiens) CpG-island No: 37942
aaacaaaaaccacaaactctcgaaacaataaactcccgcctcctccgccgatccaaccatcacctataaatccaaaacgaaaaattaaaacgctaaacgcgacgaaaccctaccctctctctccccaaacccaacccgccaacgaaaaaactccgcgtccccctcgacgcgccactccttccaaaacgaacttttaacaaaacgctttaaactcgcgaaccgaaaccttcccaaaaacgaatcaccttacctcgctaaaacccaaaaacctcgcgaaaactaccaaaaaaaacaattaaaacgaaaacgaaaaaaacgccattccaaacgaccccgaacccgacccgccgcccaaccgctccgccaacgaaaaaacgcgcgcgccccgcccctccaaccccaacgcccccgcgcccccgcgcccccgcgccgcccgcgcgtccgttaaccctaaactcgcgcgcgcccctccccaaacaataaacccccgatatcgccccgccccaatacccgcccacaacaacgaaatatacgcgcacgcgtcttaaacccgaaaccgaaaaaattaaatataaaaaccga

SEQ ID NO: 37943 - DNA, 582 bp, Artificial Sequence
  chemically treated genomic DNA (Homo sapiens) CpG-island No: 37943
aggtagaggttataggttttcgggataatgggttttcgtttttttcgtcggtttagttattatttgtgggtttaaagcgaagagttggggcgttggacgcggcgaggttttgttttttttttttttaggtttagttcgttagcggaagaatttcgcgtttttttcggcgcgttattttttttaggacgaatttttggtaaagcgttttgagttcgcgggtcgaggtttttttaggagcgggttattttatttcgttgggatttaggagtttcgcgagggttgttaggagaagtagttggggcgaaggcggaggaggcgttattttaagcggtttcgggttcggttcgtcgtttagtcgtttcgttagcgagggagcgcgcgcgtttcgtttttttagttttagcgttttcgcgttttcgcgttttcgcgtcgttcgcgcgttcgttggttttgggttcgcgcgcgtttttttttagatagtgggttttcggtatcgtttcgttttaatgttcgtttatagtagcggagtgtgcgcgtacgcgttttaaattcgaagtcggaaaagttaagtgtaggagtcgg

SEQ ID NO: 37944 - DNA, 582 bp, Artificial Sequence
  chemically treated genomic DNA (Homo sapiens) CpG-island No: 37944
ccgactcctacacttaacttttccgacttcgaatttaaaacgcgtacgcgcacactccgctactataaacgaacattaaaacgaaacgataccgaaaacccactatctaaaaaaaaacgcgcgcgaacccaaaaccaacgaacgcgcgaacgacgcgaaaacgcgaaaacgcgaaaacgctaaaactaaaaaaacgaaacgcgcgcgctccctcgctaacgaaacgactaaacgacgaaccgaacccgaaaccgcttaaaataacgcctcctccgccttcgccccaactacttctcctaacaaccctcgcgaaactcctaaatcccaacgaaataaaataacccgctcctaaaaaaacctcgacccgcgaactcaaaacgctttaccaaaaattcgtcctaaaaaaaataacgcgccgaaaaaaacgcgaaattcttccgctaacgaactaaacctaaaaaaaaaaaaaacaaaacctcgccgcgtccaacgccccaactcttcgctttaaacccacaaataataactaaaccgacgaaaaaaacgaaaacccattatcccgaaaacctataacctctacct

SEQ ID NO: 37945 - DNA, 532 bp, Artificial Sequence
  chemically treated genomic DNA (Homo sapiens) CpG-island No: 37945
  unsure (76, 310, 312, 399)
cgtagcgtcgttttaagttgtgtttgtggttatgtcgttttatttcgttcggttttttgttatttagggttgtagncgttttcgttagcgtttttcggggagagttcggggtttttagttttaagtcggggcggtttttcgttataggcgcggcggttttttttatggttaagcgcggggcgagtcgggttatagagggtaagaacgggtatagggttgggatggcggggtttttatcgagggaagtcggtggacgtttaagggcggtttcgtaataatagggaaggggttcggaatcggtcggaatgtngnttggttattggcggtcggcggggattggatatattggcgcgtcgcggggcggtaagggtcggggatacggtttttcgggtcgcgggngagattgtgggaaacgtttcggtttagaggtggtcggcgcgtgtgtataggggaaagtcgcgtggtggttttttatagaaaggagaggggagaagaggtgtgttttttatacgtatagaggggggagatgtgt

SEQ ID NO: 37946 - DNA, 532 bp, Artificial Sequence
  chemically treated genomic DNA (Homo sapiens) CpG-island No: 37946
  unsure (134, 221, 223, 457)
acacatctcccccctctatacgtataaaaaacacacctcttctcccctctcctttctataaaaaaccaccacgcgactttcccctatacacacgcgccgaccacctctaaaccgaaacgtttcccacaatctcncccgcgacccgaaaaaccgtatccccgacccttaccgccccgcgacgcgccaatatatccaatccccgccgaccgccaataaccaancnacattccgaccgattccgaaccccttccctattattacgaaaccgcccttaaacgtccaccgacttccctcgataaaaaccccgccatcccaaccctatacccgttcttaccctctataacccgactcgccccgcgcttaaccataaaaaaaaccgccgcgcctataacgaaaaaccgccccgacttaaaactaaaaaccccgaactctccccgaaaaacgctaacgaaaacgnctacaaccctaaataacaaaaaaccgaacgaaataaaacgacataaccacaaacacaacttaaaacgacgctacg

SEQ ID NO: 37947 - DNA, 532 bp, Artificial Sequence
  chemically treated genomic DNA (Homo sapiens) CpG-island No: 37947
  unsure (134, 221, 223, 457)
atatattttttttttttgtgcgtgtggagagtatattttttttttttttttttttttgtggaaaattattacgcggtttttttttgtgtatacgcgtcggttatttttgggtcggagcgttttttatagttttnttcgcgattcggggggtcgtgttttcgatttttgtcgtttcgcggcgcgttaatatgtttagttttcgtcggtcgttagtgattaantngtatttcgatcggtttcgggttttttttttgttgttgcggggtcgtttttgagcgtttatcggtttttttcggtggggatttcgttattttagttttgtgttcgtttttgttttttgtagttcggttcgtttcgcgtttggttatggaaggggtcgtcgcgtttgtggcgggggatcgtttcgatttggggttgggggtttcgggtttttttcgagaggcgttggcgggggcgnttgtagttttggataataggaagtcgaacggggtgaagcggtataattataagtataatttgaagcggcgttacg

SEQ ID NO: 37948 - DNA, 532 bp, Artificial Sequence
  chemically treated genomic DNA (Homo sapiens) CpG-island No: 37948
  unsure (76, 310, 312, 399)
cgtaacgccgcttcaaattatacttataattataccgcttcaccccgttcgacttcctattatccaaaactacaancgcccccgccaacgcctctcgaaaaaaacccgaaacccccaaccccaaatcgaaacgatcccccgccacaaacgcgacgaccccttccataaccaaacgcgaaacgaaccgaactacaaaaaacaaaaacgaacacaaaactaaaataacgaaatccccaccgaaaaaaaccgataaacgctcaaaaacgaccccgcaacaacaaaaaaaaaacccgaaaccgatcgaaatacnanttaatcactaacgaccgacgaaaactaaacatattaacgcgccgcgaaacgacaaaaatcgaaaacacgaccccccgaatcgcgaanaaaactataaaaaacgctccgacccaaaaataaccgacgcgtatacacaaaaaaaaaccgcgtaataattttccacaaaaaaaaaaaaaaaaaaaaaatatactctccacacgcacaaaaaaaaaaaatatat

SEQ ID NO: 37949 - DNA, 1091 bp, Artificial Sequence
  chemically treated genomic DNA (Homo sapiens) CpG-island No: 37949
ggcggttgcgatcgttcggtcgcgtttatcgtttttataaacggaaaggcgcgtcggggttttttcggttatttatttgttagggtcgtaggagtttacgtttggcgtacgttagttttaggtcggggtagcgggacggggaggtttcgagggttaggtcgcggaggtaggattcggcggagtttcggttcggagtttgcggatttcggtaaagatagagatttttttcgttttaaaaagtatttttcgatttcgtatttagagtcgggttaagtttttatttttcgtttttcgtttgaagcgggtagttttttcgcgttttttcgcgtttgttgtttcggaatttaggattagtcggcgtatttggttacgtatttttcggcgggaggtgattatacgggaacgcgaggcgggggttttttcgcgtttcgtcggtcggacgtagggttataagcgtagtcggaaggaggcgttcgcgtcgcggcggttttcggtttcggtattgttcgggcgggaggttcggcgcgcgttcgttcgcggggttattcgttttagaatcgttcgtcggaattagttcggtgttcgagatttcgagttcgggcgcgagtaggatgcggtttttcggggacggttggcgcgggtcggagtttcgaagtttcgtttttatttttgttttatattgcggtgtttttcggcgtcggcgtcgttgtggcgggttagtgtcgttttgtttcgtagttcgagcgttcggcgcggtaggtagtagtcggagaagcggcgtagtcgggggatgggcgggtatatggaagggcgggggttgtggttttcgggtcggattacgggattttagtttcgggggcgagatattttagtatatttcgaaaattggtaagcggttttcgtttttagggattttattgttatttgtacgtttagttttgttagaattttacgggatatgtgtaaaaggtaaagaaataagttgtcgttacgtttttcgtttttttcgtttttttgtaggatttatatggtatattttttaaagtttaacgggagacgggaaagaattgattggttgggaattttggaag

SEQ ID NO: 37950 - DNA, 1091 bp, Artificial Sequence
  chemically treated genomic DNA (Homo sapiens) CpG-island No: 37950
cttccaaaattcccaaccaatcaattctttcccgtctcccgttaaactttaaaaaatataccatataaatcctacaaaaaaacgaaaaaaacgaaaaacgtaacgacaacttatttctttaccttttacacatatcccgtaaaattctaacaaaactaaacgtacaaataacaataaaatccctaaaaacgaaaaccgcttaccaattttcgaaatatactaaaatatctcgcccccgaaactaaaatcccgtaatccgacccgaaaaccacaacccccgcccttccatatacccgcccatcccccgactacgccgcttctccgactactacctaccgcgccgaacgctcgaactacgaaacaaaacgacactaacccgccacaacgacgccgacgccgaaaaacaccgcaatataaaacaaaaataaaaacgaaacttcgaaactccgacccgcgccaaccgtccccgaaaaaccgcatcctactcgcgcccgaactcgaaatctcgaacaccgaactaattccgacgaacgattctaaaacgaataaccccgcgaacgaacgcgcgccgaacctcccgcccgaacaataccgaaaccgaaaaccgccgcgacgcgaacgcctccttccgactacgcttataaccctacgtccgaccgacgaaacgcgaaaaaacccccgcctcgcgttcccgtataatcacctcccgccgaaaaatacgtaaccaaatacgccgactaatcctaaattccgaaacaacaaacgcgaaaaaacgcgaaaaaactacccgcttcaaacgaaaaacgaaaaataaaaacttaacccgactctaaatacgaaatcgaaaaatactttttaaaacgaaaaaaatctctatctttaccgaaatccgcaaactccgaaccgaaactccgccgaatcctacctccgcgacctaaccctcgaaacctccccgtcccgctaccccgacctaaaactaacgtacgccaaacgtaaactcctacgaccctaacaaataaataaccgaaaaaaccccgacgcgcctttccgtttataaaaacgataaacgcgaccgaacgatcgcaaccgcc

SEQ ID NO: 37951 - DNA, 1091 bp, Artificial Sequence
  chemically treated genomic DNA (Homo sapiens) CpG-island No: 37951
tttttaagatttttaattaattagttttttttcgtttttcgttgggttttgaggaatgtattatatggattttgtagggggacggagaggacgaagggcgtggcgatagtttatttttttgttttttgtatatatttcgtgagattttggtaagattgagcgtgtaagtagtaatggagtttttgaggacgggggtcgtttgttagttttcgaggtgtattgagatatttcgttttcgaggttggggtttcgtggttcggttcgagggttataattttcgtttttttatgtgttcgtttatttttcggttgcgtcgttttttcggttgttatttatcgcgtcggacgttcgggttgcggaatagggcggtattggttcgttatagcgacgtcggcgtcgagggatatcgtagtatgaggtagaggtaagaacggggtttcgggatttcgattcgcgttaatcgttttcggggagtcgtattttgttcgcgttcgagttcggggtttcgggtatcgggttggtttcggcgggcggttttggagcgggtggtttcgcgagcggacgcgcgtcgagtttttcgttcgggtagtgtcgaagtcgggagtcgtcgcggcgcgggcgttttttttcggttgcgtttataattttgcgttcggtcggcggggcgcgaggaagttttcgtttcgcgttttcgtgtggttatttttcgtcggaggatgcgtggttaggtgcgtcggttggttttgagtttcggggtagtaggcgcggggaagcgcggggaggttgttcgttttaggcgggaggcggagggtgggggtttagttcggttttgggtgcggggtcggggggtgttttttggggcgggggaggtttttgtttttatcggagttcgtaggtttcgggtcgaggtttcgtcgggttttgttttcgcggtttggttttcggggttttttcgtttcgttgtttcggtttggagttagcgtgcgttaagcgtgggtttttgcgattttggtaggtaggtggtcgagaggatttcggcgcgttttttcgtttgtgggggcggtgggcgcggtcgggcgatcgtagtcgtt

SEQ ID NO: 37952 - DNA, 1091 bp, Artificial Sequence
  chemically treated genomic DNA (Homo sapiens) CpG-island No: 37952
aacgactacgatcgcccgaccgcgcccaccgcccccacaaacgaaaaaacgcgccgaaatcctctcgaccacctacctaccaaaatcgcaaaaacccacgcttaacgcacgctaactccaaaccgaaacaacgaaacgaaaaaaccccgaaaaccaaaccgcgaaaacaaaacccgacgaaacctcgacccgaaacctacgaactccgataaaaacaaaaacctcccccgccccaaaaaacaccccccgaccccgcacccaaaaccgaactaaacccccaccctccgcctcccgcctaaaacgaacaacctccccgcgcttccccgcgcctactaccccgaaactcaaaaccaaccgacgcacctaaccacgcatcctccgacgaaaaataaccacacgaaaacgcgaaacgaaaacttcctcgcgccccgccgaccgaacgcaaaattataaacgcaaccgaaaaaaaacgcccgcgccgcgacgactcccgacttcgacactacccgaacgaaaaactcgacgcgcgtccgctcgcgaaaccacccgctccaaaaccgcccgccgaaaccaacccgatacccgaaaccccgaactcgaacgcgaacaaaatacgactccccgaaaacgattaacgcgaatcgaaatcccgaaaccccgttcttacctctacctcatactacgatatccctcgacgccgacgtcgctataacgaaccaataccgccctattccgcaacccgaacgtccgacgcgataaataacaaccgaaaaaacgacgcaaccgaaaaataaacgaacacataaaaaaacgaaaattataaccctcgaaccgaaccacgaaaccccaacctcgaaaacgaaatatctcaatacacctcgaaaactaacaaacgacccccgtcctcaaaaactccattactacttacacgctcaatcttaccaaaatctcacgaaatatatacaaaaaacaaaaaaataaactatcgccacgcccttcgtcctctccgtccccctacaaaatccatataatacattcctcaaaacccaacgaaaaacgaaaaaaaactaattaattaaaaatcttaaaaa

SEQ ID NO: 37953 - DNA, 720 bp, Artificial Sequence
  chemically treated genomic DNA (Homo sapiens) CpG-island No: 37953
tttgtattcgttgtcgttaatttttttttcgggaaagtgatcggtttgattggttataacggttttggtaaatttatttgtttaaaatgtttggtcgttattagtcgtcgtcggaaggggagatttttttgatgtttaatcgttggaaagttggagtagtaaagcgtttgttcgtaagtggtttatttgtcgtagtagtttttttcggtagaagggatgatcgtcgtgaattggtggcgattggtcgttattcgtggtatggcgcgttggggtttttggggcggtagatcgcgaaaaagtcgaggaagttatttcgttggttgtttaaaatcgttggcgtatcggttggtcgatagtttttttggcggcgacgttagcgggcgtggatcgttatgttggtggcgtaggatagtcgttgtcgttgttgcgacgaatcgatttcggcgttggatatcgtttattaggttgagtgttgtcgttggtgtatcgtttaagttaggagcgtggtttgacggttatgtcgtgttgtacgatattaatatggcggtacgttattgtgattatttgtcgttttgcgcggcggtgaaatgattgtttagggaacgtttgcggaaatatgcgcggcgaaattttcgaaatgatttatggtatttcgatgggtatttgtcgtattcggcgggtgttgtatttgtgagttttgtttattgatgagcgtttatt

SEQ ID NO: 37954 - DNA, 720 bp, Artificial Sequence
  chemically treated genomic DNA (Homo sapiens) CpG-island No: 37954
aataaacgctcatcaataaacaaaactcacaaatacaacacccgccgaatacgacaaatacccatcgaaataccataaatcatttcgaaaatttcgccgcgcatatttccgcaaacgttccctaaacaatcatttcaccgccgcgcaaaacgacaaataatcacaataacgtaccgccatattaatatcgtacaacacgacataaccgtcaaaccacgctcctaacttaaacgatacaccaacgacaacactcaacctaataaacgatatccaacgccgaaatcgattcgtcgcaacaacgacaacgactatcctacgccaccaacataacgatccacgcccgctaacgtcgccgccaaaaaaactatcgaccaaccgatacgccaacgattttaaacaaccaacgaaataacttcctcgactttttcgcgatctaccgccccaaaaaccccaacgcgccataccacgaataacgaccaatcgccaccaattcacgacgatcatcccttctaccgaaaaaaactactacgacaaataaaccacttacgaacaaacgctttactactccaactttccaacgattaaacatcaaaaaaatctccccttccgacgacgactaataacgaccaaacattttaaacaaataaatttaccaaaaccgttataaccaatcaaaccgatcactttcccgaaaaaaaaattaacgacaacgaatacaaa

SEQ ID NO: 37955 - DNA, 720 bp, Artificial Sequence
  chemically treated genomic DNA (Homo sapiens) CpG-island No: 37955
ggtaagcgtttattaataaataaaatttataggtgtagtattcgtcggatgcggtaaatatttatcgggatgttataaattatttcgagggtttcgtcgcgtatattttcgtaggcgttttttgagtaattattttatcgtcgcgtagggcgatagataattatagtagcgtgtcgttatattgatatcgtgtaatacggtatgatcgttaggttacgtttttgatttaaacggtgtattagcgatagtatttaatttggtgggcgatatttagcgtcgaggtcggttcgtcgtagtaacgataacggttattttgcgttattagtatggcgatttacgttcgttgacgtcgtcgttagagagattatcgattagtcgatgcgttagcggttttaagtaattagcgagatagttttttcgattttttcgcgatttgtcgttttaaaggttttagcgcgttatgttacgggtaacgattaatcgttattagtttacgacggttattttttttgtcggaggaagttgttgcggtaaataagttatttgcgggtaaacgttttgttgttttagttttttagcggttgggtattaagagaattttttttttcgacggcggttgatgacggttaagtattttgagtaggtggatttattagaatcgttgtgattaattagatcggttattttttcggaggaaaggttaacgatagcggatgtaaa

SEQ ID NO: 37956 - DNA, 720 bp, Artificial Sequence
  chemically treated genomic DNA (Homo sapiens) CpG-island No: 37956
tttacatccgctatcgttaacctttcctccgaaaaaataaccgatctaattaatcacaacgattctaataaatccacctactcaaaatacttaaccgtcatcaaccgccgtcgaaaaaaaaaattctcttaatacccaaccgctaaaaaactaaaacaacaaaacgtttacccgcaaataacttatttaccgcaacaacttcctccgacaaaaaaaataaccgtcgtaaactaataacgattaatcgttacccgtaacataacgcgctaaaacctttaaaacgacaaatcgcgaaaaaatcgaaaaaactatctcgctaattacttaaaaccgctaacgcatcgactaatcgataatctctctaacgacgacgtcaacgaacgtaaatcgccatactaataacgcaaaataaccgttatcgttactacgacgaaccgacctcgacgctaaatatcgcccaccaaattaaatactatcgctaatacaccgtttaaatcaaaaacgtaacctaacgatcataccgtattacacgatatcaatataacgacacgctactataattatctatcgccctacgcgacgataaaataattactcaaaaaacgcctacgaaaatatacgcgacgaaaccctcgaaataatttataacatcccgataaatatttaccgcatccgacgaatactacacctataaattttatttattaataaacgcttacc

SEQ ID NO: 37957 - DNA, 918 bp, Artificial Sequence
  chemically treated genomic DNA (Homo sapiens) CpG-island No: 37957
  unsure (29)
taatcgcgcgcggcgattgttttattttncgggattttagtaggtagagttataatgtcgatagaggcgggaggaagagcgcgtttttatttttgggtgtgagcgtcgataggagtataatagttatttcgttgtttattttagatggtttgaatgatattattcggaatagttagacggcgcgatgaaagtgaaagacgcgatcgtcgatgtttttacgcggaaaatttgtcgcgtgtaaatgttgatcgcgatgcgtcggatattcgcgttacgtttggttggtataaagaaacgttagtatcgtttttgatttgagtggtatggtttatagtttgcgtggttatcgcgatcgtgttggtattgcgtcgataaagaaattttggtaggcgttattgtgatgcgattcgggttggtagtcggaatatcggtgttcgattcgatgtgtggtttcggtacgttgttgatggagtagcgatgttggggatcgatcgcgtattaggtttgtatcgtgggcgtggggttttagtcggttgggcgtagtatgatgaagttatttggtaggaaggaaagcggaagcgtaaattcgcgttcgtaaaggtttggttgagtatagttttatttttacggttcggatagcgacgtacgggtgatttaacgtgtacgattaacgttcgttttgcggggattggtgaattgattatttttgaggtgaagatgtcgcgtaattgattaattcgttgtcgaaagggtcgtacggtatatgttgagtaattcgttatacggggaacgtttggatagcgaatcggcgttattgcgttgtatagtttgttgggtcggattatgaaaaattagtttggtgttggaatttttttttgtttagtgtttcgtcggatttgttaagttgtttgagttgcg

SEQ ID NO: 37958 - DNA, 918 bp, Artificial Sequence
  chemically treated genomic DNA (Homo sapiens) CpG-island No: 37958
  unsure (890)
cgcaactcaaacaacttaacaaatccgacgaaacactaaacaaaaaaaaattccaacaccaaactaatttttcataatccgacccaacaaactatacaacgcaataacgccgattcgctatccaaacgttccccgtataacgaattactcaacatataccgtacgaccctttcgacaacgaattaatcaattacgcgacatcttcacctcaaaaataatcaattcaccaatccccgcaaaacgaacgttaatcgtacacgttaaatcacccgtacgtcgctatccgaaccgtaaaaataaaactatactcaaccaaacctttacgaacgcgaatttacgcttccgctttccttcctaccaaataacttcatcatactacgcccaaccgactaaaaccccacgcccacgatacaaacctaatacgcgatcgatccccaacatcgctactccatcaacaacgtaccgaaaccacacatcgaatcgaacaccgatattccgactaccaacccgaatcgcatcacaataacgcctaccaaaatttctttatcgacgcaataccaacacgatcgcgataaccacgcaaactataaaccataccactcaaatcaaaaacgatactaacgtttctttataccaaccaaacgtaacgcgaatatccgacgcatcgcgatcaacatttacacgcgacaaattttccgcgtaaaaacatcgacgatcgcgtctttcactttcatcgcgccgtctaactattccgaataatatcattcaaaccatctaaaataaacaacgaaataactattatactcctatcgacgctcacacccaaaaataaaaacgcgctcttcctcccgcctctatcgacattataactctacctactaaaatcccgnaaaataaaacaatcgccgcgcgcgatta

SEQ ID NO: 37959 - DNA, 918 bp, Artificial Sequence
  chemically treated genomic DNA (Homo sapiens) CpG-island No: 37959
  unsure (890)
cgtagtttaagtagtttagtagattcggcgaggtattaaataaagagagattttagtattaaattggttttttatgattcgatttagtaggttatgtagcgtaatagcgtcggttcgttgtttagacgtttttcgtatggcgggttgtttaatatgtgtcgtacggttttttcggtagcggattggttagttgcgcgatatttttattttaaaggtgattagtttattaattttcgtaagacgggcgttagtcgtgtacgttgaattattcgtgcgtcgttgttcgaatcgtaaaaatgaggttatatttagttaggtttttacgggcgcgagtttgcgttttcgtttttttttttgttagatagttttattatgttgcgtttagtcgattaaagttttacgtttacggtgtaagtttggtgcgcgatcggtttttagtatcgttgttttattagtaacgtatcggaattatatatcggatcgagtatcggtgtttcggttgttagttcggatcgtattataatagcgtttgttagggtttttttgtcggcgtaatattagtacgatcgcgatagttacgtagattgtaaattatattatttagattaagagcgatattggcgtttttttatgttagttagacgtaacgcggatattcggcgtatcgcgattaatatttgtacgcggtagatttttcgcgtgaaagtatcgacgatcgcgttttttatttttatcgcgtcgtttgattgtttcggatggtgttatttaaattatttgaagtggatagcgaaatagttgttgtgtttttgtcggcgtttatatttagaggtgggggcgcgttttttttttcgtttttgtcgatattataattttgtttgttggaatttcgnagagtgagataatcgtcgcgcgcggttg

SEQ ID NO: 37960 - DNA, 918 bp, Artificial Sequence
  chemically treated genomic DNA (Homo sapiens) CpG-island No: 37960
  unsure (29)
caaccgcgcgcgacgattatctcactctncgaaattccaacaaacaaaattataatatcgacaaaaacgaaaaaaaaaacgcgcccccacctctaaatataaacgccgacaaaaacacaacaactatttcgctatccacttcaaataatttaaataacaccatccgaaacaatcaaacgacgcgataaaaataaaaaacgcgatcgtcgatactttcacgcgaaaaatctaccgcgtacaaatattaatcgcgatacgccgaatatccgcgttacgtctaactaacataaaaaaacgccaatatcgctcttaatctaaataatataatttacaatctacgtaactatcgcgatcgtactaatattacgccgacaaaaaaaccctaacaaacgctattataatacgatccgaactaacaaccgaaacaccgatactcgatccgatatataattccgatacgttactaataaaacaacgatactaaaaaccgatcgcgcaccaaacttacaccgtaaacgtaaaactttaatcgactaaacgcaacataataaaactatctaacaaaaaaaaaaacgaaaacgcaaactcgcgcccgtaaaaacctaactaaatataacctcatttttacgattcgaacaacgacgcacgaataattcaacgtacacgactaacgcccgtcttacgaaaattaataaactaatcacctttaaaataaaaatatcgcgcaactaaccaatccgctaccgaaaaaaccgtacgacacatattaaacaacccgccatacgaaaaacgtctaaacaacgaaccgacgctattacgctacataacctactaaatcgaatcataaaaaaccaatttaatactaaaatctctctttatttaatacctcgccgaatctactaaactacttaaactacg

SEQ ID NO: 37961 - DNA, 802 bp, Artificial Sequence
  chemically treated genomic DNA (Homo sapiens) CpG-island No: 37961
gtagacgcgtatcgtgacgcgatcggagtagtttagacgttgattgttaataatttggaatttttatggtttttgttcgcgattagtattatattattttttttagttgtataacggcgtaagttatcgttttagtacggttttttattattttggatgttcggtatttaatattttcgttagaatatcgttgatgatggtacgcgtttttcggtacgcgggttatcgttcgttattatcgttacgttagtaaattttcggtaattgcgtttattagtggacgtttattttatcgcgatcgttttatagttaaagatatattatagtttgttcgtatagtgtagacgcgttgttgtaaggttttttttagtgtattcggcgtatgcgcgtaatttattatttcgtcgtttgtttggcgtagttagttaataaggtaaatcgtattcgttaggcggataattttcgggattaaaagttattaattcggcgcgaatatacggagttttcggatcgaattttaggtatagggaagtattaatcggtataaaggtgatagtttttaatttaatgcgaaaggtattttttatcgaatattgtttataatgcgttcgagagtaatttaagattatcgttagtgttgtatcggtggtaattaaatttaatgttttgttcgtttttcggtcggagttatacggatcgttagagacgtcgtaattattagaaaatcgtatgtgtaaaagttatattaatgcgattgattattagacggtaaagttttacgataaaaacgatagtacgtggt

SEQ ID NO: 37962 - DNA, 802 bp, Artificial Sequence
  chemically treated genomic DNA (Homo sapiens) CpG-island No: 37962
accacgtactatcgtttttatcgtaaaactttaccgtctaataatcaatcgcattaatataacttttacacatacgattttctaataattacgacgtctctaacgatccgtataactccgaccgaaaaacgaacaaaacattaaatttaattaccaccgatacaacactaacgataatcttaaattactctcgaacgcattataaacaatattcgataaaaaatacctttcgcattaaattaaaaactatcacctttataccgattaatacttccctatacctaaaattcgatccgaaaactccgtatattcgcgccgaattaataacttttaatcccgaaaattatccgcctaacgaatacgatttaccttattaactaactacgccaaacaaacgacgaaataataaattacgcgcatacgccgaatacactaaaaaaaaccttacaacaacgcgtctacactatacgaacaaactataatatatctttaactataaaacgatcgcgataaaataaacgtccactaataaacgcaattaccgaaaatttactaacgtaacgataataacgaacgataacccgcgtaccgaaaaacgcgtaccatcatcaacgatattctaacgaaaatattaaataccgaacatccaaaataataaaaaaccgtactaaaacgataacttacgccgttatacaactaaaaaaaataatataatactaatcgcgaacaaaaaccataaaaattccaaattattaacaatcaacgtctaaactactccgatcgcgtcacgatacgcgtctac

SEQ ID NO: 37963 - DNA, 802 bp, Artificial Sequence
  chemically treated genomic DNA (Homo sapiens) CpG-island No: 37963
gttacgtattgtcgtttttgtcgtggagttttatcgtttggtgattagtcgtattggtgtggtttttgtatatgcgattttttggtgattacggcgtttttggcgattcgtatggtttcggtcgggaagcgagtaaggtattgagtttaattgttatcggtatagtattggcgatggttttaggttattttcgggcgtattgtgggtagtattcggtggggaatgtttttcgtattggattgggggttattatttttgtgtcgattagtatttttttatgtttgagattcggttcggaagtttcgtatgttcgcgtcgggttagtggtttttggtttcgggggttgttcgtttaacgggtacgatttattttgttaattgattgcgttaggtaaacgacggggtggtggattacgcgtatacgtcggatgtattggaaaaagttttatagtagcgcgtttgtattgtgcgggtaagttgtggtgtgtttttggttgtggggcgatcgcgataaggtaagcgtttattgatgggcgtaattgtcgaagatttgttgacgtggcggtggtgacggacgataattcgcgtatcgaagaacgcgtgttattattaacgatattttggcgggaatgttagatgtcggatatttaaagtgatggaaggtcgtgttgaagcggtgatttgcgtcgttatgtagttaaagagaatgatgtggtattggtcgcgggtaaaggttatgaagattttagattgttggtaattagcgtttggattatttcgatcgcgttacggtgcgcgtttgt

SEQ ID NO: 37964 - DNA, 802 bp, Artificial Sequence
  chemically treated genomic DNA (Homo sapiens) CpG-island No: 37964
acaaacgcgcaccgtaacgcgatcgaaataatccaaacgctaattaccaacaatctaaaatcttcataacctttacccgcgaccaataccacatcattctctttaactacataacgacgcaaatcaccgcttcaacacgaccttccatcactttaaatatccgacatctaacattcccgccaaaatatcgttaataataacacgcgttcttcgatacgcgaattatcgtccgtcaccaccgccacgtcaacaaatcttcgacaattacgcccatcaataaacgcttaccttatcgcgatcgccccacaaccaaaaacacaccacaacttacccgcacaatacaaacgcgctactataaaactttttccaatacatccgacgtatacgcgtaatccaccaccccgtcgtttacctaacgcaatcaattaacaaaataaatcgtacccgttaaacgaacaacccccgaaaccaaaaaccactaacccgacgcgaacatacgaaacttccgaaccgaatctcaaacataaaaaaatactaatcgacacaaaaataataacccccaatccaatacgaaaaacattccccaccgaatactacccacaatacgcccgaaaataacctaaaaccatcgccaatactataccgataacaattaaactcaataccttactcgcttcccgaccgaaaccatacgaatcgccaaaaacgccgtaatcaccaaaaaatcgcatatacaaaaaccacaccaatacgactaatcaccaaacgataaaactccacgacaaaaacgacaatacgtaac

SEQ ID NO: 37965 - DNA, 812 bp, Artificial Sequence
  chemically treated genomic DNA (Homo sapiens) CpG-island No: 37965
atgcgatttttgtgcggggcgcgaaacggttttgtttgtgttgagaattgttcggcggacgcgttgtaattggttttgacgtcgtatttttcggtatggcgaaatttcgtcgtttgcgtatcgtcgttaggaatattaatcgtggtatgttagtatcgcggcgtaagaaatgcggtaatgagtaaagtcgaataaatgtaggtaacgttcgcgcgtggcgagcggataaattggcgattgaagcgcgtaaaatcggttttgatgaaatttattgttatttcgcgtcgattaggtataacgggaagtttcgcgttgttttagtgcggcgagtatagcgtttgtgaatggatttgttcgttgtataattattatcgtagtggattgaattggtgaaagtcggaaatatcgacgtcgtcgtgagtttttttattagattaatattttgtcggaaattatcggacgcgtttttcgtaagatcgtttgtgtgaaggtgtttgtattattcgcgatgagtacgcgcggtaattatcggtaatattgaacgttatattttagattaggcgttgcgaaaggttggcgttttgatttaagttatgttattaaagtggataagcggtggcgattatcggcgtaggttcggtaggtttggcgtgtgcggatgtttgacgcgtaacggcgtaaaagtcgttgttttcgatcgttatttagaaatggcgggttgttgattttcggtatttcggtttttaagttggaaaaagaggaatgacgcgtcgtcgtgaaatttttatcggtatgggtattgaatttaaatt

SEQ ID NO: 37966 - DNA, 812 bp, Artificial Sequence
  chemically treated genomic DNA (Homo sapiens) CpG-island No: 37966
aatttaaattcaatacccataccgataaaaatttcacgacgacgcgtcattcctctttttccaacttaaaaaccgaaataccgaaaatcaacaacccgccatttctaaataacgatcgaaaacaacgacttttacgccgttacgcgtcaaacatccgcacacgccaaacctaccgaacctacgccgataatcgccaccgcttatccactttaataacataacttaaatcaaaacgccaacctttcgcaacgcctaatctaaaatataacgttcaatattaccgataattaccgcgcgtactcatcgcgaataatacaaacaccttcacacaaacgatcttacgaaaaacgcgtccgataatttccgacaaaatattaatctaataaaaaaactcacgacgacgtcgatatttccgactttcaccaattcaatccactacgataataattatacaacgaacaaatccattcacaaacgctatactcgccgcactaaaacaacgcgaaacttcccgttatacctaatcgacgcgaaataacaataaatttcatcaaaaccgattttacgcgcttcaatcgccaatttatccgctcgccacgcgcgaacgttacctacatttattcgactttactcattaccgcatttcttacgccgcgatactaacataccacgattaatattcctaacgacgatacgcaaacgacgaaatttcgccataccgaaaaatacgacgtcaaaaccaattacaacgcgtccgccgaacaattctcaacacaaacaaaaccgtttcgcgccccgcacaaaaatcgcat

SEQ ID NO: 37967 - DNA, 812 bp, Artificial Sequence
  chemically treated genomic DNA (Homo sapiens) CpG-island No: 37967
gatttgaatttaatatttatgtcggtgaagattttacggcgacgcgttatttttttttttttagtttgaaggtcggaatatcgaaggttagtagttcgttatttttggatgacggtcgaagataacggtttttacgtcgttacgcgttagatattcgtatacgttagatttgtcgggtttgcgtcgataatcgttatcgtttgtttattttggtgatatggtttaagttaggacgttaatttttcgtaacgtttgatttgaaatgtagcgtttaatgttgtcgatagttatcgcgcgtgtttatcgcgaatagtataggtatttttatataaacggttttgcggaaaacgcgttcggtaattttcggtagggtgttggtttggtgagaaagtttacggcggcgtcgatgttttcggtttttattagtttaatttattgcggtaatggttatgtagcgggtaggtttatttataaacgttgtgttcgtcgtattaaggtagcgcgaggtttttcgttgtgtttggtcggcgcgaaatggtagtaaattttattaaaatcggttttgcgcgttttaatcgttagtttattcgttcgttacgcgcgggcgttgtttgtatttgttcgattttatttattatcgtattttttgcgtcgcggtattggtatgttacggttgatgtttttgacggcggtgcgtaagcggcgggatttcgttatgtcggagagtgcgacgttaggattagttgtagcgcgttcgtcgggtaatttttaatataggtaggatcgtttcgcgtttcgtataaaggtcgtat

SEQ ID NO: 37968 - DNA, 812 bp, Artificial Sequence
  chemically treated genomic DNA (Homo sapiens) CpG-island No: 37968
atacgacctttatacgaaacgcgaaacgatcctacctatattaaaaattacccgacgaacgcgctacaactaatcctaacgtcgcactctccgacataacgaaatcccgccgcttacgcaccgccgtcaaaaacatcaaccgtaacataccaataccgcgacgcaaaaaatacgataataaataaaatcgaacaaatacaaacaacgcccgcgcgtaacgaacgaataaactaacgattaaaacgcgcaaaaccgattttaataaaatttactaccatttcgcgccgaccaaacacaacgaaaaacctcgcgctaccttaatacgacgaacacaacgtttataaataaacctacccgctacataaccattaccgcaataaattaaactaataaaaaccgaaaacatcgacgccgccgtaaactttctcaccaaaccaacaccctaccgaaaattaccgaacgcgttttccgcaaaaccgtttatataaaaatacctatactattcgcgataaacacgcgcgataactatcgacaacattaaacgctacatttcaaatcaaacgttacgaaaaattaacgtcctaacttaaaccatatcaccaaaataaacaaacgataacgattatcgacgcaaacccgacaaatctaacgtatacgaatatctaacgcgtaacgacgtaaaaaccgttatcttcgaccgtcatccaaaaataacgaactactaaccttcgatattccgaccttcaaactaaaaaaaaaaaaataacgcgtcgccgtaaaatcttcaccgacataaatattaaattcaaatc

SEQ ID NO: 37969 - DNA, 789 bp, Artificial Sequence
  chemically treated genomic DNA (Homo sapiens) CpG-island No: 37969
gtcgcgacgtatagttggacgatttgttgagtgatacgatgtcgtgttttttggcgtcgggatttattagttaatgcgcggcggttggaaaacgaagacgtcgatggcgtgtacgtagcgttgtcgtttttttcgttaatattaaatagttaatgggttttggtgaaattcgcgacgaattttcgttagtatggaaggtaaacgcgtggtggtttttggcggtggcgatatgcgatggattgcgtgcgtacgttcgtgcgttagggagcgaagtacgtttttgtgtttatcgtcgtgatgaagagaatatgtcgggttttcgtcgcgagtgaaaaacgcgcgggaagaaggcgtagagtttaaatttaacgtttagcgttgggtattgaagtgaacggtaacggtaaagttagcggcgtaaaaatgtgcgtatcgaaatgggcgaatcggacgttaagggcgtttcgcgcggagacgtgtaggttcgaatatatgttcggtagatgcgggatatggcgtaggttcggttaataatatggatggtggtaaattaggtcgattggatttaaggacgttacgttgtggtagtatttggtagttagtttgacgcgtattatgttgcgttatttgtagcggtgttgttcggtatttcggtcgggatcgcgatggatttagttttacggtacgcggtattttggattcgataatcgagttttatgttcggtgtcgtcgttggtttatttgtcgttgatggtgatttggtttggattggtgaaatttcgaagattt

SEQ ID NO: 37970 - DNA, 789 bp, Artificial Sequence
  chemically treated genomic DNA (Homo sapiens) CpG-island No: 37970
aaatcttcgaaatttcaccaatccaaaccaaatcaccatcaacgacaaataaaccaacgacgacaccgaacataaaactcgattatcgaatccaaaataccgcgtaccgtaaaactaaatccatcgcgatcccgaccgaaataccgaacaacaccgctacaaataacgcaacataatacgcgtcaaactaactaccaaatactaccacaacgtaacgtccttaaatccaatcgacctaatttaccaccatccatattattaaccgaacctacgccatatcccgcatctaccgaacatatattcgaacctacacgtctccgcgcgaaacgcccttaacgtccgattcgcccatttcgatacgcacatttttacgccgctaactttaccgttaccgttcacttcaatacccaacgctaaacgttaaatttaaactctacgccttcttcccgcgcgtttttcactcgcgacgaaaacccgacatattctcttcatcacgacgataaacacaaaaacgtacttcgctccctaacgcacgaacgtacgcacgcaatccatcgcatatcgccaccgccaaaaaccaccacgcgtttaccttccatactaacgaaaattcgtcgcgaatttcaccaaaacccattaactatttaatattaacgaaaaaaacgacaacgctacgtacacgccatcgacgtcttcgttttccaaccgccgcgcattaactaataaatcccgacgccaaaaaacacgacatcgtatcactcaacaaatcgtccaactatacgtcgcgac

SEQ ID NO: 37971 - DNA, 789 bp, Artificial Sequence
  chemically treated genomic DNA (Homo sapiens) CpG-island No: 37971
agattttcgaggttttattaatttaaattagattattattagcggtaaataagttagcggcggtatcggatataaagttcgattatcggatttagaatgtcgcgtatcgtagggttaagtttatcgcgatttcgatcggaatatcgaataatatcgttgtaaatagcgtagtataatgcgcgttagattggttgttagatgttgttatagcgtggcgtttttggatttagtcgatttggtttgttattatttatgttgttgatcgaatttacgttatgtttcgtatttgtcggatatatgttcggatttgtacgttttcgcgcgggacgtttttggcgttcggttcgtttatttcggtacgtatatttttacgtcgttgattttgtcgttatcgtttattttaatatttagcgttggacgttgaatttgaattttacgtttttttttcgcgcgttttttattcgcggcgggaattcggtatgttttttttattacgacgataggtataggaacgtgtttcgttttttggcgtacggacgtacgtacgtagtttatcgtatgtcgttatcgttaaggattattacgcgtttgttttttatgttgacgaaggttcgtcgcgggttttattaaagtttattaattgtttggtgttggcgagaggaacggtagcgttgcgtatacgttatcggcgttttcgttttttagtcgtcgcgtattgattgataagtttcgacgttaaggaatacggtatcgtattatttagtagatcgtttagttgtacgtcgcggt

SEQ ID NO: 37972 - DNA, 789 bp, Artificial Sequence
  chemically treated genomic DNA (Homo sapiens) CpG-island No: 37972
accgcgacgtacaactaaacgatctactaaataatacgataccgtattccttaacgtcgaaacttatcaatcaatacgcgacgactaaaaaacgaaaacgccgataacgtatacgcaacgctaccgttcctctcgccaacaccaaacaattaataaactttaataaaacccgcgacgaaccttcgtcaacataaaaaacaaacgcgtaataatccttaacgataacgacatacgataaactacgtacgtacgtccgtacgccaaaaaacgaaacacgttcctatacctatcgtcgtaataaaaaaaacataccgaattcccgccgcgaataaaaaacgcgcgaaaaaaaaacgtaaaattcaaattcaacgtccaacgctaaatattaaaataaacgataacgacaaaatcaacgacgtaaaaatatacgtaccgaaataaacgaaccgaacgccaaaaacgtcccgcgcgaaaacgtacaaatccgaacatatatccgacaaatacgaaacataacgtaaattcgatcaacaacataaataataacaaaccaaatcgactaaatccaaaaacgccacgctataacaacatctaacaaccaatctaacgcgcattatactacgctatttacaacgatattattcgatattccgatcgaaatcgcgataaacttaaccctacgatacgcgacattctaaatccgataatcgaactttatatccgataccgccgctaacttatttaccgctaataataatctaatttaaattaataaaacctcgaaaatct

SEQ ID NO: 37973 - DNA, 889 bp, Artificial Sequence
  chemically treated genomic DNA (Homo sapiens) CpG-island No: 37973
gagattttattacgtttggatgttatcgatttaacgcgttttgttattttttttattagtttaagggtacgcggatgtagtttttcgtgtttttgtgtacgaatagtgatatcggtatattttaggtgcgtgacgggagatatattagttaggacggttagtaattatcgattcgatatcgtttggttttagttcgggatttattgtacgtttttgattttttttagtattgcgtacgtagatttttttgatttatgttgacgaattattgcggcgtgcgcggaagatgatcggcgttttgtgacgttagtagtacggatagttgtttgtatttttttaacgtgtagtagcgcgttttttttttgtagtagcgtacgacgatgtcgttcgttttgaagacgtttacgttatttagcgtcggatagtgttcggtagataagtgtcgttcgggttaatcgggttagcggtttttagtcgtatttttgatcgattatatagtcgttcgggtcgtggttaggcgcgtgtgaacggtatcggtatcggtatttagggtaacgtgatcgtcgaggatgtcggaacgtcgaagtttataaacggatgggtaaagcgtagtagtttaatttcgtattttttatcgtgtcgagaatggtgtaatcggttacgtcgatagttgtattacgtttttaattagatttttcgttagaattacggtttgatttcgatttgtattagcgtatagtcgaaatttggtgtaatagagattgcgcgttggtaggtagagtttacggcgtggtggtttagattattagcgagattggtcgttaacgttgtttacggtaaattttgtttttagtgtattttgattattgtttggaaagtaacgtcgatg

SEQ ID NO: 37974 - DNA, 889 bp, Artificial Sequence
  chemically treated genomic DNA (Homo sapiens) CpG-island No: 37974
catcgacgttactttccaaacaataatcaaaatacactaaaaacaaaatttaccgtaaacaacgttaacgaccaatctcgctaataatctaaaccaccacgccgtaaactctacctaccaacgcgcaatctctattacaccaaatttcgactatacgctaatacaaatcgaaatcaaaccgtaattctaacgaaaaatctaattaaaaacgtaatacaactatcgacgtaaccgattacaccattctcgacacgataaaaaatacgaaattaaactactacgctttacccatccgtttataaacttcgacgttccgacatcctcgacgatcacgttaccctaaataccgataccgataccgttcacacgcgcctaaccacgacccgaacgactatataatcgatcaaaaatacgactaaaaaccgctaacccgattaacccgaacgacacttatctaccgaacactatccgacgctaaataacgtaaacgtcttcaaaacgaacgacatcgtcgtacgctactacaaaaaaaaaacgcgctactacacgttaaaaaaatacaaacaactatccgtactactaacgtcacaaaacgccgatcatcttccgcgcacgccgcaataattcgtcaacataaatcaaaaaaatctacgtacgcaatactaaaaaaaatcaaaaacgtacaataaatcccgaactaaaaccaaacgatatcgaatcgataattactaaccgtcctaactaatatatctcccgtcacgcacctaaaatataccgatatcactattcgtacacaaaaacacgaaaaactacatccgcgtacccttaaactaataaaaaaaataacaaaacgcgttaaatcgataacatccaaacgtaataaaatctc

SEQ ID NO: 37975 - DNA, 889 bp, Artificial Sequence
  chemically treated genomic DNA (Homo sapiens) CpG-island No: 37975
tatcgacgttgttttttaggtagtgattaggatgtattgaaagtaaaatttgtcgtaagtaacgttaacggttaatttcgttggtaatttggattattacgtcgtggattttgtttgttaacgcgtaatttttattgtattagatttcgattatgcgttggtgtagatcgaggttaggtcgtgattttggcgaaagatttggttgaaagcgtaatgtagttatcggcgtgatcgattatattattttcggtacggtaaaaggtgcggagttgagttgttgcgttttatttattcgtttatgggtttcgacgtttcggtattttcggcgattacgttattttggatgtcggtatcggtgtcgtttatacgcgtttggttacggttcggacgattatgtgatcggttagaaatacggttggaaatcgttaattcggttggttcggacggtatttatttgtcgggtattattcgacgttggatggcgtgaacgtttttaaagcgaacgatatcgtcgtgcgttgttgtaggaaaaaggcgcgttgttgtacgttgagaaaatgtagatagttattcgtgttgttggcgttataaaacgtcgattatttttcgcgtacgtcgtagtggttcgttagtatggattagaaaggtttgcgtgcgtagtattgaaagagattaaaggcgtgtagtggatttcggattggggttaggcggtatcgagtcgatggttgttaatcgttttgattggtgtatttttcgttacgtatttggggtgtatcgatgttattgttcgtgtataaagatacggaaggttgtattcgcgtatttttgaattgatggaagaagtggtaaaacgcgttaagtcgatggtatttaggcgtggtgggatttt

SEQ ID NO: 37976 - DNA, 889 bp, Artificial Sequence
  chemically treated genomic DNA (Homo sapiens) CpG-island No: 37976
aaaatcccaccacgcctaaataccatcgacttaacgcgttttaccacttcttccatcaattcaaaaatacgcgaatacaaccttccgtatctttatacacgaacaataacatcgatacaccccaaatacgtaacgaaaaatacaccaatcaaaacgattaacaaccatcgactcgataccgcctaaccccaatccgaaatccactacacgcctttaatctctttcaatactacgcacgcaaacctttctaatccatactaacgaaccactacgacgtacgcgaaaaataatcgacgttttataacgccaacaacacgaataactatctacattttctcaacgtacaacaacgcgcctttttcctacaacaacgcacgacgatatcgttcgctttaaaaacgttcacgccatccaacgtcgaataatacccgacaaataaataccgtccgaaccaaccgaattaacgatttccaaccgtatttctaaccgatcacataatcgtccgaaccgtaaccaaacgcgtataaacgacaccgataccgacatccaaaataacgtaatcgccgaaaataccgaaacgtcgaaacccataaacgaataaataaaacgcaacaactcaactccgcaccttttaccgtaccgaaaataatataatcgatcacgccgataactacattacgctttcaaccaaatctttcgccaaaatcacgacctaacctcgatctacaccaacgcataatcgaaatctaatacaataaaaattacgcgttaacaaacaaaatccacgacgtaataatccaaattaccaacgaaattaaccgttaacgttacttacgacaaattttactttcaatacatcctaatcactacctaaaaaacaacgtcgata

SEQ ID NO: 37977 - DNA, 699 bp, Artificial Sequence
  chemically treated genomic DNA (Homo sapiens) CpG-island No: 37977
gttaattacgttaaaatatattagtatttagaatacgttataaaggtaggcgatagaatatcgttagcgttttgtggcgtaatagttgcggatcgatggtttgtaaggtttgtattgcgttatttaagtcgtagcggtatgtattacgttaataagtagtataacggtgttaattagtatttaagtttttgtatggtgtcgtttagtacgttggcgcgaaagttattaaagcggtatataacgtaatgttgatattaaaaattagtagttcggttttataggaatattcgtcgcggtttttagtaggcgcgtatcgtcgataaattgtcggttatcgtattaacgaacgtaattagtaaatttaaattcgttagttaattagaagacgattttggtagcgggtaaatagtatatcgtttagcgttatgtattgtagcggcgcgtaagaatcgtaaattttttgtcgagaatatcggtgaaagttagattgtaggaagttgaattatcgttagtaatatttagttagttcgtattattagtagtttttggtttcgtcgataacgaacgggattgtataggtcgcggtgagcgtttcgttagtcgaaaacggttaataagcggggcgaggaaatattttaagggacggtgtcgtgtttcgtaattttcgtataacgagaaacgaaattatattaatatgtt

SEQ ID NO: 37978 - DNA, 699 bp, Artificial Sequence
  chemically treated genomic DNA (Homo sapiens) CpG-island No: 37978
aacatattaatataatttcgtttctcgttatacgaaaattacgaaacacgacaccgtcccttaaaatatttcctcgccccgcttattaaccgttttcgactaacgaaacgctcaccgcgacctatacaatcccgttcgttatcgacgaaaccaaaaactactaataatacgaactaactaaatattactaacgataattcaacttcctacaatctaactttcaccgatattctcgacaaaaaatttacgattcttacgcgccgctacaatacataacgctaaacgatatactatttacccgctaccaaaatcgtcttctaattaactaacgaatttaaatttactaattacgttcgttaatacgataaccgacaatttatcgacgatacgcgcctactaaaaaccgcgacgaatattcctataaaaccgaactactaatttttaatatcaacattacgttatataccgctttaataactttcgcgccaacgtactaaacgacaccatacaaaaacttaaatactaattaacaccgttatactacttattaacgtaatacataccgctacgacttaaataacgcaatacaaaccttacaaaccatcgatccgcaactattacgccacaaaacgctaacgatattctatcgcctacctttataacgtattctaaatactaatatattttaacgtaattaac

SEQ ID NO: 37979 - DNA, 699 bp, Artificial Sequence
  chemically treated genomic DNA (Homo sapiens) CpG-island No: 37979
ggtatattggtgtggtttcgtttttcgttatgcgagggttacggagtacggtatcgttttttagagtattttttcgtttcgtttattggtcgttttcggttggcgagacgtttatcgcgatttatatagtttcgttcgttatcggcggggttaggagttgttaataatacgggttggttgggtattgttggcgatgatttagttttttgtagtttggtttttatcggtattttcggtaagaagtttgcgatttttgcgcgtcgttataatgtatgacgttgaacgatatgttgtttgttcgttattagagtcgttttttggttggttggcgagtttgagtttgttggttgcgttcgttggtgcgatgatcggtagtttatcggcggtgcgcgtttgttggaaatcgcggcgggtatttttatgaaatcgggttgttgatttttggtattagtattgcgttatatatcgttttggtggttttcgcgttagcgtgttgaacgatattatgtaagggtttggatgttgattggtatcgttgtgttgtttattggcgtagtatatgtcgttgcggtttaagtaacgtagtatagattttgtaaattatcgattcgtaattgttacgttataaggcgttgacgatattttgtcgtttgtttttatgacgtgttttgggtattggtgtgttttggcgtgattggt

SEQ ID NO: 37980 - DNA, 699 bp, Artificial Sequence
  chemically treated genomic DNA (Homo sapiens) CpG-island No: 37980
accaatcacgccaaaacacaccaatacccaaaacacgtcataaaaacaaacgacaaaatatcgtcaacgccttataacgtaacaattacgaatcgataatttacaaaatctatactacgttacttaaaccgcaacgacatatactacgccaataaacaacacaacgataccaatcaacatccaaacccttacataatatcgttcaacacgctaacgcgaaaaccaccaaaacgatatataacgcaatactaataccaaaaatcaacaacccgatttcataaaaatacccgccgcgatttccaacaaacgcgcaccgccgataaactaccgatcatcgcaccaacgaacgcaaccaacaaactcaaactcgccaaccaaccaaaaaacgactctaataacgaacaaacaacatatcgttcaacgtcatacattataacgacgcgcaaaaatcgcaaacttcttaccgaaaataccgataaaaaccaaactacaaaaaactaaatcatcgccaacaatacccaaccaacccgtattattaacaactcctaaccccgccgataacgaacgaaactatataaatcgcgataaacgtctcgccaaccgaaaacgaccaataaacgaaacgaaaaaatactctaaaaaacgataccgtactccgtaaccctcgcataacgaaaaacgaaaccacaccaatatacc

SEQ ID NO: 37981 - DNA, 575 bp, Artificial Sequence
  chemically treated genomic DNA (Homo sapiens) CpG-island No: 37981
tggcgagggttcgagcgcgttagatcgcgtattagattcggagcgtggggtttaaaggttggcggttatttcggagttcggcgttttaatcgggaagtgatcgtagtagtttattttttgacgttagcggaagtgcgagttcgggtcgagtttgtttcgtcgtcggcgttcgggaaggggcgggtacggggcggggttgggggcgggcgaggcgggtcggcggcggggcggggtttggtcgtagttgtttttatttaggtttcgcgtttaggcgtttcgtcgaggttgattttcgtttaagtgtgagttgcgttgagtttagcgttcgaggcgcgaggtagttaggagggttcgtgcggcgggggagttagcgagcgtcgttttttcggttaattatgcgtataggtacgcgaatgttagtttagtgttgtgcgggttaggtgagcgaggtcgggcgtacgcgggggttgttagatcggagaatcgggttaggagtttaggcgtggagatttgtttgggtagcgttatttaggttatcgatcgtgttatcgtaattatcgggttaaagggggggg

SEQ ID NO: 37982 - DNA, 575 bp, Artificial Sequence
  chemically treated genomic DNA (Homo sapiens) CpG-island No: 37982
cccccccctttaacccgataattacgataacacgatcgataacctaaataacgctacccaaacaaatctccacgcctaaactcctaacccgattctccgatctaacaacccccgcgtacgcccgacctcgctcacctaacccgcacaacactaaactaacattcgcgtacctatacgcataattaaccgaaaaaacgacgctcgctaactcccccgccgcacgaaccctcctaactacctcgcgcctcgaacgctaaactcaacgcaactcacacttaaacgaaaatcaacctcgacgaaacgcctaaacgcgaaacctaaataaaaacaactacgaccaaaccccgccccgccgccgacccgcctcgcccgcccccaaccccgccccgtacccgccccttcccgaacgccgacgacgaaacaaactcgacccgaactcgcacttccgctaacgtcaaaaaataaactactacgatcacttcccgattaaaacgccgaactccgaaataaccgccaacctttaaaccccacgctccgaatctaatacgcgatctaacgcgctcgaaccctcgcca

SEQ ID NO: 37983 - DNA, 575 bp, Artificial Sequence
  chemically treated genomic DNA (Homo sapiens) CpG-island No: 37983
tttttttttttaattcggtgattgcggtggtacggtcggtagtttgggtagcgttatttaggtaggtttttacgtttggatttttggttcggtttttcgatttgataattttcgcgtgcgttcggtttcgtttatttggttcgtatagtattgagttgatattcgcgtgtttgtgcgtataattggtcggaagggcggcgttcgttggttttttcgtcgtacgggtttttttggttgtttcgcgtttcgagcgttgggtttagcgtagtttatatttgaacgaagattagtttcggcgaagcgtttaggcgcgaggtttgggtaaaaataattgcggttaagtttcgtttcgtcgtcggttcgtttcgttcgtttttagtttcgtttcgtgttcgttttttttcgggcgtcggcggcggagtaggttcgattcgggttcgtattttcgttggcgttagggggtgggttgttgcgattatttttcggttggggcgtcgagtttcggagtggtcgttagtttttgggttttacgtttcgggtttggtgcgcggtttggcgcgttcgggttttcgtta

SEQ ID NO: 37984 - DNA, 575 bp, Artificial Sequence
  chemically treated genomic DNA (Homo sapiens) CpG-island No: 37984
taacgaaaacccgaacgcgccaaaccgcgcaccaaacccgaaacgtaaaacccaaaaactaacgaccactccgaaactcgacgccccaaccgaaaaataatcgcaacaacccaccccctaacgccaacgaaaatacgaacccgaatcgaacctactccgccgccgacgcccgaaaaaaaacgaacacgaaacgaaactaaaaacgaacgaaacgaaccgacgacgaaacgaaacttaaccgcaattatttttacccaaacctcgcgcctaaacgcttcgccgaaactaatcttcgttcaaatataaactacgctaaacccaacgctcgaaacgcgaaacaaccaaaaaaacccgtacgacgaaaaaaccaacgaacgccgcccttccgaccaattatacgcacaaacacgcgaatatcaactcaatactatacgaaccaaataaacgaaaccgaacgcacgcgaaaattatcaaatcgaaaaaccgaaccaaaaatccaaacgtaaaaacctacctaaataacgctacccaaactaccgaccgtaccaccgcaatcaccgaattaaaaaaaaaaa

SEQ ID NO: 37985 - DNA, 617 bp, Artificial Sequence
  chemically treated genomic DNA (Homo sapiens) CpG-island No: 37985
gacgcgggaaagacgtttttttggatcggtgttgggacgcgggaaagacgtttttttggatcggtgaatttttagttttatagatttcggtcgcgcgtatattagtttagttttattttttgtcgttcgcgttttttttaagacggagttatgatattattttagatattgcgtagttattttggtaacgcgcgattattttttttcggacgattttaattggttggttagtttcggagtttcgttttttcgcgtagtagtttcgggtatttgttgttaatcgggttaggtgggagcgatgattggtcgtcggtcggttttttagaaagttcgcggttcgcgtaggttgtaggttcggggagggagggtagcgcgtcgcgtcggagtcgcgtcgtttcgtttttcgttcgtcgtttatcggtgtttttgtagtacgttgttgggaggtcggcgcgcgtatttggagttttacgatattatcgttagtatttgtggtatgatacgtgaggttcgtagtagggggaggcggcgttgttcgggagtacggacggcgagggagagattacgtagtttcggcgttttcgtttatggtgacgtcgttcgcgggcgatggttgg

SEQ ID NO: 37986 - DNA, 617 bp, Artificial Sequence
  chemically treated genomic DNA (Homo sapiens) CpG-island No: 37986
ccaaccatcgcccgcgaacgacgtcaccataaacgaaaacgccgaaactacgtaatctctccctcgccgtccgtactcccgaacaacgccgcctccccctactacgaacctcacgtatcataccacaaatactaacgataatatcgtaaaactccaaatacgcgcgccgacctcccaacaacgtactacaaaaacaccgataaacgacgaacgaaaaacgaaacgacgcgactccgacgcgacgcgctaccctccctccccgaacctacaacctacgcgaaccgcgaactttctaaaaaaccgaccgacgaccaatcatcgctcccacctaacccgattaacaacaaatacccgaaactactacgcgaaaaaacgaaactccgaaactaaccaaccaattaaaatcgtccgaaaaaaaataatcgcgcgttaccaaaataactacgcaatatctaaaataatatcataactccgtcttaaaaaaaacgcgaacgacaaaaaataaaactaaactaatatacgcgcgaccgaaatctataaaactaaaaattcaccgatccaaaaaaacgtctttcccgcgtcccaacaccgatccaaaaaaacgtctttcccgcgtc

SEQ ID NO: 37987 - DNA, 617 bp, Artificial Sequence
  chemically treated genomic DNA (Homo sapiens) CpG-island No: 37987
ttaattatcgttcgcgggcgacgttattatgagcgagaacgtcgaggttgcgtggtttttttttcgtcgttcgtgttttcgagtagcgtcgtttttttttgttgcgggttttacgtgttatattataggtgttggcgatgatgtcgtaggattttagatgcgcgcgtcggttttttagtagcgtgttgtagaggtatcgatgggcggcgggcggaggacgggacggcgcggtttcgacgcggcgcgttgtttttttttttcgagtttgtagtttacgcgagtcgcgggttttttggagggtcggtcggcggttaattatcgtttttatttggttcgattgatagtaggtgttcggggttgttgcgcgaaggggcggggtttcggagttggttagttaattgaggtcgttcggaaaaaagtggtcgcgcgttgttaaggtagttgcgtagtgtttgggatgatgttatggtttcgttttaaaggggacgcgggcggtagaaagtggagttgggttggtgtgcgcgcggtcggagtttgtggagttggaaatttatcggtttaggaagacgtttttttcgcgttttagtatcggtttagaaagacgtttttttcgcgtt

SEQ ID NO: 37988 - DNA, 617 bp, Artificial Sequence
  chemically treated genomic DNA (Homo sapiens) CpG-island No: 37988
aacgcgaaaaaaacgtctttctaaaccgatactaaaacgcgaaaaaaacgtcttcctaaaccgataaatttccaactccacaaactccgaccgcgcgcacaccaacccaactccactttctaccgcccgcgtcccctttaaaacgaaaccataacatcatcccaaacactacgcaactaccttaacaacgcgcgaccacttttttccgaacgacctcaattaactaaccaactccgaaaccccgccccttcgcgcaacaaccccgaacacctactatcaatcgaaccaaataaaaacgataattaaccgccgaccgaccctccaaaaaacccgcgactcgcgtaaactacaaactcgaaaaaaaaaaacaacgcgccgcgtcgaaaccgcgccgtcccgtcctccgcccgccgcccatcgatacctctacaacacgctactaaaaaaccgacgcgcgcatctaaaatcctacgacatcatcgccaacacctataatataacacgtaaaacccgcaacaaaaaaaaacgacgctactcgaaaacacgaacgacgaaaaaaaaaccacgcaacctcgacgttctcgctcataataacgtcgcccgcgaacgataattaa

SEQ ID NO: 37989 - DNA, 780 bp, Artificial Sequence
  chemically treated genomic DNA (Homo sapiens) CpG-island No: 37989
gcgtaggcgttgatcgttatttacggtcgtgatcgtgattttggtcggtcgttgtggttggggtcggttaagtcgaatatcggttatacgtaagcggcggcgggtgtggttggtgtgattaagatggtgatggcgatgcggtacgggtagttgttacgtacgttgtacgtggaatcgtcgtcgtcggaggtggattggtcggcggggacggtttaattttttacggagaatacgttttggtttaggagtggtcgtgttcgtcgggtgggggtgtcgtcgttcgggattagtggtattaacgcgtacgttattttcgaatagttttcgggagtgtcgagttagtttgcggggtcgggttcgggttttgtcgtggatgtttcggtggtgtcgtggatggtgtcgggtaaaatattcgaagcgttattcgcgtaggtaacggcgttgatgatttatttggacgagcgatttgatgttttttcgttggatgttgggtattcgttggcgttgatacggtcggcgttggatgagcgagcggtggtgttggggtcggatcgtgaaacgttgttgtgcggtgtgaaagcgttgtttgtcggttatgaggtttttgggttggtgatcggatttgtgggggttggggtgcgtatcgggtttgtgtttttcggttagggtggttagtggttggggatgggtcgggggttttatcgggttttttcggtgttcggttgttgttttgacgaatttgttcggattggatgatatttgggttaggaatcggggttt

SEQ ID NO: 37990 - DNA, 780 bp, Artificial Sequence
  chemically treated genomic DNA (Homo sapiens) CpG-island No: 37990
aaaccccgattcctaacccaaatatcatccaatccgaacaaattcgtcaaaacaacaaccgaacaccgaaaaaacccgataaaacccccgacccatccccaaccactaaccaccctaaccgaaaaacacaaacccgatacgcaccccaacccccacaaatccgatcaccaacccaaaaacctcataaccgacaaacaacgctttcacaccgcacaacaacgtttcacgatccgaccccaacaccaccgctcgctcatccaacgccgaccgtatcaacgccaacgaatacccaacatccaacgaaaaaacatcaaatcgctcgtccaaataaatcatcaacgccgttacctacgcgaataacgcttcgaatattttacccgacaccatccacgacaccaccgaaacatccacgacaaaacccgaacccgaccccgcaaactaactcgacactcccgaaaactattcgaaaataacgtacgcgttaataccactaatcccgaacgacgacacccccacccgacgaacacgaccactcctaaaccaaaacgtattctccgtaaaaaattaaaccgtccccgccgaccaatccacctccgacgacgacgattccacgtacaacgtacgtaacaactacccgtaccgcatcgccatcaccatcttaatcacaccaaccacacccgccgccgcttacgtataaccgatattcgacttaaccgaccccaaccacaacgaccgaccaaaatcacgatcacgaccgtaaataacgatcaacgcctacgc

SEQ ID NO: 37991 - DNA, 780 bp, Artificial Sequence
  chemically treated genomic DNA (Homo sapiens) CpG-island No: 37991
gaatttcgatttttggtttagatgttatttagttcgaataagttcgttaaagtagtagtcgaatatcggaaaagttcggtaaagttttcggtttatttttagttattgattattttgatcggaaaatataaattcgatgcgtattttagtttttatagattcggttattaatttagaagttttatgatcggtagatagcgtttttatatcgtataataacgttttacggttcgattttagtattatcgttcgtttatttagcgtcgatcgtgttaacgttagcgagtatttaatatttagcgaggagatattaggtcgttcgtttagataggttattaacgtcgttgtttgcgcggatagcgtttcgggtgttttgttcgatattatttacggtattatcggaatatttacgatagaattcgaattcggtttcgtagattgattcggtattttcgggggttgttcgaggatgacgtgcgcgttagtattattgatttcgaacgacgatatttttattcgacgaatacgattatttttgggttagggcgtgtttttcgtaaggagttgaatcgttttcgtcgattaatttattttcggcgacggcgattttacgtgtaacgtgcgtggtagttgttcgtgtcgtatcgttattattattttgattatattagttatattcgtcgtcgtttgcgtatgatcgatgttcgatttgatcgattttaattataacggtcggttaggattacgattacggtcgtaggtggcgattagcgtttgcgt

SEQ ID NO: 37992 - DNA, 780 bp, Artificial Sequence
  chemically treated genomic DNA (Homo sapiens) CpG-island No: 37992
acgcaaacgctaatcgccacctacgaccgtaatcgtaatcctaaccgaccgttataattaaaatcgatcaaatcgaacatcgatcatacgcaaacgacgacgaatataactaatataatcaaaataataataacgatacgacacgaacaactaccacgcacgttacacgtaaaatcgccgtcgccgaaaataaattaatcgacgaaaacgattcaactccttacgaaaaacacgccctaacccaaaaataatcgtattcgtcgaataaaaatatcgtcgttcgaaatcaataatactaacgcgcacgtcatcctcgaacaacccccgaaaataccgaatcaatctacgaaaccgaattcgaattctatcgtaaatattccgataataccgtaaataatatcgaacaaaacacccgaaacgctatccgcgcaaacaacgacgttaataacctatctaaacgaacgacctaatatctcctcgctaaatattaaatactcgctaacgttaacacgatcgacgctaaataaacgaacgataatactaaaatcgaaccgtaaaacgttattatacgatataaaaacgctatctaccgatcataaaacttctaaattaataaccgaatctataaaaactaaaatacgcatcgaatttatattttccgatcaaaataatcaataactaaaaataaaccgaaaactttaccgaacttttccgatattcgactactactttaacgaacttattcgaactaaataacatctaaaccaaaaatcgaaattc

SEQ ID NO: 37993 - DNA, 687 bp, Artificial Sequence
  chemically treated genomic DNA (Homo sapiens) CpG-island No: 37993
gagttttgcggggtaggggtttcgtttgcgttgtttattcggagtttcgtttgatagaatcggtttttcggtgaggttcgaggcggcgtttgcgagttcggtcgcgatattacgcgcgtttagaacgtggagtttagatgggggtcggtttggttagtttaggtattttcgggggcgtttgcggggtttgaacgagataaggaaggagcggacgttcgcgtaggcggaagttacgcggcggagcgcggtttcgcggggcgatcgaggttgacggcgattttcgtatttcggtggatttataggtcgttcggaaggtttagtgtcggttttagtttcggtcgttcgttttcgcgttttcggttcggcgcgcgagttttcgagtcgtgtcgtttgcggtttttttattttaagtcgtagattcgtcgcgttttgtttagtacgaatttttcgtcgttttcgtcgattcgtaattcggtagcggcgtcggttttttcgtattttgtagtatggagtttttttattggttcggaggcgacgaggaggggcgggacgagtggtaacgcgaggcgcggggcggaggttacgttagtttcgcgttttttcgggaatgtcgggagttgtggtttagcgtttttaaggtattttgggagttggagttttttagcggtaaagggagattttcgtttt

SEQ ID NO: 37994 - DNA, 687 bp, Artificial Sequence
  chemically treated genomic DNA (Homo sapiens) CpG-island No: 37994
aaaacgaaaatctccctttaccgctaaaaaactccaactcccaaaataccttaaaaacgctaaaccacaactcccgacattcccgaaaaaacgcgaaactaacgtaacctccgccccgcgcctcgcgttaccactcgtcccgcccctcctcgtcgcctccgaaccaataaaaaaactccatactacaaaatacgaaaaaaccgacgccgctaccgaattacgaatcgacgaaaacgacgaaaaattcgtactaaacaaaacgcgacgaatctacgacttaaaataaaaaaaccgcaaacgacacgactcgaaaactcgcgcgccgaaccgaaaacgcgaaaacgaacgaccgaaactaaaaccgacactaaaccttccgaacgacctataaatccaccgaaatacgaaaatcgccgtcaacctcgatcgccccgcgaaaccgcgctccgccgcgtaacttccgcctacgcgaacgtccgctccttccttatctcgttcaaaccccgcaaacgcccccgaaaatacctaaactaaccaaaccgacccccatctaaactccacgttctaaacgcgcgtaatatcgcgaccgaactcgcaaacgccgcctcgaacctcaccgaaaaaccgattctatcaaacgaaactccgaataaacaacgcaaacgaaacccctaccccgcaaaactc

SEQ ID NO: 37995 - DNA, 687 bp, Artificial Sequence
  chemically treated genomic DNA (Homo sapiens) CpG-island No: 37995
aggacggggatttttttttgtcgttaagagattttaatttttaggatgttttgggagcgttggattatagttttcggtattttcggggaggcgcggggttagcgtagttttcgtttcgcgtttcgcgttattattcgtttcgttttttttcgtcgttttcgagttaatgggaaggttttatattgtagggtgcgaaggggtcggcgtcgttgtcgagttacgagtcggcgaaagcggcgggaagttcgtattgggtagaacgcgacgggtttgcggtttagggtagggaggtcgtaggcgatacggttcgaggattcgcgcgtcgagtcgggggcgcggaggcgggcggtcggggttggggtcggtattgggtttttcgggcggtttgtgggtttatcggggtgcgggagtcgtcgttagtttcggtcgtttcgcgggatcgcgtttcgtcgcgtggttttcgtttgcgcgggcgttcgttttttttttgtttcgtttaggtttcgtaggcgttttcggggatgtttggattggttaggtcggtttttatttgagttttacgttttggacgcgcgtggtgtcgcggtcgagttcgtaaacgtcgtttcgggttttatcgggaagtcggttttgttaggcggggtttcgggtgaatagcgtaggcgaggtttttgtttcgtagagttt

SEQ ID NO: 37996 - DNA, 687 bp, Artificial Sequence
  chemically treated genomic DNA (Homo sapiens) CpG-island No: 37996
aaactctacgaaacaaaaacctcgcctacgctattcacccgaaaccccgcctaacaaaaccgacttcccgataaaacccgaaacgacgtttacgaactcgaccgcgacaccacgcgcgtccaaaacgtaaaactcaaataaaaaccgacctaaccaatccaaacatccccgaaaacgcctacgaaacctaaacgaaacaaaaaaaaaacgaacgcccgcgcaaacgaaaaccacgcgacgaaacgcgatcccgcgaaacgaccgaaactaacgacgactcccgcaccccgataaacccacaaaccgcccgaaaaacccaataccgaccccaaccccgaccgcccgcctccgcgcccccgactcgacgcgcgaatcctcgaaccgtatcgcctacgacctccctaccctaaaccgcaaacccgtcgcgttctacccaatacgaacttcccgccgctttcgccgactcgtaactcgacaacgacgccgaccccttcgcaccctacaatataaaaccttcccattaactcgaaaacgacgaaaaaaaacgaaacgaataataacgcgaaacgcgaaacgaaaactacgctaaccccgcgcctccccgaaaataccgaaaactataatccaacgctcccaaaacatcctaaaaattaaaatctcttaacgacaaaaaaaaatccccgtcct

SEQ ID NO: 37997 - DNA, 570 bp, Artificial Sequence
  chemically treated genomic DNA (Homo sapiens) CpG-island No: 37997
gtcgtcggcgtatattgttgaggtatgatgcgacgttggggttggtatataattacgtggcgttgtttgtcgttttgtttcgtttgttgcgatgtcgtcgttgttgttgtatggtcgttataagcgttataagcggcggatatttcggtgttggcgaaattattggggtaggttatagttcggtgtttattatttattgtcggatgcggcgtgaacgttttattcgtttacgcggttttggtatattttgtaggtttgataagacgcggtaagcgtgtattaggtatcggagtatttatagtcggatgcggcgtgaacgttttatcggattacggttttggtattttttgtaggtttgataagacgcgggtagttcgtattaggtttgatgcgttaattggttacggtttttatttttggtggataagtaagtaggagtcggtaagtcgatggaatatcggggtcggtttagatcgggtttaattcgcgcgtataaatggttattcgggtaacggtgttaaggtaatgtatcggttaggaaattcggcgaattaaaggtatatgaatata

SEQ ID NO: 37998 - DNA, 570 bp, Artificial Sequence
  chemically treated genomic DNA (Homo sapiens) CpG-island No: 37998
tatattcatatacctttaattcgccgaatttcctaaccgatacattaccttaacaccgttacccgaataaccatttatacgcgcgaattaaacccgatctaaaccgaccccgatattccatcgacttaccgactcctacttacttatccaccaaaaataaaaaccgtaaccaattaacgcatcaaacctaatacgaactacccgcgtcttatcaaacctacaaaaaataccaaaaccgtaatccgataaaacgttcacgccgcatccgactataaatactccgatacctaatacacgcttaccgcgtcttatcaaacctacaaaatataccaaaaccgcgtaaacgaataaaacgttcacgccgcatccgacaataaataataaacaccgaactataacctaccccaataatttcgccaacaccgaaatatccgccgcttataacgcttataacgaccatacaacaacaacgacgacatcgcaacaaacgaaacaaaacgacaaacaacgccacgtaattatataccaaccccaacgtcgcatcatacctcaacaatatacgccgacgac

SEQ ID NO: 37999 - DNA, 570 bp, Artificial Sequence
  chemically treated genomic DNA (Homo sapiens) CpG-island No: 37999
tgtgtttatgtatttttaattcgtcgagttttttggtcggtgtattattttaatatcgttgttcggatgattatttgtgcgcgcgaattaaattcggtttaagtcgatttcggtattttatcggtttatcggtttttgtttgtttatttattaagagtaaaaatcgtagttaattggcgtattaagtttgatgcgagttgttcgcgttttattaggtttataaaaggtgttagaatcgtagttcgataaggcgtttacgtcgtattcggttataagtgtttcgatgtttgatgtacgtttgtcgcgttttattaggtttgtaaaatgtgttagaatcgcgtaggcggataaggcgtttacgtcgtattcggtaataagtaatgagtatcgagttataatttattttagtggtttcgttagtatcggagtattcgtcgtttgtggcgtttatagcgattatatagtagtaacgacgatatcgtagtaaacgaagtagggcggtaggtagcgttacgtaattatatgttagttttagcgtcgtattatattttagtaatatgcgtcgacggt

SEQ ID NO: 38000 - DNA, 570 bp, Artificial Sequence
  chemically treated genomic DNA (Homo sapiens) CpG-island No: 38000
accgtcgacgcatattactaaaatataatacgacgctaaaactaacatataattacgtaacgctacctaccgccctacttcgtttactacgatatcgtcgttactactatataatcgctataaacgccacaaacgacgaatactccgatactaacgaaaccactaaaataaattataactcgatactcattacttattaccgaatacgacgtaaacgccttatccgcctacgcgattctaacacattttacaaacctaataaaacgcgacaaacgtacatcaaacatcgaaacacttataaccgaatacgacgtaaacgccttatcgaactacgattctaacaccttttataaacctaataaaacgcgaacaactcgcatcaaacttaatacgccaattaactacgatttttactcttaataaataaacaaacaaaaaccgataaaccgataaaataccgaaatcgacttaaaccgaatttaattcgcgcgcacaaataatcatccgaacaacgatattaaaataatacaccgaccaaaaaactcgacgaattaaaaatacataaacaca

SEQ ID NO: 38001 - DNA, 805 bp, Artificial Sequence
  chemically treated genomic DNA (Homo sapiens) CpG-island No: 38001
tgttggttttttgttggaacgaatatattttgaagtcggatatatttcgttgtaggattttaacgataattttttcgttaatatttagaagacggtatttattcggtgatttcgcgtttttcgggcggtgaaattattcggaagggttgatggcggtaggtcgtatcgcgcgtgaatttaatttttaattaagattattggtttttagcgtttggcgatgtttggcgtatagaaagcgatttgtcggagatttggcgttagttgattgaagtcggtttcgaaatcgttatgtttatgcgaaagtattgcgtatggcgaaaatttgcgtgggtagatttggtgtcgttacggcgttggcgatagcgtcggtttcggcgtggaacggaaaatcgttataaaggtattcgtacgtcgtataaaatgaagttcggtttttcggttggtatcgtgaatgttagaagtttcggtaagattgggttttggtttggaacggcgatcgtttttgcgttcgcggttgattcgttgggttcgggggattatttatagcggttattttatcgtcgaggtaatcgtgcgtagtttttcggttatttaggggttcggacgttgtacgggtttcgaaagggtttttagagtaaagtttatttatattttgattgagtacggcgtatattagagattcgtattagggggattatcgaagagtgcgaataagtcggttttttagtttttgatcgtttgttgatttttgatatttagtttcgttggagatgaatagtgtgtaacgttttcgattttttatttg

SEQ ID NO: 38002 - DNA, 805 bp, Artificial Sequence
  chemically treated genomic DNA (Homo sapiens) CpG-island No: 38002
caaataaaaaatcgaaaacgttacacactattcatctccaacgaaactaaatatcaaaaatcaacaaacgatcaaaaactaaaaaaccgacttattcgcactcttcgataatccccctaatacgaatctctaatatacgccgtactcaatcaaaatataaataaactttactctaaaaaccctttcgaaacccgtacaacgtccgaacccctaaataaccgaaaaactacgcacgattacctcgacgataaaataaccgctataaataatcccccgaacccaacgaatcaaccgcgaacgcaaaaacgatcgccgttccaaaccaaaacccaatcttaccgaaacttctaacattcacgataccaaccgaaaaaccgaacttcattttatacgacgtacgaatacctttataacgattttccgttccacgccgaaaccgacgctatcgccaacgccgtaacgacaccaaatctacccacgcaaattttcgccatacgcaatactttcgcataaacataacgatttcgaaaccgacttcaatcaactaacgccaaatctccgacaaatcgctttctatacgccaaacatcgccaaacgctaaaaaccaataatcttaattaaaaattaaattcacgcgcgatacgacctaccgccatcaacccttccgaataatttcaccgcccgaaaaacgcgaaatcaccgaataaataccgtcttctaaatattaacgaaaaaattatcgttaaaatcctacaacgaaatatatccgacttcaaaatatattcgttccaacaaaaaaccaaca

SEQ ID NO: 38003 - DNA, 805 bp, Artificial Sequence
  chemically treated genomic DNA (Homo sapiens) CpG-island No: 38003
tagatggagagtcgggaacgttgtatattgtttatttttagcggaattaagtattagagattagtaaacgattagaagttagaaggtcggtttgttcgtatttttcgatgatttttttggtacggatttttgatatgcgtcgtatttagttagagtatggataagttttgttttaagagttttttcgaggttcgtgtagcgttcggatttttgggtaatcggggagttgcgtacggttatttcgacggtggaatgatcgttgtggatgatttttcgaatttagcgggttaatcgcggacgtaaaaacggtcgtcgttttaggttaaaatttagttttatcggaatttttgatatttacggtattagtcggagaatcgaattttattttgtgcggcgtacgaatgtttttgtagcggtttttcgttttacgtcgaggtcgacgttgtcgttaacgtcgtagcggtattaggtttatttacgtaggttttcgttatacgtagtgttttcgtataggtatgacggtttcgaagtcggttttaattagttgacgttagattttcggtagatcgttttttgtgcgttaaatatcgttagacgttgggagttagtgattttggttagagattaaatttacgcgcgatacgatttatcgttattagttttttcgggtgattttatcgttcggagaacgcgggattatcgagtaggtgtcgttttttggatgttagcgaggaagttgtcgttagaattttgtagcggagtatgttcggttttagaatgtattcgttttagtaggaggttagta

SEQ ID NO: 38004 - DNA, 805 bp, Artificial Sequence
  chemically treated genomic DNA (Homo sapiens) CpG-island No: 38004
tactaacctcctactaaaacgaatacattctaaaaccgaacatactccgctacaaaattctaacgacaacttcctcgctaacatccaaaaaacgacacctactcgataatcccgcgttctccgaacgataaaatcacccgaaaaaactaataacgataaatcgtatcgcgcgtaaatttaatctctaaccaaaatcactaactcccaacgtctaacgatatttaacgcacaaaaaacgatctaccgaaaatctaacgtcaactaattaaaaccgacttcgaaaccgtcatacctatacgaaaacactacgtataacgaaaacctacgtaaataaacctaataccgctacgacgttaacgacaacgtcgacctcgacgtaaaacgaaaaaccgctacaaaaacattcgtacgccgcacaaaataaaattcgattctccgactaataccgtaaatatcaaaaattccgataaaactaaattttaacctaaaacgacgaccgtttttacgtccgcgattaacccgctaaattcgaaaaatcatccacaacgatcattccaccgtcgaaataaccgtacgcaactccccgattacccaaaaatccgaacgctacacgaacctcgaaaaaactcttaaaacaaaacttatccatactctaactaaatacgacgcatatcaaaaatccgtaccaaaaaaatcatcgaaaaatacgaacaaaccgaccttctaacttctaatcgtttactaatctctaatacttaattccgctaaaaataaacaatatacaacgttcccgactctccatcta

SEQ ID NO: 38005 - DNA, 1773 bp, Artificial Sequence
  chemically treated genomic DNA (Homo sapiens) CpG-island No: 38005
gtcgagtagggtgcgggtagtgtggcggatacgggatagtgcgaggtaaggtagaggagaggagagggataggggaggttaagtcgttcgtgatcgtttaggttaggtcgggttaaggattcggggtggggttcggcgcggaggggagggcggaggggagggtacggcgcggtgggtattgggggcgttgttacggggcgagcggtaagggggtaacgcgcgagcggagtggagtgagggttagggtagcgttacgggaggtgaggtgcgacgcgtcggaggtataagggtaaagacgtgggggttcgcggtgcggggggcggagtataagtgtggagcggggcgtagggttcggggatggggtcggtgggtgaggcggtcgagtaatgggggtggggggggggggttaggtaggggcggcggagggggggattgcgggggggggggggggagcgcgggttgtgcggggtgcgagtagggagaggggtaataaatgcgcgagggcgttgcgtagcgatggcggtgttaggtaagagcgggcggggggtgagatcgggtaaggtgcggacgagtcgtgagggtgtgggttcggaagggggtgaggtcgacggggggggggttacggatgacgggcggtaataggcgtcgatggtttaaggatgggataaggggacgcgcgaagggttgaggggagggttcggagttaggtagaagcggggttaggcgtgcggcgttcgagggcgtcggcgcggatgaggggggggggttacgcgatgggtggttgttcggcggttgcgggggggggacggggttgtagcgtggggcgtcggcgcgggcgaaggtcgtcggtcgagagggtggaataagcggatcgtttgtaaaaagaagtgcgatttgatggtttgggtcggtgttgattcgtttgaatgaatcgataggttcgaaggtgatgattttgcgtatatggacgaagtgggatttatggtgcgtagtatttttcgcgaagggcgattgatgtgttgtcggttggtaacgtacgtatggttgttcgttattgtagtcggtgcgtattattattcgtgaagagtgtaaaattttaggtcgtttgacggcgatcggtaggggaatgacgttagcgttatgcgcgtggatttggtgcgcgtttttatgacgaagtgatgtaggcgggaattcgtttcgggatcgcgttacgtttgatattattttttaggtttttttttattagcgaggatggggaaagtttttgatgatcgtttcggttgttatttgttggtgacgtattgcgcgaattgtacgacgtcgaattatttgcggaagtgtggttggtgtaagttttagcgaagaggtgggattacgcggcgggtaaattgttatttcgcggtgtcgtcggacgtcgttattgtgtttgatatcgtttgttgggcgaaaattttgattatggcgcggttaattatcgttagattggtaacgggttatgttggtgtaagcgataagtcgttgattgcgtcggtaaaatttatcgttgggtcgaaatcgtggcgttagaaattggcgtgtcgttgtaggtagatagtttagtaacggcggtacggacgtcgggtcggtgtatttaatcggtatcgcgtgtttatagtggtgatggggttagtaattcgttatggatattgcgcgtatcgattgtcgattgtcgcgatattttgtagatgtagtaatttttattgtttttatttaacgttttacgcgtgagacggt

SEQ ID NO: 38006 - DNA, 1773 bp, Artificial Sequence
  chemically treated genomic DNA (Homo sapiens) CpG-island No: 38006
accgtctcacgcgtaaaacgttaaataaaaacaataaaaattactacatctacaaaatatcgcgacaatcgacaatcgatacgcgcaatatccataacgaattactaaccccatcaccactataaacacgcgataccgattaaatacaccgacccgacgtccgtaccgccgttactaaactatctacctacaacgacacgccaatttctaacgccacgatttcgacccaacgataaattttaccgacgcaatcaacgacttatcgcttacaccaacataacccgttaccaatctaacgataattaaccgcgccataatcaaaattttcgcccaacaaacgatatcaaacacaataacgacgtccgacgacaccgcgaaataacaatttacccgccgcgtaatcccacctcttcgctaaaacttacaccaaccacacttccgcaaataattcgacgtcgtacaattcgcgcaatacgtcaccaacaaataacaaccgaaacgatcatcaaaaactttccccatcctcgctaataaaaaaaaacctaaaaaataatatcaaacgtaacgcgatcccgaaacgaattcccgcctacatcacttcgtcataaaaacgcgcaccaaatccacgcgcataacgctaacgtcattcccctaccgatcgccgtcaaacgacctaaaattttacactcttcacgaataataatacgcaccgactacaataacgaacaaccatacgtacgttaccaaccgacaacacatcaatcgcccttcgcgaaaaatactacgcaccataaatcccacttcgtccatatacgcaaaatcatcaccttcgaacctatcgattcattcaaacgaatcaacaccgacccaaaccatcaaatcgcacttctttttacaaacgatccgcttattccaccctctcgaccgacgaccttcgcccgcgccgacgccccacgctacaaccccgtcccccccccgcaaccgccgaacaaccacccatcgcgtaacccccccccctcatccgcgccgacgccctcgaacgccgcacgcctaaccccgcttctacctaactccgaaccctcccctcaacccttcgcgcgtccccttatcccatccttaaaccatcgacgcctattaccgcccgtcatccgtaaccccccccccgtcgacctcacccccttccgaacccacaccctcacgactcgtccgcaccttacccgatctcaccccccgcccgctcttacctaacaccgccatcgctacgcaacgccctcgcgcatttattacccctctccctactcgcaccccgcacaacccgcgctcccccccccccccccgcaatccccccctccgccgcccctacctaaccccccccccccacccccattactcgaccgcctcacccaccgaccccatccccgaaccctacgccccgctccacacttatactccgccccccgcaccgcgaacccccacgtctttacccttatacctccgacgcgtcgcacctcacctcccgtaacgctaccctaaccctcactccactccgctcgcgcgttacccccttaccgctcgccccgtaacaacgcccccaatacccaccgcgccgtaccctcccctccgccctcccctccgcgccgaaccccaccccgaatccttaacccgacctaacctaaacgatcacgaacgacttaacctcccctatccctctcctctcctctaccttacctcgcactatcccgtatccgccacactacccgcaccctactcgac

SEQ ID NO: 38007 - DNA, 1773 bp, Artificial Sequence
  chemically treated genomic DNA (Homo sapiens) CpG-island No: 38007
atcgttttacgcgtaagacgttgaataagggtaataaaagttgttgtatttgtaaaatgtcgcggtaatcggtaatcgatgcgcgtaatgtttatggcgggttgttggttttattattattgtgggtacgcggtgtcggttaagtgtatcgattcgacgttcgtgtcgtcgttgttgaattatttgtttgtaacggtacgttaatttttggcgttacggtttcgatttagcggtaagttttgtcggcgtaattagcgatttgtcgtttatattagtatggttcgttattaatttggcgatggttagtcgcgttataattaaagttttcgtttagtaggcggtattaagtataatggcgacgttcggcgatatcgcggggtggtagtttgttcgtcgcgtaattttattttttcgttggaatttgtattagttatattttcgtaggtagttcggcgtcgtgtagttcgcgtagtacgttattagtagatagtaatcgaggcggttattaaaggttttttttattttcgttggtgagggagaatttgaaaagtggtattaaacgtgacgcgatttcgggacgaattttcgtttgtattatttcgttataggagcgcgtattaagtttacgcgtatggcgttgacgttatttttttgtcggtcgtcgttaagcggtttggaattttgtattttttacgggtggtgatgcgtatcggttgtagtggcgggtagttatgcgtacgttgttaatcggtagtatattaatcgtttttcgcgggagatgttgcgtattataaattttatttcgtttatatgcgtaagattattattttcggatttgtcgatttatttaggcggattagtatcgatttagattattaaatcgtatttttttttgtaggcgattcgtttattttattttttcggtcggcggttttcgttcgcgtcggcgttttacgttgtaatttcgtttttttttcgtaatcgtcgagtagttatttatcgcgtaattttttttttttattcgcgtcggcgttttcgaacgtcgtacgtttggtttcgtttttatttgatttcgggttttttttttaatttttcgcgcgtttttttgttttatttttggattatcggcgtttattgtcgttcgttattcgtgatttttttttcgtcggttttattttttttcgggtttatatttttacggttcgttcgtattttgttcggttttatttttcgttcgtttttatttggtatcgttatcgttgcgtagcgttttcgcgtatttgttgtttttttttttattcgtatttcgtatagttcgcgttttttttttttttttcgtaattttttttttcgtcgtttttatttggttttttttttttatttttattgttcggtcgttttatttatcggttttattttcgagttttgcgtttcgttttatatttgtatttcgtttttcgtatcgcgggtttttacgtttttgtttttgtgttttcggcgcgtcgtattttatttttcgtggcgttgttttaatttttattttatttcgttcgcgcgttgtttttttatcgttcgtttcgtggtagcgtttttagtgtttatcgcgtcgtgttttttttttcgttttttttttcgcgtcgaattttatttcggatttttgattcgatttggtttggacggttacgggcggtttggttttttttgtttttttttttttttttgttttgtttcgtattatttcgtgttcgttatattgttcgtattttgttcgat

SEQ ID NO: 38008 - DNA, 1773 bp, Artificial Sequence
  chemically treated genomic DNA (Homo sapiens) CpG-island No: 38008
atcgaacaaaatacgaacaatataacgaacacgaaataatacgaaacaaaacaaaaaaaaaaaaaaaaacaaaaaaaaccaaaccgcccgtaaccgtccaaaccaaatcgaatcaaaaatccgaaataaaattcgacgcgaaaaaaaaaacgaaaaaaaaaacacgacgcgataaacactaaaaacgctaccacgaaacgaacgataaaaaaacaacgcgcgaacgaaataaaataaaaattaaaacaacgccacgaaaaataaaatacgacgcgccgaaaacacaaaaacaaaaacgtaaaaacccgcgatacgaaaaacgaaatacaaatataaaacgaaacgcaaaactcgaaaataaaaccgataaataaaacgaccgaacaataaaaataaaaaaaaaaaaccaaataaaaacgacgaaaaaaaaaattacgaaaaaaaaaaaaaaaacgcgaactatacgaaatacgaataaaaaaaaaaacaacaaatacgcgaaaacgctacgcaacgataacgataccaaataaaaacgaacgaaaaataaaaccgaacaaaatacgaacgaaccgtaaaaatataaacccgaaaaaaaataaaaccgacgaaaaaaaaatcacgaataacgaacgacaataaacgccgataatccaaaaataaaacaaaaaaacgcgcgaaaaattaaaaaaaaaacccgaaatcaaataaaaacgaaaccaaacgtacgacgttcgaaaacgccgacgcgaataaaaaaaaaaaattacgcgataaataactactcgacgattacgaaaaaaaaacgaaattacaacgtaaaacgccgacgcgaacgaaaaccgccgaccgaaaaaataaaataaacgaatcgcctacaaaaaaaaatacgatttaataatctaaatcgatactaatccgcctaaataaatcgacaaatccgaaaataataatcttacgcatataaacgaaataaaatttataatacgcaacatctcccgcgaaaaacgattaatatactaccgattaacaacgtacgcataactacccgccactacaaccgatacgcatcaccacccgtaaaaaatacaaaattccaaaccgcttaacgacgaccgacaaaaaaataacgtcaacgccatacgcgtaaacttaatacgcgctcctataacgaaataatacaaacgaaaattcgtcccgaaatcgcgtcacgtttaataccacttttcaaattctccctcaccaacgaaaataaaaaaaacctttaataaccgcctcgattactatctactaataacgtactacgcgaactacacgacgccgaactacctacgaaaatataactaatacaaattccaacgaaaaaataaaattacgcgacgaacaaactaccaccccgcgatatcgccgaacgtcgccattatacttaataccgcctactaaacgaaaactttaattataacgcgactaaccatcgccaaattaataacgaaccatactaatataaacgacaaatcgctaattacgccgacaaaacttaccgctaaatcgaaaccgtaacgccaaaaattaacgtaccgttacaaacaaataattcaacaacgacgacacgaacgtcgaatcgatacacttaaccgacaccgcgtacccacaataataataaaaccaacaacccgccataaacattacgcgcatcgattaccgattaccgcgacattttacaaatacaacaacttttattacccttattcaacgtcttacgcgtaaaacgat

SEQ ID NO: 38009 - DNA, 746 bp, Artificial Sequence
  chemically treated genomic DNA (Homo sapiens) CpG-island No: 38009
tttttttttagggggggggtttttttttggttttgatatttttcgggtagttcgtgcgacgcgattgttgcgggaggggtggtacggttgtttgagtgacgtaatgcgaggacgggaagaacggagtggagagggggcgaagagaaagagagaaagggcgggaggggcgacgtaaacggggaggttgcgttcgggggatgacgtcggacgttggttgagaaatcgacggcgttgtgaggggtagtggagtgggggataggagggaggggtaaaggggattgtaattagttaaagcgggtgggatgcgtgacggacgggggcggaggagcgtagcggcgtgtttcgtataggcgggcgtgcggggggcgagcgcgaagagggggcgtaaagggcgtgagcggggatcgtacgggacgagggtgagttagaggaattgtatatcggtcgaggggcgtcgtagcggttggtgaaagggcgcgaggaaggaagcgaaaaatgaggagttgggatgtgggaatgcgggttgggacggatatgagggcgagggggtgggaggatgtgagtgagagttgagtagaggaattgtcggtacggggacgcgggcgaagataaggggagcgagagcggcgcgcgaaatagggtattacgtgcgtaatgttgttgagtcgggttagggaaaaaaagggggaaaggggggagtcgatcgtttatatttatgatttataggatttggtgaaattcgtttt

SEQ ID NO: 38010 - DNA, 746 bp, Artificial Sequence
  chemically treated genomic DNA (Homo sapiens) CpG-island No: 38010
aaaacgaatttcaccaaatcctataaatcataaatataaacgatcgactcccccctttccccctttttttccctaacccgactcaacaacattacgcacgtaataccctatttcgcgcgccgctctcgctccccttatcttcgcccgcgtccccgtaccgacaattcctctactcaactctcactcacatcctcccaccccctcgccctcatatccgtcccaacccgcattcccacatcccaactcctcatttttcgcttccttcctcgcgccctttcaccaaccgctacgacgcccctcgaccgatatacaattcctctaactcaccctcgtcccgtacgatccccgctcacgccctttacgccccctcttcgcgctcgccccccgcacgcccgcctatacgaaacacgccgctacgctcctccgcccccgtccgtcacgcatcccacccgctttaactaattacaatcccctttacccctccctcctatcccccactccactacccctcacaacgccgtcgatttctcaaccaacgtccgacgtcatcccccgaacgcaacctccccgtttacgtcgcccctcccgccctttctctctttctcttcgccccctctccactccgttcttcccgtcctcgcattacgtcactcaaacaaccgtaccacccctcccgcaacaatcgcgtcgcacgaactacccgaaaaatatcaaaaccaaaaaaaaaccccccccctaaaaaaaaa

SEQ ID NO: 38011 - DNA, 746 bp, Artificial Sequence
  chemically treated genomic DNA (Homo sapiens) CpG-island No: 38011
aaggcgggttttattaaattttgtaagttataggtgtagacggtcggtttttttttttttttttttttttttttggttcggtttaatagtattacgtacgtggtgttttatttcgcgcgtcgttttcgttttttttattttcgttcgcgttttcgtgtcggtagtttttttgtttagtttttatttatatttttttattttttcgtttttatattcgttttaattcgtatttttatattttaattttttatttttcgttttttttttcgcgtttttttattagtcgttgcggcgtttttcggtcgatatgtagtttttttggtttattttcgtttcgtgcggttttcgtttacgttttttgcgtttttttttcgcgttcgtttttcgtacgttcgtttgtacgaggtacgtcgttacgttttttcgttttcgttcgttacgtattttattcgttttggttggttgtaattttttttgttttttttttttgttttttattttattattttttatagcgtcgtcggttttttagttagcgttcggcgttatttttcgggcgtagttttttcgtttgcgtcgtttttttcgtttttttttttttttttttcgttttttttttatttcgtttttttcgttttcgtattacgttatttaggtagtcgtattatttttttcgtagtaatcgcgtcgtacgagttattcgggggatattagagttaagggggaattttttttttgaggggaaa

SEQ ID NO: 38012 - DNA, 746 bp, Artificial Sequence
  chemically treated genomic DNA (Homo sapiens) CpG-island No: 38012
tttcccctcaaaaaaaaaattcccccttaactctaatatcccccgaataactcgtacgacgcgattactacgaaaaaaataatacgactacctaaataacgtaatacgaaaacgaaaaaaacgaaataaaaaaaaaacgaaaaaaaaaaaaaaaaaaacgaaaaaaacgacgcaaacgaaaaaactacgcccgaaaaataacgccgaacgctaactaaaaaaccgacgacgctataaaaaataataaaataaaaaacaaaaaaaaaaaacaaaaaaaattacaaccaaccaaaacgaataaaatacgtaacgaacgaaaacgaaaaaacgtaacgacgtacctcgtacaaacgaacgtacgaaaaacgaacgcgaaaaaaaaacgcaaaaaacgtaaacgaaaaccgcacgaaacgaaaataaaccaaaaaaactacatatcgaccgaaaaacgccgcaacgactaataaaaaaacgcgaaaaaaaaaacgaaaaataaaaaattaaaatataaaaatacgaattaaaacgaatataaaaacgaaaaaataaaaaaatataaataaaaactaaacaaaaaaactaccgacacgaaaacgcgaacgaaaataaaaaaaacgaaaacgacgcgcgaaataaaacaccacgtacgtaatactattaaaccgaaccaaaaaaaaaaaaaaaaaaaaaaaaaaaccgaccgtctacacctataacttacaaaatttaataaaacccgcctt

SEQ ID NO: 38013 - DNA, 879 bp, Artificial Sequence
  chemically treated genomic DNA (Homo sapiens) CpG-island No: 38013
gtgtggtcgttttcgttattcggttaacgagataatatgattttggggaaaggacgtagcgtggtcgttttcgttattcggttaacgagataatacgattttggggaaaggatatagggtggtcgttttcgttattcggttaacgagagagtataattttggggaaaggacgtagtgtggtcgtttttattatttatttaacgagagagtacgattttggggaaaggatgtagtgtggtcgttttcgttattcggttaacgagagagtataattttggggaaaggacgtagtgtggtcgtttttattattcggttaacgagagagtacgattttggggaaaggatgtagtgtggtcgttttcgttatttagttaacgagagagtacgattttggggaaaggacgtagtgtggtcgttttcgttatttagttaacgagagagtacgattttggggaaaggatgtagtgtggtcgttttcgttatttagttaacgagagagtacgattttggggaaaggatgtagtgtggtcgttttcgttatttagttaacgagagagtacgattttggggaaaggatgtagtgtggtcgttttcgttattcggttaacgagagagtacgattttggggaaaggacgtagtgtggtcgttttcgttattcggttaacgagagagtacgattttggggaaaggatgtagtgtggtcgttttcgttattcggttaacgagagagtacgattttggggaaaggacgtagtgtggtcgttttcgttatttagttaacgagagagtacgattttggggaaaggacgtagtgtggtcgtttttttttcggagttgatgttttagaattagattagttagggacggtgaggagttag

SEQ ID NO: 38014 - DNA, 879 bp, Artificial Sequence
  chemically treated genomic DNA (Homo sapiens) CpG-island No: 38014
ctaactcctcaccgtccctaactaatctaattctaaaacatcaactccgaaaaaaaaacgaccacactacgtcctttccccaaaatcgtactctctcgttaactaaataacgaaaacgaccacactacgtcctttccccaaaatcgtactctctcgttaaccgaataacgaaaacgaccacactacatcctttccccaaaatcgtactctctcgttaaccgaataacgaaaacgaccacactacgtcctttccccaaaatcgtactctctcgttaaccgaataacgaaaacgaccacactacatcctttccccaaaatcgtactctctcgttaactaaataacgaaaacgaccacactacatcctttccccaaaatcgtactctctcgttaactaaataacgaaaacgaccacactacatcctttccccaaaatcgtactctctcgttaactaaataacgaaaacgaccacactacgtcctttccccaaaatcgtactctctcgttaactaaataacgaaaacgaccacactacatcctttccccaaaatcgtactctctcgttaaccgaataataaaaacgaccacactacgtcctttccccaaaattatactctctcgttaaccgaataacgaaaacgaccacactacatcctttccccaaaatcgtactctctcgttaaataaataataaaaacgaccacactacgtcctttccccaaaattatactctctcgttaaccgaataacgaaaacgaccaccctatatcctttccccaaaatcgtattatctcgttaaccgaataacgaaaacgaccacgctacgtcctttccccaaaatcatattatctcgttaaccgaataacgaaaacgaccacac

SEQ ID NO: 38015 - DNA, 879 bp, Artificial Sequence
  chemically treated genomic DNA (Homo sapiens) CpG-island No: 38015
ttaattttttatcgtttttggttggtttggttttagaatattagtttcgagaggagagcggttatattgcgttttttttttagggtcgtgttttttcgttgattgagtgacgagagcggttatattgcgttttttttttagggtcgtgttttttcgttgatcgagtgacgagagcggttatattgtattttttttttagggtcgtgttttttcgttgatcgagtgacgagagcggttatattgcgttttttttttagggtcgtgttttttcgttgatcgagtgacgagagcggttatattgtattttttttttagggtcgtgttttttcgttgattgagtgacgagagcggttatattgtattttttttttagggtcgtgttttttcgttgattgagtgacgagagcggttatattgtattttttttttagggtcgtgttttttcgttgattgagtgacgagagcggttatattgcgttttttttttagggtcgtgttttttcgttgattgagtgacgagagcggttatattgtattttttttttagggtcgtgttttttcgttgatcgagtgatgagagcggttatattgcgttttttttttagggttgtgttttttcgttgatcgagtgacgagagcggttatattgtattttttttttagggtcgtgttttttcgttgaatgagtgatgagagcggttatattgcgttttttttttagggttgtgttttttcgttgatcgagtgacgagggcggttattttgtgttttttttttagggtcgtgttgtttcgttgatcgagtgacgagagcggttacgttgcgttttttttttagggttatgttgtttcgttgatcgagtgacgagagcggttatat

SEQ ID NO: 38016 - DNA, 879 bp, Artificial Sequence
  chemically treated genomic DNA (Homo sapiens) CpG-island No: 38016
atataaccgctctcgtcactcgatcaacgaaacaacataaccctaaaaaaaaaacgcaacgtaaccgctctcgtcactcgatcaacgaaacaacacgaccctaaaaaaaaaacacaaaataaccgccctcgtcactcgatcaacgaaaaaacacaaccctaaaaaaaaaacgcaatataaccgctctcatcactcattcaacgaaaaaacacgaccctaaaaaaaaaatacaatataaccgctctcgtcactcgatcaacgaaaaaacacaaccctaaaaaaaaaacgcaatataaccgctctcatcactcgatcaacgaaaaaacacgaccctaaaaaaaaaatacaatataaccgctctcgtcactcaatcaacgaaaaaacacgaccctaaaaaaaaaacgcaatataaccgctctcgtcactcaatcaacgaaaaaacacgaccctaaaaaaaaaatacaatataaccgctctcgtcactcaatcaacgaaaaaacacgaccctaaaaaaaaaatacaatataaccgctctcgtcactcaatcaacgaaaaaacacgaccctaaaaaaaaaatacaatataaccgctctcgtcactcgatcaacgaaaaaacacgaccctaaaaaaaaaacgcaatataaccgctctcgtcactcgatcaacgaaaaaacacgaccctaaaaaaaaaatacaatataaccgctctcgtcactcgatcaacgaaaaaacacgaccctaaaaaaaaaacgcaatataaccgctctcgtcactcaatcaacgaaaaaacacgaccctaaaaaaaaaacgcaatataaccgctctcctctcgaaactaatattctaaaaccaaaccaaccaaaaacgataaaaaattaa

SEQ ID NO: 38017 - DNA, 671 bp, Artificial Sequence
  chemically treated genomic DNA (Homo sapiens) CpG-island No: 38017
gtcggcggcggcggggttgtggttacgggggagcgggtggcggtcgcggggtttcggtgagtcgggtcggggtgtacgggggtcgaggcggttttcgagtcgggtcggagttgtcgggagtttgggaaatacggtttaggcgattttttttcgggagttgtagttttgttttgggggcggcgcgcggttcggttttcggggcgagttttttcgcggggcgggcggcgcgcgcggaggttgagggggagggggagtatgttcggttggagttcggtttcggggcgcgtttcggtcgtcgtttttattttcgtttttttttttttttttttcgttttttttttttttttttttagtttcgtcgtcgcggtagttaatattggttgcgtttcggagttcgggaggcggtcgttgttgagcgtcgttcgtcgtttcgggtttttagttcgtttaggtttcggtttatggttttcgtcgttttacggttttcggcgttttagggttgttgtcgaggtgttcgtttgttcgttcgtcggtttcggggggttcgggaggcgttcggcggggcggggcggcgcggttcgttattatggagttttagcgtcgggagttgttcgtttagtgttagtagagtttggtttaggttatgacggaggtggaagtcgtgttcgggt

SEQ ID NO: 38018 - DNA, 671 bp, Artificial Sequence
  chemically treated genomic DNA (Homo sapiens) CpG-island No: 38018
acccgaacacgacttccacctccgtcataacctaaaccaaactctactaacactaaacgaacaactcccgacgctaaaactccataataacgaaccgcgccgccccgccccgccgaacgcctcccgaaccccccgaaaccgacgaacgaacaaacgaacacctcgacaacaaccctaaaacgccgaaaaccgtaaaacgacgaaaaccataaaccgaaacctaaacgaactaaaaacccgaaacgacgaacgacgctcaacaacgaccgcctcccgaactccgaaacgcaaccaatattaactaccgcgacgacgaaactaaaaaaaaaaaaaaaaaaaacgaaaaaaaaaaaaaaaaaaacgaaaataaaaacgacgaccgaaacgcgccccgaaaccgaactccaaccgaacatactccccctccccctcaacctccgcgcgcgccgcccgccccgcgaaaaaactcgccccgaaaaccgaaccgcgcgccgcccccaaaacaaaactacaactcccgaaaaaaaatcgcctaaaccgtatttcccaaactcccgacaactccgacccgactcgaaaaccgcctcgacccccgtacaccccgacccgactcaccgaaaccccgcgaccgccacccgctcccccgtaaccacaaccccgccgccgccgac

SEQ ID NO: 38019 - DNA, 671 bp, Artificial Sequence
  chemically treated genomic DNA (Homo sapiens) CpG-island No: 38019
gttcgagtacggtttttattttcgttatggtttgggttaggttttgttgatattgggcgagtagttttcggcgttggggttttatggtggcgggtcgcgtcgtttcgtttcgtcggacgtttttcgggtttttcgaggtcggcgggcgggtaggcgagtatttcggtagtagttttagggcgtcgggagtcgtgaggcggcgggagttatgggtcggggtttgggcgggttgggggttcggggcggcgggcggcgtttagtagcggtcgtttttcgggtttcggagcgtagttaatgttggttgtcgcggcggcgggattggaagaggaggaggaggagacggaggaggagaaggaggaggcggaggtggggacggcggtcggggcgcgtttcgaggtcgggttttagtcgggtatgtttttttttttttttagttttcgcgcgcgtcgttcgtttcgcgagaaaattcgtttcgaaagtcgggtcgcgcgtcgtttttagagtaagattataattttcgggagaaagtcgtttgggtcgtgttttttaggttttcgatagtttcggttcggttcggaggtcgtttcggttttcgtgtatttcggttcggtttatcggggtttcgcggtcgttattcgttttttcgtggttatagtttcgtcgtcgtcggt

SEQ ID NO: 38020 - DNA, 671 bp, Artificial Sequence
  chemically treated genomic DNA (Homo sapiens) CpG-island No: 38020
accgacgacgacgaaactataaccacgaaaaaacgaataacgaccgcgaaaccccgataaaccgaaccgaaatacacgaaaaccgaaacgacctccgaaccgaaccgaaactatcgaaaacctaaaaaacacgacccaaacgactttctcccgaaaattataatcttactctaaaaacgacgcgcgacccgactttcgaaacgaattttctcgcgaaacgaacgacgcgcgcgaaaactaaaaaaaaaaaaaaacatacccgactaaaacccgacctcgaaacgcgccccgaccgccgtccccacctccgcctcctccttctcctcctccgtctcctcctcctcctcttccaatcccgccgccgcgacaaccaacattaactacgctccgaaacccgaaaaacgaccgctactaaacgccgcccgccgccccgaacccccaacccgcccaaaccccgacccataactcccgccgcctcacgactcccgacgccctaaaactactaccgaaatactcgcctacccgcccgccgacctcgaaaaacccgaaaaacgtccgacgaaacgaaacgacgcgacccgccaccataaaaccccaacgccgaaaactactcgcccaatatcaacaaaacctaacccaaaccataacgaaaataaaaaccgtactcgaac

SEQ ID NO: 38021 - DNA, 576 bp, Artificial Sequence
  chemically treated genomic DNA (Homo sapiens) CpG-island No: 38021
ttcgaggattgtagattatgatgcgggtgggtgtcgttttcgttagatttgtttacgttcggtgatgcgcggggtgtatcgttgaggagattatgcggcgtttcggggggttgtagttcggtatttgtcggtgggtttttcggttacggcgggttaggattgattattcgtagttaggtgtttttttttcgggtggttagtgtagtgcgagtatttttcggggagaagagtatgtttcggaattaggtggggttcgttcgtcgtggggtcgtattattaatttgtggcggtcgggttggggttgatcgcgcgggtcgttttcgaagcgtttttatatcgtcggggtcgttcgtgcgttgtgttgcgttttaggcgttatttggtttttcgcgggttcgtgacggggttagggtttataggttcgagtcggtaatcggtgcgagtagtcgggcggtcgatcggcggttttttaggtcggtcgtttatgcgtttttcgtaggttacgtgttggtttgtggcgtggagttaggagtttttgggtcgtttttttaagtttgtagtgggttcggtgttgtg

SEQ ID NO: 38022 - DNA, 576 bp, Artificial Sequence
  chemically treated genomic DNA (Homo sapiens) CpG-island No: 38022
cacaacaccgaacccactacaaacttaaaaaaacgacccaaaaactcctaactccacgccacaaaccaacacgtaacctacgaaaaacgcataaacgaccgacctaaaaaaccgccgatcgaccgcccgactactcgcaccgattaccgactcgaacctataaaccctaaccccgtcacgaacccgcgaaaaaccaaataacgcctaaaacgcaacacaacgcacgaacgaccccgacgatataaaaacgcttcgaaaacgacccgcgcgatcaaccccaacccgaccgccacaaattaataatacgaccccacgacgaacgaaccccacctaattccgaaacatactcttctccccgaaaaatactcgcactacactaaccacccgaaaaaaaaacacctaactacgaataatcaatcctaacccgccgtaaccgaaaaacccaccgacaaataccgaactacaaccccccgaaacgccgcataatctcctcaacgatacaccccgcgcatcaccgaacgtaaacaaatctaacgaaaacgacacccacccgcatcataatctacaatcctcgaa

SEQ ID NO: 38023 - DNA, 576 bp, Artificial Sequence
  chemically treated genomic DNA (Homo sapiens) CpG-island No: 38023
tatagtatcggatttattgtaggtttgagggagcgatttagaaatttttggttttacgttatagattagtacgtgatttacgaggggcgtatgggcggtcggtttgagggatcgtcgatcgatcgttcgattgttcgtatcggttgtcggttcgaatttatggattttggtttcgttacggattcgcggaagattaggtaacgtttggggcgtagtatagcgtacggacggtttcgacggtgtgggaacgtttcggaagcgattcgcgcggttagttttaattcgatcgttataggttggtgatgcggttttacggcgaacgggttttatttgatttcgggatatattttttttttcgaaagatgttcgtattgtattaattattcgggggaaaggtatttggttgcgaatgattagttttggttcgtcgtgatcgggaagtttatcggtaggtgtcgggttataatttttcgaagcgtcgtatgatttttttagcgatatatttcgcgtattatcggacgtaagtagatttggcggaaacgatatttattcgtattataatttatagttttcgaa

SEQ ID NO: 38024 - DNA, 576 bp, Artificial Sequence
  chemically treated genomic DNA (Homo sapiens) CpG-island No: 38024
ttcgaaaactataaattataatacgaataaatatcgtttccgccaaatctacttacgtccgataatacgcgaaatatatcgctaaaaaaatcatacgacgcttcgaaaaattataacccgacacctaccgataaacttcccgatcacgacgaaccaaaactaatcattcgcaaccaaatacctttcccccgaataattaatacaatacgaacatctttcgaaaaaaaaaatatatcccgaaatcaaataaaacccgttcgccgtaaaaccgcatcaccaacctataacgatcgaattaaaactaaccgcgcgaatcgcttccgaaacgttcccacaccgtcgaaaccgtccgtacgctatactacgccccaaacgttacctaatcttccgcgaatccgtaacgaaaccaaaatccataaattcgaaccgacaaccgatacgaacaatcgaacgatcgatcgacgatccctcaaaccgaccgcccatacgcccctcgtaaatcacgtactaatctataacgtaaaaccaaaaatttctaaatcgctccctcaaacctacaataaatccgatactata

SEQ ID NO: 38025 - DNA, 881 bp, Artificial Sequence
  chemically treated genomic DNA (Homo sapiens) CpG-island No: 38025
tttagcggtgtcggggtttagcgcgtaggacggttggggggtttcggagcgggcggttaggattcgcgtagttagttggtgttagcgagcgtcgcggtcgttggggattttagtttttagtaggtatcgtttttgcggtcgacgcgcgtggcggcggtgtcggttgggattcgtagtgcggttcgggtaggagagagtagggggttacgttggttttatttacgtacgtttcggaaatcgggttcggaggggattacgttcgtttattcgtgttcggcgtttttcggagttggggttagaggagtcgggtcggtcgtagcgggaagaggttataggcggtcgcgtacgtggggggtggttagcgcggaggaattcggaagttttttgtatcgtttatcgtcgcggtgacgggttaacgttttttttggtggaggtaggggcgggcggggcggaaggcggggacgttttagttaatattttcgaggatcgttcgcgagtcgttttttttatttttacggacgcgacgtagcgcgggtttcgttttttcggtcgcggcgtttgcgtaaaagtttcgttttttcgttcgagttttatttttatatcgtagtttttatcgtcgttatttttttttttttttttgttttttttttttgttttttttttttttttttttttggttttcgcgtttttttttatttcggcgttgacgttcgcgtaggggttttggcgttagacgcgcgggggcggggcgagtgcggcgcggggtataagtagagggtgtaggaggcggtgttttttttttttttcggcggttagtgttgagagtgcggagtgtgtgtttcgggttcggaatatatatttattattaaaaaatttaaaaa

SEQ ID NO: 38026 - DNA, 881 bp, Artificial Sequence
  chemically treated genomic DNA (Homo sapiens) CpG-island No: 38026
tttttaaattttttaataataaatatatattccgaacccgaaacacacactccgcactctcaacactaaccgccgaaaaaaaaaaaaaacaccgcctcctacaccctctacttataccccgcgccgcactcgccccgcccccgcgcgtctaacgccaaaacccctacgcgaacgtcaacgccgaaataaaaaaaaacgcgaaaaccaaaaaaaaaaaaaaaaaaaaaacaaaaaaaaaaaacaaaaaaaaaaaaaaaaataacgacgataaaaactacgatataaaaataaaactcgaacgaaaaaacgaaacttttacgcaaacgccgcgaccgaaaaaacgaaacccgcgctacgtcgcgtccgtaaaaataaaaaaaacgactcgcgaacgatcctcgaaaatattaactaaaacgtccccgccttccgccccgcccgcccctacctccaccaaaaaaaacgttaacccgtcaccgcgacgataaacgatacaaaaaacttccgaattcctccgcgctaaccaccccccacgtacgcgaccgcctataacctcttcccgctacgaccgacccgactcctctaaccccaactccgaaaaacgccgaacacgaataaacgaacgtaatcccctccgaacccgatttccgaaacgtacgtaaataaaaccaacgtaaccccctactctctcctacccgaaccgcactacgaatcccaaccgacaccgccgccacgcgcgtcgaccgcaaaaacgatacctactaaaaactaaaatccccaacgaccgcgacgctcgctaacaccaactaactacgcgaatcctaaccgcccgctccgaaaccccccaaccgtcctacgcgctaaaccccgacaccgctaaa

SEQ ID NO: 38027 - DNA, 881 bp, Artificial Sequence
  chemically treated genomic DNA (Homo sapiens) CpG-island No: 38027
tttttggattttttaataataaatgtgtgtttcgagttcggagtatatatttcgtatttttagtattaatcgtcggggagaaggggaagtatcgttttttgtattttttatttatatttcgcgtcgtattcgtttcgttttcgcgcgtttgacgttagggtttttacgcgagcgttagcgtcggagtaggaggagacgcggaggttagggggaggagggaagagaaaataggaggaaagagtagagaggaagggagaggtggcggcggtggaggttgcggtgtgggggtggggttcgggcgaaggggcggggtttttgcgtaggcgtcgcggtcggggaagcggagttcgcgttgcgtcgcgttcgtgggggtggggaggacggttcgcgggcggttttcgggggtgttggttgaggcgttttcgtttttcgtttcgttcgtttttgtttttattaggaggagcgttaattcgttatcgcggcggtgggcggtgtaaagggttttcgggttttttcgcgttaattattttttacgtgcgcggtcgtttgtggttttttttcgttgcggtcggttcggtttttttagttttagtttcgggggacgtcgggtacgggtgagcgggcgtggtttttttcgggttcggttttcgaaacgtgcgtagatggagttagcgtggttttttgtttttttttattcggatcgtattacgagttttagtcggtatcgtcgttacgcgcgtcggtcgtagaagcggtgtttgttgggagttggagtttttaacggtcgcggcgttcgttgatattaattggttgcgcgggttttggtcgttcgtttcgggattttttaatcgttttgcgcgttggatttcggtatcgttgga

SEQ ID NO: 38028 - DNA, 881 bp, Artificial Sequence
  chemically treated genomic DNA (Homo sapiens) CpG-island No: 38028
tccaacgataccgaaatccaacgcgcaaaacgattaaaaaatcccgaaacgaacgaccaaaacccgcgcaaccaattaatatcaacgaacgccgcgaccgttaaaaactccaactcccaacaaacaccgcttctacgaccgacgcgcgtaacgacgataccgactaaaactcgtaatacgatccgaataaaaaaaaacaaaaaaccacgctaactccatctacgcacgtttcgaaaaccgaacccgaaaaaaaccacgcccgctcacccgtacccgacgtcccccgaaactaaaactaaaaaaaccgaaccgaccgcaacgaaaaaaaaccacaaacgaccgcgcacgtaaaaaataattaacgcgaaaaaacccgaaaaccctttacaccgcccaccgccgcgataacgaattaacgctcctcctaataaaaacaaaaacgaacgaaacgaaaaacgaaaacgcctcaaccaacacccccgaaaaccgcccgcgaaccgtcctccccacccccacgaacgcgacgcaacgcgaactccgcttccccgaccgcgacgcctacgcaaaaaccccgccccttcgcccgaaccccacccccacaccgcaacctccaccgccgccacctctcccttcctctctactctttcctcctattttctcttccctcctccccctaacctccgcgtctcctcctactccgacgctaacgctcgcgtaaaaaccctaacgtcaaacgcgcgaaaacgaaacgaatacgacgcgaaatataaataaaaaatacaaaaaacgatacttccccttctccccgacgattaatactaaaaatacgaaatatatactccgaactcgaaacacacatttattattaaaaaatccaaaaa

SEQ ID NO: 38029 - DNA, 902 bp, Artificial Sequence
  chemically treated genomic DNA (Homo sapiens) CpG-island No: 38029
gttcgcggtttcgtagtagttttaagaaggaattaagagatcgaggttttttcgttgttcggattcgatatcgttattttcgtttttcgtcggtagtcggtagttagcggtagtggatcgatttcgttttgcggtcgttgagtagtttttaatttcggttgatttttgtttttttgcgtttgtttttcgttttttttttttcggtttcggtttttagtttcggtattcgtttttttttttttacggaaaggtcgcggtttgtggttttgcgggtagtcgtgtcgagatgaattttagtgtttttagttattttatggtttcgttttacgtgggggatttttatttcgacgtgatcgaggcgatgttttacgagaagtttagttcggtcgggtttattttttttattcgggtttgtagggatatgattattcgtcgttttttgggttacgcgtatgtgaatttttagtagtcggcggacggtgagcgtcgggtttcgcggtcggtcgggcgggcgggcggttatgaggttcgggcggcggcggcgggcggggtaggtcggcgggttcggggaggggggcgggagggtatgttatttcgcgacggtcggcgggaaggcgtcggggtttttggagtcgcgtttttcgagtcggcggggattcgcgttgtcggtagttatacgttcggttatttttttttttgcgattattttttcggttttagacgtttttaaattttagggtgatgacgcgtcgggagggtgggtgagattcggttttttcgcggcgttttcgttagtggtttcgggattttggggcgttgaacgttgagtttttttcgtgggtaagaggtggaggcgtttttattattcggagtttttgtcggcgttttagtttggggaggaa

SEQ ID NO: 38030 - DNA, 902 bp, Artificial Sequence
  chemically treated genomic DNA (Homo sapiens) CpG-island No: 38030
ttcctccccaaactaaaacgccgacaaaaactccgaataataaaaacgcctccacctcttacccacgaaaaaaactcaacgttcaacgccccaaaatcccgaaaccactaacgaaaacgccgcgaaaaaaccgaatctcacccaccctcccgacgcgtcatcaccctaaaatttaaaaacgtctaaaaccgaaaaaataatcgcaaaaaaaaaaataaccgaacgtataactaccgacaacgcgaatccccgccgactcgaaaaacgcgactccaaaaaccccgacgccttcccgccgaccgtcgcgaaataacataccctcccgcccccctccccgaacccgccgacctaccccgcccgccgccgccgcccgaacctcataaccgcccgcccgcccgaccgaccgcgaaacccgacgctcaccgtccgccgactactaaaaattcacatacgcgtaacccaaaaaacgacgaataatcatatccctacaaacccgaataaaaaaaataaacccgaccgaactaaacttctcgtaaaacatcgcctcgatcacgtcgaaataaaaatcccccacgtaaaacgaaaccataaaataactaaaaacactaaaattcatctcgacacgactacccgcaaaaccacaaaccgcgacctttccgtaaaaaaaaaaaaacgaataccgaaactaaaaaccgaaaccgaaaaaaaaaaaacgaaaaacaaacgcaaaaaaacaaaaatcaaccgaaattaaaaactactcaacgaccgcaaaacgaaatcgatccactaccgctaactaccgactaccgacgaaaaacgaaaataacgatatcgaatccgaacaacgaaaaaacctcgatctcttaattccttcttaaaactactacgaaaccgcgaac

SEQ ID NO: 38031 - DNA, 902 bp, Artificial Sequence
  chemically treated genomic DNA (Homo sapiens) CpG-island No: 38031
tttttttttaggttggggcgtcggtaggagtttcgggtggtgggagcgtttttattttttatttacggaaggagtttagcgtttaacgttttagaatttcggggttattggcgggagcgtcgcggaggaatcgaattttatttattttttcggcgcgttattattttaaagtttgagagcgtttgaggtcgagaaaatggtcgtaaaggaggaagtagtcgggcgtgtggttgtcggtagcgcgggttttcgtcggttcgggaaacgcggttttagggatttcggcgttttttcgtcggtcgtcgcggggtgatatgttttttcgttttttttttcgggttcgtcggtttatttcgttcgtcgtcgtcgttcgagttttatggtcgttcgttcgttcggtcgatcgcggagttcggcgtttatcgttcgtcggttgttggaagtttatatacgcgtagtttaaggagcggcgggtgattatgtttttgtagattcggatggagaggatgggttcggtcgggttgaatttttcgtagagtatcgtttcggttacgtcggggtggaggttttttacgtagagcgaggttatggggtagttgggggtattggggtttatttcggtacggttgttcgtagggttataggtcgcgattttttcgtgagaggaggagagcgagtgtcggggttgggggtcggagtcggggggaggggagcggggagtaagcgtagagggataaaaattaatcggaattgaaaattatttaacggtcgtagaacggggtcgatttattgtcgttggttgtcggttgtcggcggggagcgagggtggcggtgtcgggttcgggtagcgggaaggtttcggttttttggtttttttttggagttgttgcggggtcgcgggt

SEQ ID NO: 38032 - DNA, 902 bp, Artificial Sequence
  chemically treated genomic DNA (Homo sapiens) CpG-island No: 38032
acccgcgaccccgcaacaactccaaaaaaaaaccaaaaaaccgaaaccttcccgctacccgaacccgacaccgccaccctcgctccccgccgacaaccgacaaccaacgacaataaatcgaccccgttctacgaccgttaaataattttcaattccgattaatttttatccctctacgcttactccccgctcccctccccccgactccgacccccaaccccgacactcgctctcctcctctcacgaaaaaatcgcgacctataaccctacgaacaaccgtaccgaaataaaccccaatacccccaactaccccataacctcgctctacgtaaaaaacctccaccccgacgtaaccgaaacgatactctacgaaaaattcaacccgaccgaacccatcctctccatccgaatctacaaaaacataatcacccgccgctccttaaactacgcgtatataaacttccaacaaccgacgaacgataaacgccgaactccgcgatcgaccgaacgaacgaacgaccataaaactcgaacgacgacgacgaacgaaataaaccgacgaacccgaaaaaaaaaacgaaaaaacatatcaccccgcgacgaccgacgaaaaaacgccgaaatccctaaaaccgcgtttcccgaaccgacgaaaacccgcgctaccgacaaccacacgcccgactacttcctcctttacgaccattttctcgacctcaaacgctctcaaactttaaaataataacgcgccgaaaaaataaataaaattcgattcctccgcgacgctcccgccaataaccccgaaattctaaaacgttaaacgctaaactccttccgtaaataaaaaataaaaacgctcccaccacccgaaactcctaccgacgccccaacctaaaaaaaaa

SEQ ID NO: 38033 - DNA, 561 bp, Artificial Sequence
  chemically treated genomic DNA (Homo sapiens) CpG-island No: 38033
attttacgcgtgcggtttgtagggacgcgtgtgggcgtggtgtagtatagttacgagggtatttttgaggttatttagttggacgacgaacgtatcgattttttgtcgagttttaaggaggttgttaagaatttcgagtggattgcgggcggtatttggatatttttagtttttaagtttgtttacgatcgttttattaaggagagtcggcgttagaagatacgtgtgtttgcggtggttattacggacgggcgttacgattttcgggacgatgattttaatttgcgggcgttgtgcgatcgcgacgttatagtgacggttatcggtatcggggatatgttttacgagaagtacgagagtgaaaatttttattttatcgtttgcgataagttatagtaggtgcgtaatatgacgttgtttttcgatttggtcgttgagaagtttatcgatgatatggaggacgttttttgttcgggtgagcgtgtgggcgcggggtagtcggtcgaggagtagtaggttttagtcgttgtttagcgtgagttttagggatattttttattt

SEQ ID NO: 38034 - DNA, 561 bp, Artificial Sequence
  chemically treated genomic DNA (Homo sapiens) CpG-island No: 38034
aaataaaaaatatccctaaaactcacgctaaacaacgactaaaacctactactcctcgaccgactaccccgcgcccacacgctcacccgaacaaaaaacgtcctccatatcatcgataaacttctcaacgaccaaatcgaaaaacaacgtcatattacgcacctactataacttatcgcaaacgataaaataaaaattttcactctcgtacttctcgtaaaacatatccccgataccgataaccgtcactataacgtcgcgatcgcacaacgcccgcaaattaaaatcatcgtcccgaaaatcgtaacgcccgtccgtaataaccaccgcaaacacacgtatcttctaacgccgactctccttaataaaacgatcgtaaacaaacttaaaaactaaaaatatccaaataccgcccgcaatccactcgaaattcttaacaacctccttaaaactcgacaaaaaatcgatacgttcgtcgtccaactaaataacctcaaaaataccctcgtaactatactacaccacgcccacacgcgtccctacaaaccgcacgcgtaaaat

SEQ ID NO: 38035 - DNA, 561 bp, Artificial Sequence
  chemically treated genomic DNA (Homo sapiens) CpG-island No: 38035
aggtgaggggtgtttttggggtttacgttagatagcggttggggtttgttgtttttcggtcgattgtttcgcgtttatacgtttattcgggtagaggacgttttttatgttatcgatgaattttttagcgattaggtcggagaatagcgttatgttgcgtatttgttgtggtttgtcgtaggcgatggagtagaggtttttattttcgtgtttttcgtggaatatgttttcgatgtcgatggtcgttattgtgacgtcgcggtcgtatagcgttcgtaagttgaggttatcgtttcgagggtcgtggcgttcgttcgtgatgattatcgtaaatatacgtgttttttggcgtcggttttttttgatgaggcggtcgtaggtaaatttgagggttgagggtgtttaggtgtcgttcgtaatttattcgaggtttttgatagtttttttgaagttcgatagggagtcgatacgttcgtcgtttagttggatggttttaaaggtgttttcgtggttgtattgtattacgtttatacgcgtttttgtaagtcgtacgcgtgaggt

SEQ ID NO: 38036 - DNA, 561 bp, Artificial Sequence
  chemically treated genomic DNA (Homo sapiens) CpG-island No: 38036
acctcacgcgtacgacttacaaaaacgcgtataaacgtaatacaatacaaccacgaaaacacctttaaaaccatccaactaaacgacgaacgtatcgactccctatcgaacttcaaaaaaactatcaaaaacctcgaataaattacgaacgacacctaaacaccctcaaccctcaaatttacctacgaccgcctcatcaaaaaaaaccgacgccaaaaaacacgtatatttacgataatcatcacgaacgaacgccacgaccctcgaaacgataacctcaacttacgaacgctatacgaccgcgacgtcacaataacgaccatcgacatcgaaaacatattccacgaaaaacacgaaaataaaaacctctactccatcgcctacgacaaaccacaacaaatacgcaacataacgctattctccgacctaatcgctaaaaaattcatcgataacataaaaaacgtcctctacccgaataaacgtataaacgcgaaacaatcgaccgaaaaacaacaaaccccaaccgctatctaacgtaaaccccaaaaacacccctcacct

SEQ ID NO: 38037 - DNA, 505 bp, Artificial Sequence
  chemically treated genomic DNA (Homo sapiens) CpG-island No: 38037
ttttttttcgtacgtgggcgtaggcgtggtgtacgttattaatgttatcgtgcgtagttcgcgtggcggggttcggaggtacgtagagttgtttttcgtgttttttacggacggcgttacgggtaacgatagtttgtacgagtcggcgtattttatgcgtaagtagaacgtggtatttatcgtgttggttttgggtagcgacgtggatatggacgtgtttattacgtttagtttgggtgatcgcgtcgtcgtgttttacgagaaggattatgatagtttggcgtaattcggttttttcgatcgttttattcgttggatttgttagttcgtcgttcgggtttcgtagtcgagggtcgtgagtttatttcgtttatggtgttaagcgggttcgggttttatacggttagtatcgttgtttattcggacgacgttttgggtttgtatttttttagttttttttacggggttttcgtagtttcggttttcgtttagttttaggtttttt

SEQ ID NO: 38038 - DNA, 505 bp, Artificial Sequence
  chemically treated genomic DNA (Homo sapiens) CpG-island No: 38038
aaaaaacctaaaactaaacgaaaaccgaaactacgaaaaccccgtaaaaaaaactaaaaaaatacaaacccaaaacgtcgtccgaataaacaacgatactaaccgtataaaacccgaacccgcttaacaccataaacgaaataaactcacgaccctcgactacgaaacccgaacgacgaactaacaaatccaacgaataaaacgatcgaaaaaaccgaattacgccaaactatcataatccttctcgtaaaacacgacgacgcgatcacccaaactaaacgtaataaacacgtccatatccacgtcgctacccaaaaccaacacgataaataccacgttctacttacgcataaaatacgccgactcgtacaaactatcgttacccgtaacgccgtccgtaaaaaacacgaaaaacaactctacgtacctccgaaccccgccacgcgaactacgcacgataacattaataacgtacaccacgcctacgcccacgtacgaaaaaaaa

SEQ ID NO: 38039 - DNA, 505 bp, Artificial Sequence
  chemically treated genomic DNA (Homo sapiens) CpG-island No: 38039
gggagatttggggttgggcgggggtcggggttacggggatttcgtgggaggagttggagaggtgtaggtttagggcgtcgttcgagtgagtagcggtgttggtcgtgtgggattcgggttcgtttagtattatggacggggtgggtttacgattttcgattgcggggttcgggcggcgggttagtagatttagcggatgaagcggtcgaagaagtcgggttgcgttaggttgttatagtttttttcgtggaatacggcggcgcggttatttaggttgagcgtggtgagtacgtttatgtttacgtcgttgtttaaggttagtacggtgggtattacgttttgtttgcgtatggagtgcgtcgattcgtgtagattgtcgttgttcgtgacgtcgttcgtgaggaatacgaaggatagttttgcgtgttttcgggtttcgttacgcgggttgcgtacgatggtattgatggcgtgtattacgtttgcgtttacgtgcgagaaggag

SEQ ID NO: 38040 - DNA, 505 bp, Artificial Sequence
  chemically treated genomic DNA (Homo sapiens) CpG-island No: 38040
ctccttctcgcacgtaaacgcaaacgtaatacacgccatcaataccatcgtacgcaacccgcgtaacgaaacccgaaaacacgcaaaactatccttcgtattcctcacgaacgacgtcacgaacaacgacaatctacacgaatcgacgcactccatacgcaaacaaaacgtaatacccaccgtactaaccttaaacaacgacgtaaacataaacgtactcaccacgctcaacctaaataaccgcgccgccgtattccacgaaaaaaactataacaacctaacgcaacccgacttcttcgaccgcttcatccgctaaatctactaacccgccgcccgaaccccgcaatcgaaaatcgtaaacccaccccgtccataatactaaacgaacccgaatcccacacgaccaacaccgctactcactcgaacgacgccctaaacctacacctctccaactcctcccacgaaatccccgtaaccccgacccccgcccaaccccaaatctccc

SEQ ID NO: 38041 - DNA, 1001 bp, Artificial Sequence
  chemically treated genomic DNA (Homo sapiens) CpG-island No: 38041
ggtagttagaatcgcggtagaaagggcgcgagcggggaattgcgggaacgtagcggttcgggaagttggagggggcggattcggtcggcgagcgtaggcgttttttggtttacgcgcgtatttcggttttattatttatttttacgtcgcggttcgtttttcggggcgggtaagagagcgcgcgagtagcggtcgttaggatacgttttttcgttttcgcgagttggcgggcgggttggtatcgtcgggaggcggggtcgcggtagtcggttgggtgcgattgggcggtttcggagttcgtagacgttcgggggaatatggcggttgcggagtcggcggtttttgcgttttttaatagcggcgtcgggggcgcgggggcgtcgtcgggtatagtttcggtgtttttttgttttttagttttcgcgcgattttcgtcggtgttatacggggcgggttacgagttgtttatttagaagttttttagtttgtacggcgattagatcgatatgtatcgtaaattcgtggtgtagttgttcgtcgaggagtggggttagtacgtggatttgtttaagggtttcgcggtgagcgagcgttgtaaggtgcgtttcgtgtcgttgtagatttaggtgggttttgcgggaggtcgcgcgtttttttgttttcgagtcgttttcgttttcgtttttgttttcgttttcgtcgcgttttttaggtgtttcgagtcgttcgggattcgggttttgcgcgagtggttgagttcgaagggttgcgcgtttttcgtaagtttcggggtcggttggggaatgtttttgtttaaaggtgatggttattagttgttttcggcgggggcgtgggtttcgtagttggttttagcgttcgcgaacgtttttacgtgtgtggttttcggtcgttcgtattcgttttttatgttaggattaggttttagttttttgcgtaattaaagggttgtgttgtagtagttgtttttattttggggtgat

SEQ ID NO: 38042 - DNA, 1001 bp, Artificial Sequence
  chemically treated genomic DNA (Homo sapiens) CpG-island No: 38042
atcaccccaaaataaaaacaactactacaacacaaccctttaattacgcaaaaaactaaaacctaatcctaacataaaaaacgaatacgaacgaccgaaaaccacacacgtaaaaacgttcgcgaacgctaaaaccaactacgaaacccacgcccccgccgaaaacaactaataaccatcacctttaaacaaaaacattccccaaccgaccccgaaacttacgaaaaacgcgcaacccttcgaactcaaccactcgcgcaaaacccgaatcccgaacgactcgaaacacctaaaaaacgcgacgaaaacgaaaacaaaaacgaaaacgaaaacgactcgaaaacaaaaaaacgcgcgacctcccgcaaaacccacctaaatctacaacgacacgaaacgcaccttacaacgctcgctcaccgcgaaacccttaaacaaatccacgtactaaccccactcctcgacgaacaactacaccacgaatttacgatacatatcgatctaatcgccgtacaaactaaaaaacttctaaataaacaactcgtaacccgccccgtataacaccgacgaaaatcgcgcgaaaactaaaaaacaaaaaaacaccgaaactatacccgacgacgcccccgcgcccccgacgccgctattaaaaaacgcaaaaaccgccgactccgcaaccgccatattcccccgaacgtctacgaactccgaaaccgcccaatcgcacccaaccgactaccgcgaccccgcctcccgacgataccaacccgcccgccaactcgcgaaaacgaaaaaacgtatcctaacgaccgctactcgcgcgctctcttacccgccccgaaaaacgaaccgcgacgtaaaaataaataataaaaccgaaatacgcgcgtaaaccaaaaaacgcctacgctcgccgaccgaatccgccccctccaacttcccgaaccgctacgttcccgcaattccccgctcgcgccctttctaccgcgattctaactacc

SEQ ID NO: 38043 - DNA, 1001 bp, Artificial Sequence
  chemically treated genomic DNA (Homo sapiens) CpG-island No: 38043
attattttaaaataaaaatagttattatagtatagttttttggttacgtaggaggttgggatttgattttggtataaaaagcggatgcgggcgatcgaggattatatacgtgggggcgttcgcgggcgttgaaattagttacgaggtttacgttttcgtcggggatagttggtgattattatttttggataggggtattttttagtcggtttcggaatttgcgaaagacgcgtagtttttcggatttagttattcgcgtagggttcgggtttcgggcggttcggggtatttgaggagcgcggcgaaggcggggatagggacggggacggggacgattcgggaatagggaagcgcgcggtttttcgtaggatttatttggatttgtaacggtacgaggcgtattttgtagcgttcgtttatcgcgaagtttttgggtaagtttacgtattggttttatttttcggcgaatagttgtattacgaatttgcggtgtatgtcgatttggtcgtcgtataggttgaggaatttttggatgagtagttcgtagttcgtttcgtgtggtatcgacgagggtcgcgcgaagattgagaaatagaagagtatcgggattgtgttcgacggcgttttcgcgttttcggcgtcgttgttggggagcgtaaggatcgtcggtttcgtagtcgttatgttttttcgagcgtttgcgagtttcgaggtcgtttagtcgtatttagtcggttgtcgcggtttcgtttttcggcgatgttagttcgttcgttagttcgcggaggcgaaggggcgtgttttgacgatcgttgttcgcgcgtttttttattcgtttcggagggcgggtcgcggcgtaagggtgggtggtggggtcggggtgcgcgcgtgagttagggagcgtttgcgttcgtcggtcgggttcgttttttttagtttttcgggtcgttgcgttttcgtagtttttcgttcgcgttttttttgtcgcggttttgattgtt

SEQ ID NO: 38044 - DNA, 1001 bp, Artificial Sequence
  chemically treated genomic DNA (Homo sapiens) CpG-island No: 38044
aacaatcaaaaccgcgacaaaaaaaacgcgaacgaaaaactacgaaaacgcaacgacccgaaaaactaaaaaaaacgaacccgaccgacgaacgcaaacgctccctaactcacgcgcgcaccccgaccccaccacccacccttacgccgcgacccgccctccgaaacgaataaaaaaacgcgcgaacaacgatcgtcaaaacacgccccttcgcctccgcgaactaacgaacgaactaacatcgccgaaaaacgaaaccgcgacaaccgactaaatacgactaaacgacctcgaaactcgcaaacgctcgaaaaaacataacgactacgaaaccgacgatccttacgctccccaacaacgacgccgaaaacgcgaaaacgccgtcgaacacaatcccgatactcttctatttctcaatcttcgcgcgaccctcgtcgataccacacgaaacgaactacgaactactcatccaaaaattcctcaacctatacgacgaccaaatcgacatacaccgcaaattcgtaatacaactattcgccgaaaaataaaaccaatacgtaaacttacccaaaaacttcgcgataaacgaacgctacaaaatacgcctcgtaccgttacaaatccaaataaatcctacgaaaaaccgcgcgcttccctattcccgaatcgtccccgtccccgtccctatccccgccttcgccgcgctcctcaaataccccgaaccgcccgaaacccgaaccctacgcgaataactaaatccgaaaaactacgcgtctttcgcaaattccgaaaccgactaaaaaatacccctatccaaaaataataatcaccaactatccccgacgaaaacgtaaacctcgtaactaatttcaacgcccgcgaacgcccccacgtatataatcctcgatcgcccgcatccgctttttataccaaaatcaaatcccaacctcctacgtaaccaaaaaactatactataataactatttttattttaaaataat

SEQ ID NO: 38045 - DNA, 503 bp, Artificial Sequence
  chemically treated genomic DNA (Homo sapiens) CpG-island No: 38045
agggggcggcgaggttttaatttttgcgttcggcgcgacgcgtgtgtggaggagtgttaattaagtaatgagtggaaggcggggttttttagagggggtcggaggcgggggtgcgtgtcgcgtaggaagttgtgcgtgcgtttaaggttttcgcggagtttaggtggtcgaatttgtgggtgggtttttaggtttcgttgtcgaagttgtggtgtggttaattaacgtgtgcggttttatatattaatttgtgttgtatttaggtagtgtcgtgcgcgtttaaatttttcggggtgcgtacgtggttgtggagaaaagttgttgtaggagatagtggttattgtggttgtggggagcgtttgttagttcgtcgtggggttgcgtagtgcgtagtttcgtgtaacgtgtcgtagtagggggattgttgtggtgttagggtcgtgtatttggtcgcgttgtaggtaatttgagtgttgtcgaagtaggttatagtggttatgtga

SEQ ID NO: 38046 - DNA, 503 bp, Artificial Sequence
  chemically treated genomic DNA (Homo sapiens) CpG-island No: 38046
tcacataaccactataacctacttcgacaacactcaaattacctacaacgcgaccaaatacacgaccctaacaccacaacaatccccctactacgacacgttacacgaaactacgcactacgcaaccccacgacgaactaacaaacgctccccacaaccacaataaccactatctcctacaacaacttttctccacaaccacgtacgcaccccgaaaaatttaaacgcgcacgacactacctaaatacaacacaaattaatatataaaaccgcacacgttaattaaccacaccacaacttcgacaacgaaacctaaaaacccacccacaaattcgaccacctaaactccgcgaaaaccttaaacgcacgcacaacttcctacgcgacacgcacccccgcctccgaccccctctaaaaaaccccgccttccactcattacttaattaacactcctccacacacgcgtcgcgccgaacgcaaaaattaaaacctcgccgccccct

SEQ ID NO: 38047 - DNA, 503 bp, Artificial Sequence
  chemically treated genomic DNA (Homo sapiens) CpG-island No: 38047
ttatatggttattatagtttatttcgatagtatttaggttatttgtaacgcggttaagtgtacggttttggtattatagtaatttttttattacggtacgttatacgggattacgtattacgtaattttacggcgaattaataagcgttttttataattatagtggttattgttttttgtagtaatttttttttatagttacgtgcgtatttcgggggatttgggcgcgtacggtattatttggatgtaatataaattagtgtgtagaatcgtatacgttagttggttatattatagtttcggtaacgaggtttaaaagtttatttataggttcggttatttgggtttcgcgggaattttaaacgtacgtataattttttacgcggtacgtattttcgttttcggttttttttggggaatttcgttttttatttattatttggttaatatttttttatatacgcgtcgcgtcgaacgtaagagttgggatttcgtcgtttttt

SEQ ID NO: 38048 - DNA, 503 bp, Artificial Sequence
  chemically treated genomic DNA (Homo sapiens) CpG-island No: 38048
aaaaaacgacgaaatcccaactcttacgttcgacgcgacgcgtatataaaaaaatattaaccaaataataaataaaaaacgaaattccccaaaaaaaaccgaaaacgaaaatacgtaccgcgtaaaaaattatacgtacgtttaaaattcccgcgaaacccaaataaccgaacctataaataaacttttaaacctcgttaccgaaactataatataaccaactaacgtatacgattctacacactaatttatattacatccaaataataccgtacgcgcccaaatcccccgaaatacgcacgtaactataaaaaaaaattactacaaaaaacaataaccactataattataaaaaacgcttattaattcgccgtaaaattacgtaatacgtaatcccgtataacgtaccgtaataaaaaaattactataataccaaaaccgtacacttaaccgcgttacaaataacctaaatactatcgaaataaactataataaccatataa

SEQ ID NO: 38049 - DNA, 522 bp, Artificial Sequence
  chemically treated genomic DNA (Homo sapiens) CpG-island No: 38049
gttttcgcgtgttgtttcgggtttttttgcgcgtcgggtttcggtttttttttttgtgtcgttgaagaataatcggaagtatagggcgatttggaatattaagaattttcgtcggtggtatgtgggaatagcggaagtttatacgtgcgtttttaaagggtttttttgcgtcgttttttcggggggaatatggaataatttcgggtcgggtttgtttaaaatcgtaagaacgtttcggtttgtgggggaattgtttcgtaagcggtgtaaaaataaggtatcgcggggaaattggggtttttcgaggggggatacgtttataaggaatttatatagcgggtatttcggtttttaagggggcgtacggaacggtttttaagggttcgaggtttttagtttttggtagaatagcggtgattggtttatcgggcgagtttttagggattttttaagattttgtagtcgacgagtggttaagtattaacgtacgattaacgaatattttgttatagtttttgaaat

SEQ ID NO: 38050 - DNA, 522 bp, Artificial Sequence
  chemically treated genomic DNA (Homo sapiens) CpG-island No: 38050
atttcaaaaactataacaaaatattcgttaatcgtacgttaatacttaaccactcgtcgactacaaaatcttaaaaaatccctaaaaactcgcccgataaaccaatcaccgctattctaccaaaaactaaaaacctcgaacccttaaaaaccgttccgtacgcccccttaaaaaccgaaatacccgctatataaattccttataaacgtatcccccctcgaaaaaccccaatttccccgcgataccttatttttacaccgcttacgaaacaattcccccacaaaccgaaacgttcttacgattttaaacaaacccgacccgaaattattccatattccccccgaaaaaacgacgcaaaaaaaccctttaaaaacgcacgtataaacttccgctattcccacataccaccgacgaaaattcttaatattccaaatcgccctatacttccgattattcttcaacgacacaaaaaaaaaaaccgaaacccgacgcgcaaaaaaacccgaaacaacacgcgaaaac

SEQ ID NO: 38051 - DNA, 522 bp, Artificial Sequence
  chemically treated genomic DNA (Homo sapiens) CpG-island No: 38051
attttaaaggttgtaataagatattcgttggtcgtacgttggtatttggttattcgtcgattatagggttttagaaggtttttaggagttcgttcggtgaattaattatcgttgttttgttaagagttaaaagtttcgggtttttggaaatcgtttcgtgcgtttttttggaaatcggggtgttcgttatgtgagttttttatgggcgtgttttttttcggggggttttagttttttcgcggtgttttatttttatatcgtttacggggtaatttttttataaatcggggcgtttttgcggttttgggtaaattcggttcggggttattttatatttttttcggggaggcggcgtaaaggggttttttaggggcgtacgtgtaggttttcgttgtttttatatgttatcggcgggggtttttaatattttaaatcgttttgtgttttcgattgttttttaacggtataggaagagaaatcggggttcgacgcgtaagagaattcggaataatacgcgggggt

SEQ ID NO: 38052 - DNA, 522 bp, Artificial Sequence
  chemically treated genomic DNA (Homo sapiens) CpG-island No: 38052
acccccgcgtattattccgaattctcttacgcgtcgaaccccgatttctcttcctataccgttaaaaaacaatcgaaaacacaaaacgatttaaaatattaaaaacccccgccgataacatataaaaacaacgaaaacctacacgtacgcccctaaaaaacccctttacgccgcctccccgaaaaaaatataaaataaccccgaaccgaatttacccaaaaccgcaaaaacgccccgatttataaaaaaattaccccgtaaacgatataaaaataaaacaccgcgaaaaaactaaaaccccccgaaaaaaaacacgcccataaaaaactcacataacgaacaccccgatttccaaaaaaacgcacgaaacgatttccaaaaacccgaaacttttaactcttaacaaaacaacgataattaattcaccgaacgaactcctaaaaaccttctaaaaccctataatcgacgaataaccaaataccaacgtacgaccaacgaatatcttattacaacctttaaaat

SEQ ID NO: 38053 - DNA, 660 bp, Artificial Sequence
  chemically treated genomic DNA (Homo sapiens) CpG-island No: 38053
tcggtggatgaaatcgacgaacggtttttacgttttgattggagcgtcgtataaaggatttcgttggttgtcgcgatgatcgaaataggtgttgggatttcgtcgatgtgtttgttcgtatatcgtcgttttttttttggtagtcgtgacgaggtagtgcgcgaacgggcgcgggttattatgagtaaagcgattcgtttggcgcgcgatttcggtattcgtattatttagttggtaggttatgacgtttattacgaagattacgacgaaggttattcggtaacgtttgttgaagggttggcgtggtagtcgtataggcgttggtattataagtaatgttggcggtggagattatggatatcgcgtttatgaattttattagtaaatggatagaatggtacgagatgttcgttttatcgtggtttatcgtttattcggacgtcggtaattttagcgtttggggtaatgatgttttcgtcgaattgaaattgggtattgatcgtatcgtcgcgatttatttgaaagatatttagttagttatcgggtaaagtttcggatagtttcgcgacgtgtcgtttggcgaaggttgcgtcgatttcgttgtatttttaaaacgttgtataaattgaattatcgcgtttttttttgattgagatgtgg

SEQ ID NO: 38054 - DNA, 660 bp, Artificial Sequence
  chemically treated genomic DNA (Homo sapiens) CpG-island No: 38054
ccacatctcaatcaaaaaaaaacgcgataattcaatttatacaacgttttaaaaatacaacgaaatcgacgcaaccttcgccaaacgacacgtcgcgaaactatccgaaactttacccgataactaactaaatatctttcaaataaatcgcgacgatacgatcaatacccaatttcaattcgacgaaaacatcattaccccaaacgctaaaattaccgacgtccgaataaacgataaaccacgataaaacgaacatctcgtaccattctatccatttactaataaaattcataaacgcgatatccataatctccaccgccaacattacttataataccaacgcctatacgactaccacgccaacccttcaacaaacgttaccgaataaccttcgtcgtaatcttcgtaataaacgtcataacctaccaactaaataatacgaataccgaaatcgcgcgccaaacgaatcgctttactcataataacccgcgcccgttcgcgcactacctcgtcacgactaccaaaaaaaaaacgacgatatacgaacaaacacatcgacgaaatcccaacacctatttcgatcatcgcgacaaccaacgaaatcctttatacgacgctccaatcaaaacgtaaaaaccgttcgtcgatttcatccaccga

SEQ ID NO: 38055 - DNA, 660 bp, Artificial Sequence
  chemically treated genomic DNA (Homo sapiens) CpG-island No: 38055
ttatattttaattaggaaagaacgcgatagtttagtttatgtagcgttttgaagatgtaacgaaatcgacgtagttttcgttaaacggtacgtcgcggaattgttcgggattttgttcggtgattggttgggtgttttttaggtggatcgcggcgatacggttaatgtttagttttagttcggcgggaatattattgttttaggcgttgaggttgtcgacgttcgggtagacggtgaattacggtgaggcgagtatttcgtgttattttgtttatttgttgatggagtttataaacgcggtatttataatttttatcgttagtattatttgtgatgttagcgtttgtgcgattgttacgttagttttttagtaaacgttgtcgggtagttttcgtcgtggttttcgtaatagacgttataatttgttagttggatggtgcgaatgtcgagatcgcgcgttaggcgaatcgttttatttatgatggttcgcgttcgttcgcgtattgtttcgttacggttattaaagggaaagcgacgatgtgcggataggtatatcgacgggattttaatatttgtttcgattatcgcggtaattagcgaagttttttgtgcggcgttttagttaagacgtgagagtcgttcgtcggttttatttatcga

SEQ ID NO: 38056 - DNA, 660 bp, Artificial Sequence
  chemically treated genomic DNA (Homo sapiens) CpG-island No: 38056
tcgataaataaaaccgacgaacgactctcacgtcttaactaaaacgccgcacaaaaaacttcgctaattaccgcgataatcgaaacaaatattaaaatcccgtcgatatacctatccgcacatcgtcgctttccctttaataaccgtaacgaaacaatacgcgaacgaacgcgaaccatcataaataaaacgattcgcctaacgcgcgatctcgacattcgcaccatccaactaacaaattataacgtctattacgaaaaccacgacgaaaactacccgacaacgtttactaaaaaactaacgtaacaatcgcacaaacgctaacatcacaaataatactaacgataaaaattataaataccgcgtttataaactccatcaacaaataaacaaaataacacgaaatactcgcctcaccgtaattcaccgtctacccgaacgtcgacaacctcaacgcctaaaacaataatattcccgccgaactaaaactaaacattaaccgtatcgccgcgatccacctaaaaaacacccaaccaatcaccgaacaaaatcccgaacaattccgcgacgtaccgtttaacgaaaactacgtcgatttcgttacatcttcaaaacgctacataaactaaactatcgcgttctttcctaattaaaatataa

SEQ ID NO: 38057 - DNA, 630 bp, Artificial Sequence
  chemically treated genomic DNA (Homo sapiens) CpG-island No: 38057
tgtgtttgattagtatggtagtatttaattggcgggtaagcgtattgagggatcgggagtagagcgtggcgtagttttttagaatgaagggttattatcgtggcgtaatgtataggataacgtggcgttcggtttgtaattggtaggtataaggaggaaaaattgttaggcggattggaaatcgcgtattaatgttgaaaaagtgggtggaaggcgtagaaaacgttatatttggtagtttttcggtggttaacgttagcgggtggggattgttcgtgcgttggcggcgaatttttagttgttattattcgacgaatcgtttggtgcgttggacgtttttattcgcgattagatgtaaattttgttgttgaaattttggtaggagacgggtaagtaggtgttgttgattatttacgatatagaagaagcggtgtttatggcgattgaattggttttgtttttattcggttttggtcgtgtgttggagcggttgtcgtttaattttgttcgtcgttttgttgcgggagagtcgagtcgtagtattaagttcgatttataatttatcgttatgcgcgaatatgttttaagtcgcgtatttgagtaacgggaggcgtttttatgagtgtgttt

SEQ ID NO: 38058 - DNA, 630 bp, Artificial Sequence
  chemically treated genomic DNA (Homo sapiens) CpG-island No: 38058
aaacacactcataaaaacgcctcccgttactcaaatacgcgacttaaaacatattcgcgcataacgataaattataaatcgaacttaatactacgactcgactctcccgcaacaaaacgacgaacaaaattaaacgacaaccgctccaacacacgaccaaaaccgaataaaaacaaaaccaattcaatcgccataaacaccgcttcttctatatcgtaaataatcaacaacacctacttacccgtctcctaccaaaatttcaacaacaaaatttacatctaatcgcgaataaaaacgtccaacgcaccaaacgattcgtcgaataataacaactaaaaattcgccgccaacgcacgaacaatccccacccgctaacgttaaccaccgaaaaactaccaaatataacgttttctacgccttccacccactttttcaacattaatacgcgatttccaatccgcctaacaatttttcctccttatacctaccaattacaaaccgaacgccacgttatcctatacattacgccacgataataacccttcattctaaaaaactacgccacgctctactcccgatccctcaatacgcttacccgccaattaaatactaccatactaatcaaacaca

SEQ ID NO: 38059 - DNA, 630 bp, Artificial Sequence
  chemically treated genomic DNA (Homo sapiens) CpG-island No: 38059
gagtatatttatgagaacgtttttcgttgtttaaatacgcggtttaaaatatattcgcgtatggcgatgaattgtggatcggatttgatgttgcggttcgattttttcgtaataaagcggcgagtaaagttgagcggtagtcgttttagtatacggttagggtcggatgaaagtagaattagtttagtcgttataaatatcgttttttttatatcgtgggtaattaatagtatttgtttgttcgttttttgttagagttttagtagtagggtttgtatttggtcgcgggtgaaggcgtttagcgtattaaacggttcgtcgagtaataatagttggggattcgtcgttagcgtacgagtaatttttattcgttgacgttgattatcggaaagttgttagatgtagcgttttttgcgttttttatttatttttttagtattggtgcgcgatttttagttcgtttggtaattttttttttttatatttgttaattgtaggtcgaacgttacgttgttttgtatattgcgttacggtagtagttttttattttgaaaaattacgttacgttttgttttcggttttttaatacgtttattcgttagttgaatgttgttatgttgattaggtata

SEQ ID NO: 38060 - DNA, 630 bp, Artificial Sequence
  chemically treated genomic DNA (Homo sapiens) CpG-island No: 38060
tatacctaatcaacataacaacattcaactaacgaataaacgtattaaaaaaccgaaaacaaaacgtaacgtaatttttcaaaataaaaaactactaccgtaacgcaatatacaaaacaacgtaacgttcgacctacaattaacaaatataaaaaaaaaaaattaccaaacgaactaaaaatcgcgcaccaatactaaaaaaataaataaaaaacgcaaaaaacgctacatctaacaactttccgataatcaacgtcaacgaataaaaattactcgtacgctaacgacgaatccccaactattattactcgacgaaccgtttaatacgctaaacgccttcacccgcgaccaaatacaaaccctactactaaaactctaacaaaaaacgaacaaacaaatactattaattacccacgatataaaaaaaacgatatttataacgactaaactaattctactttcatccgaccctaaccgtatactaaaacgactaccgctcaactttactcgccgctttattacgaaaaaatcgaaccgcaacatcaaatccgatccacaattcatcgccatacgcgaatatattttaaaccgcgtatttaaacaacgaaaaacgttctcataaatatactc

SEQ ID NO: 38061 - DNA, 1313 bp, Artificial Sequence
  chemically treated genomic DNA (Homo sapiens) CpG-island No: 38061
ttttttcgttttttcgggattatttttttttttttttatgttatcgtcgtcgttagtttattagtcgggttttttcgttttgatcgtcgttggatttaattaggttttgacggtttgttttttttggatagcggtgtcgattttttttagttcggcgtcgaagagcgtaaagttattgttcgttttgttatcgattatgtcgatcgtcgcgtttcggtgttgatcggtatcggcggtattaacgttcgggaaattatcgaatttagttagtacgcgtagtaggcgggcgcggacggtatcgtggtgattaatttttattattggaaagtgtcggaagcgaatttgattcgttatttcgagtaggtggtcgatagcgttacgttgtcggtgatgttttataatttttcggcgttgatcgggtaggatttgatttcggcgttggtgaaaattttcgtcgattcgcgtagtaatattatcggtattaaagatattatcgatttcgtcgtttatttgcgtagtatgatttatatcgttaaaggtgtttattcgtattttatcgtgttttgcggttacgacgattatttgtttaatattttgttgttcggcggcgacggggcgatatcggcgagcggtaattttgtttcgtaggtgtcggtgaattttttgaaagtttggcgcgacggggacgtggcgaaagcggtcgggtattattagattttgttgtaaatttcgtagatgtattagttggatacgtcgtttgtgaacgtgattaaagaggcgatcgtgttttgcggtcgttttgtttttacgtacgtgttgtcgttcgtttcgtcgttggacgagtcgcgtaaggcgtagttgaaaattttgttgtaatagtttaagttttgttgagtcggacgataacgatgattattgagaaaatttttatttcgtaggacgacgcgttttatgcggtgattatttacgcggcggggtcgtagggcgttttgtcgttgatttcgtagatgttgatggaattttttagcggtaatttgttcggtatgacgtagaacgtcgggatgggttgggacgttaataagtttatcggtaaagaggtgttgattatcggtatttagggcggtattcgcgtcggagacggacgtttaatcgcgttgggttattatatcgggtattgggagatcggtatgtagatgtaggcggcggcgaaggagattattcgtaatggcgggatttcgttcgcggttttcgttagcgattcgtgcgacgggcgttcgtagggtacgtacgggatgttcgattttttgtcgtat

SEQ ID NO: 38062 - DNA, 1313 bp, Artificial Sequence
  chemically treated genomic DNA (Homo sapiens) CpG-island No: 38062
atacgacaaaaaatcgaacatcccgtacgtaccctacgaacgcccgtcgcacgaatcgctaacgaaaaccgcgaacgaaatcccgccattacgaataatctccttcgccgccgcctacatctacataccgatctcccaatacccgatataataacccaacgcgattaaacgtccgtctccgacgcgaataccgccctaaataccgataatcaacacctctttaccgataaacttattaacgtcccaacccatcccgacgttctacgtcataccgaacaaattaccgctaaaaaattccatcaacatctacgaaatcaacgacaaaacgccctacgaccccgccgcgtaaataatcaccgcataaaacgcgtcgtcctacgaaataaaaattttctcaataatcatcgttatcgtccgactcaacaaaacttaaactattacaacaaaattttcaactacgccttacgcgactcgtccaacgacgaaacgaacgacaacacgtacgtaaaaacaaaacgaccgcaaaacacgatcgcctctttaatcacgttcacaaacgacgtatccaactaatacatctacgaaatttacaacaaaatctaataatacccgaccgctttcgccacgtccccgtcgcgccaaactttcaaaaaattcaccgacacctacgaaacaaaattaccgctcgccgatatcgccccgtcgccgccgaacaacaaaatattaaacaaataatcgtcgtaaccgcaaaacacgataaaatacgaataaacacctttaacgatataaatcatactacgcaaataaacgacgaaatcgataatatctttaataccgataatattactacgcgaatcgacgaaaattttcaccaacgccgaaatcaaatcctacccgatcaacgccgaaaaattataaaacatcaccgacaacgtaacgctatcgaccacctactcgaaataacgaatcaaattcgcttccgacactttccaataataaaaattaatcaccacgataccgtccgcgcccgcctactacgcgtactaactaaattcgataatttcccgaacgttaataccgccgataccgatcaacaccgaaacgcgacgatcgacataatcgataacaaaacgaacaataactttacgctcttcgacgccgaactaaaaaaaatcgacaccgctatccaaaaaaaacaaaccgtcaaaacctaattaaatccaacgacgatcaaaacgaaaaaacccgactaataaactaacgacgacgataacataaaaaaaaaaaaaaataatcccgaaaaaacgaaaaaa

SEQ ID NO: 38063 - DNA, 1313 bp, Artificial Sequence
  chemically treated genomic DNA (Homo sapiens) CpG-island No: 38063
gtacggtagggaatcgaatatttcgtgcgtgttttgcgagcgttcgtcgtacggatcgttgacgaaggtcgcgaacgggatttcgttattgcgggtgatttttttcgtcgtcgtttgtatttgtatgtcgattttttaatgttcggtgtggtagtttagcgcgattgggcgttcgttttcggcgcggatgtcgttttgagtgtcgataattagtatttttttgtcggtgagtttgttggcgttttagtttatttcggcgttttgcgttatgtcgaataggttgtcgttgggagattttattagtatttgcggggttagcggtagagcgttttgcggtttcgtcgcgtgggtgattatcgtataaaacgcgtcgttttgcggggtgaaaatttttttaatggttatcgttatcgttcggtttagtaaagtttgagttgttgtagtagggtttttagttgcgttttgcgcggttcgtttagcggcgaggcgggcggtagtacgtgcgtggagataggacgatcgtagagtacgatcgtttttttaattacgtttataaacggcgtatttagttgatatatttgcggaatttgtagtaaggtttgatgatattcggtcgttttcgttacgttttcgtcgcgttaggtttttagaagatttatcgatatttgcggggtaaagttgtcgttcgtcgatatcgtttcgtcgtcgtcgagtagtagggtattgaatagatgatcgtcgtagtcgtagagtacggtgaagtgcggatgggtatttttgacggtatggattatgttgcgtaggtgggcgacggagtcgatggtgtttttgatgtcgataatattgttgcgcgagtcggcgagggtttttattagcgtcggagttagattttgttcggttagcgtcgggaagttatagagtattatcggtagcgtgacgttgtcggttatttgttcgaaatagcggattaggttcgttttcgatattttttagtagtaggggttgattattacgatgtcgttcgcgttcgtttgttgcgcgtgttggttgagttcgatggtttttcgggcgttggtgtcgtcggtgtcgattagtatcgggacgcgacgatcgatatgatcgatagtaaagcgggtaatggttttacgtttttcggcgtcgagttgggagaaatcggtatcgttgtttaggaagaataggtcgttaaagtttggttgagtttaacggcgattagggcgagggggttcggttaataagttggcggcggcggtaatatggggggaagggggaataatttcggaaaagcggagagg

SEQ ID NO: 38064 - DNA, 1313 bp, Artificial Sequence
  chemically treated genomic DNA (Homo sapiens) CpG-island No: 38064
cctctccgcttttccgaaattattcccccttccccccatattaccgccgccgccaacttattaaccgaaccccctcgccctaatcgccgttaaactcaaccaaactttaacgacctattcttcctaaacaacgataccgatttctcccaactcgacgccgaaaaacgtaaaaccattacccgctttactatcgatcatatcgatcgtcgcgtcccgatactaatcgacaccgacgacaccaacgcccgaaaaaccatcgaactcaaccaacacgcgcaacaaacgaacgcgaacgacatcgtaataatcaacccctactactaaaaaatatcgaaaacgaacctaatccgctatttcgaacaaataaccgacaacgtcacgctaccgataatactctataacttcccgacgctaaccgaacaaaatctaactccgacgctaataaaaaccctcgccgactcgcgcaacaatattatcgacatcaaaaacaccatcgactccgtcgcccacctacgcaacataatccataccgtcaaaaatacccatccgcacttcaccgtactctacgactacgacgatcatctattcaataccctactactcgacgacgacgaaacgatatcgacgaacgacaactttaccccgcaaatatcgataaatcttctaaaaacctaacgcgacgaaaacgtaacgaaaacgaccgaatatcatcaaaccttactacaaattccgcaaatatatcaactaaatacgccgtttataaacgtaattaaaaaaacgatcgtactctacgatcgtcctatctccacgcacgtactaccgcccgcctcgccgctaaacgaaccgcgcaaaacgcaactaaaaaccctactacaacaactcaaactttactaaaccgaacgataacgataaccattaaaaaaattttcaccccgcaaaacgacgcgttttatacgataatcacccacgcgacgaaaccgcaaaacgctctaccgctaaccccgcaaatactaataaaatctcccaacgacaacctattcgacataacgcaaaacgccgaaataaactaaaacgccaacaaactcaccgacaaaaaaatactaattatcgacactcaaaacgacatccgcgccgaaaacgaacgcccaatcgcgctaaactaccacaccgaacattaaaaaatcgacatacaaatacaaacgacgacgaaaaaaatcacccgcaataacgaaatcccgttcgcgaccttcgtcaacgatccgtacgacgaacgctcgcaaaacacgcacgaaatattcgattccctaccgtac

SEQ ID NO: 38065 - DNA, 743 bp, Artificial Sequence
  chemically treated genomic DNA (Homo sapiens) CpG-island No: 38065
ttaacgtcggtattcgtttcgtgatgatttttggtattttttattatatcgatgaaatcggtagcgatgtttggcgggaagatggattggtggcgcgtatgtcgcgtatttgtaagtagatcgtgttagaaatgatcgttatgttagatatttgtttttgtgaatatattttttacggttattgcggtgtgttgtgcgagtatggcgtcgataacgacgcgattttggaaaatttaggtaagtaagtcgtggttgtagttgttgtaggtgtagattttatcgtttttttcgtcgcgatggacggttaggtataggcgattcgttaggcgttggacgttgcgggatttaaagatacggcgattatgtcgtattcgattaagttcgttttttttttttatggttcgtttcgtgaagttgtcggaagcgtattaaaaggcgatcgtaaaagttattagatgaatttaatgaatcgtcgtgaggcgattcgtgaattattgttggatgaagtttagggcgtagattgtttgatggttaaatttgttggagcgtatttcgatatcgtgcgtgagttgcgtgaacgtattgaattgtcgattggcgcgtattaggtgagcggtgagtatgcgatgattaagttcgtcgcgttggcgggtgttatagatgaagagaaagtcgtgttcgaaagtttaggttcgatttaagcgtgcgggtgcggatttgatttttagttattttgcgttgga

SEQ ID NO: 38066 - DNA, 743 bp, Artificial Sequence
  chemically treated genomic DNA (Homo sapiens) CpG-island No: 38066
tccaacgcaaaataactaaaaatcaaatccgcacccgcacgcttaaatcgaacctaaactttcgaacacgactttctcttcatctataacacccgccaacgcgacgaacttaatcatcgcatactcaccgctcacctaatacgcgccaatcgacaattcaatacgttcacgcaactcacgcacgatatcgaaatacgctccaacaaatttaaccatcaaacaatctacgccctaaacttcatccaacaataattcacgaatcgcctcacgacgattcattaaattcatctaataacttttacgatcgccttttaatacgcttccgacaacttcacgaaacgaaccataaaaaaaaaaaacgaacttaatcgaatacgacataatcgccgtatctttaaatcccgcaacgtccaacgcctaacgaatcgcctatacctaaccgtccatcgcgacgaaaaaaacgataaaatctacacctacaacaactacaaccacgacttacttacctaaattttccaaaatcgcgtcgttatcgacgccatactcgcacaacacaccgcaataaccgtaaaaaatatattcacaaaaacaaatatctaacataacgatcatttctaacacgatctacttacaaatacgcgacatacgcgccaccaatccatcttcccgccaaacatcgctaccgatttcatcgatataataaaaaataccaaaaatcatcacgaaacgaataccgacgttaa

SEQ ID NO: 38067 - DNA, 743 bp, Artificial Sequence
  chemically treated genomic DNA (Homo sapiens) CpG-island No: 38067
tttagcgtaaagtagttgaaaattagattcgtattcgtacgtttaagtcgaatttaagttttcgagtacgattttttttttatttatagtattcgttagcgcggcgaatttaattatcgtatatttatcgtttatttgatacgcgttaatcggtaatttagtacgtttacgtagtttacgtacgatgtcgaggtacgttttagtaggtttaattattaggtagtttgcgttttgggttttatttagtagtgatttacgaatcgttttacgacggtttattgggtttatttgatagtttttgcggtcgttttttaatgcgttttcggtagttttacggaacgggttataaaaggaggaggcgaatttggtcgaatacgatataatcgtcgtatttttaaatttcgtagcgtttagcgtttgacgaatcgtttgtatttggtcgtttatcgcggcggaaggggcgatgaagtttgtatttgtagtagttgtaattacggtttgtttgtttaaattttttagagtcgcgtcgttgtcgacgttatgttcgtatagtatatcgtagtgatcgtgagaagtgtatttatagaagtaggtgtttgatataacgattatttttggtacggtttgtttgtagatgcgcgatatacgcgttattagtttattttttcgttaggtatcgttgtcggttttatcggtatggtgagagatgttaaaagttattacggaacgaatatcggcgttgg

SEQ ID NO: 38068 - DNA, 743 bp, Artificial Sequence
  chemically treated genomic DNA (Homo sapiens) CpG-island No: 38068
ccaacgccgatattcgttccgtaataacttttaacatctctcaccataccgataaaaccgacaacgatacctaacgaaaaaataaactaataacgcgtatatcgcgcatctacaaacaaaccgtaccaaaaataatcgttatatcaaacacctacttctataaatacacttctcacgatcactacgatatactatacgaacataacgtcgacaacgacgcgactctaaaaaatttaaacaaacaaaccgtaattacaactactacaaatacaaacttcatcgccccttccgccgcgataaacgaccaaatacaaacgattcgtcaaacgctaaacgctacgaaatttaaaaatacgacgattatatcgtattcgaccaaattcgcctcctccttttataacccgttccgtaaaactaccgaaaacgcattaaaaaacgaccgcaaaaactatcaaataaacccaataaaccgtcgtaaaacgattcgtaaatcactactaaataaaacccaaaacgcaaactacctaataattaaacctactaaaacgtacctcgacatcgtacgtaaactacgtaaacgtactaaattaccgattaacgcgtatcaaataaacgataaatatacgataattaaattcgccgcgctaacgaatactataaataaaaaaaaaatcgtactcgaaaacttaaattcgacttaaacgtacgaatacgaatctaattttcaactactttacgctaaa

SEQ ID NO: 38069 - DNA, 532 bp, Artificial Sequence
  chemically treated genomic DNA (Homo sapiens) CpG-island No: 38069
gtgcgttttagttttagacgttgcgtagcgtttttaggttcggtaattacgtcgttggttttttttagtacgcgtataattaattgatatttattttcgttttttagggcgataatcgttgcggtaggcggcgttttaggtttcggtaaaataatatttggtaatgatagttgtagtacgttatcgcgtgttagtaatatcgcgcgtttaatgacgttttttagttcgcgtacgttattcggttattttatgttgtttaaggtgcgtagcgtttcggtaggaatgttgtcgatattgcgttttagacgacgggtaattttgaaggtaaaggttttcgttagtagcggaatatttttcggacgttcgcgtagtggcggtaggtgaatcgggaatacgtttaggcggtaatagagatcgttacggaatttacggtcggcgattattttttttagatcgcggttagtcgcggcgattagacgtacgttcgtttgaatgattttgttgttgtcgagacgtttaaatttttgttttt

SEQ ID NO: 38070 - DNA, 532 bp, Artificial Sequence
  chemically treated genomic DNA (Homo sapiens) CpG-island No: 38070
aaaaacaaaaatttaaacgtctcgacaacaacaaaatcattcaaacgaacgtacgtctaatcgccgcgactaaccgcgatctaaaaaaaataatcgccgaccgtaaattccgtaacgatctctattaccgcctaaacgtattcccgattcacctaccgccactacgcgaacgtccgaaaaatattccgctactaacgaaaacctttaccttcaaaattacccgtcgtctaaaacgcaatatcgacaacattcctaccgaaacgctacgcaccttaaacaacataaaataaccgaataacgtacgcgaactaaaaaacgtcattaaacgcgcgatattactaacacgcgataacgtactacaactatcattaccaaatattattttaccgaaacctaaaacgccgcctaccgcaacgattatcgccctaaaaaacgaaaataaatatcaattaattatacgcgtactaaaaaaaaccaacgacgtaattaccgaacctaaaaacgctacgcaacgtctaaaactaaaacgcac

SEQ ID NO: 38071 - DNA, 532 bp, Artificial Sequence
  chemically treated genomic DNA (Homo sapiens) CpG-island No: 38071
aggaataggagtttgaacgtttcggtagtaataaaattatttagacggacgtgcgtttaatcgtcgcgattaatcgcgatttgaaaaaaatggtcgtcgatcgtgagtttcgtagcgatttttattatcgtttgaacgtattttcgatttatttgtcgttattacgcgagcgttcggaagatatttcgttgttggcgaaagtttttatttttaaaattgttcgtcgtttggggcgtaatatcgatagtatttttgtcgagacgttgcgtattttgagtaatatggagtggtcgggtaacgtacgcgaattggaaaacgttattgagcgcgcggtattgttaatacgcggtaacgtgttgtagttgttattgttagatattgttttatcggaatttgaaacgtcgtttgtcgtaacggttgtcgttttggagggcgaagatgaatattagttgattgtgcgcgtgttgaaagaaattaacggcgtggttgtcgggtttaaaggcgttgcgtaacgtttggggttgaaacgtat

SEQ ID NO: 38072 - DNA, 532 bp, Artificial Sequence
  chemically treated genomic DNA (Homo sapiens) CpG-island No: 38072
atacgtttcaaccccaaacgttacgcaacgcctttaaacccgacaaccacgccgttaatttctttcaacacgcgcacaatcaactaatattcatcttcgccctccaaaacgacaaccgttacgacaaacgacgtttcaaattccgataaaacaatatctaacaataacaactacaacacgttaccgcgtattaacaataccgcgcgctcaataacgttttccaattcgcgtacgttacccgaccactccatattactcaaaatacgcaacgtctcgacaaaaatactatcgatattacgccccaaacgacgaacaattttaaaaataaaaactttcgccaacaacgaaatatcttccgaacgctcgcgtaataacgacaaataaatcgaaaatacgttcaaacgataataaaaatcgctacgaaactcacgatcgacgaccatttttttcaaatcgcgattaatcgcgacgattaaacgcacgtccgtctaaataattttattactaccgaaacgttcaaactcctattcct

SEQ ID NO: 38073 - DNA, 925 bp, Artificial Sequence
  chemically treated genomic DNA (Homo sapiens) CpG-island No: 38073
atattttgatgtgttgtattcgtatttgtggcgcgaaggaaaggatttttcgtttttattcgcgcggatggatgttttgttgaaagttcggtatattgcgtttgtcgttgatttttaatttcgcgtatgcgtagtaaaaaatcgttagcggcgattgtttgtaagtagttagttttggttttcgcgaggggatgatggtaacgttatttttattatttttgttacgcgaatgttagtgttgcggcgaaggtagttgttatttttgtttttattcgatgcgtaattgcgtaaagtagatttcgttgtttggggcgatttttttgttttcgattcgtaaaaattgtttgacgggtagcgcgaattattgcgattaagaatgtcgtaggatttgtcgtcggtattggttgaatcgtacgtaggttgggtaaatgcgttggaataagaatggttatatcgttacggtacgtattaatttttttgttgtgggcgatggtggcggtgatttatgtatcgttgatttcggtagtttttacgttgatatcgtttgttttgtcgttgatatattggtaggcgttatttgtcgatttatagttatcgtaggtattattggtaacgttggtgtcgataattatcgcggcggtcggggtattgttgattgttttgttggtgattgtggcgttgtggtttgggtcgaaatggtagcgtatgtgcgttcgtttgtcgtggttgttcgttattttttatgtggtttttgttattagcgtttttttgttttttgttgacggagggttgttttatgattatttttcgtattttatttcgttaatggatcgatttggtatcggtttgggttttatttttgtagtgaaagaaagcgtatttttgttgtggattttagtagtagtattgagcgaaaaatggttgt

SEQ ID NO: 38074 - DNA, 925 bp, Artificial Sequence
  chemically treated genomic DNA (Homo sapiens) CpG-island No: 38074
acaaccatttttcgctcaatactactactaaaatccacaacaaaaatacgctttctttcactacaaaaataaaacccaaaccgataccaaatcgatccattaacgaaataaaatacgaaaaataatcataaaacaaccctccgtcaacaaaaaacaaaaaaacgctaataacaaaaaccacataaaaaataacgaacaaccacgacaaacgaacgcacatacgctaccatttcgacccaaaccacaacgccacaatcaccaacaaaacaatcaacaataccccgaccgccgcgataattatcgacaccaacgttaccaataatacctacgataactataaatcgacaaataacgcctaccaatatatcaacgacaaaacaaacgatatcaacgtaaaaactaccgaaatcaacgatacataaatcaccgccaccatcgcccacaacaaaaaaattaatacgtaccgtaacgatataaccattcttattccaacgcatttacccaacctacgtacgattcaaccaataccgacgacaaatcctacgacattcttaatcgcaataattcgcgctacccgtcaaacaatttttacgaatcgaaaacaaaaaaatcgccccaaacaacgaaatctactttacgcaattacgcatcgaataaaaacaaaaataacaactaccttcgccgcaacactaacattcgcgtaacaaaaataataaaaataacgttaccatcatcccctcgcgaaaaccaaaactaactacttacaaacaatcgccgctaacgattttttactacgcatacgcgaaattaaaaatcaacgacaaacgcaatataccgaactttcaacaaaacatccatccgcgcgaataaaaacgaaaaatcctttccttcgcgccacaaatacgaatacaacacatcaaaatat

SEQ ID NO: 38075 - DNA, 925 bp, Artificial Sequence
  chemically treated genomic DNA (Homo sapiens) CpG-island No: 38075
atagttatttttcgtttaatattgttgttaagatttatagtagaaatgcgtttttttttattgtaagggtgaggtttagatcgatgttaaatcggtttattggcggagtgaaatacgggaaatagttataaagtagtttttcgttagtaaagagtagaagggcgttggtggtaaaagttatatggggaatggcgagtagttacggtagacgggcgtatatacgttgttatttcggtttaggttatagcgttataattattagtagggtaattaataatgtttcgatcgtcgcgatggttgtcgatattagcgttgttagtaatgtttgcggtaattgtggatcggtaaataacgtttgttagtgtgttaacgataaagtaggcgatattagcgtgagagttgtcgggattagcggtgtataaattatcgttattatcgtttatagtaaaaagattaatgcgtatcgtaacggtgtagttatttttgttttagcgtatttatttaatttgcgtgcggtttagttagtatcggcggtagattttgcggtatttttgatcgtaatgattcgcgttgttcgttaggtagtttttgcggatcgagaatagaaggatcgttttagatagcgggatttgttttacgtagttgcgtatcgggtgagagtaggaatggtaattattttcgtcgtagtattggtattcgcgtggtaggaatggtgaaaatgacgttgttattattttttcgcgaaagttaaaattgattgtttgtaggtaatcgtcgttggcgattttttgttgcgtatgcgcggggttaaaggttagcgataggcgtaatgtgtcgggtttttagtagagtatttattcgcgcgggtgaaggcgggaaattttttttttcgcgttataaatacggatgtagtatattaagatat

SEQ ID NO: 38076 - DNA, 925 bp, Artificial Sequence
  chemically treated genomic DNA (Homo sapiens) CpG-island No: 38076
atatcttaatatactacatccgtatttataacgcgaaaaaaaaaatttcccgccttcacccgcgcgaataaatactctactaaaaacccgacacattacgcctatcgctaacctttaaccccgcgcatacgcaacaaaaaatcgccaacgacgattacctacaaacaatcaattttaactttcgcgaaaaaataataacaacgtcattttcaccattcctaccacgcgaataccaatactacgacgaaaataattaccattcctactctcacccgatacgcaactacgtaaaacaaatcccgctatctaaaacgatccttctattctcgatccgcaaaaactacctaacgaacaacgcgaatcattacgatcaaaaataccgcaaaatctaccgccgatactaactaaaccgcacgcaaattaaataaatacgctaaaacaaaaataactacaccgttacgatacgcattaatctttttactataaacgataataacgataatttatacaccgctaatcccgacaactctcacgctaatatcgcctactttatcgttaacacactaacaaacgttatttaccgatccacaattaccgcaaacattactaacaacgctaatatcgacaaccatcgcgacgatcgaaacattattaattaccctactaataattataacgctataacctaaaccgaaataacaacgtatatacgcccgtctaccgtaactactcgccattccccatataacttttaccaccaacgcccttctactctttactaacgaaaaactactttataactatttcccgtatttcactccgccaataaaccgatttaacatcgatctaaacctcacccttacaataaaaaaaaacgcatttctactataaatcttaacaacaatattaaacgaaaaataactat

SEQ ID NO: 38077 - DNA, 543 bp, Artificial Sequence
  chemically treated genomic DNA (Homo sapiens) CpG-island No: 38077
acgcgggcgaacgatgcggttaatcgttataaattgttgaaaaaagatgcgcgtattatcgtcgtttagtaggtagtaaggttggaattcgttatgtgtttgcgtcgtcgttggtcgttggaaaatttttagttttttttggttgagtattcgttggttcgttatttaattcgtcgtttgatttggggcgtttatagcgtcgaaaattagttattggtttgttttcgcgtagtagaagataatagttttagtatcgttgacgatgatttttttattttgtcggaaggcgatatttttatcggtattttttacgttttggaaatattattaacggatgttgtcgtttttggttagttttttgtcgattacgaattggtattatcgtttcgttagttcgatcgtaatagttacgttttgatagaagtcgagcgtaatgttagtgaattgagtcgttgggtaggtagaaaatgtcgagtggtcgggttaggggttgggaatacggtggtaaggggaatttagatgaggggtcgatggtgttatttt

SEQ ID NO: 38078 - DNA, 543 bp, Artificial Sequence
  chemically treated genomic DNA (Homo sapiens) CpG-island No: 38078
aaaataacaccatcgacccctcatctaaattccccttaccaccgtattcccaacccctaacccgaccactcgacattttctacctacccaacgactcaattcactaacattacgctcgacttctatcaaaacgtaactattacgatcgaactaacgaaacgataataccaattcgtaatcgacaaaaaactaaccaaaaacgacaacatccgttaataatatttccaaaacgtaaaaaataccgataaaaatatcgccttccgacaaaataaaaaaatcatcgtcaacgatactaaaactattatcttctactacgcgaaaacaaaccaataactaattttcgacgctataaacgccccaaatcaaacgacgaattaaataacgaaccaacgaatactcaaccaaaaaaaactaaaaattttccaacgaccaacgacgacgcaaacacataacgaattccaaccttactacctactaaacgacgataatacgcgcatcttttttcaacaatttataacgattaaccgcatcgttcgcccgcgt

SEQ ID NO: 38079 - DNA, 543 bp, Artificial Sequence
  chemically treated genomic DNA (Homo sapiens) CpG-island No: 38079
aaggtgatattatcgattttttatttgggttttttttattatcgtatttttagtttttgattcgattattcggtattttttgtttgtttagcggtttagtttattggtattgcgttcggtttttgttagggcgtagttgttacggtcgagttggcggaacggtggtattagttcgtagtcggtaaaaagttgattaaaggcggtagtattcgttggtgatatttttagaacgtgaggagtgtcgatagagatatcgtttttcggtagggtgaaaagattatcgttagcggtgttggagttgttattttttgttacgcgaaagtaagttagtagttggttttcggcgttataaacgttttaaattagacggcgggttaagtgacgaattagcggatgtttaattaggaagagttggaagttttttagcgattagcggcggcgtaggtatatggcggattttagttttgttatttgttgggcggcgatggtacgcgtatttttttttagtaatttgtagcggttaatcgtatcgttcgttcgcgt

SEQ ID NO: 38080 - DNA, 543 bp, Artificial Sequence
  chemically treated genomic DNA (Homo sapiens) CpG-island No: 38080
acgcgaacgaacgatacgattaaccgctacaaattactaaaaaaaaatacgcgtaccatcgccgcccaacaaataacaaaactaaaatccgccatatacctacgccgccgctaatcgctaaaaaacttccaactcttcctaattaaacatccgctaattcgtcacttaacccgccgtctaatttaaaacgtttataacgccgaaaaccaactactaacttactttcgcgtaacaaaaaataacaactccaacaccgctaacgataatcttttcaccctaccgaaaaacgatatctctatcgacactcctcacgttctaaaaatatcaccaacgaatactaccgcctttaatcaactttttaccgactacgaactaataccaccgttccgccaactcgaccgtaacaactacgccctaacaaaaaccgaacgcaataccaataaactaaaccgctaaacaaacaaaaaataccgaataatcgaatcaaaaactaaaaatacgataataaaaaaaacccaaataaaaaatcgataatatcacctt

SEQ ID NO: 38081 - DNA, 992 bp, Artificial Sequence
  chemically treated genomic DNA (Homo sapiens) CpG-island No: 38081
  unsure (920)
gggcgttgattagaatattaattagggtatcgatattacgataattaagatttattttttgtttcgttagcggatggatggtatgcgcggtatcgtttattagcgtaagttttggttgtacgtattgtaacgtatggcgacgcgttagcggaaacgtattagcggtaagcggtgtaacgtaatttagacgcgacgggaaatgtttcgcgattttcgtttggagttgtgttatatttatattttgtaattggcgaatacgcgtcggagagttatattatattagcgatgtttagttattaaataacggtagaaacgtacgcggttcgttcggagtaaattgttgttaggtgttgtcgtcgggatcgttttcgtattggacgttaattaatatgtacgattgcgtatattgttatgtatgaacgttaattttcgttatttgtcgtatttgcgaatttgcgtcgtcggtattaattattagtttcgcgcgaattattttagcgttttttagttttagtttttgaagattattatggcgatgtagcgtaattagcgagtttggtatacgtaacgttattttcggatgcgtttttagcgtttgttataacgtttgtggtaggatagtgttttttattatatagttaagtagcggtagtttaagtttagcggcgttaaatattatatgcgtcgttttttatttttacgtttttagtttgcggtaaggatggtaacgtatagtttgtattgtattttagatttttaattttttaagtaatgatatcgaagtcgcgttgatcgtcgagattcgtacgttcggttggttattagcgataaacggcgttggttttgcgtgttcgattatcgttatcgtaaattcgtgttgtgttagttttagcgttagtgcgtcgtcgattatttttttnggtcgataatggggtaatttttcgttggttgattgttatggttaattattttgtagtaatatgttttaagtt

SEQ ID NO: 38082 - DNA, 992 bp, Artificial Sequence
  chemically treated genomic DNA (Homo sapiens) CpG-island No: 38082
  unsure (73)
aacttaaaacatattactacaaaataattaaccataacaatcaaccaacgaaaaattaccccattatcgaccnaaaaaaataatcgacgacgcactaacgctaaaactaacacaacacgaatttacgataacgataatcgaacacgcaaaaccaacgccgtttatcgctaataaccaaccgaacgtacgaatctcgacgatcaacgcgacttcgatatcattacttaaaaaattaaaaatctaaaatacaatacaaactatacgttaccatccttaccgcaaactaaaaacgtaaaaataaaaaacgacgcatataatatttaacgccgctaaacttaaactaccgctacttaactatataataaaaaacactatcctaccacaaacgttataacaaacgctaaaaacgcatccgaaaataacgttacgtataccaaactcgctaattacgctacatcgccataataatcttcaaaaactaaaactaaaaaacgctaaaataattcgcgcgaaactaataattaataccgacgacgcaaattcgcaaatacgacaaataacgaaaattaacgttcatacataacaatatacgcaatcgtacatattaattaacgtccaatacgaaaacgatcccgacgacaacacctaacaacaatttactccgaacgaaccgcgtacgtttctaccgttatttaataactaaacatcgctaatataatataactctccgacgcgtattcgccaattacaaaatataaatataacacaactccaaacgaaaatcgcgaaacatttcccgtcgcgtctaaattacgttacaccgcttaccgctaatacgtttccgctaacgcgtcgccatacgttacaatacgtacaaccaaaacttacgctaataaacgataccgcgcataccatccatccgctaacgaaacaaaaaataaatcttaattatcgtaatatcgataccctaattaatattctaatcaacgccc

SEQ ID NO: 38083 - DNA, 992 bp, Artificial Sequence
  chemically treated genomic DNA (Homo sapiens) CpG-island No: 38083
  unsure (73)
aatttaaagtatattgttataggatgattgattatgataattaattaacgggaaattgttttattgtcggttnggaggaatggtcggcggcgtattggcgttggggttggtatagtacggatttgcggtaacggtgatcgagtacgtagaattagcgtcgtttgtcgttgatagttaatcggacgtgcggatttcggcgattagcgcggtttcggtattattgtttaaagggttaggggtttgggatgtagtataggttatgcgttgttatttttatcgtagattggaaacgtgggagtgggaaacggcgtatgtggtgtttgacgtcgttgaatttaagttatcgttgtttggttatatggtggaaaatattgttttgttataggcgttgtggtaggcgttggaagcgtattcgaaagtaacgttacgtgtgttaggttcgttgattgcgttgtatcgttatgatgatttttaggagttggagttgaaaggcgttgaagtgattcgcgcgaagttggtgattggtgtcgacggcgtaaattcgtaggtgcggtagatggcgggaattggcgtttatgtatggtagtatgcgtagtcgtgtatgttgattagcgtttagtgcgagaacgatttcggcgatagtatttggtagtaatttatttcggacggatcgcgtgcgtttttgtcgttgtttgataattgggtatcgttggtgtggtatgatttttcggcgcgtattcgttagttgtagaatatgaatatggtatagttttaggcggaaatcgcgaagtatttttcgtcgcgtttgggttacgttatatcgtttgtcgttggtgcgttttcgttgacgcgtcgttatgcgttgtagtacgtgtagttagggtttgcgttggtgggcgatgtcgcgtatattatttattcgttggcggggtagggagtgaattttggttatcgtgatgtcgatgttttgattgatgttttggttaacgttt

SEQ ID NO: 38084 - DNA, 992 bp, Artificial Sequence
  chemically treated genomic DNA (Homo sapiens) CpG-island No: 38084
  unsure (920)
aaacgttaaccaaaacatcaatcaaaacatcgacatcacgataaccaaaattcactccctaccccgccaacgaataaataatatacgcgacatcgcccaccaacgcaaaccctaactacacgtactacaacgcataacgacgcgtcaacgaaaacgcaccaacgacaaacgatataacgtaacccaaacgcgacgaaaaatacttcgcgatttccgcctaaaactataccatattcatattctacaactaacgaatacgcgccgaaaaatcataccacaccaacgatacccaattatcaaacaacgacaaaaacgcacgcgatccgtccgaaataaattactaccaaatactatcgccgaaatcgttctcgcactaaacgctaatcaacatacacgactacgcatactaccatacataaacgccaattcccgccatctaccgcacctacgaatttacgccgtcgacaccaatcaccaacttcgcgcgaatcacttcaacgcctttcaactccaactcctaaaaatcatcataacgatacaacgcaatcaacgaacctaacacacgtaacgttactttcgaatacgcttccaacgcctaccacaacgcctataacaaaacaatattttccaccatataaccaaacaacgataacttaaattcaacgacgtcaaacaccacatacgccgtttcccactcccacgtttccaatctacgataaaaataacaacgcataacctatactacatcccaaacccctaaccctttaaacaataataccgaaaccgcgctaatcgccgaaatccgcacgtccgattaactatcaacgacaaacgacgctaattctacgtactcgatcaccgttaccgcaaatccgtactataccaaccccaacgccaatacgccgccgaccattcctccnaaccgacaataaaacaatttcccgttaattaattatcataatcaatcatcctataacaatatactttaaatt

SEQ ID NO: 38085 - DNA, 667 bp, Artificial Sequence
  chemically treated genomic DNA (Homo sapiens) CpG-island No: 38085
ttacgttacgtagcggcgtatcgtcgtttaggtgttcgttgtcgcgtagggtaaatgagaattacgttcgcgtacgcggatatgcggttaatagttcggttaacgttttaatttcggaaaaattcggtagggtttcgtaggttagtagatcggtttcggtatttagtaaggtttttacgcgcgggcgatgaaacgtttgaaatgttttaacgttataatgataatcgttacggtatttagagttattcgttagatacgcgtcgtaaggttcgacggatttcgttattagaagcgttttcgtttgcgggttttttgttagatacgttttacgggttttacgcgttagttttacgtttttgttaattagcgttttcgattgcgttttatttagatttcgcgcggcgaagttcgtcggcgtcgtttgatagttggtagtgatcgcgtattgcgttttcgttcggtagtaattaagatgtatttcgcggataagtttcgggttttttattagtattttggttgattataggttgtcggttaagttatattttcgcgtttttagtttcgtcgttatcgcgttatttagtagtaggatattttgtttattaagaagagcgcgtaacggattattttgcgatatgttttggtttttgttttgcgtttcggggtt

SEQ ID NO: 38086 - DNA, 667 bp, Artificial Sequence
  chemically treated genomic DNA (Homo sapiens) CpG-island No: 38086
aaccccgaaacgcaaaacaaaaaccaaaacatatcgcaaaataatccgttacgcgctcttcttaataaacaaaatatcctactactaaataacgcgataacgacgaaactaaaaacgcgaaaatataacttaaccgacaacctataatcaaccaaaatactaataaaaaacccgaaacttatccgcgaaatacatcttaattactaccgaacgaaaacgcaatacgcgatcactaccaactatcaaacgacgccgacgaacttcgccgcgcgaaatctaaataaaacgcaatcgaaaacgctaattaacaaaaacgtaaaactaacgcgtaaaacccgtaaaacgtatctaacaaaaaacccgcaaacgaaaacgcttctaataacgaaatccgtcgaaccttacgacgcgtatctaacgaataactctaaataccgtaacgattatcattataacgttaaaacatttcaaacgtttcatcgcccgcgcgtaaaaaccttactaaataccgaaaccgatctactaacctacgaaaccctaccgaatttttccgaaattaaaacgttaaccgaactattaaccgcatatccgcgtacgcgaacgtaattctcatttaccctacgcgacaacgaacacctaaacgacgatacgccgctacgtaacgtaa

SEQ ID NO: 38087 - DNA, 667 bp, Artificial Sequence
  chemically treated genomic DNA (Homo sapiens) CpG-island No: 38087
aatttcgaaacgtaaaataggagttagaatatgtcgtagaataattcgttacgcgttttttttgataaataggatattttgttgttggatggcgcgatggcgacggagttggaagcgcgagggtgtaatttagtcgatagtttgtggttagttaaagtgttggtagaaaattcggagtttattcgcgaagtgtattttgattattatcgggcgggggcgtaatgcgcgattattgttagttattaggcgacgtcggcgggtttcgtcgcgcgaggtttggatgaagcgtagtcgaaagcgttgattggtaaaagcgtggagttggcgcgtaaagttcgtgaagcgtatttggtagagaattcgtaggcgggaacgtttttggtggcgggattcgtcgggttttacggcgcgtatttggcggatggttttgaatatcgtggcgattattattgtagcgttgaggtattttaggcgttttatcgttcgcgcgtggaagttttgttggatgtcggggtcgatttgttggtttgcgaaattttgtcgaattttttcgagattgaggcgttggtcgagttgttgatcgtatattcgcgtgcgcgggcgtggtttttatttattttgcgcgatagcgaatatttgagcgacggtacgtcgttgcgtgacgtgg

SEQ ID NO: 38088 - DNA, 667 bp, Artificial Sequence
  chemically treated genomic DNA (Homo sapiens) CpG-island No: 38088
ccacgtcacgcaacgacgtaccgtcgctcaaatattcgctatcgcgcaaaataaataaaaaccacgcccgcgcacgcgaatatacgatcaacaactcgaccaacgcctcaatctcgaaaaaattcgacaaaatttcgcaaaccaacaaatcgaccccgacatccaacaaaacttccacgcgcgaacgataaaacgcctaaaatacctcaacgctacaataataatcgccacgatattcaaaaccatccgccaaatacgcgccgtaaaacccgacgaatcccgccaccaaaaacgttcccgcctacgaattctctaccaaatacgcttcacgaactttacgcgccaactccacgcttttaccaatcaacgctttcgactacgcttcatccaaacctcgcgcgacgaaacccgccgacgtcgcctaataactaacaataatcgcgcattacgcccccgcccgataataatcaaaatacacttcgcgaataaactccgaattttctaccaacactttaactaaccacaaactatcgactaaattacaccctcgcgcttccaactccgtcgccatcgcgccatccaacaacaaaatatcctatttatcaaaaaaaacgcgtaacgaattattctacgacatattctaactcctattttacgtttcgaaatt

SEQ ID NO: 38089 - DNA, 696 bp, Artificial Sequence
  chemically treated genomic DNA (Homo sapiens) CpG-island No: 38089
  unsure (48..49, 250, 266..267, 291, 384)
agggtagtcgttagagattgtatcgtcgcgtaggtgatttagatatannaggttcggataggattttttttgatttgtttttagcgtattaacgatgttttggatttgtcggattttggttatagcgttttggtatagtgattaatatgttttcggcggtattatcggtaatgttcgataacgacgtattatttatatttttcgtgtttttataaacgtgggttttttacggttaacggaacgggtttgngcgtacgtatcgtgtnntttattttcgggttacgtatattngcgcgtttagttataagcgtaacgttagaatgatttttattttatatttagcgcggcgcgtattacgacgcggtacgataatttttttttttnggcggtaatatcgtcgaagaagacgacgttggcgttagtcgtttttagttcgttttgtatcgaacgcgttagtttttcgttatattgttgtttgtcgtgaatgatggcgatgcgttggggttttatcgttttaagaatgtattttgtcgtcgttggtttttgggaagagtttagttcggtagtacgtataatgtgttgataatcgcgttgggttagtttcgggttggtcgttttcggcgagattattagaatattttcgtttttatagatatttgacgtaggttgggtagaagaagaatatagatgattaat

SEQ ID NO: 38090 - DNA, 696 bp, Artificial Sequence
  chemically treated genomic DNA (Homo sapiens) CpG-island No: 38090
  unsure (313, 406, 430..431, 447, 648..)
attaatcatctatattcttcttctacccaacctacgtcaaatatctataaaaacgaaaatattctaataatctcgccgaaaacgaccaacccgaaactaacccaacgcgattatcaacacattatacgtactaccgaactaaactcttcccaaaaaccaacgacgacaaaatacattcttaaaacgataaaaccccaacgcatcgccatcattcacgacaaacaacaatataacgaaaaactaacgcgttcgatacaaaacgaactaaaaacgactaacgccaacgtcgtcttcttcgacgatattaccgccnaaaaaaaaaaattatcgtaccgcgtcgtaatacgcgccgcgctaaatataaaataaaaatcattctaacgttacgcttataactaaacgcgcnaatatacgtaacccgaaaataaannacacgatacgtacgcncaaacccgttccgttaaccgtaaaaaacccacgtttataaaaacacgaaaaatataaataatacgtcgttatcgaacattaccgataataccgccgaaaacatattaatcactataccaaaacgctataaccaaaatccgacaaatccaaaacatcgttaatacgctaaaaacaaatcaaaaaaaatcctatccgaacctnntatatctaaatcacctacgcgacgatacaatctctaacgactaccct

SEQ ID NO: 38091 - DNA, 696 bp, Artificial Sequence
  chemically treated genomic DNA (Homo sapiens) CpG-island No: 38091
  unsure (313, 406, 430..431, 447, 648..)
attggttatttgtgttttttttttatttagtttgcgttagatatttatgaagacgaaggtattttgatgatttcgtcgggagcgattaattcggagttgatttaacgcggttattaatatattatgcgtattgtcgggttggattttttttaggggttaacggcggtaaaatatatttttgagacggtgaagttttagcgtatcgttattatttacgataaataatagtatggcgaagggttggcgcgttcggtgtaggacgggttgaaagcggttaacgttaacgtcgtttttttcgacggtattatcgttnggggagaaagattgtcgtgtcgcgtcgtgatgcgcgtcgcgttgaatataaagtaagaattattttgacgttgcgtttgtagttgagcgcgtnggtgtacgtagttcggaaatgggnngtacgatgcgtgcgtntaggttcgtttcgttggtcgtgaaaagtttacgtttataggggtacggaaggtgtgggtaatgcgtcgttgtcgaatattgtcggtgatgtcgtcgaaggtatgttggttattatgttaaaacgttatgattaggattcggtaaatttagggtatcgttgatgcgttgaaagtagattaagaaagattttgttcgggtttnntatgtttggattatttacgcggcggtgtaatttttggcgattgtttt

SEQ ID NO: 38092 - DNA, 696 bp, Artificial Sequence
  chemically treated genomic DNA (Homo sapiens) CpG-island No: 38092
  unsure (48..49, 250, 266..267, 291, 384)
aaaacaatcgccaaaaattacaccgccgcgtaaataatccaaacatannaaacccgaacaaaatctttcttaatctactttcaacgcatcaacgataccctaaatttaccgaatcctaatcataacgttttaacataataaccaacataccttcgacgacatcaccgacaatattcgacaacgacgcattacccacaccttccgtacccctataaacgtaaacttttcacgaccaacgaaacgaacctanacgcacgcatcgtacnncccatttccgaactacgtacaccnacgcgctcaactacaaacgcaacgtcaaaataattcttactttatattcaacgcgacgcgcatcacgacgcgacacgacaatctttctccccnaacgataataccgtcgaaaaaaacgacgttaacgttaaccgctttcaacccgtcctacaccgaacgcgccaacccttcgccatactattatttatcgtaaataataacgatacgctaaaacttcaccgtctcaaaaatatattttaccgccgttaacccctaaaaaaaatccaacccgacaatacgcataatatattaataaccgcgttaaatcaactccgaattaatcgctcccgacgaaatcatcaaaataccttcgtcttcataaatatctaacgcaaactaaataaaaaaaaaacacaaataaccaat

SEQ ID NO: 38093 - DNA, 548 bp, Artificial Sequence
  chemically treated genomic DNA (Homo sapiens) CpG-island No: 38093
ttttgcgcggttttttgattttatttcgtatgaaatttgtagagcgatcgttttaaggattagcgagcgttaattagattcgtttgtgtttgtagagttttatttgaggtttgggttttcgagggcggatgagcgggtcggttttcgggttcgggttgggggattcgtagttcgcggtcggcggggatggggaggggtggtcgtttgtcgcgcggttttcgcgggtcgtcgttaggtgtacggtttttttggtttttcgtagggaggacgttttttggtgttttcgtcgtcgtcgggtttgggagttttagagcgggcgggaggcggggtcggcggggttggattttgacgttagtttaaggtcgggtgattattggggtttgttcgcgtcgcggacgcgtcgagtttttttagtgtggcgttgttcggcggcgaggggggtgtggaacgaagtacggttaagatagaaaataaagttagtaggttatttggtaggttttgggcgaattatgtaacgaaagtaggggaatgtttgatgcgttttattt

SEQ ID NO: 38094 - DNA, 548 bp, Artificial Sequence
  chemically treated genomic DNA (Homo sapiens) CpG-island No: 38094
aaataaaacgcatcaaacattcccctactttcgttacataattcgcccaaaacctaccaaataacctactaactttattttctatcttaaccgtacttcgttccacacccccctcgccgccgaacaacgccacactaaaaaaactcgacgcgtccgcgacgcgaacaaaccccaataatcacccgaccttaaactaacgtcaaaatccaaccccgccgaccccgcctcccgcccgctctaaaactcccaaacccgacgacgacgaaaacaccaaaaaacgtcctccctacgaaaaaccaaaaaaaccgtacacctaacgacgacccgcgaaaaccgcgcgacaaacgaccacccctccccatccccgccgaccgcgaactacgaatcccccaacccgaacccgaaaaccgacccgctcatccgccctcgaaaacccaaacctcaaataaaactctacaaacacaaacgaatctaattaacgctcgctaatccttaaaacgatcgctctacaaatttcatacgaaataaaatcaaaaaaccgcgcaaaa

SEQ ID NO: 38095 - DNA, 548 bp, Artificial Sequence
  chemically treated genomic DNA (Homo sapiens) CpG-island No: 38095
gagtgggacgtattaaatatttttttgttttcgttgtataattcgtttagaatttgttaggtgatttgttgattttgttttttgttttgatcgtgtttcgttttatatttttttcgtcgtcgggtagcgttatattgagagggttcggcgcgttcgcggcgcgggtagattttagtagttattcggttttggattggcgttaagatttagtttcgtcgatttcgtttttcgttcgttttggagtttttaggttcggcggcggcgggggtattagggggcgttttttttgcgggggattagggggatcgtgtatttggcgacggttcgcgggagtcgcgcggtaggcggttatttttttttattttcgtcgatcgcggattgcgggttttttagttcgggttcgagagtcggttcgtttattcgttttcggggatttaggttttaggtgaagttttgtagatatagacggatttgattagcgttcgttggtttttggggcggtcgttttgtagattttatgcgaaatggggttaaaaggtcgcgtagaa

SEQ ID NO: 38096 - DNA, 548 bp, Artificial Sequence
  chemically treated genomic DNA (Homo sapiens) CpG-island No: 38096
ttctacgcgaccttttaaccccatttcgcataaaatctacaaaacgaccgccccaaaaaccaacgaacgctaatcaaatccgtctatatctacaaaacttcacctaaaacctaaatccccgaaaacgaataaacgaaccgactctcgaacccgaactaaaaaacccgcaatccgcgatcgacgaaaataaaaaaaaataaccgcctaccgcgcgactcccgcgaaccgtcgccaaatacacgatccccctaatcccccgcaaaaaaaacgccccctaatacccccgccgccgccgaacctaaaaactccaaaacgaacgaaaaacgaaatcgacgaaactaaatcttaacgccaatccaaaaccgaataactactaaaatctacccgcgccgcgaacgcgccgaaccctctcaatataacgctacccgacgacgaaaaaaatataaaacgaaacacgatcaaaacaaaaaacaaaatcaacaaatcacctaacaaattctaaacgaattatacaacgaaaacaaaaaaatatttaatacgtcccactc

SEQ ID NO: 38097 - DNA, 528 bp, Artificial Sequence
  chemically treated genomic DNA (Homo sapiens) CpG-island No: 38097
gtcgaggtttttttcgcggtaggcggcgaaagggtttgcgcgttttttttttttttatagtttttcgtttttcgcgggttcgtttttttaggcgaggttaattttcgcgttcgtcgttcgagttttagcggttcgggaggagttttcggcggcgttcggtagagttttcggtcggtgtttcgcggtcgtcgcgtttttagggttattggcgtagcgtacggagaattcggttttcggcgcggtgcgtcgtgttgggttttcgcgtcgggttatttgaagttagaggatttggggcgtattgaagggattgcgttttttagttcgaattcggtttaagtggggtcgggagcgaggtcgggaaagttttattcgtttaaagttttattatcgagaggtatttaaaaaggaaagcgtagagggattttgtttacgcgcgtgtatatatatatttttttatatatatataagtaaatacgagtttttcgttattttttttttagggtttttttaaggttaaatattgttttt

SEQ ID NO: 38098 - DNA, 528 bp, Artificial Sequence
  chemically treated genomic DNA (Homo sapiens) CpG-island No: 38098
aaaaacaatatttaaccttaaaaaaaccctaaaaaaaaaataacgaaaaactcgtatttacttatatatatataaaaaaatatatatatacacgcgcgtaaacaaaatccctctacgctttcctttttaaatacctctcgataataaaactttaaacgaataaaactttcccgacctcgctcccgaccccacttaaaccgaattcgaactaaaaaacgcaatcccttcaatacgccccaaatcctctaacttcaaataacccgacgcgaaaacccaacacgacgcaccgcgccgaaaaccgaattctccgtacgctacgccaataaccctaaaaacgcgacgaccgcgaaacaccgaccgaaaactctaccgaacgccgccgaaaactcctcccgaaccgctaaaactcgaacgacgaacgcgaaaattaacctcgcctaaaaaaacgaacccgcgaaaaacgaaaaactataaaaaaaaaaaaaacgcgcaaaccctttcgccgcctaccgcgaaaaaaacctcgac

SEQ ID NO: 38099 - DNA, 528 bp, Artificial Sequence
  chemically treated genomic DNA (Homo sapiens) CpG-island No: 38099
gggagtaatatttggttttgaggagattttggggaggaagtggcggggagttcgtgtttgtttgtgtgtgtgtgggggggtgtgtgtgtatacgcgcgtgggtagggtttttttgcgtttttttttttaagtgtttttcggtggtgaggttttgggcgggtgagattttttcgatttcgttttcggttttatttaagtcgggttcgagttgggagacgtagtttttttagtgcgttttaaattttttggttttaggtggttcggcgcgggggtttagtacgacgtatcgcgtcgagaatcgggtttttcgtgcgttgcgttagtagttttgggagcgcggcggtcgcggggtatcggtcgagggttttgtcgagcgtcgtcgggagtttttttcggatcgttgaggttcgggcggcgggcgcggaggttggtttcgtttggaggggcgggttcgcgaggggcggggggttgtggaggaggggagggcgcgtaagttttttcgtcgtttgtcgcgggaggggtttcggt

SEQ ID NO: 38100 - DNA, 528 bp, Artificial Sequence
  chemically treated genomic DNA (Homo sapiens) CpG-island No: 38100
accgaaacccctcccgcgacaaacgacgaaaaaacttacgcgccctcccctcctccacaaccccccgcccctcgcgaacccgcccctccaaacgaaaccaacctccgcgcccgccgcccgaacctcaacgatccgaaaaaaactcccgacgacgctcgacaaaaccctcgaccgataccccgcgaccgccgcgctcccaaaactactaacgcaacgcacgaaaaacccgattctcgacgcgatacgtcgtactaaacccccgcgccgaaccacctaaaaccaaaaaatttaaaacgcactaaaaaaactacgtctcccaactcgaacccgacttaaataaaaccgaaaacgaaatcgaaaaaatctcacccgcccaaaacctcaccaccgaaaaacacttaaaaaaaaaaacgcaaaaaaaccctacccacgcgcgtatacacacacacccccccacacacacacaaacaaacacgaactccccgccacttcctccccaaaatctcctcaaaaccaaatattactccc

SEQ ID NO: 38101 - DNA, 533 bp, Artificial Sequence
  chemically treated genomic DNA (Homo sapiens) CpG-island No: 38101
gagatagtttggacgggaattttatcggggagataagttagatatttagtcggagtagtagcggcgttttaggttcgcgttttttagttcggatgttatatttatttagttttcgggtcgggtttcgcgttttttttttttttttttttttttttgttttttcgtattttttttttttttttttttttttttcgtttttttttttttttttttttttttttttttcggcggttttttttttttttttttttttttcgttcgtttttttttttggggatgggagtttcgtttatatttttttttttagtcgttcgatttcgtttagtaggttcgggtttcggaagtttaggtagcgttcgagttcgtagttgtcgtcggagttgggacgtcgttgtttttagttttgggaagcggttggggtttatttggggattacgtgcggaggtattagaaagtatgtatcgattagtcgtcgtattttttaaaaatatttatgggagtttgggtttttttgagtttagtgtaattgttgt

SEQ ID NO: 38102 - DNA, 533 bp, Artificial Sequence
  chemically treated genomic DNA (Homo sapiens) CpG-island No: 38102
acaacaattacactaaactcaaaaaaacccaaactcccataaatatttttaaaaaatacgacgactaatcgatacatactttctaatacctccgcacgtaatccccaaataaaccccaaccgcttcccaaaactaaaaacaacgacgtcccaactccgacgacaactacgaactcgaacgctacctaaacttccgaaacccgaacctactaaacgaaatcgaacgactaaaaaaaaaaatataaacgaaactcccatccccaaaaaaaaaaacgaacgaaaaaaaaaaaaaaaaaaaaaaaaccgccgaaaaaaaaaaaaaaaaaaaaaaaaaaaaaaacgaaaaaaaaaaaaaaaaaaaaaaaaaatacgaaaaaacaaaaaaaaaaaaaaaaaaaaaaaaaacgcgaaacccgacccgaaaactaaataaatataacatccgaactaaaaaacgcgaacctaaaacgccgctactactccgactaaatatctaacttatctccccgataaaattcccgtccaaactatctc

SEQ ID NO: 38103 - DNA, 533 bp, Artificial Sequence
  chemically treated genomic DNA (Homo sapiens) CpG-island No: 38103
gtagtagttatattaaatttagggaagtttagatttttatgggtatttttggaaggtacggcgattagtcggtgtatgttttttagtattttcgtacgtggtttttaggtgagttttagtcgttttttagagttggaggtagcggcgttttagtttcgacggtagttgcggattcgggcgttgtttgggttttcgggattcgggtttgttaggcgaggtcgggcggttggaggggaggatgtgggcggggtttttatttttagaaagggaggcgagcgagggaggagggaaggagggaggggtcgtcggggaagaggaggaggaaggaaagaaagaaagcgagggagggaaagaggaggaaggaagatgcgagaaggtagaggaggagggagggagggaaggagcgcggagttcggttcggaagttaggtgagtgtggtattcgagttgagggacgcgagtttgagacgtcgttgttgtttcggttgagtatttagtttgttttttcgatgggattttcgtttaagttatttt

SEQ ID NO: 38104 - DNA, 533 bp, Artificial Sequence
  chemically treated genomic DNA (Homo sapiens) CpG-island No: 38104
aaaataacttaaacgaaaatcccatcgaaaaaacaaactaaatactcaaccgaaacaacaacgacgtctcaaactcgcgtccctcaactcgaataccacactcacctaacttccgaaccgaactccgcgctccttccctccctccctcctcctctaccttctcgcatcttccttcctcctctttccctccctcgctttctttctttccttcctcctcctcttccccgacgacccctccctccttccctcctccctcgctcgcctccctttctaaaaataaaaaccccgcccacatcctcccctccaaccgcccgacctcgcctaacaaacccgaatcccgaaaacccaaacaacgcccgaatccgcaactaccgtcgaaactaaaacgccgctacctccaactctaaaaaacgactaaaactcacctaaaaaccacgtacgaaaatactaaaaaacatacaccgactaatcgccgtaccttccaaaaatacccataaaaatctaaacttccctaaatttaatataactactac

SEQ ID NO: 38105 - DNA, 566 bp, Artificial Sequence
  chemically treated genomic DNA (Homo sapiens) CpG-island No: 38105
cgatcgttcggcgttcgattttattcggtcggatggagacgcggaattttcggtcgagtttttcgcggttagtgtttttgtcgtgcgtacgcgcggaggggtttgggtttgggagaagggcgacgcggtgcgcgggcgtcgtttgcgggtcgcggcggggagggcgtacgtacgaggggcggacggcgggcgttgagagtggttgaggattcggaaacgcgtcgtagagggtgcggtttagaggaggtcgcgggtcgggaaaggtcggggcgggatcggaaacgttaggttagcggttttcggggtgaagggggtcgagcggacgggtagggtttcgagggcgaattttggtcggatgagtaatatagtagtggggtaggcgcgtgcgtttttagcgtagttggtaggtgggttgcgcgcgggttcggtcgtagcggggcggggcgcggcggttcggtttgcgggtcgcgggcgggttaatttatagtttttgggtggcggtgtcggtagcgtttggggttttcgggtagttgggatggggtttataattttgttgtggttttggt

SEQ ID NO: 38106 - DNA, 566 bp, Artificial Sequence
  chemically treated genomic DNA (Homo sapiens) CpG-island No: 38106
accaaaaccacaacaaaattataaaccccatcccaactacccgaaaaccccaaacgctaccgacaccgccacccaaaaactataaattaacccgcccgcgacccgcaaaccgaaccgccgcgccccgccccgctacgaccgaacccgcgcgcaacccacctaccaactacgctaaaaacgcacgcgcctaccccactactatattactcatccgaccaaaattcgccctcgaaaccctacccgtccgctcgacccccttcaccccgaaaaccgctaacctaacgtttccgatcccgccccgacctttcccgacccgcgacctcctctaaaccgcaccctctacgacgcgtttccgaatcctcaaccactctcaacgcccgccgtccgcccctcgtacgtacgccctccccgccgcgacccgcaaacgacgcccgcgcaccgcgtcgcccttctcccaaacccaaacccctccgcgcgtacgcacgacaaaaacactaaccgcgaaaaactcgaccgaaaattccgcgtctccatccgaccgaataaaatcgaacgccgaacgatcg

SEQ ID NO: 38107 - DNA, 566 bp, Artificial Sequence
  chemically treated genomic DNA (Homo sapiens) CpG-island No: 38107
attaaaattataataaggttgtaggttttattttagttattcgaaagttttaggcgttgtcgatatcgttatttaagggttgtggattagttcgttcgcggttcgtaggtcgggtcgtcgcgtttcgtttcgttacggtcgggttcgcgcgtagtttatttgttagttgcgttgggggcgtacgcgtttgttttattgttatgttatttattcggttagagttcgttttcggggttttgttcgttcgttcggttttttttatttcgggggtcgttgatttaacgttttcggtttcgtttcggtttttttcggttcgcggttttttttgggtcgtattttttgcggcgcgttttcggatttttagttatttttagcgttcgtcgttcgtttttcgtgcgtgcgtttttttcgtcgcggttcgtaagcggcgttcgcgtatcgcgtcgttttttttttaagtttaggttttttcgcgcgtgcgtacggtagaggtattggtcgcgagaggttcggtcgggagtttcgcgtttttattcggtcgggtagaatcgagcgtcgagcgatcg

SEQ ID NO: 38108 - DNA, 566 bp, Artificial Sequence
  chemically treated genomic DNA (Homo sapiens) CpG-island No: 38108
cgatcgctcgacgctcgattctacccgaccgaataaaaacgcgaaactcccgaccgaacctctcgcgaccaatacctctaccgtacgcacgcgcgaaaaaacctaaacttaaaaaaaaaacgacgcgatacgcgaacgccgcttacgaaccgcgacgaaaaaaacgcacgcacgaaaaacgaacgacgaacgctaaaaataactaaaaatccgaaaacgcgccgcaaaaaatacgacccaaaaaaaaccgcgaaccgaaaaaaaccgaaacgaaaccgaaaacgttaaatcaacgacccccgaaataaaaaaaaccgaacgaacgaacaaaaccccgaaaacgaactctaaccgaataaataacataacaataaaacaaacgcgtacgcccccaacgcaactaacaaataaactacgcgcgaacccgaccgtaacgaaacgaaacgcgacgacccgacctacgaaccgcgaacgaactaatccacaacccttaaataacgatatcgacaacgcctaaaactttcgaataactaaaataaaacctacaaccttattataattttaat

SEQ ID NO: 38109 - DNA, 635 bp, Artificial Sequence
  chemically treated genomic DNA (Homo sapiens) CpG-island No: 38109
  unsure (346, 398, 410, 451, 472, 492, 509, 532, 567)
cggtcgcgtagtcgggcggcgattattcgtttttcggtcgttgattttagcgtttcggtttcgtcgtagtttttggtttttcggcgttcgtttttttattcgttatttggttttcgtcgtcgtcgttcgggaagttttcggtattttttagaatagagagtagttgttaacgttaggttgtcgtttgtcgcggggtttcggatacgcggggtttgggcggagaggacgtgatttcgcgttggtttttcgtttttttttttcggtcgggaaattgaggttcgggatcgggaattattttttcgcgagtacggttcgcgagggttcggttaatttcggttttagcgtntcgattttcgcgcgcgatttttcgattatacgcgttcgtcggttattttaanaagcgtggcggngaagcggttttaaagcgagcgtacggtttcggaacgcgtanggcgttagttttcggttaatngttttgcgaaaagtgtgttnttagtttgggtttgttntaatttcgggatatatttttcgnttgttttgtagtacgtattaatatcggttattttngtaatattttttcgcgttatgaggttttttttttaaaatttcgggttttcggtttttgggtaaaaaaa

SEQ ID NO: 38110 - DNA, 635 bp, Artificial Sequence
  chemically treated genomic DNA (Homo sapiens) CpG-island No: 38110
  unsure (69, 104, 127, 144, 164, 185, 226, 238, 290)
tttttttacccaaaaaccgaaaacccgaaattttaaaaaaaaaacctcataacgcgaaaaaatattacnaaaataaccgatattaatacgtactacaaaacaancgaaaaatatatcccgaaattanaacaaacccaaactaanaacacacttttcgcaaaacnattaaccgaaaactaacgccntacgcgttccgaaaccgtacgctcgctttaaaaccgcttcnccgccacgcttnttaaaataaccgacgaacgcgtataatcgaaaaatcgcgcgcgaaaatcganacgctaaaaccgaaattaaccgaaccctcgcgaaccgtactcgcgaaaaaataattcccgatcccgaacctcaatttcccgaccgaaaaaaaaaaacgaaaaaccaacgcgaaatcacgtcctctccgcccaaaccccgcgtatccgaaaccccgcgacaaacgacaacctaacgttaacaactactctctattctaaaaaataccgaaaacttcccgaacgacgacgacgaaaaccaaataacgaataaaaaaacgaacgccgaaaaaccaaaaactacgacgaaaccgaaacgctaaaatcaacgaccgaaaaacgaataatcgccgcccgactacgcgaccg

SEQ ID NO: 38111 - DNA, 635 bp, Artificial Sequence
  chemically treated genomic DNA (Homo sapiens) CpG-island No: 38111
  unsure (69, 104, 127, 144, 164, 185, 226, 238, 290)
tttttttatttaagggtcggaaattcggggttttgaaggaaaggttttataacgcggaaaggtgttgtnaaagtgatcgatgttagtgcgtgttgtagggtaancggaaagtgtgtttcgaggttanagtaggtttaggttggnagtatatttttcgtaaagtnattggtcgggggttggcgttntgcgcgtttcggggtcgtgcgttcgttttgagatcgttttntcgttacgtttnttgaggtgatcgacgggcgcgtgtggtcgaaggatcgcgcgcgggagtcggnacgttaggatcggggttggtcgggttttcgcggatcgtgttcgcggggaagtggttttcggtttcgggttttagtttttcgatcggggagggaaggcggaaggttagcgcggagttacgtttttttcgtttagatttcgcgtgttcggaatttcgcggtaggcggtagtttgacgttggtagttgttttttattttgggaagtgtcgagggtttttcgggcggcggcggcgaaagttaggtggcgggtggggaaacgaacgtcgaggggttagggattgcggcgaggtcggagcgttggggttagcggtcgggggacggatggtcgtcgttcggttgcgcggtcg

SEQ ID NO: 38112 - DNA, 635 bp, Artificial Sequence
  chemically treated genomic DNA (Homo sapiens) CpG-island No: 38112
  unsure (346, 398, 410, 451, 472, 492, 509, 532, 567)
cgaccgcgcaaccgaacgacgaccatccgtcccccgaccgctaaccccaacgctccgacctcgccgcaatccctaacccctcgacgttcgtttccccacccgccacctaactttcgccgccgccgcccgaaaaaccctcgacacttcccaaaataaaaaacaactaccaacgtcaaactaccgcctaccgcgaaattccgaacacgcgaaatctaaacgaaaaaaacgtaactccgcgctaaccttccgccttccctccccgatcgaaaaactaaaacccgaaaccgaaaaccacttccccgcgaacacgatccgcgaaaacccgaccaaccccgatcctaacgtnccgactcccgcgcgcgatccttcgaccacacgcgcccgtcgatcacctcaanaaacgtaacganaaaacgatctcaaaacgaacgcacgaccccgaaacgcgcanaacgccaacccccgaccaatnactttacgaaaaatatactnccaacctaaacctactntaacctcgaaacacactttccgnttaccctacaacacgcactaacatcgatcactttnacaacacctttccgcgttataaaacctttccttcaaaaccccgaatttccgacccttaaataaaaaaa

SEQ ID NO: 38113 - DNA, 597 bp, Artificial Sequence
  chemically treated genomic DNA (Homo sapiens) CpG-island No: 38113
ttttttttcggggtaggttttcgggtttcgagcgttttaggttggcgcgtagtatatttcggttttatgtattcgtcgttcgcggttttgttaatgtttgttttttttggggtgattaggattttttaattttttttcgcgttgaaagtttggtcgtaaagatcgtattttcggggcgggttgagacgtagagaagtcggggcgtttttttgtcggttcgtcgggagttttcgggttcgtagtaggttgaggatacggcgggattcgttgtatttggttagggaggggcggggcgggcgcgttagtgtagttgggggaggtttcgtttcggttttattttttcggtcgttcggtggggaaattcgggagttatttcgcggcgcggttgcggttttgtttcggcgcgataggtaagcggtagaaggagttcgcgatttttttttcgggagggtttttttgagtttttcgattgttcggattttttttcggcggatttcgtttttgtcgagttttcgtttttattttttttttcgttagttttcgtttttttttttttttttttattattttcgatagtaaaatgaaggggttgggtta

SEQ ID NO: 38114 - DNA, 597 bp, Artificial Sequence
  chemically treated genomic DNA (Homo sapiens) CpG-island No: 38114
taacccaaccccttcattttactatcgaaaataataaaaaaaaaaaaaaaaaaacgaaaactaacgaaaaaaaaaataaaaacgaaaactcgacaaaaacgaaatccgccgaaaaaaaatccgaacaatcgaaaaactcaaaaaaaccctcccgaaaaaaaaatcgcgaactccttctaccgcttacctatcgcgccgaaacaaaaccgcaaccgcgccgcgaaataactcccgaatttccccaccgaacgaccgaaaaaataaaaccgaaacgaaacctcccccaactacactaacgcgcccgccccgcccctccctaaccaaatacaacgaatcccgccgtatcctcaacctactacgaacccgaaaactcccgacgaaccgacaaaaaaacgccccgacttctctacgtctcaacccgccccgaaaatacgatctttacgaccaaactttcaacgcgaaaaaaaattaaaaaatcctaatcaccccaaaaaaaacaaacattaacaaaaccgcgaacgacgaatacataaaaccgaaatatactacgcgccaacctaaaacgctcgaaacccgaaaacctaccccgaaaaaaaa

SEQ ID NO: 38115 - DNA, 597 bp, Artificial Sequence
  chemically treated genomic DNA (Homo sapiens) CpG-island No: 38115
tggtttagtttttttattttattgtcgggggtagtgaggaggaagaggaagaggcgaaggttggcggaggaggaggtgagagcgaggattcggtagaagcgagattcgtcgaagggaagttcgagtagtcggggagtttaggggggttttttcggggagagggtcgcgggttttttttgtcgtttatttgtcgcgtcgaggtaaagtcgtagtcgcgtcgcggggtggttttcgggtttttttatcggacggtcgggagggtgggatcggggcgggattttttttagttgtattaacgcgttcgtttcgtttttttttggttaggtgtagcgggtttcgtcgtgtttttagtttgttgcgggttcgggaattttcggcggatcggtagaggggcgtttcggtttttttgcgttttagttcgtttcgggggtgcggtttttgcggttaggtttttagcgcggaaaaagattggagggttttagttattttaaagaggataggtattagtagagtcgcgggcggcgggtgtatggaatcggaatgtgttgcgcgttagtttggagcgttcggagttcggaggtttgtttcggaggggga

SEQ ID NO: 38116 - DNA, 597 bp, Artificial Sequence
  chemically treated genomic DNA (Homo sapiens) CpG-island No: 38116
tccccctccgaaacaaacctccgaactccgaacgctccaaactaacgcgcaacacattccgattccatacacccgccgcccgcgactctactaatacctatcctctttaaaataactaaaaccctccaatctttttccgcgctaaaaacctaaccgcaaaaaccgcacccccgaaacgaactaaaacgcaaaaaaaccgaaacgcccctctaccgatccgccgaaaattcccgaacccgcaacaaactaaaaacacgacgaaacccgctacacctaaccaaaaaaaaacgaaacgaacgcgttaatacaactaaaaaaaatcccgccccgatcccaccctcccgaccgtccgataaaaaaacccgaaaaccaccccgcgacgcgactacgactttacctcgacgcgacaaataaacgacaaaaaaaacccgcgaccctctccccgaaaaaacccccctaaactccccgactactcgaacttcccttcgacgaatctcgcttctaccgaatcctcgctctcacctcctcctccgccaaccttcgcctcttcctcttcctcctcactacccccgacaataaaataaaaaaactaaacca

SEQ ID NO: 38117 - DNA, 718 bp, Artificial Sequence
  chemically treated genomic DNA (Homo sapiens) CpG-island No: 38117
cgtagtagtcgggtcgggatcgggaggcgacggtcgtgggtcgttttttggttcgtttcggacgttgggacgtcggattggtcgtttttttcgggtttgttttcgtcgtttagggcgcggttcgcgtatagtttgttaagttttattgggttttagttcgcgtttcgcgtttcggagattttcgacgtttttgcgaacgcggggtggacgcgacgggttgggttggttttcgtttcgcggtttcgttttcgttttcgttttcgtttcgagtttttcgcgttattagtattcgcggagcgttgcgttgggggcggtcggtgcgtcggggagcggcgtttttagtcgtcgcgattttttgttttagcggagcgttgagtttcggtcgtttcgggtttcggtttttgttacggtcgaggtggttgcggcgaatgtgggcgatcggtttttcggcgttttcgttttttttttcgtgtttatttttttagtcggacgggttgttggtgaagggtcggcgtcgtttcgcgcgtttttttgaatttaacgggggcgggtatcgcggagtcgcggaggttagtagaggtcgaacgaggatttcgagcggaggaagtcgcgggtggcgcgcggggttggcgtagaggtcggagggggtggggggtaggtcgacggggtgggataggaaaagcggagagaaatcgttttttgtaggtttttttggttt

SEQ ID NO: 38118 - DNA, 718 bp, Artificial Sequence
  chemically treated genomic DNA (Homo sapiens) CpG-island No: 38118
aaaccaaaaaaacctacaaaaaacgatttctctccgcttttcctatcccaccccgtcgacctaccccccaccccctccgacctctacgccaaccccgcgcgccacccgcgacttcctccgctcgaaatcctcgttcgacctctactaacctccgcgactccgcgatacccgcccccgttaaattcaaaaaaacgcgcgaaacgacgccgacccttcaccaacaacccgtccgactaaaaaaataaacacgaaaaaaaaaacgaaaacgccgaaaaaccgatcgcccacattcgccgcaaccacctcgaccgtaacaaaaaccgaaacccgaaacgaccgaaactcaacgctccgctaaaacaaaaaatcgcgacgactaaaaacgccgctccccgacgcaccgaccgcccccaacgcaacgctccgcgaatactaataacgcgaaaaactcgaaacgaaaacgaaaacgaaaacgaaaccgcgaaacgaaaaccaacccaacccgtcgcgtccaccccgcgttcgcaaaaacgtcgaaaatctccgaaacgcgaaacgcgaactaaaacccaataaaacttaacaaactatacgcgaaccgcgccctaaacgacgaaaacaaacccgaaaaaaacgaccaatccgacgtcccaacgtccgaaacgaaccaaaaaacgacccacgaccgtcgcctcccgatcccgacccgactactacg

SEQ ID NO: 38119 - DNA, 718 bp, Artificial Sequence
  chemically treated genomic DNA (Homo sapiens) CpG-island No: 38119
gagttaaggggatttgtagagggcggttttttttcgttttttttgttttatttcgtcggtttgttttttatttttttcggtttttgcgttaatttcgcgcgttattcgcggtttttttcgttcggggttttcgttcggtttttgttggttttcgcgatttcgcggtgttcgttttcgttgagtttaaaaggacgcgcggagcggcgtcggttttttattagtagttcgttcgattggaaaggtgagtacgagggaaggggcgggggcgtcggagagtcggtcgtttatattcgtcgtagttatttcggtcgtggtaggaatcgaaattcggagcggtcgaagtttagcgtttcgttggggtagagggtcgcggcggttgggaacgtcgtttttcgacgtatcggtcgtttttagcgtagcgtttcgcgggtgttggtaacgcggggggttcggggcgggggcggggacgggggcggggtcgcggggcgaggattaatttagttcgtcgcgtttatttcgcgttcgtaggggcgtcgaggattttcggggcgcggggcgcgggttggggtttagtgaggtttggtaggttgtgcgcggatcgcgttttggacggcgaaagtaggttcggagggggcggttagttcggcgttttagcgttcgaggcgagttagaaggcggtttacggtcgtcgtttttcggtttcggttcggttattgcg

SEQ ID NO: 38120 - DNA, 718 bp, Artificial Sequence
  chemically treated genomic DNA (Homo sapiens) CpG-island No: 38120
cgcaataaccgaaccgaaaccgaaaaacgacgaccgtaaaccgccttctaactcgcctcgaacgctaaaacgccgaactaaccgccccctccgaacctactttcgccgtccaaaacgcgatccgcgcacaacctaccaaacctcactaaaccccaacccgcgccccgcgccccgaaaatcctcgacgcccctacgaacgcgaaataaacgcgacgaactaaattaatcctcgccccgcgaccccgcccccgtccccgcccccgccccgaaccccccgcgttaccaacacccgcgaaacgctacgctaaaaacgaccgatacgtcgaaaaacgacgttcccaaccgccgcgaccctctaccccaacgaaacgctaaacttcgaccgctccgaatttcgattcctaccacgaccgaaataactacgacgaatataaacgaccgactctccgacgcccccgccccttccctcgtactcacctttccaatcgaacgaactactaataaaaaaccgacgccgctccgcgcgtccttttaaactcaacgaaaacgaacaccgcgaaatcgcgaaaaccaacaaaaaccgaacgaaaaccccgaacgaaaaaaaccgcgaataacgcgcgaaattaacgcaaaaaccgaaaaaaataaaaaacaaaccgacgaaataaaacaaaaaaaacgaaaaaaaaccgccctctacaaatccccttaactc

SEQ ID NO: 38121 - DNA, 543 bp, Artificial Sequence
  chemically treated genomic DNA (Homo sapiens) CpG-island No: 38121
ggcgtatcgttattcgcgcggcgtttattgtttttacggtattaatggtattacgtttaatgtacgggatttgtatttgttcggtaatcggatcgtaggttagttttaagttatgtttatcgcgattttttcggattggattttgcgtcggatgtcgttagtatttcgttaatcgtcgtcgtattttagtcggtatttttgacgtatcgagttacggttgtttatcggtttgtcgttattaaaattagcgtgtttttcggatttatatcgcgaatattaatttgtcggttatttttacgttgattattggtggagttatcggttaggttaacgtttggtatggtacggatgattttcgatatatcgcgggtaatcgggtttttgcggattttatttgcggtgatggtcgaaacgttaggcgtttgtaagttttgttcggcggcggtaacgataatagtatcgttatgtgaaataggagtatcggtcggtttttgtgtttgcgttattttataaatttttagattgattaataaggttagggaa

SEQ ID NO: 38122 - DNA, 543 bp, Artificial Sequence
  chemically treated genomic DNA (Homo sapiens) CpG-island No: 38122
ttccctaaccttattaatcaatctaaaaatttataaaataacgcaaacacaaaaaccgaccgatactcctatttcacataacgatactattatcgttaccgccgccgaacaaaacttacaaacgcctaacgtttcgaccatcaccgcaaataaaatccgcaaaaacccgattacccgcgatatatcgaaaatcatccgtaccataccaaacgttaacctaaccgataactccaccaataatcaacgtaaaaataaccgacaaattaatattcgcgatataaatccgaaaaacacgctaattttaataacgacaaaccgataaacaaccgtaactcgatacgtcaaaaataccgactaaaatacgacgacgattaacgaaatactaacgacatccgacgcaaaatccaatccgaaaaaatcgcgataaacataacttaaaactaacctacgatccgattaccgaacaaatacaaatcccgtacattaaacgtaataccattaataccgtaaaaacaataaacgccgcgcgaataacgatacgcc

SEQ ID NO: 38123 - DNA, 543 bp, Artificial Sequence
  chemically treated genomic DNA (Homo sapiens) CpG-island No: 38123
ttttttggttttgttggttaatttggggatttatggggtagcgtaggtataagagtcgatcgatatttttgttttatatgacgatattattgtcgttatcgtcgtcgagtagaatttataggcgtttggcgtttcgattattatcgtagatgaaattcgtaaaaattcggttgttcgcgatgtgtcgaagattattcgtattatgttaggcgttaatttgatcggtaattttattagtggttagcgtgggaataatcgatagattgatattcgcggtatgggttcggaaaatacgttgattttgatgacggtaagtcggtaagtagtcgtaattcggtacgttaggggtatcgattggaatgcggcgacggttaacggaatattggcgatattcggcgtaggatttaattcggggaaatcgcgatggatataatttggggttgatttgcgattcggttgtcgagtaggtataaatttcgtgtattgaacgtaatgttattaatgtcgtgaaagtagtaaacgtcgcgcggatggcgatgcgtt

SEQ ID NO: 38124 - DNA, 543 bp, Artificial Sequence
  chemically treated genomic DNA (Homo sapiens) CpG-island No: 38124
aacgcatcgccatccgcgcgacgtttactactttcacgacattaataacattacgttcaatacacgaaatttatacctactcgacaaccgaatcgcaaatcaaccccaaattatatccatcgcgatttccccgaattaaatcctacgccgaatatcgccaatattccgttaaccgtcgccgcattccaatcgatacccctaacgtaccgaattacgactacttaccgacttaccgtcatcaaaatcaacgtattttccgaacccataccgcgaatatcaatctatcgattattcccacgctaaccactaataaaattaccgatcaaattaacgcctaacataatacgaataatcttcgacacatcgcgaacaaccgaatttttacgaatttcatctacgataataatcgaaacgccaaacgcctataaattctactcgacgacgataacgacaataatatcgtcatataaaacaaaaatatcgatcgactcttatacctacgctaccccataaatccccaaattaaccaacaaaaccaaaaaa

SEQ ID NO: 38125 - DNA, 508 bp, Artificial Sequence
  chemically treated genomic DNA (Homo sapiens) CpG-island No: 38125
tgagggcgaattttttgatgtgaaatatcgtttttttcgtaagttttgttagtattgcgattatgcgtcgtgcgttgacgtttgttcgatcggtgcgttttttcgcgatgttgttagtgggattgtcgatgttaattcggatttttgcgtcggttgttagtattgtatcgtcgtttgttcgtatcgcgtgcgttttatttattcggttacgaagacggcggataaatgcgatttttgtcgtaagattaatttgtaggtcggtaagttgttcgcgtgcgttgaagtttgttcgattaaggcgttgacgtttggtaatttggacgattttaatagtgagatttcgtaattgttgcgttagaagtttatttatcgttataagttggcgttgggaattaaatcgaagttgtatcgcgtatcgtttaaatacggggaggtgagttaatgacgtagattttcgtattttattttgaatcgttggtgtgggattggtcgattgttatttatttgt

SEQ ID NO: 38126 - DNA, 508 bp, Artificial Sequence
  chemically treated genomic DNA (Homo sapiens) CpG-island No: 38126
acaaataaataacaatcgaccaatcccacaccaacgattcaaaataaaatacgaaaatctacgtcattaactcacctccccgtatttaaacgatacgcgatacaacttcgatttaattcccaacgccaacttataacgataaataaacttctaacgcaacaattacgaaatctcactattaaaatcgtccaaattaccaaacgtcaacgccttaatcgaacaaacttcaacgcacgcgaacaacttaccgacctacaaattaatcttacgacaaaaatcgcatttatccgccgtcttcgtaaccgaataaataaaacgcacgcgatacgaacaaacgacgatacaatactaacaaccgacgcaaaaatccgaattaacatcgacaatcccactaacaacatcgcgaaaaaacgcaccgatcgaacaaacgtcaacgcacgacgcataatcgcaatactaacaaaacttacgaaaaaaacgatatttcacatcaaaaaattcgccctca

SEQ ID NO: 38127 - DNA, 508 bp, Artificial Sequence
  chemically treated genomic DNA (Homo sapiens) CpG-island No: 38127
ataggtagatggtaatcggttagttttatattagcgatttaaaatgaaatgcggaagtttgcgttattggtttattttttcgtatttaaacggtacgcggtatagtttcggtttggtttttagcgttagtttgtagcggtaagtgggtttttggcgtagtagttgcgaaattttattgttgggatcgtttagattgttaaacgttagcgttttggtcgggtaagttttaacgtacgcgggtaatttatcggtttgtaaattggttttacggtagaaatcgtatttgttcgtcgttttcgtgatcggatggataaagcgtacgcggtacggataggcggcgatgtagtattgataatcgacgtagagattcggattaatatcgataattttattggtagtatcgcgaaaagacgtatcggtcgggtagacgttaacgtacggcgtatgatcgtagtgttggtaagatttacggaagaagcgatattttatattaggaaattcgttttta

SEQ ID NO: 38128 - DNA, 508 bp, Artificial Sequence
  chemically treated genomic DNA (Homo sapiens) CpG-island No: 38128
taaaaacgaatttcctaatataaaatatcgcttcttccgtaaatcttaccaacactacgatcatacgccgtacgttaacgtctacccgaccgatacgtcttttcgcgatactaccaataaaattatcgatattaatccgaatctctacgtcgattatcaatactacatcgccgcctatccgtaccgcgtacgctttatccatccgatcacgaaaacgacgaacaaatacgatttctaccgtaaaaccaatttacaaaccgataaattacccgcgtacgttaaaacttacccgaccaaaacgctaacgtttaacaatctaaacgatcccaacaataaaatttcgcaactactacgccaaaaacccacttaccgctacaaactaacgctaaaaaccaaaccgaaactataccgcgtaccgtttaaatacgaaaaaataaaccaataacgcaaacttccgcatttcattttaaatcgctaatataaaactaaccgattaccatctacctat

SEQ ID NO: 38129 - DNA, 702 bp, Artificial Sequence
  chemically treated genomic DNA (Homo sapiens) CpG-island No: 38129
ggagtcgaagttcgcgttggggttgggttttggtcggatcgtaggttgggcggtttttgatttttcgcgtttttcgtttatagtcggagttcggtagttggaagtattcgttatttcggggagcgtttttaggtcgcggttttcggttttcgtcgagcgaggcgggcgggaaggtagggtcgcggtggagcgggtacggtttttcgttttagttcggagttttttcgtttcgtcgggtttcgcggtcgttttttttttattcggaaaatcgtggggaggcgcggcgtagcggtcggatttttggttttcgcgtcgggttgcgttacgtggtagtttttagcgttttttcgtttcggtttcgtatgttgtcgggggagcgtttcgttttatttaggtcgaaattttaggaaggaaattattttgggttggggacgcggtttttttgttcgcggttgttgggtgatgtgttcgaggtttttttgttttttttcgggcgtaggtcgtttattcgcgtcgtcgtttttgagggtcgttgggcgtagaatcgtttcggtcgcggttcggttttaggcgcggtttcgcgtatttttgcgttcgttatagtcggcgggaggcggggaagggagtagttcgggtggtttggagaatattgaatttttaattgggttataaattagataggggagtgcggtggagtttatg

SEQ ID NO: 38130 - DNA, 702 bp, Artificial Sequence
  chemically treated genomic DNA (Homo sapiens) CpG-island No: 38130
cataaactccaccgcactcccctatctaatttataacccaattaaaaattcaatattctccaaaccacccgaactactcccttccccgcctcccgccgactataacgaacgcaaaaatacgcgaaaccgcgcctaaaaccgaaccgcgaccgaaacgattctacgcccaacgaccctcaaaaacgacgacgcgaataaacgacctacgcccgaaaaaaaacaaaaaaacctcgaacacatcacccaacaaccgcgaacaaaaaaaccgcgtccccaacccaaaataatttccttcctaaaatttcgacctaaataaaacgaaacgctcccccgacaacatacgaaaccgaaacgaaaaaacgctaaaaactaccacgtaacgcaacccgacgcgaaaaccaaaaatccgaccgctacgccgcgcctccccacgattttccgaataaaaaaaaaacgaccgcgaaacccgacgaaacgaaaaaactccgaactaaaacgaaaaaccgtacccgctccaccgcgaccctaccttcccgcccgcctcgctcgacgaaaaccgaaaaccgcgacctaaaaacgctccccgaaataacgaatacttccaactaccgaactccgactataaacgaaaaacgcgaaaaatcaaaaaccgcccaacctacgatccgaccaaaacccaaccccaacgcgaacttcgactcc

SEQ ID NO: 38131 - DNA, 702 bp, Artificial Sequence
  chemically treated genomic DNA (Homo sapiens) CpG-island No: 38131
tataaattttatcgtatttttttgtttgatttatagtttaattaaaggtttagtgttttttaagttattcgggttgttttttttttcgtttttcgtcggttgtggcgagcgtaggaatgcgcgaggtcgcgtttaaggtcgggtcgcggtcgaggcggttttgcgtttagcgatttttaggagcggcggcgcgaatgaacggtttgcgttcggagaagggtagagaaatttcgggtatattatttaatagtcgcgagtagaaaggtcgcgtttttagtttagagtgattttttttttggggtttcggtttgagtgggacgaggcgttttttcgatagtatgcgaggtcgggacgggagggcgttgggagttgttacgtggcgtagttcgacgcggaggttaggggttcggtcgttacgtcgcgtttttttacgatttttcgggtgaggaaggggcggtcgcggggttcggcggggcggagaggtttcgggttggggcgggaggtcgtgttcgttttatcgcggttttattttttcgttcgtttcgttcggcgaaggtcggagatcgcggtttggagacgtttttcggggtagcgggtgtttttagttgtcgggtttcggttgtgggcgggaggcgcggggggttaaagatcgtttagtttgcgattcggttagagtttagttttagcgcgggtttcggtttt

SEQ ID NO: 38132 - DNA, 702 bp, Artificial Sequence
  chemically treated genomic DNA (Homo sapiens) CpG-island No: 38132
aaaaccgaaacccgcgctaaaactaaactctaaccgaatcgcaaactaaacgatctttaaccccccgcgcctcccgcccacaaccgaaacccgacaactaaaaacacccgctaccccgaaaaacgtctccaaaccgcgatctccgaccttcgccgaacgaaacgaacgaaaaaataaaaccgcgataaaacgaacacgacctcccgccccaacccgaaacctctccgccccgccgaaccccgcgaccgccccttcctcacccgaaaaatcgtaaaaaaacgcgacgtaacgaccgaacccctaacctccgcgtcgaactacgccacgtaacaactcccaacgccctcccgtcccgacctcgcatactatcgaaaaaacgcctcgtcccactcaaaccgaaaccccaaaaaaaaaatcactctaaactaaaaacgcgacctttctactcgcgactattaaataatatacccgaaatttctctacccttctccgaacgcaaaccgttcattcgcgccgccgctcctaaaaatcgctaaacgcaaaaccgcctcgaccgcgacccgaccttaaacgcgacctcgcgcattcctacgctcgccacaaccgacgaaaaacgaaaaaaaaaacaacccgaataacttaaaaaacactaaacctttaattaaactataaatcaaacaaaaaaatacgataaaatttata

SEQ ID NO: 38133 - DNA, 526 bp, Artificial Sequence
  chemically treated genomic DNA (Homo sapiens) CpG-island No: 38133
gtcgggtcggcgcgggagcggtcgggcgtagttgattacgggtatagataggttaatttttatatggagttgtagaaattttattcgcgggttgcgaagcgtgggttagttaaggtatgttaatttgtttagtatgtgcgtcgcgcggaggagttagattatcggggcgtaggaggcgcggtcgtagtcggcgtttttttgggggagttaataaagagtttaaggtaggtaagtaagtgtatggaggttgcgagcggttttttgcgggcggttcgggggagggcgaggttcggttgtttgcgttcgcgtttttaggttttcggaatcgcgcgttttcgaggtcgagcgagtttcgtcgcgtcgagtttttcgggcgttcgtaggtttggcgtatatcgaagcggggggcgtagtattgttttttcgtttttcggagtcgagttttttcgcgttcgtatcgtgaaaggaggggagcgaggggttagttatttcgaatatttttaattaattaaaatatttgttgatg

SEQ ID NO: 38134 - DNA, 526 bp, Artificial Sequence
  chemically treated genomic DNA (Homo sapiens) CpG-island No: 38134
catcaacaaatattttaattaattaaaaatattcgaaataactaacccctcgctcccctcctttcacgatacgaacgcgaaaaaactcgactccgaaaaacgaaaaaacaatactacgccccccgcttcgatatacgccaaacctacgaacgcccgaaaaactcgacgcgacgaaactcgctcgacctcgaaaacgcgcgattccgaaaacctaaaaacgcgaacgcaaacaaccgaacctcgccctcccccgaaccgcccgcaaaaaaccgctcgcaacctccatacacttacttacctaccttaaactctttattaactcccccaaaaaaacgccgactacgaccgcgcctcctacgccccgataatctaactcctccgcgcgacgcacatactaaacaaattaacataccttaactaacccacgcttcgcaacccgcgaataaaatttctacaactccatataaaaattaacctatctatacccgtaatcaactacgcccgaccgctcccgcgccgacccgac

SEQ ID NO: 38135 - DNA, 526 bp, Artificial Sequence
  chemically treated genomic DNA (Homo sapiens) CpG-island No: 38135
tattagtaaatattttgattagttaaaaatgttcgagatggttaatttttcgtttttttttttttacggtgcgaacgcgaagaggttcggtttcggggggcgggagagtagtattgcgtttttcgtttcggtgtgcgttaggtttgcggacgttcgggaggttcggcgcggcggggttcgttcggtttcgagggcgcgcggtttcgagggtttgggaacgcgagcgtaggtagtcgggtttcgttttttttcgggtcgttcgtaagaagtcgttcgtagtttttatatatttatttgtttgttttaagttttttattaatttttttagaggagcgtcggttgcggtcgcgttttttgcgtttcggtggtttggttttttcgcgcggcgtatatgttaaatagattaatatgttttggttgatttacgtttcgtaattcgcggatagggtttttgtagttttatgtggaaattaatttatttgtattcgtggttagttgcgttcggtcgttttcgcgtcggttcggt

SEQ ID NO: 38136 - DNA, 526 bp, Artificial Sequence
  chemically treated genomic DNA (Homo sapiens) CpG-island No: 38136
accgaaccgacgcgaaaacgaccgaacgcaactaaccacgaatacaaataaattaatttccacataaaactacaaaaaccctatccgcgaattacgaaacgtaaatcaaccaaaacatattaatctatttaacatatacgccgcgcgaaaaaaccaaaccaccgaaacgcaaaaaacgcgaccgcaaccgacgctcctctaaaaaaattaataaaaaacttaaaacaaacaaataaatatataaaaactacgaacgacttcttacgaacgacccgaaaaaaaacgaaacccgactacctacgctcgcgttcccaaaccctcgaaaccgcgcgccctcgaaaccgaacgaaccccgccgcgccgaacctcccgaacgtccgcaaacctaacgcacaccgaaacgaaaaacgcaatactactctcccgccccccgaaaccgaacctcttcgcgttcgcaccgtaaaaaaaaaaaaacgaaaaattaaccatctcgaacatttttaactaatcaaaatatttactaata

SEQ ID NO: 38137 - DNA, 523 bp, Artificial Sequence
  chemically treated genomic DNA (Homo sapiens) CpG-island No: 38137
ttcgtcgcgaggtggaggttgagatagcgtcgtttcgtttttagggtagtcgtttttggttcgatttcgttttcgagagttagtttgagcgggtgcgtttgttcgtcgtatcgtttttttttttttttttgttttgtttttttttgtttcgtttttttagggaatttttcgttttcgttttcgtttttttattacgtcgtcgtttagagtttttttgtattttgtcggagcgaataaggggtcgcgcgggggattagggttggtgtttaaggggtttcgggtggattatttgagattaggcgtatatacgcggggacgtaagatggtagttaaagggaggtcggaagtgatataaggttattttttttaagagttaggaaattgatttcgtcgcgaattcggtttttttttgcgtacgcgcgatagcgtttgtgatggtttagcgagtttttatttttttttttttgttttagcggttgtcggttgtaggttttacgagagattgttggtttggggcgtagtt

SEQ ID NO: 38138 - DNA, 523 bp, Artificial Sequence
  chemically treated genomic DNA (Homo sapiens) CpG-island No: 38138
aactacgccccaaaccaacaatctctcgtaaaacctacaaccgacaaccgctaaaacaaaaaaaaaaaaataaaaactcgctaaaccatcacaaacgctatcgcgcgtacgcaaaaaaaaaccgaattcgcgacgaaatcaatttcctaactcttaaaaaaaataaccttatatcacttccgacctccctttaactaccatcttacgtccccgcgtatatacgcctaatctcaaataatccacccgaaaccccttaaacaccaaccctaatcccccgcgcgaccccttattcgctccgacaaaatacaaaaaaactctaaacgacgacgtaataaaaaaacgaaaacgaaaacgaaaaattccctaaaaaaacgaaacaaaaaaaaacaaaacaaaaaaaaaaaaaaaaacgatacgacgaacaaacgcacccgctcaaactaactctcgaaaacgaaatcgaaccaaaaacgactaccctaaaaacgaaacgacgctatctcaacctccacctcgcgacgaa

SEQ ID NO: 38139 - DNA, 523 bp, Artificial Sequence
  chemically treated genomic DNA (Homo sapiens) CpG-island No: 38139
ggttgcgttttaagttagtagtttttcgtagggtttatagtcggtagtcgttggagtaggaggaggagaatagggattcgttggattattataaacgttgtcgcgcgtgcgtagggaggaatcgagttcgcggcgaagttagttttttgatttttgaaggaagtggttttgtgttattttcggtttttttttagttgttattttgcgttttcgcgtgtgtgcgtttaattttaggtggtttattcgagattttttgagtattaattttagtttttcgcgcggttttttattcgtttcgataaggtataaaaaggttttggacggcggcgtggtaggaggacgggagcgggggcgggaagttttttgaaggagcgagatagggagggatagggtagaggaggagaggaaggcgatgcgacggataggcgtattcgtttaggttgattttcgggggcgaggtcgagttaggggcggttgttttgggggcgaggcgacgttgttttaatttttatttcgcggcgga

SEQ ID NO: 38140 - DNA, 523 bp, Artificial Sequence
  chemically treated genomic DNA (Homo sapiens) CpG-island No: 38140
tccgccgcgaaataaaaattaaaacaacgtcgcctcgcccccaaaacaaccgcccctaactcgacctcgcccccgaaaatcaacctaaacgaatacgcctatccgtcgcatcgccttcctctcctcctctaccctatccctccctatctcgctccttcaaaaaacttcccgcccccgctcccgtcctcctaccacgccgccgtccaaaacctttttataccttatcgaaacgaataaaaaaccgcgcgaaaaactaaaattaatactcaaaaaatctcgaataaaccacctaaaattaaacgcacacacgcgaaaacgcaaaataacaactaaaaaaaaaccgaaaataacacaaaaccacttccttcaaaaatcaaaaaactaacttcgccgcgaactcgattcctccctacgcacgcgcgacaacgtttataataatccaacgaatccctattctcctcctcctactccaacgactaccgactataaaccctacgaaaaactactaacttaaaacgcaacc

SEQ ID NO: 38141 - DNA, 721 bp, Artificial Sequence
  chemically treated genomic DNA (Homo sapiens) CpG-island No: 38141
cggggagtttttagtaggcggggttagtaggatgttatcgtcgtttttttttttttttagattttttagttcgtttttttcggcgtacgagcgtcgtcgtcgtcgtcgttgcgcggggatagttagtcggggttcgttatcgtcgttttcgtcgtcgtttttttttttttcgtttttttcgttttcgtttttttttattacgtcgatgtttgttttttcggcgaggttagaggtatcggatattttagtgtttagggttatagttgtggcgcggcggcggcggggcggcgtatgggggcgtcgggtttcgggttttttttgcgttttagttcgggtttcgggcggtaggttcggtcggggggcgttacgttgggggcgttgcgattgcggttgtcggagttgcgtcggggttgtcgggtggcggcggagtttcgcgcgtcgattttataatttttgcgtcgtcgcggtagtcgcgcggatgttgcgttttttgggtttcgttcgcgttcggttcgggcggaggatttgatttttttttttcggagtagtttttgtttcgttagttgaggagggggtggcggggttcgggcgggcgaattagaacgttaggcgtttaggaacgtgcgggacgggtgagagtttaagaatagagttcggcgaggttagggttgagtttaggagagggcggatttttttcggtttatagtagaagggggtttgt

SEQ ID NO: 38142 - DNA, 721 bp, Artificial Sequence
  chemically treated genomic DNA (Homo sapiens) CpG-island No: 38142
acaaacccccttctactataaaccgaaaaaaatccgccctctcctaaactcaaccctaacctcgccgaactctattcttaaactctcacccgtcccgcacgttcctaaacgcctaacgttctaattcgcccgcccgaaccccgccaccccctcctcaactaacgaaacaaaaactactccgaaaaaaaaaaatcaaatcctccgcccgaaccgaacgcgaacgaaacccaaaaaacgcaacatccgcgcgactaccgcgacgacgcaaaaattataaaatcgacgcgcgaaactccgccgccacccgacaaccccgacgcaactccgacaaccgcaatcgcaacgcccccaacgtaacgccccccgaccgaacctaccgcccgaaacccgaactaaaacgcaaaaaaaacccgaaacccgacgcccccatacgccgccccgccgccgccgcgccacaactataaccctaaacactaaaatatccgatacctctaacctcgccgaaaaaacaaacatcgacgtaataaaaaaaaacgaaaacgaaaaaaacgaaaaaaaaaaaaacgacgacgaaaacgacgataacgaaccccgactaactatccccgcgcaacgacgacgacgacgacgctcgtacgccgaaaaaaacgaactaaaaaatctaaaaaaaaaaaaaaacgacgataacatcctactaaccccgcctactaaaaactccccg

SEQ ID NO: 38143 - DNA, 721 bp, Artificial Sequence
  chemically treated genomic DNA (Homo sapiens) CpG-island No: 38143
ataggtttttttttgttataagtcgaggaaggttcgtttttttttggatttagttttggtttcgtcgagttttgtttttagatttttattcgtttcgtacgtttttgggcgtttggcgttttgattcgttcgttcgggtttcgttattttttttttagttgacggggtaaaagttgtttcgagaggagaaggttaagtttttcgttcgggtcgggcgcgagcggagtttagggagcgtagtattcgcgcggttatcgcggcggcgtaggagttataaagtcggcgcgcgagatttcgtcgttattcggtagtttcggcgtagtttcggtagtcgtagtcgtagcgtttttagcgtggcgtttttcggtcgggtttgtcgttcgggattcgggttggggcgtagagggagttcggagttcggcgtttttatgcgtcgtttcgtcgtcgtcgcgttatagttatgattttgagtattgagatgttcgatgtttttggtttcgtcgaggaaatagatatcgacgtggtgggggagggcgaggacgaagaagacgaggaagaggaggacgacgacgagggcggcggtggcgggtttcggttggttgttttcgcgtagcggcggcggcggcggcgttcgtacgtcggggaggacgagttggaggatttggaggaggaggaggacgacgatgatattttgttggtttcgtttgttgggggtttttcg

SEQ ID NO: 38144 - DNA, 721 bp, Artificial Sequence
  chemically treated genomic DNA (Homo sapiens) CpG-island No: 38144
cgaaaaacccccaacaaacgaaaccaacaaaatatcatcgtcgtcctcctcctcctccaaatcctccaactcgtcctccccgacgtacgaacgccgccgccgccgccgctacgcgaaaacaaccaaccgaaacccgccaccgccgccctcgtcgtcgtcctcctcttcctcgtcttcttcgtcctcgccctcccccaccacgtcgatatctatttcctcgacgaaaccaaaaacatcgaacatctcaatactcaaaatcataactataacgcgacgacgacgaaacgacgcataaaaacgccgaactccgaactccctctacgccccaacccgaatcccgaacgacaaacccgaccgaaaaacgccacgctaaaaacgctacgactacgactaccgaaactacgccgaaactaccgaataacgacgaaatctcgcgcgccgactttataactcctacgccgccgcgataaccgcgcgaatactacgctccctaaactccgctcgcgcccgacccgaacgaaaaacttaaccttctcctctcgaaacaacttttaccccgtcaactaaaaaaaaaataacgaaacccgaacgaacgaatcaaaacgccaaacgcccaaaaacgtacgaaacgaataaaaatctaaaaacaaaactcgacgaaaccaaaactaaatccaaaaaaaaacgaaccttcctcgacttataacaaaaaaaaacctat

SEQ ID NO: 38145 - DNA, 765 bp, Artificial Sequence
  chemically treated genomic DNA (Homo sapiens) CpG-island No: 38145
ttgcggttcgttatcggatggggtttattttggggtcgtagagcgtaggcggcggaggtgcgacggcggcgaagtttacgaggtttcgtagaaggtggttcgtgtcgtttcggggacgtgtgtgggtttcgtaaggtgttgttaatttttttcgaacgttagcgttttcgataattaaaggcgattgtttcgggtttagatcgttgttcgtcgtttcgtttttggagggtagagtataggttgtggggtttttcgcgcgcgtttcggttcggtttcggggagtcgaatttttttcggatcgcgttttaagtagcgttcgggcgtttttttttttgttcggtcggagtcgcgtttttcgcgtttcgcgtagtttatcgttcgttggttggtttcggacggttgttggcgaggaggtgttgcgggcgtcggcggggcggtggtttcgagttttaaatatttttagtttcgttcggttcgtttttttcgaggcggggcggcgtttttgtttagttagtttttttttcggattaggttgggcgagtttcgcgtcggttagatatttcgagtcgtcgtcgtaggggcgattaggaagttttcgacggggagagcgcgggtattgaggggcgcgattttcgttgttatcgttaggtttcgtggcgttttcgggatttgggttgcggtcgcgtttgtttttcgttttttttagaattatttgagtgaagaattcgttgagaggaatttaattaataggttgttttatttgta

SEQ ID NO: 38146 - DNA, 765 bp, Artificial Sequence
  chemically treated genomic DNA (Homo sapiens) CpG-island No: 38146
tacaaataaaacaacctattaattaaattcctctcaacgaattcttcactcaaataattctaaaaaaaacgaaaaacaaacgcgaccgcaacccaaatcccgaaaacgccacgaaacctaacgataacaacgaaaatcgcgcccctcaatacccgcgctctccccgtcgaaaacttcctaatcgcccctacgacgacgactcgaaatatctaaccgacgcgaaactcgcccaacctaatccgaaaaaaaaactaactaaacaaaaacgccgccccgcctcgaaaaaaacgaaccgaacgaaactaaaaatatttaaaactcgaaaccaccgccccgccgacgcccgcaacacctcctcgccaacaaccgtccgaaaccaaccaacgaacgataaactacgcgaaacgcgaaaaacgcgactccgaccgaacaaaaaaaaaaacgcccgaacgctacttaaaacgcgatccgaaaaaaattcgactccccgaaaccgaaccgaaacgcgcgcgaaaaaccccacaacctatactctaccctccaaaaacgaaacgacgaacaacgatctaaacccgaaacaatcgcctttaattatcgaaaacgctaacgttcgaaaaaaattaacaacaccttacgaaacccacacacgtccccgaaacgacacgaaccaccttctacgaaacctcgtaaacttcgccgccgtcgcacctccgccgcctacgctctacgaccccaaaataaaccccatccgataacgaaccgcaa

SEQ ID NO: 38147 - DNA, 765 bp, Artificial Sequence
  chemically treated genomic DNA (Homo sapiens) CpG-island No: 38147
tataaataaagtaatttattaattgaattttttttagcgaattttttatttaggtgattttggagagggcgggggatagacgcggtcgtagtttaggtttcgggagcgttacggaatttaacggtggtagcggaggtcgcgttttttagtgttcgcgtttttttcgtcgggagttttttggtcgtttttgcggcggcggttcggggtgtttggtcggcgcggggttcgtttagtttggttcggggagaggattggttgggtaggggcgtcgtttcgtttcgggagaggcgggtcgggcggggttgggagtatttgaggttcggagttatcgtttcgtcggcgttcgtagtattttttcgttagtagtcgttcggagttagttaacgagcggtgagttgcgcggggcgcgggggacgcggtttcggtcgggtaggggagagggcgttcgggcgttgtttggggcgcggttcggagagggttcggtttttcgggatcgggtcggggcgcgcgcggagagttttatagtttgtgttttgttttttaggagcggggcggcgggtagcgatttgggttcggggtagtcgtttttgattatcgagggcgttggcgttcggggaaggttggtagtattttacgagatttatatacgttttcggggcggtacgggttattttttgcggagtttcgtgggtttcgtcgtcgtcgtattttcgtcgtttgcgttttgcggttttagagtaagttttattcggtgacgagtcgtag

SEQ ID NO: 38148 - DNA, 765 bp, Artificial Sequence
  chemically treated genomic DNA (Homo sapiens) CpG-island No: 38148
ctacgactcgtcaccgaataaaacttactctaaaaccgcaaaacgcaaacgacgaaaatacgacgacgacgaaacccacgaaactccgcaaaaaataacccgtaccgccccgaaaacgtatataaatctcgtaaaatactaccaaccttccccgaacgccaacgccctcgataatcaaaaacgactaccccgaacccaaatcgctacccgccgccccgctcctaaaaaacaaaacacaaactataaaactctccgcgcgcgccccgacccgatcccgaaaaaccgaaccctctccgaaccgcgccccaaacaacgcccgaacgccctctcccctacccgaccgaaaccgcgtcccccgcgccccgcgcaactcaccgctcgttaactaactccgaacgactactaacgaaaaaatactacgaacgccgacgaaacgataactccgaacctcaaatactcccaaccccgcccgacccgcctctcccgaaacgaaacgacgcccctacccaaccaatcctctccccgaaccaaactaaacgaaccccgcgccgaccaaacaccccgaaccgccgccgcaaaaacgaccaaaaaactcccgacgaaaaaaacgcgaacactaaaaaacgcgacctccgctaccaccgttaaattccgtaacgctcccgaaacctaaactacgaccgcgtctatcccccgccctctccaaaatcacctaaataaaaaattcgctaaaaaaaattcaattaataaattactttatttata

SEQ ID NO: 38149 - DNA, 724 bp, Artificial Sequence
  chemically treated genomic DNA (Homo sapiens) CpG-island No: 38149
tagtcgtttagggacgtacgaataaagggagttcgggattaatcggagcgaatcggttttttagcgggtcgcgttcgtcgggaaggggtgggggaggggtcggttcgcgttcgtttcgtttcgtagttagatttgacgttaggcgtttagaaattcgtcgggcgcgacgttagcggttttcgatattttttttttggggggcgatttttaggtagttcgtagcgtggaggaaggcgatcgatagaaacgtttagttttggtgttaggtaggcgattacggttcgagtattggacgtgattcgatgtatttcggttatcgcgttcgtttttcgtttggtcgcgttcgcgggtttcgtaattttagtttttcgatttttttttacgatttttattagtatcgaagtagttttattcggtaatattcgagatcgtagtagggtttagaagcggcgatgggttcgagggattgggttttgaagacgcgggcgtagtttgattgacggtagttagagtagcggcggtaatagtattagtagcgcgcggttttttttggcgtcggaataggaagcgtcgagcgtatcgttttcgttcgttttttttttttttttaggtcgcgtcgcgtgcgtttttcgtaggtttttggcggtattgcggttcgttaggtttagggggatgggttttatttggcgtcggtttcgggtcgtttttttttggtgggcgggtt

SEQ ID NO: 38150 - DNA, 724 bp, Artificial Sequence
  chemically treated genomic DNA (Homo sapiens) CpG-island No: 38150
aacccgcccaccaaaaaaaaacgacccgaaaccgacgccaaataaaacccatccccctaaacctaacgaaccgcaataccgccaaaaacctacgaaaaacgcacgcgacgcgacctaaaaaaaaaaaaaaaacgaacgaaaacgatacgctcgacgcttcctattccgacgccaaaaaaaaccgcgcgctactaatactattaccgccgctactctaactaccgtcaatcaaactacgcccgcgtcttcaaaacccaatccctcgaacccatcgccgcttctaaaccctactacgatctcgaatattaccgaataaaactacttcgatactaataaaaatcgtaaaaaaaaatcgaaaaactaaaattacgaaacccgcgaacgcgaccaaacgaaaaacgaacgcgataaccgaaatacatcgaatcacgtccaatactcgaaccgtaatcgcctacctaacaccaaaactaaacgtttctatcgatcgccttcctccacgctacgaactacctaaaaatcgccccccaaaaaaaaaatatcgaaaaccgctaacgtcgcgcccgacgaatttctaaacgcctaacgtcaaatctaactacgaaacgaaacgaacgcgaaccgacccctcccccaccccttcccgacgaacgcgacccgctaaaaaaccgattcgctccgattaatcccgaactccctttattcgtacgtccctaaacgacta

SEQ ID NO: 38151 - DNA, 724 bp, Artificial Sequence
  chemically treated genomic DNA (Homo sapiens) CpG-island No: 38151
agttcgtttattaggggaaagcggttcggagtcggcgttaggtggagtttatttttttaggtttggcgggtcgtagtatcgttaggggtttgcgggaggcgtacgcggcgcggtttgaggggagggggagaacgggcggaggcggtgcgttcggcgttttttgtttcggcgttaggaggagtcgcgcgttgttggtgttgttgtcgtcgttgttttagttgtcgttagttaggttgcgttcgcgtttttagggtttagtttttcggatttatcgtcgtttttagattttattgcggtttcggatattgtcgggtgaggttgtttcggtattagtgggagtcgtgaaggggaatcggggagttggggttgcggagttcgcgggcgcggttaagcgggaagcgggcgcggtgatcgaggtgtatcgagttacgtttagtgttcgggtcgtggtcgtttgtttggtattaggattaagcgtttttatcggtcgtttttttttacgttgcgggttgtttggggatcgttttttagggagaaggtgtcggaggtcgttgacgtcgcgttcgacgggtttttgggcgtttgacgttaggtttggttgcggggcggggcgggcgcgggtcggttttttttttattttttttcggcgggcgcgattcgttaggaggtcggttcgtttcggttgatttcggattttttttgttcgtgcgtttttaaacggttg

SEQ ID NO: 38152 - DNA, 724 bp, Artificial Sequence
  chemically treated genomic DNA (Homo sapiens) CpG-island No: 38152
caaccgtttaaaaacgcacgaacaaaaaaaatccgaaatcaaccgaaacgaaccgacctcctaacgaatcgcgcccgccgaaaaaaaataaaaaaaaaaccgacccgcgcccgccccgccccgcaaccaaacctaacgtcaaacgcccaaaaacccgtcgaacgcgacgtcaacgacctccgacaccttctccctaaaaaacgatccccaaacaacccgcaacgtaaaaaaaaacgaccgataaaaacgcttaatcctaataccaaacaaacgaccacgacccgaacactaaacgtaactcgatacacctcgatcaccgcgcccgcttcccgcttaaccgcgcccgcgaactccgcaaccccaactccccgattccccttcacgactcccactaataccgaaacaacctcacccgacaatatccgaaaccgcaataaaatctaaaaacgacgataaatccgaaaaactaaaccctaaaaacgcgaacgcaacctaactaacgacaactaaaacaacgacgacaacaacaccaacaacgcgcgactcctcctaacgccgaaacaaaaaacgccgaacgcaccgcctccgcccgttctccccctcccctcaaaccgcgccgcgtacgcctcccgcaaacccctaacgatactacgacccgccaaacctaaaaaaataaactccacctaacgccgactccgaaccgctttcccctaataaacgaact

SEQ ID NO: 38153 - DNA, 618 bp, Artificial Sequence
  chemically treated genomic DNA (Homo sapiens) CpG-island No: 38153
gggtttttcgcgaggggcgtgtttttgtttggtttcgttcgtttcggttcggtagcgaatgaagcgggcgcgtcgggagggcgcgaggttagggggttggggacgcgcgtggggatcgttattcggttcggttattgttgggcggatatttgggcgcgtcgtcgcgggaggagttcggattcgggtcgaggttgtttaggtaatgcgtttattcggcgtaaatatggttgcggttttgcgcgtcgcgggcgttttgtttcgcgattcgcgtaagtgggtttgtcgcggcggtcgttagggttaggatttttgagaaggcgtgggtagagcggtaagtgggtttgtcgcggcggtcgttagggttaggatttttgagaaggcgtgggtagagcgggtagttggcgtttgggttttcgcgttcgggggattcggggagcggttttgggggtgttgcgagtaatcgggcgaggggcgtcgcggagaagggagggttgagggtagtatttagggttcgggaggtcgcggggagggcgttcggatttaggaggcgtaggtttaagttttatcggtcggttgggtggtttggagtagtggttggaattttttagagttttggtt

SEQ ID NO: 38154 - DNA, 618 bp, Artificial Sequence
  chemically treated genomic DNA (Homo sapiens) CpG-island No: 38154
aaccaaaactctaaaaaattccaaccactactccaaaccacccaaccgaccgataaaacttaaacctacgcctcctaaatccgaacgccctccccgcgacctcccgaaccctaaatactaccctcaaccctcccttctccgcgacgcccctcgcccgattactcgcaacacccccaaaaccgctccccgaatcccccgaacgcgaaaacccaaacgccaactacccgctctacccacgccttctcaaaaatcctaaccctaacgaccgccgcgacaaacccacttaccgctctacccacgccttctcaaaaatcctaaccctaacgaccgccgcgacaaacccacttacgcgaatcgcgaaacaaaacgcccgcgacgcgcaaaaccgcaaccatatttacgccgaataaacgcattacctaaacaacctcgacccgaatccgaactcctcccgcgacgacgcgcccaaatatccgcccaacaataaccgaaccgaataacgatccccacgcgcgtccccaaccccctaacctcgcgccctcccgacgcgcccgcttcattcgctaccgaaccgaaacgaacgaaaccaaacaaaaacacgcccctcgcgaaaaaccc

SEQ ID NO: 38155 - DNA, 618 bp, Artificial Sequence
  chemically treated genomic DNA (Homo sapiens) CpG-island No: 38155
aattaaggttttgggaaattttagttattgttttaagttatttagtcgatcgatgggatttgaatttgcgttttttggattcgggcgtttttttcgcggtttttcgagttttgagtgttgtttttagttttttttttttcgcgacgtttttcgttcggttgttcgtagtatttttaaggtcgtttttcgaatttttcgggcgcgagggtttaggcgttagttgttcgttttgtttacgtttttttagggattttggttttggcggtcgtcgcgatagatttatttatcgttttgtttacgtttttttagggattttggttttggcggtcgtcgcgatagatttatttacgcggatcgcggagtaggacgttcgcggcgcgtagggtcgtagttatgtttgcgtcgagtgaacgtattgtttgggtagtttcggttcgagttcgggtttttttcgcggcggcgcgtttaggtgttcgtttagtagtggtcgagtcgggtagcgatttttacgcgcgtttttagttttttgatttcgcgttttttcggcgcgttcgttttattcgttgtcgggtcggggcgggcgaggttaggtagagatacgtttttcgcggagagttt

SEQ ID NO: 38156 - DNA, 618 bp, Artificial Sequence
  chemically treated genomic DNA (Homo sapiens) CpG-island No: 38156
aaactctccgcgaaaaacgtatctctacctaacctcgcccgccccgacccgacaacgaataaaacgaacgcgccgaaaaaacgcgaaatcaaaaaactaaaaacgcgcgtaaaaatcgctacccgactcgaccactactaaacgaacacctaaacgcgccgccgcgaaaaaaacccgaactcgaaccgaaactacccaaacaatacgttcactcgacgcaaacataactacgaccctacgcgccgcgaacgtcctactccgcgatccgcgtaaataaatctatcgcgacgaccgccaaaaccaaaatccctaaaaaaacgtaaacaaaacgataaataaatctatcgcgacgaccgccaaaaccaaaatccctaaaaaaacgtaaacaaaacgaacaactaacgcctaaaccctcgcgcccgaaaaattcgaaaaacgaccttaaaaatactacgaacaaccgaacgaaaaacgtcgcgaaaaaaaaaaaactaaaaacaacactcaaaactcgaaaaaccgcgaaaaaaacgcccgaatccaaaaaacgcaaattcaaatcccatcgatcgactaaataacttaaaacaataactaaaatttcccaaaaccttaatt

SEQ ID NO: 38157 - DNA, 668 bp, Artificial Sequence
  chemically treated genomic DNA (Homo sapiens) CpG-island No: 38157
  unsure (446, 579, 625)
agttattgcgcgtattgtttttacggttttatgttcgacggtttcgggacgcggttgggtcggggcgggcggtaaggatgcggtcgtcgtcgtcgtcgcggttttttcgcgtttcgtcgacgttaatagtcgtcggtttttttttcgcgcgggatcgagggagtaggagtcgtagttgacgggtcgcgggcgtcgcgttaggttcggtttcggtttcggttcgggtgcgtcgcgattcggtcgtcgttgtagcgagtttcgcgcgtttttcgtgcgtttcggtcggttcggcggcggttgtcgcgtataggttttcgattttagcgttcggttcgttattgagtatgtttagtacgtcggtcggtttcgttgcggttcgtaagtttttagacgcgcgggtgggagcgcgtcggcggtcggggttggggtttgtggtcgagggcggngcgcgggggaggggtcggcggaggggggcggcggttagaaaggggatttcgcgttttcgtttgtagttttgcggggtttacgtagttttcggcgttttggggttttttttcgggcggtttttcggttttgcgnggagtgtggttgaatattgtaatacgatggggttttttaggatttnttaaaatataaatgtttaaaggagcgacggattaattggggta

SEQ ID NO: 38158 - DNA, 668 bp, Artificial Sequence
  chemically treated genomic DNA (Homo sapiens) CpG-island No: 38158
  unsure (44, 90, 223)
taccccaattaatccgtcgctcctttaaacatttatattttaanaaatcctaaaaaaccccatcgtattacaatattcaaccacactccncgcaaaaccgaaaaaccgcccgaaaaaaaaccccaaaacgccgaaaactacgtaaaccccgcaaaactacaaacgaaaacgcgaaatcccctttctaaccgccgcccccctccgccgacccctcccccgcgcnccgccctcgaccacaaaccccaaccccgaccgccgacgcgctcccacccgcgcgtctaaaaacttacgaaccgcaacgaaaccgaccgacgtactaaacatactcaataacgaaccgaacgctaaaatcgaaaacctatacgcgacaaccgccgccgaaccgaccgaaacgcacgaaaaacgcgcgaaactcgctacaacgacgaccgaatcgcgacgcacccgaaccgaaaccgaaaccgaacctaacgcgacgcccgcgacccgtcaactacgactcctactccctcgatcccgcgcgaaaaaaaaaccgacgactattaacgtcgacgaaacgcgaaaaaaccgcgacgacgacgacgaccgcatccttaccgcccgccccgacccaaccgcgtcccgaaaccgtcgaacataaaaccgtaaaaacaatacgcgcaataact

SEQ ID NO: 38159 - DNA, 668 bp, Artificial Sequence
  chemically treated genomic DNA (Homo sapiens) CpG-island No: 38159
  unsure (44, 90, 223)
tgttttaattaattcgtcgtttttttgagtatttgtgttttagngggttttgggggattttatcgtattatagtatttagttatattttncgtaaagtcgggaagtcgttcgagagaagattttaggacgtcgggggttgcgtgagtttcgtaaggttgtaggcgggggcgcgggattttttttttggtcgtcgttttttttcgtcggtttttttttcgcgtntcgttttcggttatagattttagtttcggtcgtcggcgcgtttttattcgcgcgtttggggatttgcggatcgtagcgagatcggtcggcgtgttgggtatgtttagtggcgggtcgggcgttggagtcggaagtttgtgcgcggtagtcgtcgtcgagtcggtcggggcgtacggagagcgcgcgggattcgttgtagcggcggtcgggtcgcggcgtattcgggtcgggatcggagtcgagtttagcgcggcgttcgcgattcgttagttgcggtttttgttttttcgatttcgcgcggggaaagggtcggcggttgttggcgtcggcggggcgcggaggaatcgcggcggcggcggcggtcgtatttttgtcgttcgtttcggtttagtcgcgtttcggagtcgtcgggtatggagtcgtggaagtagtgcgcgtagtggtt

SEQ ID NO: 38160 - DNA, 668 bp, Artificial Sequence
  chemically treated genomic DNA (Homo sapiens) CpG-island No: 38160
  unsure (446, 579, 625)
aaccactacgcgcactacttccacgactccatacccgacgactccgaaacgcgactaaaccgaaacgaacgacaaaaatacgaccgccgccgccgccgcgattcctccgcgccccgccgacgccaacaaccgccgaccctttccccgcgcgaaatcgaaaaaacaaaaaccgcaactaacgaatcgcgaacgccgcgctaaactcgactccgatcccgacccgaatacgccgcgacccgaccgccgctacaacgaatcccgcgcgctctccgtacgccccgaccgactcgacgacgactaccgcgcacaaacttccgactccaacgcccgacccgccactaaacatacccaacacgccgaccgatctcgctacgatccgcaaatccccaaacgcgcgaataaaaacgcgccgacgaccgaaactaaaatctataaccgaaaacganacgcgaaaaaaaaaccgacgaaaaaaaacgacgaccaaaaaaaaaatcccgcgcccccgcctacaaccttacgaaactcacgcaacccccgacgtcctaaaatcttctctcgaacgacttcccgactttacgnaaaatataactaaatactataatacgataaaatcccccaaaacccnctaaaacacaaatactcaaaaaaacgacgaattaattaaaaca

SEQ ID NO: 38161 - DNA, 558 bp, Artificial Sequence
  chemically treated genomic DNA (Homo sapiens) CpG-island No: 38161
tgtgttacgtgatggtcgtcgggatttaacgtgtgagttattttatacgatgtttgatgcgtgcgatgttttttaagttcgtagttgttatcgtcgtgatcgtgaggtttttttagtagagtggaaggttttatttcggacggagcgtggaggttaggagggaggatggttggtcggttcgggacggcgtcgttttgttttttcggtcgatttttagttttattggttagcggttgggtcgtgacggagaggtttgcgttgttgttgagggttaggtcgtgggttgaagtgcggggttcgggttcgagcgtcggaagtttgcgggggtcgtgggttgaagcgcggggtttcggttcgagcgtgggaagtttgcgggggtcgtgggttgaagcgcggggttcgggttcgagcgtgggaagtttgtttgtttgtcgtgtgggatcggtcgcggagatgtcggttgtttatttggaacgaaggtgtttgttttgtgtgtgtcgggtagtttgggggattgtttttttgttcgtggttttcggcgtgtttttagtattttga

SEQ ID NO: 38162 - DNA, 558 bp, Artificial Sequence
  chemically treated genomic DNA (Homo sapiens) CpG-island No: 38162
tcaaaatactaaaaacacgccgaaaaccacgaacaaaaaaacaatcccccaaactacccgacacacacaaaacaaacaccttcgttccaaataaacaaccgacatctccgcgaccgatcccacacgacaaacaaacaaacttcccacgctcgaacccgaaccccgcgcttcaacccacgacccccgcaaacttcccacgctcgaaccgaaaccccgcgcttcaacccacgacccccgcaaacttccgacgctcgaacccgaaccccgcacttcaacccacgacctaaccctcaacaacaacgcaaacctctccgtcacgacccaaccgctaaccaataaaactaaaaatcgaccgaaaaaacaaaacgacgccgtcccgaaccgaccaaccatcctccctcctaacctccacgctccgtccgaaataaaaccttccactctactaaaaaaacctcacgatcacgacgataacaactacgaacttaaaaaacatcgcacgcatcaaacatcgtataaaataactcacacgttaaatcccgacgaccatcacgtaacaca

SEQ ID NO: 38163 - DNA, 558 bp, Artificial Sequence
  chemically treated genomic DNA (Homo sapiens) CpG-island No: 38163
ttaggatgttgggaatacgtcggaagttacgaataggaagataattttttaaattattcggtatatatagggtaggtattttcgttttaagtgaatagtcggtattttcgcggtcggttttatacgataaataggtaagttttttacgttcgagttcgggtttcgcgttttaatttacgattttcgtaggttttttacgttcgagtcggggtttcgcgttttaatttacgattttcgtaggttttcgacgttcgagttcgggtttcgtattttaatttacgatttggtttttaatagtagcgtaggttttttcgttacggtttagtcgttgattaatgggattgagaatcggtcggaggggtagagcgacgtcgtttcggatcggttagttatttttttttttggtttttacgtttcgttcggggtgaggttttttattttgttgaaggagttttacggttacggcgatgatagttacgagtttggggaatatcgtacgtattaggtatcgtgtggagtgatttatacgttgaatttcggcggttattacgtgatata

SEQ ID NO: 38164 - DNA, 558 bp, Artificial Sequence
  chemically treated genomic DNA (Homo sapiens) CpG-island No: 38164
tatatcacgtaataaccgccgaaattcaacgtataaatcactccacacgatacctaatacgtacgatattccccaaactcgtaactatcatcgccgtaaccgtaaaactccttcaacaaaataaaaaacctcaccccgaacgaaacgtaaaaaccaaaaaaaaaaataactaaccgatccgaaacgacgtcgctctacccctccgaccgattctcaatcccattaatcaacgactaaaccgtaacgaaaaaacctacgctactattaaaaaccaaatcgtaaattaaaatacgaaacccgaactcgaacgtcgaaaacctacgaaaatcgtaaattaaaacgcgaaaccccgactcgaacgtaaaaaacctacgaaaatcgtaaattaaaacgcgaaacccgaactcgaacgtaaaaaacttacctatttatcgtataaaaccgaccgcgaaaataccgactattcacttaaaacgaaaatacctaccctatatataccgaataatttaaaaaattatcttcctattcgtaacttccgacgtattcccaacatcctaa

SEQ ID NO: 38165 - DNA, 730 bp, Artificial Sequence
  chemically treated genomic DNA (Homo sapiens) CpG-island No: 38165
  unsure (498)
gttgggcgcgcgttttttggaattagagaggaggtggtcggggcggggtcgggggaggggggtagggtagagtcggcgggagttcggcgttgattggtcggtttggttggcgggttttcgtcgttggttcgtagtcggcgtagcggtttgggttgggatgtgaggagcggcgggtttcgggtttcgggttttgggtggcggcggttgtgagcggcggtattgcggcgtaggttagcgggcgtcgtcggcggttggttttgtcggtcgcgggatgaggaagcggatcgagttcgtcgttttggagtatgagcgttgcgtcgtcgcgggttcgttttttttcggttcggtcgtcgcggcgttggacgtcgattgtcgtttgaagtagaatttacgtttgacgggttcggcggcggttgagtcgcgttgcgtagtcgacgcgggaatgaagcgggcgttgggtaggtgaggtttcgcgcggagcggggggggggggggggncggttttttattttgcgtaggtgcgtttcgtagggggtcgcggtattttttagttttttttagagtggtcgttcgttcgattcgcggtcgttttcgttcgcgtttgtgtttcgtatttggttcgcggtagttttattttcgtttttttttttaggtatcgcggcgggagcgttttgttttgtcgttgattttttgtgttttgtttcggttttttcgttaggtatttttggtt

SEQ ID NO: 38166 - DNA, 730 bp, Artificial Sequence
  chemically treated genomic DNA (Homo sapiens) CpG-island No: 38166
  unsure (233)
aaccaaaaatacctaacgaaaaaaccgaaacaaaacacaaaaaatcaacgacaaaacaaaacgctcccgccgcgatacctaaaaaaaaaaacgaaaataaaactaccgcgaaccaaatacgaaacacaaacgcgaacgaaaacgaccgcgaatcgaacgaacgaccactctaaaaaaaactaaaaaataccgcgaccccctacgaaacgcacctacgcaaaataaaaaaccgnccccccccccccccccgctccgcgcgaaacctcacctacccaacgcccgcttcattcccgcgtcgactacgcaacgcgactcaaccgccgccgaacccgtcaaacgtaaattctacttcaaacgacaatcgacgtccaacgccgcgacgaccgaaccgaaaaaaaacgaacccgcgacgacgcaacgctcatactccaaaacgacgaactcgatccgcttcctcatcccgcgaccgacaaaaccaaccgccgacgacgcccgctaacctacgccgcaataccgccgctcacaaccgccgccacccaaaacccgaaacccgaaacccgccgctcctcacatcccaacccaaaccgctacgccgactacgaaccaacgacgaaaacccgccaaccaaaccgaccaatcaacgccgaactcccgccgactctaccctacccccctcccccgaccccgccccgaccacctcctctctaattccaaaaaacgcgcgcccaac

SEQ ID NO: 38167 - DNA, 730 bp, Artificial Sequence
  chemically treated genomic DNA (Homo sapiens) CpG-island No: 38167
  unsure (233)
ggttaggagtgtttggcgagagggtcggagtaggatatagggggttagcggtagggtagggcgttttcgtcgcggtgtttggggaagggagcgggggtggggttgtcgcgggttaaatgcgggatataggcgcggacgggggcggtcgcggatcgggcggacggttattttgggaggggttgggaggtatcgcggttttttgcgggacgtatttgcgtaaagtgagggatcgntttttttttttttttcgtttcgcgcgaagttttatttgtttagcgttcgttttattttcgcgtcggttgcgtagcgcggtttagtcgtcgtcgggttcgttaggcgtaggttttgttttaggcggtagtcggcgtttagcgtcgcggcggtcgagtcggaggaggacgagttcgcggcggcgtagcgtttatgttttaaggcgacgggttcggttcgtttttttatttcgcggtcgatagggttagtcgtcgacggcgttcgttggtttgcgtcgtagtgtcgtcgtttatagtcgtcgttatttagagttcggagttcggaattcgtcgttttttatattttagtttaggtcgttgcgtcggttacgaattagcggcgggggttcgttagttaggtcggttaattagcgtcgggttttcgtcggttttgttttatttttttttttcggtttcgtttcggttattttttttttagttttaaggagcgcgcgtttagt

SEQ ID NO: 38168 - DNA, 730 bp, Artificial Sequence
  chemically treated genomic DNA (Homo sapiens) CpG-island No: 38168
  unsure (498)
actaaacgcgcgctccttaaaactaaaaaaaaaataaccgaaacgaaaccgaaaaaaaaaaataaaacaaaaccgacgaaaacccgacgctaattaaccgacctaactaacgaacccccgccgctaattcgtaaccgacgcaacgacctaaactaaaatataaaaaacgacgaattccgaactccgaactctaaataacgacgactataaacgacgacactacgacgcaaaccaacgaacgccgtcgacgactaaccctatcgaccgcgaaataaaaaaacgaaccgaacccgtcgccttaaaacataaacgctacgccgccgcgaactcgtcctcctccgactcgaccgccgcgacgctaaacgccgactaccgcctaaaacaaaacctacgcctaacgaacccgacgacgactaaaccgcgctacgcaaccgacgcgaaaataaaacgaacgctaaacaaataaaacttcgcgcgaaacgaaaaaaaaaaaaaaancgatccctcactttacgcaaatacgtcccgcaaaaaaccgcgatacctcccaacccctcccaaaataaccgtccgcccgatccgcgaccgcccccgtccgcgcctatatcccgcatttaacccgcgacaaccccacccccgctcccttccccaaacaccgcgacgaaaacgccctaccctaccgctaaccccctatatcctactccgaccctctcgccaaacactcctaacc

SEQ ID NO: 38169 - DNA, 525 bp, Artificial Sequence
  chemically treated genomic DNA (Homo sapiens) CpG-island No: 38169
cgaacgttttcggcgagcggagcgtttaacgatgttcgatcggttcgttttattcgaagcgcgcgcgcggttgggtcgtcgatataacgtcgtcgcgtcgttttttcggcgtcgcgatcgacgttcgttttcgtgtttttcgcgtcgtcgcgcgcgcggattcgcgtaacgttcgaggttcgcgcgtcgtatcgtcgtcggcgttttcggtacggtcggtcggatgttttcgttcgtttttttagtattttttttttcgtcgattttcgcggtttcgtgttcgtttagttttttcgattaggtcggtttcggatttcgtcgtcgttttcgcgcgcgtcgttcgtcgtcgtcgtatttatttcgttatttttcggggtcgcgattcgcgttttttttcgttacgattttttcgtttcgcgatttataatgtttgtcgtttcgtaagcgttttgtagcgtataatttttgattcgcggggttaggggttgttgggggttttataattttttgcgaatttaaaagaga

SEQ ID NO: 38170 - DNA, 525 bp, Artificial Sequence
  chemically treated genomic DNA (Homo sapiens) CpG-island No: 38170
tctcttttaaattcgcaaaaaattataaaacccccaacaacccctaaccccgcgaatcaaaaattatacgctacaaaacgcttacgaaacgacaaacattataaatcgcgaaacgaaaaaatcgtaacgaaaaaaaacgcgaatcgcgaccccgaaaaataacgaaataaatacgacgacgacgaacgacgcgcgcgaaaacgacgacgaaatccgaaaccgacctaatcgaaaaaactaaacgaacacgaaaccgcgaaaatcgacgaaaaaaaaaatactaaaaaaacgaacgaaaacatccgaccgaccgtaccgaaaacgccgacgacgatacgacgcgcgaacctcgaacgttacgcgaatccgcgcgcgcgacgacgcgaaaaacacgaaaacgaacgtcgatcgcgacgccgaaaaaacgacgcgacgacgttatatcgacgacccaaccgcgcgcgcgcttcgaataaaacgaaccgatcgaacatcgttaaacgctccgctcgccgaaaacgttcg

SEQ ID NO: 38171 - DNA, 525 bp, Artificial Sequence
  chemically treated genomic DNA (Homo sapiens) CpG-island No: 38171
ttttttttgggttcgtaagaagttataggatttttaataatttttgatttcgcgggttaggggttgtgcgttataaggcgtttgcggggcggtagatattatgggtcgcgagacgggaaggtcgtggcggggaggggcgcgggtcgcgatttcggggagtggcggagtgggtgcggcggcggcgaacgacgcgcgcgggggcggcggcgaggttcgaggtcggtttaatcgaagaagttgggcgggtacgggatcgcgggggtcggcgggggggggggtattgggggggcgggcgggggtattcggtcggtcgtgtcggaggcgtcggcggcggtgcggcgcgcgagtttcgggcgttgcgcgggttcgcgcgcgcggcggcgcggggggtacgagggcgggcgtcggtcgcggcgtcggggagacggcgcggcggcgttgtgtcggcggtttagtcgcgcgcgcgtttcgggtggagcgagtcggtcgggtatcgttgagcgtttcgttcgtcgaggacgttcg

SEQ ID NO: 38172 - DNA, 525 bp, Artificial Sequence
  chemically treated genomic DNA (Homo sapiens) CpG-island No: 38172
cgaacgtcctcgacgaacgaaacgctcaacgatacccgaccgactcgctccacccgaaacgcgcgcgcgactaaaccgccgacacaacgccgccgcgccgtctccccgacgccgcgaccgacgcccgccctcgtaccccccgcgccgccgcgcgcgcgaacccgcgcaacgcccgaaactcgcgcgccgcaccgccgccgacgcctccgacacgaccgaccgaatacccccgcccgcccccccaatacccccccccccgccgacccccgcgatcccgtacccgcccaacttcttcgattaaaccgacctcgaacctcgccgccgcccccgcgcgcgtcgttcgccgccgccgcacccactccgccactccccgaaatcgcgacccgcgcccctccccgccacgaccttcccgtctcgcgacccataatatctaccgccccgcaaacgccttataacgcacaacccctaacccgcgaaatcaaaaattattaaaaatcctataacttcttacgaacccaaaaaaaa

SEQ ID NO: 38173 - DNA, 664 bp, Artificial Sequence
  chemically treated genomic DNA (Homo sapiens) CpG-island No: 38173
  unsure (464, 510, 542)
attcgttaacgttaatgggggttcgcgattgttgcggggacgagggcgtagagtagttttcgttacgggtcggtttacgtaggggtcgagaaagtggcggagaggcggtggtcgaggtttaggggcgagcgcgggttgagttggtttttgttgcgtttacgagcgatatttattttttcgttgcggacgtttcgcgggcgttaggttgggggttttgcgatcgatttttttcgttttcgaggtatcgtcgggttcgtttggtaggtagcgcgtttcgcgagttggagggtcgagtttcgcgggtcgtggggcgtgtgggtgaaggcgatatttcggatgcgggacgtatgaatggtggtagagtaggggtcgggattcgtttatgggttgggagagagatgtttttgtgagtacggaaaagtaacgttgtcggaggatagttttgaggcgggattaaaagtcgncggcgaaagttcgtcgagggatacggtcgttgttcgggtcgttttncgagcgttttttttttgaagggaagatttttnttcgcgggtttttcggagggtgcggaagcgggttttaaggtagttttttttgttttttttggggaacggttgttaaggttttcggttcgttttttgtatcggtttaggggtaaggaaaggtt

SEQ ID NO: 38174 - DNA, 664 bp, Artificial Sequence
  chemically treated genomic DNA (Homo sapiens) CpG-island No: 38174
  unsure (123, 155, 201)
aacctttccttacccctaaaccgatacaaaaaacgaaccgaaaaccttaacaaccgttccccaaaaaaaacaaaaaaaactaccttaaaacccgcttccgcaccctccgaaaaacccgcgaanaaaaatcttcccttcaaaaaaaaaacgctcgnaaaacgacccgaacaacgaccgtatccctcgacgaactttcgccgncgacttttaatcccgcctcaaaactatcctccgacaacgttacttttccgtactcacaaaaacatctctctcccaacccataaacgaatcccgacccctactctaccaccattcatacgtcccgcatccgaaatatcgccttcacccacacgccccacgacccgcgaaactcgaccctccaactcgcgaaacgcgctacctaccaaacgaacccgacgatacctcgaaaacgaaaaaaatcgatcgcaaaacccccaacctaacgcccgcgaaacgtccgcaacgaaaaaataaatatcgctcgtaaacgcaacaaaaaccaactcaacccgcgctcgcccctaaacctcgaccaccgcctctccgccactttctcgacccctacgtaaaccgacccgtaacgaaaactactctacgccctcgtccccgcaacaatcgcgaacccccattaacgttaacgaat

SEQ ID NO: 38175 - DNA, 664 bp, Artificial Sequence
  chemically treated genomic DNA (Homo sapiens) CpG-island No: 38175
  unsure (123, 155, 201)
aatttttttttatttttagatcggtataaaaaacgggtcgggggttttaataatcgttttttaaaaaaaatagggggaattgttttaaaattcgttttcgtatttttcggagaattcgcgggngggaattttttttttaaaaaaagaacgttcgngaagcggttcgggtaacggtcgtgtttttcggcgggttttcgtcgncggtttttgatttcgttttagagttgtttttcggtagcgttattttttcgtgtttataaaagtattttttttttaatttatgaacggatttcgatttttgttttgttattatttatgcgtttcgtattcgaggtgtcgtttttatttatacgttttacggttcgcgaaattcggttttttagttcgcgggacgcgttgtttgttaggcgggttcggcggtatttcgggggcgggaggggtcggtcgtagggtttttagtttggcgttcgcggggcgttcgtagcgaaggggtgggtgtcgttcgtgaacgtagtagggattagtttagttcgcgttcgtttttgggtttcggttatcgttttttcgttattttttcggtttttgcgtggatcggttcgtggcgggggttgttttgcgttttcgttttcgtagtagtcgcggatttttattaacgttgacgagt

SEQ ID NO: 38176 - DNA, 664 bp, Artificial Sequence
  chemically treated genomic DNA (Homo sapiens) CpG-island No: 38176
  unsure (464, 510, 542)
actcgtcaacgttaataaaaatccgcgactactacgaaaacgaaaacgcaaaacaacccccgccacgaaccgatccacgcaaaaaccgaaaaaataacgaaaaaacgataaccgaaacccaaaaacgaacgcgaactaaactaatccctactacgttcacgaacgacacccaccccttcgctacgaacgccccgcgaacgccaaactaaaaaccctacgaccgacccctcccgcccccgaaataccgccgaacccgcctaacaaacaacgcgtcccgcgaactaaaaaaccgaatttcgcgaaccgtaaaacgtataaataaaaacgacacctcgaatacgaaacgcataaataataacaaaacaaaaatcgaaatccgttcataaattaaaaaaaaaatacttttataaacacgaaaaaataacgctaccgaaaaacaactctaaaacgaaatcaaaaaccgncgacgaaaacccgccgaaaaacacgaccgttacccgaaccgcttcncgaacgttctttttttaaaaaaaaaattcccncccgcgaattctccgaaaaatacgaaaacgaattttaaaacaattccccctattttttttaaaaaacgattattaaaacccccgacccgttttttataccgatctaaaaataaaaaaaaatt

SEQ ID NO: 38177 - DNA, 602 bp, Artificial Sequence
  chemically treated genomic DNA (Homo sapiens) CpG-island No: 38177
  unsure (548, 560)
gcgcggttgtcgtgtttttttttttttttgcggttcgcgcgttcgtcggtggcgttttcgtgttgtggtttcgcgtttgttcgttttgtgtgtcgcgtcgcgtttcgtttttttttcgttgcgttttggcggttttcggcggttcgtggggttcggttttcgtcggcgtttttcgcgcgggcgttcgcgtttcgggtgtttggggtggggttcgtttttttttttgcgggtcgcgtttcgcgggttcggttttggcgttttttttttcgcgttttcggtgttcgtgcgtcgcggttgttcgttcgtcggcgcggcgcggtcgttgcgttcgtgtcgggcgtcgtgttttttcgttcgtcgttcgttacggttcgttggatcgttcgcgtttttgtcgggtgtattttcgcgcgtggttcgttcgcggttcgtcgttgtggcggtcgtgttcgcgcgttgcggggcgggtgtttcggggcgcggttttttgcgcgcgggtcggcgttcgtcgtcgtcgcgttgtttgggcgtcgtttgcgtgggtcgtntgtttcgttgtntgcgggagtatgcggtagtgtggtcgcgttcgtcgttatttg

SEQ ID NO: 38178 - DNA, 602 bp, Artificial Sequence
  chemically treated genomic DNA (Homo sapiens) CpG-island No: 38178
  unsure (43, 55)
caaataacgacgaacgcgaccacactaccgcatactcccgcanacaacgaaacanacgacccacgcaaacgacgcccaaacaacgcgacgacgacgaacgccgacccgcgcgcaaaaaaccgcgccccgaaacacccgccccgcaacgcgcgaacacgaccgccacaacgacgaaccgcgaacgaaccacgcgcgaaaatacacccgacaaaaacgcgaacgatccaacgaaccgtaacgaacgacgaacgaaaaaacacgacgcccgacacgaacgcaacgaccgcgccgcgccgacgaacgaacaaccgcgacgcacgaacaccgaaaacgcgaaaaaaaaaacgccaaaaccgaacccgcgaaacgcgacccgcaaaaaaaaaaacgaaccccaccccaaacacccgaaacgcgaacgcccgcgcgaaaaacgccgacgaaaaccgaaccccacgaaccgccgaaaaccgccaaaacgcaacgaaaaaaaaacgaaacgcgacgcgacacacaaaacgaacaaacgcgaaaccacaacacgaaaacgccaccgacgaacgcgcgaaccgcaaaaaaaaaaaaaaacacgacaaccgcgc

SEQ ID NO: 38179 - DNA, 602 bp, Artificial Sequence
  chemically treated genomic DNA (Homo sapiens) CpG-island No: 38179
  unsure (43, 55)
taagtggcgacggacgcggttatattgtcgtatgttttcgtangtagcgagatangcggtttacgtagacggcgtttagatagcgcggcgacgacgaacgtcgattcgcgcgtagaagatcgcgtttcggggtattcgtttcgtagcgcgcgagtacggtcgttataacgacgaatcgcgggcgggttacgcgcgggagtgtattcggtagggacgcgagcgatttagcgggtcgtggcggacgacgagcggaggggtacggcgttcgatacgggcgtagcgatcgcgtcgcgtcgacgggcggatagtcgcgacgtacggatatcgggggcgcggaaaggagggcgttagaatcggattcgcgaggcgcgattcgtaaaaagaaaaacggattttattttaagtattcggggcgcgggcgttcgcgcggagagcgtcggcgggggtcgggttttacgggtcgtcgggagtcgttagggcgtagcggagagaaggcggagcgcggcgcggtatataagacgggtaggcgcgggattatagtacgggagcgttatcggcgagcgcgcgggtcgtaggggagggggagagtacggtagtcgcgt

SEQ ID NO: 38180 - DNA, 602 bp, Artificial Sequence
  chemically treated genomic DNA (Homo sapiens) CpG-island No: 38180
  unsure (548, 560)
acgcgactaccgtactctccccctcccctacgacccgcgcgctcgccgataacgctcccgtactataatcccgcgcctacccgtcttatataccgcgccgcgctccgccttctctccgctacgccctaacgactcccgacgacccgtaaaacccgacccccgccgacgctctccgcgcgaacgcccgcgccccgaatacttaaaataaaatccgtttttctttttacgaatcgcgcctcgcgaatccgattctaacgccctcctttccgcgcccccgatatccgtacgtcgcgactatccgcccgtcgacgcgacgcgatcgctacgcccgtatcgaacgccgtacccctccgctcgtcgtccgccacgacccgctaaatcgctcgcgtccctaccgaatacactcccgcgcgtaacccgcccgcgattcgtcgttataacgaccgtactcgcgcgctacgaaacgaataccccgaaacgcgatcttctacgcgcgaatcgacgttcgtcgtcgccgcgctatctaaacgccgtctacgtaaaccgcntatctcgctacntacgaaaacatacgacaatataaccgcgtccgtcgccactta

SEQ ID NO: 38181 - DNA, 746 bp, Artificial Sequence
  chemically treated genomic DNA (Homo sapiens) CpG-island No: 38181
  unsure (580, 604, 660)
tatacgtaagcggcggcgggtgtggttggtgtgattaagatggtgatggcgatgcggtacgggtagttgttacgtacgttgtacgtggaatcgtcgtcgtcggaggtggattggtcggcggggacggtttaattttttacggagaatacgttttggtttaggagtggtcgtgttcgtcgggtgggggtgtcgtcgttcgggattagtggtattaacgcgtacgttattttcgaatagttttcgggagtgtcgagttagtttgcggggtcgggttcgggttttgtcgtggatgtttcggtggtgtcgtggatggtgtcgggtaaaatattcgaagcgttattcgcgtaggtaacggcgttgatgatttatttggacgagcgatttgatgttttttcgttggatgttgggtattcgttggcgttgatacggtcggcgtttgatgagcgagcggtggtgttggggtcggatcgtgaaacgttgttgtgcggtgtgaaagcgttgtttgtcggttatgaggtttttgggttggtgatcgatttgtggggttgggggtcgatcggttttgtgtttttcgttaggntggtagtggtttgggatggttcgnggttttatcggtttttttcggtgtcgttgttgttttgacgagtttggtttagttgnatgtatatttggttagaaattcgggttcggaggtggtggtcggtttgatttttaatttttgatacgattttgtggcgtaattcgtt

SEQ ID NO: 38182 - DNA, 746 bp, Artificial Sequence
  chemically treated genomic DNA (Homo sapiens) CpG-island No: 38182
  unsure (87, 143, 167)
aacgaattacgccacaaaatcgtatcaaaaattaaaaatcaaaccgaccaccacctccgaacccgaatttctaaccaaatatacatncaactaaaccaaactcgtcaaaacaacaacgacaccgaaaaaaaccgataaaaccncgaaccatcccaaaccactaccancctaacgaaaaacacaaaaccgatcgacccccaaccccacaaatcgatcaccaacccaaaaacctcataaccgacaaacaacgctttcacaccgcacaacaacgtttcacgatccgaccccaacaccaccgctcgctcatcaaacgccgaccgtatcaacgccaacgaatacccaacatccaacgaaaaaacatcaaatcgctcgtccaaataaatcatcaacgccgttacctacgcgaataacgcttcgaatattttacccgacaccatccacgacaccaccgaaacatccacgacaaaacccgaacccgaccccgcaaactaactcgacactcccgaaaactattcgaaaataacgtacgcgttaataccactaatcccgaacgacgacacccccacccgacgaacacgaccactcctaaaccaaaacgtattctccgtaaaaaattaaaccgtccccgccgaccaatccacctccgacgacgacgattccacgtacaacgtacgtaacaactacccgtaccgcatcgccatcaccatcttaatcacaccaaccacacccgccgccgcttacgtata

SEQ ID NO: 38183 - DNA, 746 bp, Artificial Sequence
  chemically treated genomic DNA (Homo sapiens) CpG-island No: 38183
  unsure (87, 143, 167)
aacggattgcgttataaagtcgtattaaaaattgggaattaaatcggttattattttcgaattcgaatttttggttagatgtgtatntagttgggttaagttcgttaaggtagtaacgatatcgaaaaaagtcggtaaagttncgggttattttaagttattgttantttgacggaaaatatagagtcgatcggtttttagttttatagatcggttattaatttagaagttttatgatcggtagatagcgtttttatatcgtataataacgttttacggttcgattttagtattatcgttcgtttattaagcgtcgatcgtgttaacgttagcgagtatttaatatttagcgaggagatattaggtcgttcgtttagataggttattaacgtcgttgtttgcgcggatagcgtttcgggtgttttgttcgatattatttacggtattatcggaatatttacgatagaattcgaattcggtttcgtagattgattcggtattttcgggggttgttcgaggatgacgtgcgcgttagtattattgatttcgaacgacgatatttttattcgacgaatacgattatttttgggttagggcgtgtttttcgtaaggagttgaatcgttttcgtcgattaatttattttcggcgacggcgattttacgtgtaacgtgcgtggtagttgttcgtgtcgtatcgttattattattttgattatattagttatattcgtcgtcgtttgcgtatg

SEQ ID NO: 38184 - DNA, 746 bp, Artificial Sequence
  chemically treated genomic DNA (Homo sapiens) CpG-island No: 38184
  unsure (580, 604, 660)
catacgcaaacgacgacgaatataactaatataatcaaaataataataacgatacgacacgaacaactaccacgcacgttacacgtaaaatcgccgtcgccgaaaataaattaatcgacgaaaacgattcaactccttacgaaaaacacgccctaacccaaaaataatcgtattcgtcgaataaaaatatcgtcgttcgaaatcaataatactaacgcgcacgtcatcctcgaacaacccccgaaaataccgaatcaatctacgaaaccgaattcgaattctatcgtaaatattccgataataccgtaaataatatcgaacaaaacacccgaaacgctatccgcgcaaacaacgacgttaataacctatctaaacgaacgacctaatatctcctcgctaaatattaaatactcgctaacgttaacacgatcgacgcttaataaacgaacgataatactaaaatcgaaccgtaaaacgttattatacgatataaaaacgctatctaccgatcataaaacttctaaattaataaccgatctataaaactaaaaaccgatcgactctatattttccgtcaaantaacaataacttaaaataacccgnaactttaccgacttttttcgatatcgttactaccttaacgaacttaacccaactanatacacatctaaccaaaaattcgaattcgaaaataataaccgatttaattcccaatttttaatacgactttataacgcaatccgtt

SEQ ID NO: 38185 - DNA, 524 bp, Artificial Sequence
  chemically treated genomic DNA (Homo sapiens) CpG-island No: 38185
cggtggcggtttgaggagcggtcgagtgaagagatgaacggaggcgtagtgaatggcgaggtcgagtgaacggtgagaacggagaggtgagagaaagaaatcgaagtagaagttgaggtgtttttgcggtcgagtgaatgggaggcgagattgagtgaaaaggaagcgatggtgagacggtgaaggttcgacgatcgagtaggcggtgaatagagaggagtagcggggttaagagtgaagagggaggaaacgttgagacggtgaagtttttggcgaagtgaagggcggagtggtcgagtgaacggcgagtggtgagaagggagagatggtaaaattggttttatcgttgagtgaaagagaggatgaaggcggtggcgtgagtgtcggtggttgtgtcgtaatcgagtgagaagggagacgaagtcggaggggagagatcgagtgtttttgtgtggtcgagtgtttggagaggaagagagatggtgaggtttggtcgagagagagttgtgagggagagatgtcga

SEQ ID NO: 38186 - DNA, 524 bp, Artificial Sequence
  chemically treated genomic DNA (Homo sapiens) CpG-island No: 38186
tcgacatctctccctcacaactctctctcgaccaaacctcaccatctctcttcctctccaaacactcgaccacacaaaaacactcgatctctcccctccgacttcgtctcccttctcactcgattacgacacaaccaccgacactcacgccaccgccttcatcctctctttcactcaacgataaaaccaattttaccatctctcccttctcaccactcgccgttcactcgaccactccgcccttcacttcgccaaaaacttcaccgtctcaacgtttcctccctcttcactcttaaccccgctactcctctctattcaccgcctactcgatcgtcgaaccttcaccgtctcaccatcgcttccttttcactcaatctcgcctcccattcactcgaccgcaaaaacacctcaacttctacttcgatttctttctctcacctctccgttctcaccgttcactcgacctcgccattcactacgcctccgttcatctcttcactcgaccgctcctcaaaccgccaccg

SEQ ID NO: 38187 - DNA, 524 bp, Artificial Sequence
  chemically treated genomic DNA (Homo sapiens) CpG-island No: 38187
tcgatattttttttttataattttttttcgattaaattttattatttttttttttttttaaatattcgattatataaaaatattcgatttttttttttcggtttcgtttttttttttattcgattacgatatagttatcgatatttacgttatcgtttttatttttttttttatttaacgatgggattagttttgttatttttttttttttattattcgtcgtttattcgattatttcgttttttatttcgttagaagttttatcgttttaacgttttttttttttttatttttgatttcgttgtttttttttatttatcgtttattcgatcgtcggatttttatcgttttattatcgttttttttttatttaatttcgttttttatttattcgatcgtaagagtattttagtttttatttcgattttttttttttattttttcgtttttatcgtttattcgatttcgttatttattgcgttttcgtttatttttttattcgatcgttttttaaatcgttatcg

SEQ ID NO: 38188 - DNA, 524 bp, Artificial Sequence
  chemically treated genomic DNA (Homo sapiens) CpG-island No: 38188
cgataacgatttaaaaaacgatcgaataaaaaaataaacgaaaacgcaataaataacgaaatcgaataaacgataaaaacgaaaaaataaaaaaaaaaaatcgaaataaaaactaaaatactcttacgatcgaataaataaaaaacgaaattaaataaaaaaaaaacgataataaaacgataaaaatccgacgatcgaataaacgataaataaaaaaaaacaacgaaatcaaaaataaaaaaaaaaaaaacgttaaaacgataaaacttctaacgaaataaaaaacgaaataatcgaataaacgacgaataataaaaaaaaaaaaataacaaaactaatcccatcgttaaataaaaaaaaaaataaaaacgataacgtaaatatcgataactatatcgtaatcgaataaaaaaaaaaacgaaaccgaaaaaaaaaaatcgaatatttttatataatcgaatatttaaaaaaaaaaaaaaataataaaatttaatcgaaaaaaaattataaaaaaaaaatatcga

SEQ ID NO: 38189 - DNA, 761 bp, Artificial Sequence
  chemically treated genomic DNA (Homo sapiens) CpG-island No: 38189
gtcggttacgttttttataggttcggaagtttattttattttgtatcgtgatttatcggaagcgttttagggaattttggagttttcgcgtttgtttagttttgtttcgaaagatttatcgaggagggagtttgcggtgcgttttgggaaagttgttgggttagtttttttgtttttagtttgagcgttgcgttcggtttttcgagggttttttgaggtatcgcggttgcgggtttttgagttttcggtttttcgtagggaagtttttttttcgtatttcgttttttggttcgtggggggtttttttatcgttggtcgacgtagttagtatgttcggggtgcgcgtagtgcggattagtatcgaatcggtttgcgagaagtaggtttatgaggtgggtttggatggtatcgagacgtatttgttttcgttgtttatgtcgtagaatttggcgcgtttggtttagcggatagattttagttagggttcgggtttcgaggaggaggaggcggcggggatcgagggcgacgcgtaggagtggtcgggcgtcgggtttagcgtagattaggacgacgaggaaggtaaggtttgtattcgttgttcgagtttttcggtttgggttttagtattcgcgcgggttttcgtttttttcgcgatgggggtgattttgtgcgtgcgagaatttttgagtgtttttttagcggaagcgtaaggatatttggtcgttatttttttgttgttgtcggataaggtaggatacgat

SEQ ID NO: 38190 - DNA, 761 bp, Artificial Sequence
  chemically treated genomic DNA (Homo sapiens) CpG-island No: 38190
atcgtatcctaccttatccgacaacaacaaaaaaataacgaccaaatatccttacgcttccgctaaaaaaacactcaaaaattctcgcacgcacaaaatcacccccatcgcgaaaaaaacgaaaacccgcgcgaatactaaaacccaaaccgaaaaactcgaacaacgaatacaaaccttaccttcctcgtcgtcctaatctacgctaaacccgacgcccgaccactcctacgcgtcgccctcgatccccgccgcctcctcctcctcgaaacccgaaccctaactaaaatctatccgctaaaccaaacgcgccaaattctacgacataaacaacgaaaacaaatacgtctcgataccatccaaacccacctcataaacctacttctcgcaaaccgattcgatactaatccgcactacgcgcaccccgaacatactaactacgtcgaccaacgataaaaaaaccccccacgaaccaaaaaacgaaatacgaaaaaaaaacttccctacgaaaaaccgaaaactcaaaaacccgcaaccgcgatacctcaaaaaaccctcgaaaaaccgaacgcaacgctcaaactaaaaacaaaaaaactaacccaacaactttcccaaaacgcaccgcaaactccctcctcgataaatctttcgaaacaaaactaaacaaacgcgaaaactccaaaattccctaaaacgcttccgataaatcacgatacaaaataaaataaacttccgaacctataaaaaacgtaaccgac

SEQ ID NO: 38191 - DNA, 761 bp, Artificial Sequence
  chemically treated genomic DNA (Homo sapiens) CpG-island No: 38191
gtcgtgttttattttgttcggtagtaataaaaagatgacgattaagtatttttacgttttcgttagagggatatttaaaagttttcgtacgtataagattatttttatcgcgggagaggcggaggttcgcgcgggtgttgggatttagatcgggggattcgggtagcggatgtaggttttatttttttcgtcgttttggtttgcgttggattcggcgttcggttatttttgcgcgtcgttttcggttttcgtcgttttttttttttcggagttcgaattttggttgaagtttattcgttgggttagacgcgttagattttgcgatatggatagcgggggtaggtacgtttcggtgttatttaggtttattttatggatttgtttttcgtaggtcgattcgatgttgattcgtattgcgcgtatttcggatatgttggttgcgtcggttagcggtgggaggattttttacgagttaaaaaacgaggtacgaagaggaggtttttttgcggagagtcgggaatttagaagttcgtagtcgcggtgttttagaagattttcgggaaatcgaacgtaacgtttagattggaaataaaggagttggtttagtaatttttttagaacgtatcgtaagtttttttttcggtaagtttttcggagtaaaattgggtaggcgcggaagttttagggttttttagagcgttttcggtgaattacggtgtagggtggggtaaattttcgggtttataagaggcgtggtcggt

SEQ ID NO: 38192 - DNA, 761 bp, Artificial Sequence
  chemically treated genomic DNA (Homo sapiens) CpG-island No: 38192
accgaccacgcctcttataaacccgaaaatttaccccaccctacaccgtaattcaccgaaaacgctctaaaaaaccctaaaacttccgcgcctacccaattttactccgaaaaacttaccgaaaaaaaaacttacgatacgttctaaaaaaattactaaaccaactcctttatttccaatctaaacgttacgttcgatttcccgaaaatcttctaaaacaccgcgactacgaacttctaaattcccgactctccgcaaaaaaacctcctcttcgtacctcgttttttaactcgtaaaaaatcctcccaccgctaaccgacgcaaccaacatatccgaaatacgcgcaatacgaatcaacatcgaatcgacctacgaaaaacaaatccataaaataaacctaaataacaccgaaacgtacctacccccgctatccatatcgcaaaatctaacgcgtctaacccaacgaataaacttcaaccaaaattcgaactccgaaaaaaaaaaaacgacgaaaaccgaaaacgacgcgcaaaaataaccgaacgccgaatccaacgcaaaccaaaacgacgaaaaaaataaaacctacatccgctacccgaatcccccgatctaaatcccaacacccgcgcgaacctccgcctctcccgcgataaaaataatcttatacgtacgaaaacttttaaatatccctctaacgaaaacgtaaaaatacttaatcgtcatctttttattactaccgaacaaaataaaacacgac

SEQ ID NO: 38193 - DNA, 1088 bp, Artificial Sequence
  chemically treated genomic DNA (Homo sapiens) CpG-island No: 38193
cgcgttttcgtgttaataggtcggaaaggtagatagaagggaaaaggtttcgcgcgtttttacgttaataggtcggaaaggtagatagaagggaaaaggtttcgcgcgtttttacgttaataggtcggaaaggtagatagaagggaaaaggtttcgcgcgtttttacgttaataggtcggaaaggtagatagaagggaaaaggtttcgcgcgtttttacgttaataggtcggaaaggtagatagaagggaaaaggtttcgcgcgtttttacgttaataggtcggaaaggtagatagaagggaaaacgtttcgcgcgtttttacgttaataggtcggaaaggtagatagaagggaaaacgtttcgcgcgtttttacgttaataggtcggaaaggtagatagaagggaaaaggtttcgcgcgtttttacgttaataggtcggaaaggtagatagaagggaaaaggtttcgcgcgtttttacgttaataggtcggaaaggtagatagaagggaaaaggtttcgcgcgtttttacgttaataggtcggaaaggtagatagaagggaaaaggtttcgcgcgtttttacgttaataggtcggaaaggtagatagaagggaaaaggtttcgcgcgtttttacgttaataggtcggaaaggtagatagaagggaaaacgtttcgcgcgtttttacgttaataggtcggaaaggtagatagaagggaaaaggtttcgcgcgtttttacgttaataggtcggaaaggtagatagaagggaaaaggtttcgcgcgtttttacgttaataggtcggaaaggtagatagaagggaaaaggtttcgcgcgtttttacgttaataggtcggaaaggtagatagaagggaaaaggtttcgcgcgtttttatgttaataggtcggaaaggaagatagaagggaaaacgtttcgcgtgtttttatgttaagaggtcggaaaggtagatagaagggaaaaggtttcgcgcgtttttgtgtttagaggtcggaaaggtagatagaagggaaaaggttttgcgcgtttttgtgttttgttacggggttggggtgtgtagttagggtttt

SEQ ID NO: 38194 - DNA, 1088 bp, Artificial Sequence
  chemically treated genomic DNA (Homo sapiens) CpG-island No: 38194
aaaaccctaactacacaccccaaccccgtaacaaaacacaaaaacgcgcaaaaccttttcccttctatctacctttccgacctctaaacacaaaaacgcgcgaaaccttttcccttctatctacctttccgacctcttaacataaaaacacgcgaaacgttttcccttctatcttcctttccgacctattaacataaaaacgcgcgaaaccttttcccttctatctacctttccgacctattaacgtaaaaacgcgcgaaaccttttcccttctatctacctttccgacctattaacgtaaaaacgcgcgaaaccttttcccttctatctacctttccgacctattaacgtaaaaacgcgcgaaaccttttcccttctatctacctttccgacctattaacgtaaaaacgcgcgaaacgttttcccttctatctacctttccgacctattaacgtaaaaacgcgcgaaaccttttcccttctatctacctttccgacctattaacgtaaaaacgcgcgaaaccttttcccttctatctacctttccgacctattaacgtaaaaacgcgcgaaaccttttcccttctatctacctttccgacctattaacgtaaaaacgcgcgaaaccttttcccttctatctacctttccgacctattaacgtaaaaacgcgcgaaaccttttcccttctatctacctttccgacctattaacgtaaaaacgcgcgaaacgttttcccttctatctacctttccgacctattaacgtaaaaacgcgcgaaacgttttcccttctatctacctttccgacctattaacgtaaaaacgcgcgaaaccttttcccttctatctacctttccgacctattaacgtaaaaacgcgcgaaaccttttcccttctatctacctttccgacctattaacgtaaaaacgcgcgaaaccttttcccttctatctacctttccgacctattaacgtaaaaacgcgcgaaaccttttcccttctatctacctttccgacctattaacgtaaaaacgcgcgaaaccttttcccttctatctacctttccgacctattaacacgaaaacgcg

SEQ ID NO: 38195 - DNA, 1088 bp, Artificial Sequence
  chemically treated genomic DNA (Homo sapiens) CpG-island No: 38195
aaaattttgattgtatattttagtttcgtaatagaatatagaaacgcgtagggtttttttttttttgtttgttttttcggtttttggatatagaaacgcgcggggtttttttttttttgtttgttttttcggttttttgatatggaaatacgcggagcgtttttttttttgttttttttttcggtttgttgatatggaaacgcgcggagtttttttttttttgtttgttttttcggtttgttgacgtggaaacgcgcggggtttttttttttttgtttgttttttcggtttgttgacgtggagacgcgcggggtttttttttttttgtttgttttttcggtttgttgacgtggagacgcgcggggtttttttttttttgtttgttttttcggtttgttgacgtggagacgcgcggggcgtttttttttttgtttgttttttcggtttgttgacgtggagacgcgcggggtttttttttttttgtttgttttttcggtttgttgacgtggagacgcgcggggtttttttttttttgtttgttttttcggtttgttgacgtggagacgcgcggggtttttttttttttgtttgttttttcggtttgttgacgtggagacgcgcggggtttttttttttttgtttgttttttcggtttgttgacgtggagacgcgcggggtttttttttttttgtttgttttttcggtttgttgacgtggagacgcgcggggcgtttttttttttgtttgttttttcggtttgttgacgtggagacgcgcggggcgtttttttttttgtttgttttttcggtttgttgacgtggagacgcgcggggtttttttttttttgtttgttttttcggtttgttgacgtggagacgcgcggggtttttttttttttgtttgttttttcggtttgttgacgtggagacgcgcggggtttttttttttttgtttgttttttcggtttgttgacgtggagacgcgcggggtttttttttttttgtttgttttttcggtttgttgacgtggagacgcgcggggtttttttttttttgtttgttttttcggtttgttgatacggagacgcg

SEQ ID NO: 38196 - DNA, 1088 bp, Artificial Sequence
  chemically treated genomic DNA (Homo sapiens) CpG-island No: 38196
cgcgtctccgtatcaacaaaccgaaaaaacaaacaaaaaaaaaaaaaccccgcgcgtctccacgtcaacaaaccgaaaaaacaaacaaaaaaaaaaaaaccccgcgcgtctccacgtcaacaaaccgaaaaaacaaacaaaaaaaaaaaaaccccgcgcgtctccacgtcaacaaaccgaaaaaacaaacaaaaaaaaaaaaaccccgcgcgtctccacgtcaacaaaccgaaaaaacaaacaaaaaaaaaaaaaccccgcgcgtctccacgtcaacaaaccgaaaaaacaaacaaaaaaaaaaacgccccgcgcgtctccacgtcaacaaaccgaaaaaacaaacaaaaaaaaaaacgccccgcgcgtctccacgtcaacaaaccgaaaaaacaaacaaaaaaaaaaaaaccccgcgcgtctccacgtcaacaaaccgaaaaaacaaacaaaaaaaaaaaaaccccgcgcgtctccacgtcaacaaaccgaaaaaacaaacaaaaaaaaaaaaaccccgcgcgtctccacgtcaacaaaccgaaaaaacaaacaaaaaaaaaaaaaccccgcgcgtctccacgtcaacaaaccgaaaaaacaaacaaaaaaaaaaaaaccccgcgcgtctccacgtcaacaaaccgaaaaaacaaacaaaaaaaaaaacgccccgcgcgtctccacgtcaacaaaccgaaaaaacaaacaaaaaaaaaaaaaccccgcgcgtctccacgtcaacaaaccgaaaaaacaaacaaaaaaaaaaaaaccccgcgcgtctccacgtcaacaaaccgaaaaaacaaacaaaaaaaaaaaaaccccgcgcgtttccacgtcaacaaaccgaaaaaacaaacaaaaaaaaaaaaactccgcgcgtttccatatcaacaaaccgaaaaaaaaaacaaaaaaaaaaacgctccgcgtatttccatatcaaaaaaccgaaaaaacaaacaaaaaaaaaaaaaccccgcgcgtttctatatccaaaaaccgaaaaaacaaacaaaaaaaaaaaaaccctacgcgtttctatattctattacgaaactaaaatatacaatcaaaatttt

SEQ ID NO: 38197 - DNA, 516 bp, Artificial Sequence
  chemically treated genomic DNA (Homo sapiens) CpG-island No: 38197
aggggtcgttgtaggaaacgtttggtttttttttttcgttattttttgattacgtaaagttattgttcggagttacgatggtagcgttagtggtagttgtagttcggaggttgcggcgggttattcgaaggtcgttcgtatggcggggttttagttatcggtcgtttttatcggagttttttgtagttaaggtttcggtcgtgagggtcgtttttttgaatttttttcgggatcgttatggttatcggttggtgtttttcgttttcgtgcggtttcgcggcgattttagtttgttttttgttaatgcgggtatgaattaggtgagagtcgaattatattgatagggagcggagttcgtgagttttttggtgagaaagacgttgtaggattgggtaaaagaagcgagaggcggagttcgtagtttttggggaaagagggcggtgtttggttgggtaaagtgatgggggtacggcgtttagagtatagggagggtttggggagggtttgagttgggaa

SEQ ID NO: 38198 - DNA, 516 bp, Artificial Sequence
  chemically treated genomic DNA (Homo sapiens) CpG-island No: 38198
ttcccaactcaaaccctccccaaaccctccctatactctaaacgccgtacccccatcactttacccaaccaaacaccgccctctttccccaaaaactacgaactccgcctctcgcttcttttacccaatcctacaacgtctttctcaccaaaaaactcacgaactccgctccctatcaatataattcgactctcacctaattcatacccgcattaacaaaaaacaaactaaaatcgccgcgaaaccgcacgaaaacgaaaaacaccaaccgataaccataacgatcccgaaaaaaattcaaaaaaacgaccctcacgaccgaaaccttaactacaaaaaactccgataaaaacgaccgataactaaaaccccgccatacgaacgaccttcgaataacccgccgcaacctccgaactacaactaccactaacgctaccatcgtaactccgaacaataactttacgtaatcaaaaaataacgaaaaaaaaaaaccaaacgtttcctacaacgacccct

SEQ ID NO: 38199 - DNA, 516 bp, Artificial Sequence
  chemically treated genomic DNA (Homo sapiens) CpG-island No: 38199
tttttagtttaagttttttttaagttttttttatattttgagcgtcgtatttttattattttatttaattaagtatcgttttttttttttaaaagttacgaatttcgtttttcgttttttttgtttaattttgtagcgttttttttattagaaaatttacgaatttcgttttttattagtatggttcggtttttatttggtttatgttcgtattgataaaaagtaaattggggtcgtcgcggggtcgtacggaagcggagggtattagtcggtggttatggcggtttcgaaagaagtttagaaaggcggtttttacggtcgaggttttggttgtagggggtttcgatgagagcggtcgatggttgaggtttcgttatgcgggcgattttcgaatggttcgtcgtagttttcgggttgtagttgttattgacgttgttatcgtagtttcgggtagtgattttacgtggttaaagagtgacgagggaaggaagttaggcgttttttatagcggttttt

SEQ ID NO: 38200 - DNA, 516 bp, Artificial Sequence
  chemically treated genomic DNA (Homo sapiens) CpG-island No: 38200
aaaaaccgctataaaaaacgcctaacttccttccctcgtcactctttaaccacgtaaaatcactacccgaaactacgataacaacgtcaataacaactacaacccgaaaactacgacgaaccattcgaaaatcgcccgcataacgaaacctcaaccatcgaccgctctcatcgaaaccccctacaaccaaaacctcgaccgtaaaaaccgcctttctaaacttctttcgaaaccgccataaccaccgactaataccctccgcttccgtacgaccccgcgacgaccccaatttactttttatcaatacgaacataaaccaaataaaaaccgaaccatactaataaaaaacgaaattcgtaaattttctaataaaaaaaacgctacaaaattaaacaaaaaaaacgaaaaacgaaattcgtaacttttaaaaaaaaaaaacgatacttaattaaataaaataataaaaatacgacgctcaaaatataaaaaaaacttaaaaaaaacttaaactaaaaa

SEQ ID NO: 38201 - DNA, 571 bp, Artificial Sequence
  chemically treated genomic DNA (Homo sapiens) CpG-island No: 38201
ttcgagggttcggaggttggagtcgaggtggattcgggtagggagcgtagagagcgtagagatttaatgttagagtcgtattggttttttttcgtttcgttcggtttttttcgcgttttcgatatgttcgcggttttggtcggtcggggttcggtttgagtaggattcggttttaggtttcgtcgcgtcgttttttcgggttgcgggttcgtttggtagagcgggcgttcggttcgcggcggtttttttttcgggttgtggggtttcgaggggtcggcgcgtagcgaggataaggttcggagcgttggttaggtttatttagcggttattgtgggtagtcgaatcgtttaagcgggttttttttttcgtttcgttttttcggattaatagggtcgttttacgcggatggtttcgtttttttttcgttttcggcgggcgttttcggaaagaggtttcgttttttcggaattttttttttcgggttttgcgtaggtttggagtttgtggttttcgggttttgatttattttttcgttgatttatttatttatttatttatttatttatttatt

SEQ ID NO: 38202 - DNA, 571 bp, Artificial Sequence
  chemically treated genomic DNA (Homo sapiens) CpG-island No: 38202
aataaataaataaataaataaataaataaataaatcaacgaaaaaataaatcaaaacccgaaaaccacaaactccaaacctacgcaaaacccgaaaaaaaaaattccgaaaaaacgaaacctctttccgaaaacgcccgccgaaaacgaaaaaaaaacgaaaccatccgcgtaaaacgaccctattaatccgaaaaaacgaaacgaaaaaaaaaacccgcttaaacgattcgactacccacaataaccgctaaataaacctaaccaacgctccgaaccttatcctcgctacgcgccgacccctcgaaaccccacaacccgaaaaaaaaaccgccgcgaaccgaacgcccgctctaccaaacgaacccgcaacccgaaaaaacgacgcgacgaaacctaaaaccgaatcctactcaaaccgaaccccgaccgaccaaaaccgcgaacatatcgaaaacgcgaaaaaaaccgaacgaaacgaaaaaaaaccaatacgactctaacattaaatctctacgctctctacgctccctacccgaatccacctcgactccaacctccgaaccctcgaa

SEQ ID NO: 38203 - DNA, 571 bp, Artificial Sequence
  chemically treated genomic DNA (Homo sapiens) CpG-island No: 38203
agtgaatgaatgaatgaatgaatgagtgaatgaattaacgaaggagtgagttaaggttcgggaattatagattttaagtttacgtagagttcgggaagggggatttcggaggggcggggttttttttcggaagcgttcgtcgggggcggggagggggcggggttattcgcgtgaggcgattttgttggttcggaggggcggggcgaggaggaggattcgtttgggcggttcggttgtttatagtaatcgttgggtggatttggttagcgtttcgaattttgttttcgttgcgcgtcggtttttcggagttttatagttcgggaaggaggtcgtcgcgggtcgggcgttcgttttgttaagcggattcgtaattcggaaaggcggcgcggcggagtttggagtcggattttgtttagatcgggtttcggtcggttagagtcgcgggtatgtcggaggcgcggaaggggtcggacgaggcggaggagagttagtacgattttggtattgagtttttgcgttttttgcgttttttattcgagtttatttcggttttagttttcgggttttcgga

SEQ ID NO: 38204 - DNA, 571 bp, Artificial Sequence
  chemically treated genomic DNA (Homo sapiens) CpG-island No: 38204
tccgaaaacccgaaaactaaaaccgaaataaactcgaataaaaaacgcaaaaaacgcaaaaactcaataccaaaatcgtactaactctcctccgcctcgtccgaccccttccgcgcctccgacatacccgcgactctaaccgaccgaaacccgatctaaacaaaatccgactccaaactccgccgcgccgcctttccgaattacgaatccgcttaacaaaacgaacgcccgacccgcgacgacctccttcccgaactataaaactccgaaaaaccgacgcgcaacgaaaacaaaattcgaaacgctaaccaaatccacccaacgattactataaacaaccgaaccgcccaaacgaatcctcctcctcgccccgcccctccgaaccaacaaaatcgcctcacgcgaataaccccgccccctccccgcccccgacgaacgcttccgaaaaaaaaccccgcccctccgaaatcccccttcccgaactctacgtaaacttaaaatctataattcccgaaccttaactcactccttcgttaattcattcactcattcattcattcattcattcact

SEQ ID NO: 38205 - DNA, 537 bp, Artificial Sequence
  chemically treated genomic DNA (Homo sapiens) CpG-island No: 38205
aggaatttcgcggtcgattatttggtatagattatttaggatagttaggacggttataattttagcgaggacgtaaacgtttgtttgtagttggtgatgtggaaggttcgatagcgcgtttagatttagttacgttatcggttcgtttttttcgtcgttttggtttgtttttagttttaggttttttttaaaatcgttattagtttcgagagtttattttgtttatttcgtcgtaaagcgaaagaaattggagtagtcggcggtaggagagggtaaaaagttaagagtaattttaattttcgattttcggtatttcggaatttttgtcgcggtttttcgggtttgtttatatatttttgttttttttagatttttgtttttttattaatcgtttttcgtagtttcgagtcgttatttttagtttttcgagtttttgtcgcgcgttttcgcgtttgtttatatttttttgtttattcgagatttttgtttttatattattagttattttacgtgggatttttatggtttttgagtata

SEQ ID NO: 38206 - DNA, 537 bp, Artificial Sequence
  chemically treated genomic DNA (Homo sapiens) CpG-island No: 38206
tatactcaaaaaccataaaaatcccacgtaaaataactaataatataaaaacaaaaatctcgaataaacaaaaaaatataaacaaacgcgaaaacgcgcgacaaaaactcgaaaaactaaaaataacgactcgaaactacgaaaaacgattaataaaaaaacaaaaatctaaaaaaaacaaaaatatataaacaaacccgaaaaaccgcgacaaaaattccgaaataccgaaaatcgaaaattaaaattactcttaactttttaccctctcctaccgccgactactccaatttctttcgctttacgacgaaataaacaaaataaactctcgaaactaataacgattttaaaaaaaacctaaaactaaaaacaaaccaaaacgacgaaaaaaacgaaccgataacgtaactaaatctaaacgcgctatcgaaccttccacatcaccaactacaaacaaacgtttacgtcctcgctaaaattataaccgtcctaactatcctaaataatctataccaaataatcgaccgcgaaattcct

SEQ ID NO: 38207 - DNA, 537 bp, Artificial Sequence
  chemically treated genomic DNA (Homo sapiens) CpG-island No: 38207
tgtatttagaagttatggaagttttacgtggggtggttagtggtgtaaggatagaggtttcggatgggtagagggatgtggataggcgcgagggcgcgcggtagggattcgggggattgggagtggcggttcggggttgcgggaggcgattggtggaaggatagaggtttgggaggggtagaggtatgtggataggttcgaggggtcgcggtagggatttcggggtatcgggagtcgggggttggggttatttttggttttttgtttttttttgtcgtcggttgttttagtttttttcgttttgcggcgaggtgggtagggtgagttttcgggattgatggcggttttggaagaggtttggggttaaggataggttagggcggcgggagaggcggatcggtggcgtggttggatttgggcgcgttgtcggattttttatattattagttgtaggtaggcgtttgcgttttcgttggagttgtggtcgttttggttgttttggatgatttgtgttaggtagtcggtcgcgagattttt

SEQ ID NO: 38208 - DNA, 537 bp, Artificial Sequence
  chemically treated genomic DNA (Homo sapiens) CpG-island No: 38208
aaaaatctcgcgaccgactacctaacacaaatcatccaaaacaaccaaaacgaccacaactccaacgaaaacgcaaacgcctacctacaactaataatataaaaaatccgacaacgcgcccaaatccaaccacgccaccgatccgcctctcccgccgccctaacctatccttaaccccaaacctcttccaaaaccgccatcaatcccgaaaactcaccctacccacctcgccgcaaaacgaaaaaaactaaaacaaccgacgacaaaaaaaaacaaaaaaccaaaaataaccccaacccccgactcccgataccccgaaatccctaccgcgacccctcgaacctatccacatacctctacccctcccaaacctctatccttccaccaatcgcctcccgcaaccccgaaccgccactcccaatcccccgaatccctaccgcgcgccctcgcgcctatccacatccctctacccatccgaaacctctatccttacaccactaaccaccccacgtaaaacttccataacttctaaataca

SEQ ID NO: 38209 - DNA, 515 bp, Artificial Sequence
  chemically treated genomic DNA (Homo sapiens) CpG-island No: 38209
tttacggacgtttttagatgtttttattttacggacgtttttagatatttttaattttacggacgtttttagatacgtttattttacggacgtttttagatatttttaattttacggacgtttttagatatttttattttacggacgtttttagatacgtttattttacggacgtttttagatatttttaattttacggacgtttttagatatttttattttacggacgtttttagatacgtttattttacggacgtttttagatatttttaattttacggacgtttttagatatttttattttacggatgtttttagatgtttttaattttacggacgtttttagatgtttttaattttacggacgtttttagatatttttattttacggacgtttttagatgtttttaattttacggacgtttttagatatttttattttacggatgtttttagatgtttttaattttacggacgtttttagatgtttttaattttacgggcgtttttagatg

SEQ ID NO: 38210 - DNA, 515 bp, Artificial Sequence
  chemically treated genomic DNA (Homo sapiens) CpG-island No: 38210
catctaaaaacgcccgtaaaattaaaaacatctaaaaacgtccgtaaaattaaaaacatctaaaaacatccgtaaaataaaaatatctaaaaacgtccgtaaaattaaaaacatctaaaaacgtccgtaaaataaaaatatctaaaaacgtccgtaaaattaaaaacatctaaaaacgtccgtaaaattaaaaacatctaaaaacatccgtaaaataaaaatatctaaaaacgtccgtaaaattaaaaatatctaaaaacgtccgtaaaataaacgtatctaaaaacgtccgtaaaataaaaatatctaaaaacgtccgtaaaattaaaaatatctaaaaacgtccgtaaaataaacgtatctaaaaacgtccgtaaaataaaaatatctaaaaacgtccgtaaaattaaaaatatctaaaaacgtccgtaaaataaacgtatctaaaaacgtccgtaaaattaaaaatatctaaaaacgtccgtaaaataaaaacatctaaaaacgtccgtaaa

SEQ ID NO: 38211 - DNA, 515 bp, Artificial Sequence
  chemically treated genomic DNA (Homo sapiens) CpG-island No: 38211
tatttgggagcgttcgtggggttgggggtatttgggagcgttcgtggggttgggggtatttgggagtattcgtggggtgggggtatttgggagcgttcgtggggttgggggtatttgggagcgttcgtggggtgggggtatttgggagcgttcgtggggttgggggtatttgggagcgttcgtggggttgggggtatttgggagtattcgtggggtgggggtatttgggagcgttcgtggggttgggggtatttgggagcgttcgtggggtgggcgtatttgggagcgttcgtggggtgggggtatttgggagcgttcgtggggttgggggtatttgggagcgttcgtggggtgggcgtatttgggagcgttcgtggggtgggggtatttgggagcgttcgtggggttgggggtatttgggagcgttcgtggggtgggcgtatttgggagcgttcgtggggttgggggtatttgggagcgttcgtggggtgggggtatttgggagcgttcgtggg

SEQ ID NO: 38212 - DNA, 515 bp, Artificial Sequence
  chemically treated genomic DNA (Homo sapiens) CpG-island No: 38212
cccacgaacgctcccaaatacccccaccccacgaacgctcccaaatacccccaaccccacgaacgctcccaaatacgcccaccccacgaacgctcccaaatacccccaaccccacgaacgctcccaaatacccccaccccacgaacgctcccaaatacgcccaccccacgaacgctcccaaatacccccaaccccacgaacgctcccaaatacccccaccccacgaacgctcccaaatacgcccaccccacgaacgctcccaaatacccccaaccccacgaacgctcccaaatacccccaccccacgaatactcccaaatacccccaaccccacgaacgctcccaaatacccccaaccccacgaacgctcccaaatacccccaccccacgaacgctcccaaatacccccaaccccacgaacgctcccaaatacccccaccccacgaatactcccaaatacccccaaccccacgaacgctcccaaatacccccaaccccacgaacgctcccaaata

SEQ ID NO: 38213 - DNA, 549 bp, Artificial Sequence
  chemically treated genomic DNA (Homo sapiens) CpG-island No: 38213
agggcgggggcgcggaggtttggggtgggggtcgtagggggttggaaggaagtgcgtagtgtggcgagagcgcgaataaagtttttttcggagtttcgttatttttcggtgattttaggttcgtttcgttgagtcgcgggttttcgggtttcgttttcgagtaggtcgtatcgttcggtgggcgtacgttaggttttcgcggtcgttcgggttagtgtttttttcggttttcgtagtcgagttcgcggtcggtttcgaaggcgcgagggatagcgcggtcggcggtggagttttatttaggtacggagtttatagagcgaggttgaggaggattttatgttgttgttcgtcgggaaatcggattattttggggcgcgttggagttattattttgttagtagtcggggaggggtcgcgagggtttttaagtggacggaagtaggcgattaatttcgtcgcgatttttgttttttagagaagggttttggttgaggaggcggcgggaggggattgttgtaaatagttgttttttatatatattttattata

SEQ ID NO: 38214 - DNA, 549 bp, Artificial Sequence
  chemically treated genomic DNA (Homo sapiens) CpG-island No: 38214
tataataaaatatatataaaaaacaactatttacaacaatcccctcccgccgcctcctcaaccaaaacccttctctaaaaaacaaaaatcgcgacgaaattaatcgcctacttccgtccacttaaaaaccctcgcgacccctccccgactactaacaaaataataactccaacgcgccccaaaataatccgatttcccgacgaacaacaacataaaatcctcctcaacctcgctctataaactccgtacctaaataaaactccaccgccgaccgcgctatccctcgcgccttcgaaaccgaccgcgaactcgactacgaaaaccgaaaaaaacactaacccgaacgaccgcgaaaacctaacgtacgcccaccgaacgatacgacctactcgaaaacgaaacccgaaaacccgcgactcaacgaaacgaacctaaaatcaccgaaaaataacgaaactccgaaaaaaactttattcgcgctctcgccacactacgcacttccttccaaccccctacgacccccaccccaaacctccgcgcccccgccct

SEQ ID NO: 38215 - DNA, 549 bp, Artificial Sequence
  chemically treated genomic DNA (Homo sapiens) CpG-island No: 38215
tgtaatgaaatatgtatgaggaatagttgtttgtaatagttttttttcgtcgtttttttagttaaggtttttttttaggaagtaggagtcgcggcgaagttggtcgtttattttcgtttatttgggagttttcgcggttttttttcggttgttggtagaatggtggttttagcgcgttttagagtagttcggtttttcgacggataatagtatggagttttttttagtttcgttttgtgggtttcgtgtttgagtgaggttttatcgtcggtcgcgttgtttttcgcgttttcggggtcggtcgcgggttcggttgcggggatcgaggggagtattggttcgggcggtcgcggaggtttgacgtgcgtttatcgggcggtgcggtttgttcggaggcgaggttcgggagttcgcggtttagcggggcgggtttggggttatcgaggggtgacggggtttcggagagggttttgttcgcgttttcgttatattgcgtatttttttttagttttttgcggtttttattttaaattttcgcgttttcgtttt

SEQ ID NO: 38216 - DNA, 549 bp, Artificial Sequence
  chemically treated genomic DNA (Homo sapiens) CpG-island No: 38216
aaaacgaaaacgcgaaaatttaaaataaaaaccgcaaaaaactaaaaaaaaatacgcaatataacgaaaacgcgaacaaaaccctctccgaaaccccgtcacccctcgataaccccaaacccgccccgctaaaccgcgaactcccgaacctcgcctccgaacaaaccgcaccgcccgataaacgcacgtcaaacctccgcgaccgcccgaaccaatactcccctcgatccccgcaaccgaacccgcgaccgaccccgaaaacgcgaaaaacaacgcgaccgacgataaaacctcactcaaacacgaaacccacaaaacgaaactaaaaaaaactccatactattatccgtcgaaaaaccgaactactctaaaacgcgctaaaaccaccattctaccaacaaccgaaaaaaaaccgcgaaaactcccaaataaacgaaaataaacgaccaacttcgccgcgactcctacttcctaaaaaaaaaccttaactaaaaaaacgacgaaaaaaaactattacaaacaactattcctcatacatatttcattaca

SEQ ID NO: 38217 - DNA, 609 bp, Artificial Sequence
  chemically treated genomic DNA (Homo sapiens) CpG-island No: 38217
ttcggttgcggggtttttgcgttagatcggattgtcgtttgcgggcgattggcggcgttgaacgggcggtttgcggcgggcgcgtttgtgttgggttcggggtggttggtggttttcgcgggtgttgtgcgtcggaggatggtggggttttttggtcgcgtcgtgttcgtcgtttttcgcggttcgttttttcgttcgttcgttgggttcgttgttcgggtttgttttgttgtgtcggtgtgttttcgtcgcgttttgcgtttgttttcgtgtcggggggttttttttgcgcggcgttttgcgcgcggttttcgtgttgtcgcgggcgttttttcgttgcgtcgtcgttttttggttttttttttgttttcggttcgggggcggttttttcgcggcggggttgttttttgggggggtgtttttcggtgggcggcgttcgtgttttcgtgtcgtcgtgttttgtgttttggtgtgcgtcgggtgttttgttgtcgtcgcggcggtttgttcggttcgcgtcgcgcgttgttgggttgtcgtttttttgttttgtgtttcgtcgtcgcgcgttcgtgttcgcgtcgttttgttcggtgttgtgtttgtgtg

SEQ ID NO: 38218 - DNA, 609 bp, Artificial Sequence
  chemically treated genomic DNA (Homo sapiens) CpG-island No: 38218
cacacaaacacaacaccgaacaaaacgacgcgaacacgaacgcgcgacgacgaaacacaaaacaaaaaaacgacaacccaacaacgcgcgacgcgaaccgaacaaaccgccgcgacgacaacaaaacacccgacgcacaccaaaacacaaaacacgacgacacgaaaacacgaacgccgcccaccgaaaaacacccccccaaaaaacaaccccgccgcgaaaaaaccgcccccgaaccgaaaacaaaaaaaaaaccaaaaaacgacgacgcaacgaaaaaacgcccgcgacaacacgaaaaccgcgcgcaaaacgccgcgcaaaaaaaaccccccgacacgaaaacaaacgcaaaacgcgacgaaaacacaccgacacaacaaaacaaacccgaacaacgaacccaacgaacgaacgaaaaaacgaaccgcgaaaaacgacgaacacgacgcgaccaaaaaaccccaccatcctccgacgcacaacacccgcgaaaaccaccaaccaccccgaacccaacacaaacgcgcccgccgcaaaccgcccgttcaacgccgccaatcgcccgcaaacgacaatccgatctaacgcaaaaaccccgcaaccgaa

SEQ ID NO: 38219 - DNA, 609 bp, Artificial Sequence
  chemically treated genomic DNA (Homo sapiens) CpG-island No: 38219
tatatagatataatatcgaatagagcgacgcggatacgagcgcgcggcggcggggtataaaataaaaggacgataatttaatagcgcgcgacgcgaatcgagtaggtcgtcgcgacgatagtagggtattcgacgtatattaaagtataagatacgacggtacgagaatacgaacgtcgtttatcggggaatatttttttaaggaatagtttcgtcgcgagagagtcgttttcggatcggagataaaaaaagaattaggagacggcgacgtagcggggggacgttcgcgataatacgggagtcgcgcgtaaggcgtcgcgtagagagggtttttcggtacggaggtaagcgtagggcgcggcggagatatatcgatatagtaaggtaggttcgaataacggatttagcgagcgaacgggggaacgaatcgcggaaggcggcgagtacgacgcggttaagagattttattatttttcgacgtatagtattcgcgaaggttattagttatttcgggtttagtataagcgcgttcgtcgtagatcgttcgtttagcgtcgttaatcgttcgtaaacggtagttcggtttggcgtaaaggtttcgtagtcggg

SEQ ID NO: 38220 - DNA, 609 bp, Artificial Sequence
  chemically treated genomic DNA (Homo sapiens) CpG-island No: 38220
cccgactacgaaacctttacgccaaaccgaactaccgtttacgaacgattaacgacgctaaacgaacgatctacgacgaacgcgcttatactaaacccgaaataactaataaccttcgcgaatactatacgtcgaaaaataataaaatctcttaaccgcgtcgtactcgccgccttccgcgattcgttcccccgttcgctcgctaaatccgttattcgaacctaccttactatatcgatatatctccgccgcgccctacgcttacctccgtaccgaaaaaccctctctacgcgacgccttacgcgcgactcccgtattatcgcgaacgtccccccgctacgtcgccgtctcctaattctttttttatctccgatccgaaaacgactctctcgcgacgaaactattccttaaaaaaatattccccgataaacgacgttcgtattctcgtaccgtcgtatcttatactttaatatacgtcgaataccctactatcgtcgcgacgacctactcgattcgcgtcgcgcgctattaaattatcgtccttttattttataccccgccgccgcgcgctcgtatccgcgtcgctctattcgatattatatctatata

SEQ ID NO: 38221 - DNA, 659 bp, Artificial Sequence
  chemically treated genomic DNA (Homo sapiens) CpG-island No: 38221
gattcgtacgcgattaaaagtcgagcgtatatttttcgttttcgttttatttgttatcgtttatattaacgtgtatatatgttcgtgtaaacgcgtacgtacggaatcgcgcgtttttttatatttagtcgcgttttcggttcggtttagttaggtgtttttacgcggtagcgttcggtttgttcgtcggttttttgcgaatttttcgttttacgttcgtttgtttgcgcgtacgtacgcgtacgtacgtattttttacgttttcgcgcgggggcgtaggttttgggtggcggggtttggtcgggagtcggtcgggttagggagcggcgagtagagtttagggtgtatttcgcgtttggttttcgtgcgtagttttttcgcgcggaggtatttggttttttttcggttttagaacgcgaatagttggcgttgagtatataattttttttttttttttttcgagatttttgtatttttttcgcgcgttatttttcgttttttataataggttcgaagagtaaatttttaaacgcgtttagaagcggtttttaatttttcgtcgggagtacgttggaggttggatttcggagagattcgggattggggtttattgtcggttttttttggattcggtttgatttttatattttaagaagatt

SEQ ID NO: 38222 - DNA, 659 bp, Artificial Sequence
  chemically treated genomic DNA (Homo sapiens) CpG-island No: 38222
aatcttcttaaaatataaaaatcaaaccgaatccaaaaaaaaccgacaataaaccccaatcccgaatctctccgaaatccaacctccaacgtactcccgacgaaaaattaaaaaccgcttctaaacgcgtttaaaaatttactcttcgaacctattataaaaaacgaaaaataacgcgcgaaaaaaatacaaaaatctcgaaaaaaaaaaaaaaaaaattatatactcaacgccaactattcgcgttctaaaaccgaaaaaaaaccaaatacctccgcgcgaaaaaactacgcacgaaaaccaaacgcgaaatacaccctaaactctactcgccgctccctaacccgaccgactcccgaccaaaccccgccacccaaaacctacgcccccgcgcgaaaacgtaaaaaatacgtacgtacgcgtacgtacgcgcaaacaaacgaacgtaaaacgaaaaattcgcaaaaaaccgacgaacaaaccgaacgctaccgcgtaaaaacacctaactaaaccgaaccgaaaacgcgactaaatataaaaaaacgcgcgattccgtacgtacgcgtttacacgaacatatatacacgttaatataaacgataacaaataaaacgaaaacgaaaaatatacgctcgacttttaatcgcgtacgaatc

SEQ ID NO: 38223 - DNA, 659 bp, Artificial Sequence
  chemically treated genomic DNA (Homo sapiens) CpG-island No: 38223
aatttttttaaaatatgaaaattaagtcggatttaggaggggtcggtaatagattttaatttcgagttttttcgaaatttagtttttaacgtgttttcggcgaagagttgggagtcgtttttggacgcgtttgggggtttatttttcgggtttgttatgaggggcgggagatggcgcgcggggagggtataggggtttcgggggagaaggaggaggagttgtgtgtttaacgttaattgttcgcgttttagagtcgagagggagttaggtgttttcgcgcggggaggttgcgtacggaagttaagcgcgggatgtattttggattttgttcgtcgttttttggttcggtcggttttcggttaaatttcgttatttaaggtttgcgttttcgcgcgggggcgtggggaatgcgtgcgtgcgcgtgcgtgcgcgtaggtaggcgggcgtgaggcgaggggttcgtagggggtcggcgggtagatcgggcgttgtcgcgtgggggtatttggttgagtcgggtcgggagcgcggttgggtgtgagggggcgcgcggtttcgtgcgtgcgcgtttgtacgagtatgtgtgtacgttagtgtgagcgatggtaagtggggcgggggcgggaggtgtgcgttcggtttttggtcgcgtgcggatt

SEQ ID NO: 38224 - DNA, 659 bp, Artificial Sequence
  chemically treated genomic DNA (Homo sapiens) CpG-island No: 38224
aatccgcacgcgaccaaaaaccgaacgcacacctcccgcccccgccccacttaccatcgctcacactaacgtacacacatactcgtacaaacgcgcacgcacgaaaccgcgcgccccctcacacccaaccgcgctcccgacccgactcaaccaaatacccccacgcgacaacgcccgatctacccgccgaccccctacgaacccctcgcctcacgcccgcctacctacgcgcacgcacgcgcacgcacgcattccccacgcccccgcgcgaaaacgcaaaccttaaataacgaaatttaaccgaaaaccgaccgaaccaaaaaacgacgaacaaaatccaaaatacatcccgcgcttaacttccgtacgcaacctccccgcgcgaaaacacctaactccctctcgactctaaaacgcgaacaattaacgttaaacacacaactcctcctccttctcccccgaaacccctataccctccccgcgcgccatctcccgcccctcataacaaacccgaaaaataaacccccaaacgcgtccaaaaacgactcccaactcttcgccgaaaacacgttaaaaactaaatttcgaaaaaactcgaaattaaaatctattaccgacccctcctaaatccgacttaattttcatattttaaaaaaatt

SEQ ID NO: 38225 - DNA, 1014 bp, Artificial Sequence
  chemically treated genomic DNA (Homo sapiens) CpG-island No: 38225
agagtggagaggatcggcgaggcgcgttagtcggagttatttttttttcggtcgttttttttttattttttttatatatatacgttcgttcgttcgtcggcgcgcgtatatttttcgcgtcggattcgtatttcggcgggcgttatatattcggtagttcgagtcgcggtagtcgtagcgggatggaggcggcgcgtacggagcgtttcgtaggtaggtcgggggcgtcgtttgttcggacggggtttttatttttgtcgacgtgggttttggtcggcgtcgagattatttgggacgcgataggcggtttcggacgttcggcggtttcggtttcgcggttatcggcgttgtttttattttcgtcgcgggtagtggttagttagtggtcggaggagttggcgtcggcgcggagagtcgtcgtgttggggcgtcgggtcggattagagttgttgttttagtagggcggcggtagaggcggtgagatgtaggtggaagtcggagggatattatcggtaggcgagcggcggggtcggggtattttagtttttgttaagtttggcggcgcgaggaggagtcgtcgggcgtagtttttaattatttaggaacgcggggacgtttgggttattgtttcggtcgatggttttagaggaagtcgtttttttgttaagggttttcgggaggaggtgaaggcgtcgcgggttggggggtcggcggttgaagattttcggttgtttagtatttttttcgcgttgatcggggattcggtttataattaagttatggtgtattggtcgggatataatagtagcgtgagtatttattcggcggcgggttcgtttgttttttgatatcgaaggggaatgggggggtgggtgggagcgagggatagatagttgttcgggggtcgaggcgggggacgtttcgatttttcgagataataggtttgttcgattttttttacgtttttaataggttaacggagtttgttgttagacgttgtgtgtgtttgtttat

SEQ ID NO: 38226 - DNA, 1014 bp, Artificial Sequence
  chemically treated genomic DNA (Homo sapiens) CpG-island No: 38226
ataaacaaacacacacaacgtctaacaacaaactccgttaacctattaaaaacgtaaaaaaaatcgaacaaacctattatctcgaaaaatcgaaacgtcccccgcctcgacccccgaacaactatctatccctcgctcccacccacccccccattccccttcgatatcaaaaaacaaacgaacccgccgccgaataaatactcacgctactattatatcccgaccaatacaccataacttaattataaaccgaatccccgatcaacgcgaaaaaaatactaaacaaccgaaaatcttcaaccgccgaccccccaacccgcgacgccttcacctcctcccgaaaacccttaacaaaaaaacgacttcctctaaaaccatcgaccgaaacaataacccaaacgtccccgcgttcctaaataattaaaaactacgcccgacgactcctcctcgcgccgccaaacttaacaaaaactaaaataccccgaccccgccgctcgcctaccgataatatccctccgacttccacctacatctcaccgcctctaccgccgccctactaaaacaacaactctaatccgacccgacgccccaacacgacgactctccgcgccgacgccaactcctccgaccactaactaaccactacccgcgacgaaaataaaaacaacgccgataaccgcgaaaccgaaaccgccgaacgtccgaaaccgcctatcgcgtcccaaataatctcgacgccgaccaaaacccacgtcgacaaaaataaaaaccccgtccgaacaaacgacgcccccgacctacctacgaaacgctccgtacgcgccgcctccatcccgctacgactaccgcgactcgaactaccgaatatataacgcccgccgaaatacgaatccgacgcgaaaaatatacgcgcgccgacgaacgaacgaacgtatatatataaaaaaaataaaaaaaaaacgaccgaaaaaaaaataactccgactaacgcgcctcgccgatcctctccactct

SEQ ID NO: 38227 - DNA, 1014 bp, Artificial Sequence
  chemically treated genomic DNA (Homo sapiens) CpG-island No: 38227
gtaaataaatatatatagcgtttaataataaatttcgttaatttgttgggggcgtggggggaatcggataaatttgttatttcgaaaagtcgaggcgtttttcgtttcgattttcgagtaattatttgtttttcgtttttatttatttttttattttttttcggtgttaggaaataggcggattcgtcgtcgggtgggtatttacgttgttgttgtgtttcgattagtgtattatggtttggttgtgggtcgagttttcggttagcgcgaaggaggtgttgggtagtcggaggtttttagtcgtcgattttttagttcgcggcgtttttattttttttcgggaatttttagtaaggggacggttttttttggaattatcggtcggagtagtggtttaggcgttttcgcgtttttgggtgattgggggttgcgttcggcgattttttttcgcgtcgttaagtttggtaggagttgggatgtttcggtttcgtcgttcgtttgtcggtgatgttttttcggtttttatttgtattttatcgtttttgtcgtcgttttgttggggtagtagttttggttcggttcggcgttttagtacggcggtttttcgcgtcgacgttagttttttcggttattggttggttattgttcgcggcgagagtggagataacgtcggtggtcgcgaagtcggggtcgtcgggcgttcgggatcgtttgtcgcgttttaagtgatttcggcgtcggttaggatttacgtcgataagagtaggagtttcgttcggataagcggcgttttcggtttgtttgcggggcgtttcgtgcgcgtcgtttttatttcgttgcggttatcgcggttcgggttgtcgagtgtgtggcgttcgtcgaggtgcgggttcggcgcggggggtgtgcgcgcgtcggcgagcgagcgagcgtgtgtgtgtagggggagtggggagggggcggtcgggaaggaggtggtttcggttggcgcgtttcgtcggttttttttatttt

SEQ ID NO: 38228 - DNA, 1014 bp, Artificial Sequence
  chemically treated genomic DNA (Homo sapiens) CpG-island No: 38228
aaaataaaaaaaaccgacgaaacgcgccaaccgaaaccacctccttcccgaccgccccctccccactccccctacacacacacgctcgctcgctcgccgacgcgcgcacaccccccgcgccgaacccgcacctcgacgaacgccacacactcgacaacccgaaccgcgataaccgcaacgaaataaaaacgacgcgcacgaaacgccccgcaaacaaaccgaaaacgccgcttatccgaacgaaactcctactcttatcgacgtaaatcctaaccgacgccgaaatcacttaaaacgcgacaaacgatcccgaacgcccgacgaccccgacttcgcgaccaccgacgttatctccactctcgccgcgaacaataaccaaccaataaccgaaaaaactaacgtcgacgcgaaaaaccgccgtactaaaacgccgaaccgaaccaaaactactaccccaacaaaacgacgacaaaaacgataaaatacaaataaaaaccgaaaaaacatcaccgacaaacgaacgacgaaaccgaaacatcccaactcctaccaaacttaacgacgcgaaaaaaaatcgccgaacgcaacccccaatcacccaaaaacgcgaaaacgcctaaaccactactccgaccgataattccaaaaaaaaccgtccccttactaaaaattcccgaaaaaaaataaaaacgccgcgaactaaaaaatcgacgactaaaaacctccgactacccaacacctccttcgcgctaaccgaaaactcgacccacaaccaaaccataatacactaatcgaaacacaacaacaacgtaaatacccacccgacgacgaatccgcctatttcctaacaccgaaaaaaaataaaaaaataaataaaaacgaaaaacaaataattactcgaaaatcgaaacgaaaaacgcctcgacttttcgaaataacaaatttatccgattccccccacgcccccaacaaattaacgaaatttattattaaacgctatatatatttatttac

SEQ ID NO: 38229 - DNA, 508 bp, Artificial Sequence
  chemically treated genomic DNA (Homo sapiens) CpG-island No: 38229
ggaaacggggggatgggggcggcgagcgggataaataaagaaaaaaaggggagggcgagggaagagagaggaggcggggcgggagaacggcggtaaagcgcggcgcggcgcggagggaggggggtcgcggaaaaagggatagagaaataaaatcgcggcgcgggggggcgagagaataaggcgcgttaaaattaatttggggggagggcgggggtatagtatatagggcggacggaatggggggacggtggggaaaggtagggtagggatttatgatggaaaataggggggacgtgaagcgatttaaacggcgtgggaggcgtgcgggttaaatatttttttaattgagtttatatagcggcggttcggtatcggtgtaggaataggcggaaaattgttggtcggggttcgtttcgggttgagcgcgggtatttaaaaagttggggtagtgtttgttgaattggcggtgtgaaaatgggttaggtgaggattttgttaataattatta

SEQ ID NO: 38230 - DNA, 508 bp, Artificial Sequence
  chemically treated genomic DNA (Homo sapiens) CpG-island No: 38230
taataattattaacaaaatcctcacctaacccattttcacaccgccaattcaacaaacactaccccaactttttaaatacccgcgctcaacccgaaacgaaccccgaccaacaattttccgcctattcctacaccgataccgaaccgccgctatataaactcaattaaaaaaatatttaacccgcacgcctcccacgccgtttaaatcgcttcacgtcccccctattttccatcataaatccctaccctacctttccccaccgtccccccattccgtccgccctatatactatacccccgccctccccccaaattaattttaacgcgccttattctctcgcccccccgcgccgcgattttatttctctatccctttttccgcgacccccctccctccgcgccgcgccgcgctttaccgccgttctcccgccccgcctcctctctcttccctcgccctcccctttttttctttatttatcccgctcgccgcccccatccccccgtttcc

SEQ ID NO: 38231 - DNA, 508 bp, Artificial Sequence
  chemically treated genomic DNA (Homo sapiens) CpG-island No: 38231
tggtgattgttaataagatttttatttggtttatttttatatcgttaatttaataagtattgttttagttttttgggtattcgcgtttagttcggagcggatttcggttagtagtttttcgtttatttttgtatcgatgtcgagtcgtcgttgtatgggtttagttaggagagtatttagttcgtacgttttttacgtcgtttagatcgttttacgttttttttgttttttattatgaatttttattttatttttttttatcgtttttttatttcgttcgttttgtgtattgtattttcgttttttttttaggttagttttagcgcgttttgttttttcgttttttcgcgtcgcggttttatttttttgttttttttttcgcggttttttttttttcgcgtcgcgtcgcgttttgtcgtcgttttttcgtttcgtttttttttttttttttcgtttttttttttttttttttatttatttcgttcgtcgtttttattttttcgttttt

SEQ ID NO: 38232 - DNA, 508 bp, Artificial Sequence
  chemically treated genomic DNA (Homo sapiens) CpG-island No: 38232
aaaaacgaaaaaataaaaacgacgaacgaaataaataaaaaaaaaaaaaaaaaaacgaaaaaaaaaaaaaaaaacgaaacgaaaaaacgacgacaaaacgcgacgcgacgcgaaaaaaaaaaaaccgcgaaaaaaaaaacaaaaaaataaaaccgcgacgcgaaaaaacgaaaaaacaaaacgcgctaaaactaacctaaaaaaaaaacgaaaatacaatacacaaaacgaacgaaataaaaaaacgataaaaaaaaataaaataaaaattcataataaaaaacaaaaaaaacgtaaaacgatctaaacgacgtaaaaaacgtacgaactaaatactctcctaactaaacccatacaacgacgactcgacatcgatacaaaaataaacgaaaaactactaaccgaaatccgctccgaactaaacgcgaatacccaaaaaactaaaacaatacttattaaattaacgatataaaaataaaccaaataaaaatcttattaacaatcacca

SEQ ID NO: 38233 - DNA, 603 bp, Artificial Sequence
  chemically treated genomic DNA (Homo sapiens) CpG-island No: 38233
tttttcgattttcgtttttcgttcgttttttttaattcgcgtcgttcgttttttcgtttttttttttttgtttatattagtattcgcgtcgttttcgttttttgttttattgttgtcgtatgcgacgtttttttttatattttttttttatttcggtttttttttcgttttttttttttttattatttttcgtttttttcgtttttttcgttttttttttatttattttttattttgttttttttttcgttttttattttttattgaattcgtcgtatcgtttcgtatttttttcgggtttcgtattttttttttttttcgttttcgtcgttatttttttttttcgtttttttcgtattttgtttttttttttttttttttcgcgtttttcgttttttttttttatttgtttttcgttttttttttttttttcgttttcgtttttttggtgtttttcgtttgcgttttttttattttttttttttttttttttatttttttttattatttttcgtttttttttttattcgttgtttattcgtgtgtttatttgtttttcgtttgtttttaacgtatttttttgttcgttaggtttatttttat

SEQ ID NO: 38234 - DNA, 603 bp, Artificial Sequence
  chemically treated genomic DNA (Homo sapiens) CpG-island No: 38234
ataaaaataaacctaacgaacaaaaaaatacgttaaaaacaaacgaaaaacaaataaacacacgaataaacaacgaataaaaaaaaaaacgaaaaataataaaaaaaaataaaaaaaaaaaaaaaaaaaataaaaaaaacgcaaacgaaaaacaccaaaaaaacgaaaacgaaaaaaaaaaaaaaaacgaaaaacaaataaaaaaaaaaaacgaaaaacgcgaaaaaaaaaaaaaaaaaaacaaaatacgaaaaaaacgaaaaaaaaaaataacgacgaaaacgaaaaaaaaaaaaaatacgaaacccgaaaaaaatacgaaacgatacgacgaattcaataaaaaataaaaaacgaaaaaaaaaacaaaataaaaaataaataaaaaaaaaacgaaaaaaacgaaaaaaacgaaaaataataaaaaaaaaaaaaacgaaaaaaaaaccgaaataaaaaaaaaatataaaaaaaaacgtcgcatacgacaacaataaaacaaaaaacgaaaacgacgcgaatactaatataaacaaaaaaaaaaaaacgaaaaaacgaacgacgcgaattaaaaaaaacgaacgaaaaacgaaaatcgaaaaa

SEQ ID NO: 38235 - DNA, 603 bp, Artificial Sequence
  chemically treated genomic DNA (Homo sapiens) CpG-island No: 38235
gtggggatagatttggcggatagaagggtgcgttagggataggcgggggataagtgggtatacgggtgaatagcgggtaaaaggaaaagcggggggtaatgggagggaatgggggggggagagggggggataagagggacgtaaacgggaaatattaggaaaacggggacggggggggggagaggggcggggggtaaatgaagggggggggcggggggcgcgggaggaagggaaggagaggtaggatacgggggaaacgagggggggaaatgacggcggggacggggggaaagggggatacggggttcgggggaagtgcggggcggtgcggcgggtttaatgggagatagagggcgggaggggaggtagggtagggaatgggtagagggagaacggggaaaacggggggggcggggggtaatggggagggggaaagcggaaagaaaatcggaatgggggggggatatgggggggggcgtcgtatacggtaataataaaataaagaacggggacggcgcgggtgttggtgtgggtaggggagggggaacggggggacgggcgacgcgggttgaggggaacgagcggaagacgggaatcgagggg

SEQ ID NO: 38236 - DNA, 603 bp, Artificial Sequence
  chemically treated genomic DNA (Homo sapiens) CpG-island No: 38236
cccctcgattcccgtcttccgctcgttcccctcaacccgcgtcgcccgtccccccgttccccctcccctacccacaccaacacccgcgccgtccccgttctttattttattattaccgtatacgacgcccccccccatatcccccccccattccgattttctttccgctttccccctccccattaccccccgccccccccgttttccccgttctccctctacccattccctaccctacctcccctcccgccctctatctcccattaaacccgccgcaccgccccgcacttcccccgaaccccgtatccccctttccccccgtccccgccgtcatttccccccctcgtttcccccgtatcctacctctccttcccttcctcccgcgccccccgcccccccccttcatttaccccccgcccctctccccccccccgtccccgttttcctaatatttcccgtttacgtccctcttatccccccctctcccccccccattccctcccattaccccccgcttttccttttacccgctattcacccgtatacccacttatcccccgcctatccctaacgcacccttctatccgccaaatctatccccac

SEQ ID NO: 38237 - DNA, 561 bp, Artificial Sequence
  chemically treated genomic DNA (Homo sapiens) CpG-island No: 38237
ttttttcgttgtcggttcggagttttgggtatgttgttgtttcggttcgaatttcgttgttggtgagagttttagcgattcgttttagtcgttcgttaacggtatatgttgtttttgaattcgcgaattgtggaatcgttgcgtattatgtgggaagcggatgttatcgaaagtagggtgagattatatgttcggtatgttcggatgtttttcgaatttttttattgttttttgtatttttcgcggcgtttttcgtcgtttttcgttcgttcgttgtcgttttttagcgttattgtgtatttttagtatttgttttatgtttatttcgttcgtcgcgtgtatttttttcggtatcgtatttttttttatattcgcgttcgtcgtgtcgtttgttttttttttcgttcgtttgtacgtcgtgtcgcgtcggtatttcgtaggattgtattgttcgtcgtcgtttcgttttttttttttcgttttttttttttcgtatgacgttatggtttttgtgttgatcgttacggatcgcgagtttgttatatttttttaggcgatttt

SEQ ID NO: 38238 - DNA, 561 bp, Artificial Sequence
  chemically treated genomic DNA (Homo sapiens) CpG-island No: 38238
aaaatcgcctaaaaaaatataacaaactcgcgatccgtaacgatcaacacaaaaaccataacgtcatacgaaaaaaaaaaaacgaaaaaaaaaaaacgaaacgacgacgaacaatacaatcctacgaaataccgacgcgacacgacgtacaaacgaacgaaaaaaaaaacaaacgacacgacgaacgcgaatataaaaaaaaatacgataccgaaaaaaatacacgcgacgaacgaaataaacataaaacaaatactaaaaatacacaataacgctaaaaaacgacaacgaacgaacgaaaaacgacgaaaaacgccgcgaaaaatacaaaaaacaataaaaaaattcgaaaaacatccgaacataccgaacatataatctcaccctactttcgataacatccgcttcccacataatacgcaacgattccacaattcgcgaattcaaaaacaacatataccgttaacgaacgactaaaacgaatcgctaaaactctcaccaacaacgaaattcgaaccgaaacaacaacatacccaaaactccgaaccgacaacgaaaaaa

SEQ ID NO: 38239 - DNA, 561 bp, Artificial Sequence
  chemically treated genomic DNA (Homo sapiens) CpG-island No: 38239
agggtcgtttgggaaagtgtggtaaattcgcggttcgtggcggttagtataagagttatggcgttatacgggggaaaaggggcgaaaaagaaaaaacggggcgacgacgggtagtgtaattttgcgggatatcggcgcgatacggcgtgtagacgaacgggggaaaaagtaggcggtacggcgaacgcgggtgtggggaggagtgcgatgtcggggaaaatgtacgcggcgagcgaggtgggtatagagtaggtattggaaatgtatagtgacgttaaagggcggtaacgggcgggcggaaaacggcggggggcgtcgcgggggatatagggggtaatgggggaattcgagggatattcgggtatgtcgggtatatgattttattttattttcgatagtattcgttttttatatgatacgtaacggttttatagttcgcgggtttaaggataatatatgtcgttggcggacgattagggcgagtcgttagagtttttattagtagcgagattcgggtcggaatagtagtatgtttagggtttcggatcgataacggaaaag

SEQ ID NO: 38240 - DNA, 561 bp, Artificial Sequence
  chemically treated genomic DNA (Homo sapiens) CpG-island No: 38240
cttttccgttatcgatccgaaaccctaaacatactactattccgacccgaatctcgctactaataaaaactctaacgactcgccctaatcgtccgccaacgacatatattatccttaaacccgcgaactataaaaccgttacgtatcatataaaaaacgaatactatcgaaaataaaataaaatcatatacccgacatacccgaatatccctcgaattcccccattaccccctatatcccccgcgacgccccccgccgttttccgcccgcccgttaccgccctttaacgtcactatacatttccaatacctactctatacccacctcgctcgccgcgtacattttccccgacatcgcactcctccccacacccgcgttcgccgtaccgcctactttttcccccgttcgtctacacgccgtatcgcgccgatatcccgcaaaattacactacccgtcgtcgccccgttttttctttttcgccccttttcccccgtataacgccataactcttatactaaccgccacgaaccgcgaatttaccacactttcccaaacgaccct

SEQ ID NO: 38241 - DNA, 531 bp, Artificial Sequence
  chemically treated genomic DNA (Homo sapiens) CpG-island No: 38241
gttcgcggggacgtcgaggttcggcgtcgtattttgtcgttcgttttgttcgcggggaagtcgaggttcgatgtcgtattttgtcgttcgttttgttcgcggggaagtcgaggttcggcgtcgtattttgtcgttcgttttgttcgcggggaagtcgaggttcggcgtcgtattttgtcgttcgttttattcgcgaggaagtcgaggttcggcgtcgtatcgtgtcgttcgttttgttcgcggggaagtcgaggttcggcgtcgtattttgtggtcgttttattcgcgggaaagtcgaggttcggcgtcgtattttgtcgttcgttttattcgcgaggaagtcgaggttcggcgtcgtatcgtgtcgttcgttttgttcgcggggaagtcgaggttcggcgtcgtattttgtcgttcgttttattcgcggagacgtcgaggttcgatgtcgtattttgtcgttcgttttattcgcgggaaagtcgaggttcggtgttgtattttgtcgtttattttattcgcggggaagtt

SEQ ID NO: 38242 - DNA, 531 bp, Artificial Sequence
  chemically treated genomic DNA (Homo sapiens) CpG-island No: 38242
aacttccccgcgaataaaataaacgacaaaatacaacaccgaacctcgactttcccgcgaataaaacgaacgacaaaatacgacatcgaacctcgacgtctccgcgaataaaacgaacgacaaaatacgacgccgaacctcgacttccccgcgaacaaaacgaacgacacgatacgacgccgaacctcgacttcctcgcgaataaaacgaacgacaaaatacgacgccgaacctcgactttcccgcgaataaaacgaccacaaaatacgacgccgaacctcgacttccccgcgaacaaaacgaacgacacgatacgacgccgaacctcgacttcctcgcgaataaaacgaacgacaaaatacgacgccgaacctcgacttccccgcgaacaaaacgaacgacaaaatacgacgccgaacctcgacttccccgcgaacaaaacgaacgacaaaatacgacatcgaacctcgacttccccgcgaacaaaacgaacgacaaaatacgacgccgaacctcgacgtccccgcgaac

SEQ ID NO: 38243 - DNA, 531 bp, Artificial Sequence
  chemically treated genomic DNA (Homo sapiens) CpG-island No: 38243
agttttttcgcgggtaaaatgggcggtagaatatagtatcgggtttcggttttttcgcgggtaaaacgggcggtaggatacggtatcgggtttcggcgttttcgcgggtaaaacgggcggtaggatacggcgtcgggtttcggttttttcgcgggtaaaacgggcggtacgatacggcgtcgggtttcggttttttcgcgggtaaaacgggcggtaggatacggcgtcgggtttcgattttttcgcgggtaaaacggttataggatacggcgtcgggtttcggttttttcgcgggtaaaacgggcggtacgatacggcgtcgggtttcggttttttcgcgggtaaaacgggcggtaggatacggcgtcgggtttcggttttttcgcgggtaaaacgggcggtaggatgcggcgtcgggtttcggttttttcgcgggtaaaacgggcggtagggtacggtatcgggtttcggttttttcgcgggtaaaacgggcggtaggatgcggcgtcgggtttcggcgttttcgcgggt

SEQ ID NO: 38244 - DNA, 531 bp, Artificial Sequence
  chemically treated genomic DNA (Homo sapiens) CpG-island No: 38244
acccgcgaaaacgccgaaacccgacgccgcatcctaccgcccgttttacccgcgaaaaaaccgaaacccgataccgtaccctaccgcccgttttacccgcgaaaaaaccgaaacccgacgccgcatcctaccgcccgttttacccgcgaaaaaaccgaaacccgacgccgtatcctaccgcccgttttacccgcgaaaaaaccgaaacccgacgccgtatcgtaccgcccgttttacccgcgaaaaaaccgaaacccgacgccgtatcctataaccgttttacccgcgaaaaaatcgaaacccgacgccgtatcctaccgcccgttttacccgcgaaaaaaccgaaacccgacgccgtatcgtaccgcccgttttacccgcgaaaaaaccgaaacccgacgccgtatcctaccgcccgttttacccgcgaaaacgccgaaacccgataccgtatcctaccgcccgttttacccgcgaaaaaaccgaaacccgatactatattctaccgcccattttacccgcgaaaaaact

SEQ ID NO: 38245 - DNA, 517 bp, Artificial Sequence
  chemically treated genomic DNA (Homo sapiens) CpG-island No: 38245
cgttgttggcgtttttttatagtttcgtttttttgacgagtattataaaaatcgacgtttaagttagaggtggcgaaattcgataggattataaagatattaggcgtttttttttggaagttttttcgtgcgttttattgatacgattttgtcgattatcggatatttgttcgttttttttttttcgggaagcgtggcgtttttttatagtttacgttgtaggtattttaggtcggtgtaggtcgttcgttttaagttgggttgtgtgtacgaattttttcgttagttttatcgttgagttttattcggtaattatcgtttcgagtttaatttcgtaagatacgatttattcgtattggtagtagttattggttatagtattagtatatttacgttcgtattcgttgttatatcgtttttttcgttgggggtttattacgcgttattttttattattattattttgttttttgtttttttttgtaaatatgtattttttgtataaaacgtgtttttt

SEQ ID NO: 38246 - DNA, 517 bp, Artificial Sequence
  chemically treated genomic DNA (Homo sapiens) CpG-island No: 38246
aaaaaacacgttttatacaaaaaatacatatttacaaaaaaaaacaaaaaacaaaataataataataaaaaataacgcgtaataaacccccaacgaaaaaaacgatataacaacgaatacgaacgtaaatatactaatactataaccaataactactaccaatacgaataaatcgtatcttacgaaattaaactcgaaacgataattaccgaataaaactcaacgataaaactaacgaaaaaattcgtacacacaacccaacttaaaacgaacgacctacaccgacctaaaatacctacaacgtaaactataaaaaaacgccacgcttcccgaaaaaaaaaaaacgaacaaatatccgataatcgacaaaatcgtatcaataaaacgcacgaaaaaacttccaaaaaaaaacgcctaatatctttataatcctatcgaatttcgccacctctaacttaaacgtcgatttttataatactcgtcaaaaaaacgaaactataaaaaaacgccaacaacg

SEQ ID NO: 38247 - DNA, 517 bp, Artificial Sequence
  chemically treated genomic DNA (Homo sapiens) CpG-island No: 38247
gaaaaatacgttttgtgtagaagatgtatgtttgtaggagagggtaagggataagatggtagtagtggggggtagcgcgtggtgagtttttagcggaaaagacgatgtagtagcgagtacgggcgtggatgtgttgatgttgtgattagtggttgttgttagtgcgagtaagtcgtgttttacggggttgggttcgagacgatagttgtcggataaggtttagcggtgaggttaacgggggggttcgtgtatatagtttagtttgaagcgaacgatttatatcgatttgagatatttatagcgtgagttatgagaaagcgttacgtttttcgaaggaagaaaggcgggtaggtattcggtgatcggtagggtcgtattagtagagcgtacgagggagtttttagggggaaacgtttggtatttttatagttttgtcgggtttcgttatttttgatttgagcgtcgatttttgtgatgttcgttaggggggcggagttatggaaaaacgttagtaacg

SEQ ID NO: 38248 - DNA, 517 bp, Artificial Sequence
  chemically treated genomic DNA (Homo sapiens) CpG-island No: 38248
cgttactaacgtttttccataactccgcccccctaacgaacatcacaaaaatcgacgctcaaatcaaaaataacgaaacccgacaaaactataaaaataccaaacgtttccccctaaaaactccctcgtacgctctactaatacgaccctaccgatcaccgaatacctacccgcctttcttccttcgaaaaacgtaacgctttctcataactcacgctataaatatctcaaatcgatataaatcgttcgcttcaaactaaactatatacacgaacccccccgttaacctcaccgctaaaccttatccgacaactatcgtctcgaacccaaccccgtaaaacacgacttactcgcactaacaacaaccactaatcacaacatcaacacatccacgcccgtactcgctactacatcgtcttttccgctaaaaactcaccacgcgctaccccccactactaccatcttatcccttaccctctcctacaaacatacatcttctacacaaaacgtatttttc

SEQ ID NO: 38249 - DNA, 799 bp, Artificial Sequence
  chemically treated genomic DNA (Homo sapiens) CpG-island No: 38249
ttgttcgttcgtgttcgtaattattaaggtttacgtaaatttttacggttttttttcgttttcgcgttatttttttaagaaatttttagagggtagcgtagacggggcgggttttgagatttcgggtttcgttttttttcgggaatcgtttattatttaggatttcgatagagggtgaaaaaagataattttcggtttcgcgatcgtttttaatttcgcgagaagagaaggcggtcgttatcggtcgaacggaggcggtggcgagggagggggtgtggtcggggagcgcgaagttttcgggagtaagggagagggggcggggtcgcgcgtttcgggtatacgtatgcgtgtacgttgtcggtcgggttgggttgagaggggagggggcggcggcggtcgaggcggcgtcgttattttcgtggttcggatagtgcgtggcggcgcgggtgattacgggagaagtaggtagggatcgtttttgcgtagttattgaaattttttcgttcgtgtgttcgagagtcgtagtttttcgcgcgtgtggtagattttggggattttaggttattttgcggtttcggttttttcgttgcgcgttaggtaggagcggcgggttttttagtgttcgttgtcggtcgaggttttatttttgttcggtgttgtcgaggcgacgattcggcgtcggacgtgttcgttttttcgcgcggcgatagttttgtttttgtttatgcgtttagtgggatcggggttgggttgggttgattcgggtagggcggaagggaagcgtgtgttcgttttaggt

SEQ ID NO: 38250 - DNA, 799 bp, Artificial Sequence
  chemically treated genomic DNA (Homo sapiens) CpG-island No: 38250
acctaaaacgaacacacgcttcccttccgccctacccgaatcaacccaacccaaccccgatcccactaaacgcataaacaaaaacaaaactatcgccgcgcgaaaaaacgaacacgtccgacgccgaatcgtcgcctcgacaacaccgaacaaaaataaaacctcgaccgacaacgaacactaaaaaacccgccgctcctacctaacgcgcaacgaaaaaaccgaaaccgcaaaataacctaaaatccccaaaatctaccacacgcgcgaaaaactacgactctcgaacacacgaacgaaaaaatttcaataactacgcaaaaacgatccctacctacttctcccgtaatcacccgcgccgccacgcactatccgaaccacgaaaataacgacgccgcctcgaccgccgccgccccctcccctctcaacccaacccgaccgacaacgtacacgcatacgtatacccgaaacgcgcgaccccgccccctctcccttactcccgaaaacttcgcgctccccgaccacaccccctccctcgccaccgcctccgttcgaccgataacgaccgccttctcttctcgcgaaattaaaaacgatcgcgaaaccgaaaattatcttttttcaccctctatcgaaatcctaaataataaacgattcccgaaaaaaaacgaaacccgaaatctcaaaacccgccccgtctacgctaccctctaaaaatttcttaaaaaaataacgcgaaaacgaaaaaaaaccgtaaaaatttacgtaaaccttaataattacgaacacgaacgaacaa

SEQ ID NO: 38251 - DNA, 799 bp, Artificial Sequence
  chemically treated genomic DNA (Homo sapiens) CpG-island No: 38251
atttgaggcgggtatacgtttttttttcgttttgttcgggttagtttagtttagtttcggttttattgggcgtataagtaaggatagagttgtcgtcgcgcgggagggcgggtacgttcggcgtcgggtcgtcgtttcggtaatatcgggtaagagtggggtttcggtcgatagcgggtattggggagttcgtcgtttttatttgacgcgtagcgggagggtcggggtcgtagggtgatttggggtttttaggatttgttatacgcgcggggggttgcggttttcggatatacgagcgagagggttttaatggttacgtaggggcggtttttatttatttttttcgtggttattcgcgtcgttacgtattgttcggattacggaaataacgacgtcgtttcggtcgtcgtcgttttttttttttttagtttagttcgatcggtagcgtgtacgtatgcgtatgttcgggacgcgcgatttcgtttttttttttttattttcggggatttcgcgtttttcggttatattttttttttcgttatcgttttcgttcggtcgatggcggtcgtttttttttttcgcgagattagagacgatcgcgagatcggaagttatttttttttattttttgtcggagttttgggtagtgggcggttttcggaaagaggcggagttcggagttttagagttcgtttcgtttgcgttgttttttgggaattttttagaaaggtgacgcgaaggcggaaggaaatcgtggaggtttgcgtagattttagtggttgcgagtacgaacgagtag

SEQ ID NO: 38252 - DNA, 799 bp, Artificial Sequence
  chemically treated genomic DNA (Homo sapiens) CpG-island No: 38252
ctactcgttcgtactcgcaaccactaaaatctacgcaaacctccacgatttccttccgccttcgcgtcacctttctaaaaaattcccaaaaaacaacgcaaacgaaacgaactctaaaactccgaactccgcctctttccgaaaaccgcccactacccaaaactccgacaaaaaataaaaaaaaataacttccgatctcgcgatcgtctctaatctcgcgaaaaaaaaaaacgaccgccatcgaccgaacgaaaacgataacgaaaaaaaaaatataaccgaaaaacgcgaaatccccgaaaataaaaaaaaaaaaacgaaatcgcgcgtcccgaacatacgcatacgtacacgctaccgatcgaactaaactaaaaaaaaaaaaaacgacgacgaccgaaacgacgtcgttatttccgtaatccgaacaatacgtaacgacgcgaataaccacgaaaaaaataaataaaaaccgcccctacgtaaccattaaaaccctctcgctcgtatatccgaaaaccgcaaccccccgcgcgtataacaaatcctaaaaaccccaaatcaccctacgaccccgaccctcccgctacgcgtcaaataaaaacgacgaactccccaatacccgctatcgaccgaaaccccactcttacccgatattaccgaaacgacgacccgacgccgaacgtacccgccctcccgcgcgacgacaactctatccttacttatacgcccaataaaaccgaaactaaactaaactaacccgaacaaaacgaaaaaaaaacgtatacccgcctcaaat

SEQ ID NO: 38253 - DNA, 993 bp, Artificial Sequence
  chemically treated genomic DNA (Homo sapiens) CpG-island No: 38253
ttatgatttgggattttatcgaattcgtttgtcgcggttgcgttaattacgagggcgtcgatcgcgtcgagttcgttatcgagacggcgcggtagtttaagcgggcgtacggttgtttttcggagggtcgttttttattcggcgtcgcggtttcggtcgtcgttaagtcgtcgtcgtttttcgttaaggatatttttttgtagtagtagtagtagtttggttacggcggtttcgaggcggtttcgcgcgcgtcgtaggttttggagcgttattcgttggcggtcgcggtcgagaggttttcgcgtttcggttttgatttcggtagtagtcgttcggtagcgagtttggtttagtcgtcgacgtcgtagtcgtcgttcgtgaacggtattttggtgtttaacggtttttttaagttagaggagtcgttcgagttgaatcgttagagttcgaattcgcggcgcggttacgcggtgtcgtttattttggtgtcgtttatgaacggttcggttacgtcgttgtttatcgcgttcggtttcggcggtcgcgttgtcgtttttttagtcgcggtgttcggaatcgcggtcgttagtttgggtttcgcgtagttttatcggatttgggcgtttataagcggtcggtattcgtgtcgagtagcgttgtcgtggagtacgagtagcgtgaggcggtagttaaaaagaaataatcgtcgtcgtttgcgtatcggggttcggtcgatagtttgtttatcgcggtcggggtcgtcgagttgagcgcggaaggtgcgggtaagagtcgcgggtttggagagtaggattgggttaataggtttaagatcgtgcgcgatacgttgttggcgttgtattagtacggttattcggggtttttcgagagtaagtttaagaaggagtcggttttgattgtaggtaggttgttgggtttcgaggttaacggggttaacgggtttaaagtaggtaggggcggttgtgaagtgag

SEQ ID NO: 38254 - DNA, 993 bp, Artificial Sequence
  chemically treated genomic DNA (Homo sapiens) CpG-island No: 38254
ctcacttcacaaccgcccctacctactttaaacccgttaaccccgttaacctcgaaacccaacaacctacctacaatcaaaaccgactccttcttaaacttactctcgaaaaaccccgaataaccgtactaatacaacgccaacaacgtatcgcgcacgatcttaaacctattaacccaatcctactctccaaacccgcgactcttacccgcaccttccgcgctcaactcgacgaccccgaccgcgataaacaaactatcgaccgaaccccgatacgcaaacgacgacgattatttctttttaactaccgcctcacgctactcgtactccacgacaacgctactcgacacgaataccgaccgcttataaacgcccaaatccgataaaactacgcgaaacccaaactaacgaccgcgattccgaacaccgcgactaaaaaaacgacaacgcgaccgccgaaaccgaacgcgataaacaacgacgtaaccgaaccgttcataaacgacaccaaaataaacgacaccgcgtaaccgcgccgcgaattcgaactctaacgattcaactcgaacgactcctctaacttaaaaaaaccgttaaacaccaaaataccgttcacgaacgacgactacgacgtcgacgactaaaccaaactcgctaccgaacgactactaccgaaatcaaaaccgaaacgcgaaaacctctcgaccgcgaccgccaacgaataacgctccaaaacctacgacgcgcgcgaaaccgcctcgaaaccgccgtaaccaaactactactactactacaaaaaaatatccttaacgaaaaacgacgacgacttaacgacgaccgaaaccgcgacgccgaataaaaaacgaccctccgaaaaacaaccgtacgcccgcttaaactaccgcgccgtctcgataacgaactcgacgcgatcgacgccctcgtaattaacgcaaccgcgacaaacgaattcgataaaatcccaaatcataa

SEQ ID NO: 38255 - DNA, 993 bp, Artificial Sequence
  chemically treated genomic DNA (Homo sapiens) CpG-island No: 38255
tttattttatagtcgtttttatttgttttagattcgttggtttcgttggtttcgaaatttaataatttgtttgtagttagggtcggtttttttttaaatttgttttcgaagggtttcgagtggtcgtgttggtgtagcgttagtagcgtgtcgcgtacggttttgggtttgttgatttagttttgttttttagattcgcggtttttgttcgtatttttcgcgtttagttcggcggtttcggtcgcggtggataggttgtcggtcgggtttcggtgcgtaggcggcggcggttgtttttttttggttgtcgttttacgttgttcgtgttttacggtagcgttgttcgatacggatgtcggtcgtttgtgggcgtttagattcggtggggttgcgcggagtttaggttggcggtcgcggtttcggatatcgcggttaaggaggcggtagcgcggtcgtcgaggtcgagcgcggtgggtagcggcgtggtcgagtcgtttatgagcggtattagggtgggcggtatcgcgtggtcgcgtcgcgggttcgggttttggcgatttagttcgggcggtttttttagtttggagaagtcgttgggtattaggatgtcgtttacgggcggcggttgcggcgtcggcggttgggttaggttcgttgtcgggcggttgttgtcgaagttagagtcgaggcgcgggggtttttcggtcgcggtcgttaacgggtagcgttttaaggtttgcggcgcgcgcggggtcgtttcggggtcgtcgtggttaagttgttgttgttgttgtaaaaggatgtttttggcggagagcggcggcggtttggcggcggtcgaggtcgcggcgtcgggtggggagcgatttttcgggaagtagtcgtgcgttcgtttgagttgtcgcgtcgtttcgatgacgaattcgacgcggtcggcgttttcgtagttgacgtagtcgcggtagacgggttcggtgaagttttagattatgg

SEQ ID NO: 38256 - DNA, 993 bp, Artificial Sequence
  chemically treated genomic DNA (Homo sapiens) CpG-island No: 38256
ccataatctaaaacttcaccgaacccgtctaccgcgactacgtcaactacgaaaacgccgaccgcgtcgaattcgtcatcgaaacgacgcgacaactcaaacgaacgcacgactacttcccgaaaaatcgctccccacccgacgccgcgacctcgaccgccgccaaaccgccgccgctctccgccaaaaacatccttttacaacaacaacaacaacttaaccacgacgaccccgaaacgaccccgcgcgcgccgcaaaccttaaaacgctacccgttaacgaccgcgaccgaaaaacccccgcgcctcgactctaacttcgacaacaaccgcccgacaacgaacctaacccaaccgccgacgccgcaaccgccgcccgtaaacgacatcctaatacccaacgacttctccaaactaaaaaaaccgcccgaactaaatcgccaaaacccgaacccgcgacgcgaccacgcgataccgcccaccctaataccgctcataaacgactcgaccacgccgctacccaccgcgctcgacctcgacgaccgcgctaccgcctccttaaccgcgatatccgaaaccgcgaccgccaacctaaactccgcgcaaccccaccgaatctaaacgcccacaaacgaccgacatccgtatcgaacaacgctaccgtaaaacacgaacaacgtaaaacgacaaccaaaaaaaaacaaccgccgccgcctacgcaccgaaacccgaccgacaacctatccaccgcgaccgaaaccgccgaactaaacgcgaaaaatacgaacaaaaaccgcgaatctaaaaaacaaaactaaatcaacaaacccaaaaccgtacgcgacacgctactaacgctacaccaacacgaccactcgaaacccttcgaaaacaaatttaaaaaaaaaccgaccctaactacaaacaaattattaaatttcgaaaccaacgaaaccaacgaatctaaaacaaataaaaacgactataaaataaa

SEQ ID NO: 38257 - DNA, 708 bp, Artificial Sequence
  chemically treated genomic DNA (Homo sapiens) CpG-island No: 38257
gttcggggatttcgcgttgtttttttttcggtttttatagagtagggggttttcggcggggtatttttttttgtgggcggggtttatcgttttcgttttcgttttttcggttgcgcgcggttgcgggttgcgattacgtgagtatagtagggagggggaggggttttgattttcgggcggcggaaggagacgcggtcgcgtgaggacgaggttatttgaaaatacgtttcgggagttagagtttgaggtcggcggcgtacgttgttgtttcgtgggtttttgttttttcgtttgttttttcgggtttttcgtttcggtcgcggtcgggtttttaggtaagcggtcgtcgttcgtcgggtcgggttttttcggggcgcgggattgagcgtggtggggtcgtcgtttttcgattcgcggtttaagcgggtagggtcggtcgtgtacgatttgcgtttttcgggtttgggtcgcggcgttttttcgagttgggtttgggtgtgcggtcggtattgcgggggcgggattttttagggcgtttgcggagttttaggtgattgggcgggttcgtttggtttcgggttcgagagagttttagttcggagtgtgtgaatcgggttttattttttcgattttggttttggtcggcgttttttggagtaggaggaacgatggttttttaaaatttatggtgtgttcgtttttgggatg

SEQ ID NO: 38258 - DNA, 708 bp, Artificial Sequence
  chemically treated genomic DNA (Homo sapiens) CpG-island No: 38258
catcccaaaaacgaacacaccataaattttaaaaaaccatcgttcctcctactccaaaaaacgccgaccaaaaccaaaatcgaaaaaataaaacccgattcacacactccgaactaaaactctctcgaacccgaaaccaaacgaacccgcccaatcacctaaaactccgcaaacgccctaaaaaatcccgcccccgcaataccgaccgcacacccaaacccaactcgaaaaaacgccgcgacccaaacccgaaaaacgcaaatcgtacacgaccgaccctacccgcttaaaccgcgaatcgaaaaacgacgaccccaccacgctcaatcccgcgccccgaaaaaacccgacccgacgaacgacgaccgcttacctaaaaacccgaccgcgaccgaaacgaaaaacccgaaaaaacaaacgaaaaaacaaaaacccacgaaacaacaacgtacgccgccgacctcaaactctaactcccgaaacgtattttcaaataacctcgtcctcacgcgaccgcgtctccttccgccgcccgaaaatcaaaacccctccccctccctactatactcacgtaatcgcaacccgcaaccgcgcgcaaccgaaaaaacgaaaacgaaaacgataaaccccgcccacaaaaaaaaataccccgccgaaaaccccctactctataaaaaccgaaaaaaaaacaacgcgaaatccccgaac

SEQ ID NO: 38259 - DNA, 708 bp, Artificial Sequence
  chemically treated genomic DNA (Homo sapiens) CpG-island No: 38259
tattttagaggcgaatatattatgggttttaggaaattatcgttttttttattttaagggacgtcggttaggattagagtcggggaagtggggttcgatttatatatttcgggttaaaattttttcggattcgaaattaggcgaattcgtttagttatttgaagtttcgtaaacgttttagggggtttcgttttcgtagtgtcggtcgtatatttaggtttagttcggagggacgtcgcggtttagattcgggggacgtaaatcgtgtacggtcgattttgttcgtttgggtcgcggatcggggggcgacggttttattacgtttagtttcgcgtttcgggaggattcggttcgacgggcgacggtcgtttatttgaggattcggtcgcggtcggggcgagaagttcgagaagataagcgagggagtagaagtttacggggtaatagcgtgcgtcgtcgattttaggttttagttttcggagcgtgtttttaaatagtttcgtttttacgcggtcgcgttttttttcgtcgttcggaaattagggtttttttttttttttgttgtgtttacgtgatcgtagttcgtagtcgcgcgtaatcggggaggcgggagcgggagcggtaggtttcgtttatagaggagggtatttcgtcggaagttttttgttttgtgggaatcggagggaggatagcgcgaggttttcggat

SEQ ID NO: 38260 - DNA, 708 bp, Artificial Sequence
  chemically treated genomic DNA (Homo sapiens) CpG-island No: 38260
atccgaaaacctcgcgctatcctccctccgattcccacaaaacaaaaaacttccgacgaaataccctcctctataaacgaaacctaccgctcccgctcccgcctccccgattacgcgcgactacgaactacgatcacgtaaacacaacaaaaaaaaaaaaaaaccctaatttccgaacgacgaaaaaaaacgcgaccgcgtaaaaacgaaactatttaaaaacacgctccgaaaactaaaacctaaaatcgacgacgcacgctattaccccgtaaacttctactccctcgcttatcttctcgaacttctcgccccgaccgcgaccgaatcctcaaataaacgaccgtcgcccgtcgaaccgaatcctcccgaaacgcgaaactaaacgtaataaaaccgtcgccccccgatccgcgacccaaacgaacaaaatcgaccgtacacgatttacgtcccccgaatctaaaccgcgacgtccctccgaactaaacctaaatatacgaccgacactacgaaaacgaaaccccctaaaacgtttacgaaacttcaaataactaaacgaattcgcctaatttcgaatccgaaaaaattttaacccgaaatatataaatcgaaccccacttccccgactctaatcctaaccgacgtcccttaaaataaaaaaaacgataatttcctaaaacccataatatattcgcctctaaaata

SEQ ID NO: 38261 - DNA, 826 bp, Artificial Sequence
  chemically treated genomic DNA (Homo sapiens) CpG-island No: 38261
gcggcgcggtcgcggcgaggttttttagaggcggtattagcgtatgcgtagggcggagtttcggttcgggatataagatggcggtacggcgttggggagggcgaggcggaggcggtaaaacgggcggtcgagtagaacgtgtagtcgcgttttttttagttcgtttcgggtaggtaagagttttaggaagttatggtttcgtagcgagtcgcgttagggtttggggattcgaagttggggggcggcggtttttcggcgttttttgttcgggattgtcgtttgttttgtttttgttgtcgtcgttattttagattcgcgggtgggcggtcgcgtcggtggtcgaagtgagggaggtggttcgagagtttttagcggagcgggttttagggttttttcgttgttgtcgtcgttatcgtttttgtgtcgggtttcgattttgagtcgttttagttcgggggcgggagcgcgcggcggggcggggggcggagttcgagagatgggtcggcgcgcgcgcgcgcgttaaatagtttattttcgttggggtagggggaggggaaggtgcgcgcgcgcgcgcgcgttggagttcgtttttcgttttcgtgcgtcgtcgcgtttgcgtattttgttcgttttttgatttttttttattgggtcggagaattttgattggtatattgcggagatggtttcgttttacgtgtttttaatttcggattcggattttggtttttggtgggtttttttggttgcgtagatagagttgtttatttttgagtagcggtaatttttaaattgcggtatgcgtgggggtcgggaagttatagga

SEQ ID NO: 38262 - DNA, 826 bp, Artificial Sequence
  chemically treated genomic DNA (Homo sapiens) CpG-island No: 38262
tcctataacttcccgacccccacgcataccgcaatttaaaaattaccgctactcaaaaataaacaactctatctacgcaaccaaaaaaacccaccaaaaaccaaaatccgaatccgaaattaaaaacacgtaaaacgaaaccatctccgcaatataccaatcaaaattctccgacccaataaaaaaaaatcaaaaaacgaacaaaatacgcaaacgcgacgacgcacgaaaacgaaaaacgaactccaacgcgcgcgcgcgcgcgcaccttcccctccccctaccccaacgaaaataaactatttaacgcgcgcgcgcgcgccgacccatctctcgaactccgccccccgccccgccgcgcgctcccgcccccgaactaaaacgactcaaaatcgaaacccgacacaaaaacgataacgacgacaacaacgaaaaaaccctaaaacccgctccgctaaaaactctcgaaccacctccctcacttcgaccaccgacgcgaccgcccacccgcgaatctaaaataacgacgacaacaaaaacaaaacaaacgacaatcccgaacaaaaaacgccgaaaaaccgccgccccccaacttcgaatccccaaaccctaacgcgactcgctacgaaaccataacttcctaaaactcttacctacccgaaacgaactaaaaaaaacgcgactacacgttctactcgaccgcccgttttaccgcctccgcctcgccctccccaacgccgtaccgccatcttatatcccgaaccgaaactccgccctacgcatacgctaataccgcctctaaaaaacctcgccgcgaccgcgccgc

SEQ ID NO: 38263 - DNA, 826 bp, Artificial Sequence
  chemically treated genomic DNA (Homo sapiens) CpG-island No: 38263
ttttgtggtttttcgatttttacgtatatcgtagtttgagaattatcgttgtttaaggataaataattttatttgcgtaattagaaaaatttattagaagttagagttcgagttcgggattggaggtacgtggggcgggattattttcgtaatgtattaattagaatttttcggtttagtagggaggagttaaagggcgaataaagtacgtaggcgcgacggcgtacgaaggcgagaggcgagttttagcgcgcgcgcgcgcgcgtatttttttttttttttattttagcgagggtgggttgtttggcgcgcgcgcgcgcgtcggtttatttttcgggtttcgtttttcgtttcgtcgcgcgttttcgttttcgggttgaggcgatttagagtcggagttcgatataaaggcggtggcggcggtagtagcggaggggttttagagttcgtttcgttgggggttttcgggttattttttttatttcggttatcggcgcggtcgtttattcgcgggtttaagatggcggcggtaatagagatagggtaagcggtagtttcgagtagaaagcgtcggagggtcgtcgttttttagtttcggatttttagattttggcgcggttcgttgcgggattatggttttttgggatttttatttgttcggagcggattggaggggacgcggttatacgttttgttcgatcgttcgttttgtcgttttcgtttcgttttttttagcgtcgtgtcgttattttgtgtttcgggtcgggatttcgttttgcgtatgcgttggtatcgtttttgagggatttcgtcgcggtcgcgtcgt

SEQ ID NO: 38264 - DNA, 826 bp, Artificial Sequence
  chemically treated genomic DNA (Homo sapiens) CpG-island No: 38264
acgacgcgaccgcgacgaaatccctcaaaaacgataccaacgcatacgcaaaacgaaatcccgacccgaaacacaaaataacgacacgacgctaaaaaaaacgaaacgaaaacgacaaaacgaacgatcgaacaaaacgtataaccgcgtcccctccaatccgctccgaacaaataaaaatcccaaaaaaccataatcccgcaacgaaccgcgccaaaatctaaaaatccgaaactaaaaaacgacgaccctccgacgctttctactcgaaactaccgcttaccctatctctattaccgccgccatcttaaacccgcgaataaacgaccgcgccgataaccgaaataaaaaaaataacccgaaaacccccaacgaaacgaactctaaaacccctccgctactaccgccgccaccgcctttatatcgaactccgactctaaatcgcctcaacccgaaaacgaaaacgcgcgacgaaacgaaaaacgaaacccgaaaaataaaccgacgcgcgcgcgcgcgccaaacaacccaccctcgctaaaataaaaaaaaaaaaaaatacgcgcgcgcgcgcgcgctaaaactcgcctctcgccttcgtacgccgtcgcgcctacgtactttattcgccctttaactcctccctactaaaccgaaaaattctaattaatacattacgaaaataatcccgccccacgtacctccaatcccgaactcgaactctaacttctaataaatttttctaattacgcaaataaaattatttatccttaaacaacgataattctcaaactacgatatacgtaaaaatcgaaaaaccacaaaa

SEQ ID NO: 38265 - DNA, 784 bp, Artificial Sequence
  chemically treated genomic DNA (Homo sapiens) CpG-island No: 38265
tagtgttaaatatttatagagagacgcgtagatataaacggatttatacgggtaattttcgagataaaatttatattcgatggatttacgcggtcgtggaaatatttgtcgttttagaaatatttaggtattcgcgatatatatagtatagttacgtttaagggtattaggatttcgggtttgcgcgtatgcgcggtttttttggatgttcgtgcgtatagatataatattttatacgttttagatttacgaaattttttacggtttagttttagtttattcgggtcgtttttttttcgaggcggtttttcgtttttttttttttcgtttttttttttttttcgtttaaagatgtataaaatatttttcggaagtaatttcggcgtttagttttttttttttcgtttttcggtcgtcgtttttttatttattttcggtcgtcgtcggttaagtttttttttcggcgtagttcggttttcgtcgtttttcgttcggagatcgcggcgtatttggatttttttttttattcgttagtcgtttcgttttcggattttacggttgtaaattgatttggcgcgcggggaggaggagagcgtaggcgagcgaattcgcgagagagggagagagcgagcgagtaatagcgagagcgagagcgagagagtcgggaggtagagggagtagtgatcgtttttcggagtcgggatttatgtttgttttcgggattagcgaaggggattttacggttgagtatgagttaggttgttaggagttaggtatttttacg

SEQ ID NO: 38266 - DNA, 784 bp, Artificial Sequence
  chemically treated genomic DNA (Homo sapiens) CpG-island No: 38266
cgtaaaaatacctaactcctaacaacctaactcatactcaaccgtaaaatccccttcgctaatcccgaaaacaaacataaatcccgactccgaaaaacgatcactactccctctacctcccgactctctcgctctcgctctcgctattactcgctcgctctctccctctctcgcgaattcgctcgcctacgctctcctcctccccgcgcgccaaatcaatttacaaccgtaaaatccgaaaacgaaacgactaacgaataaaaaaaaaaatccaaatacgccgcgatctccgaacgaaaaacgacgaaaaccgaactacgccgaaaaaaaaacttaaccgacgacgaccgaaaataaataaaaaaacgacgaccgaaaaacgaaaaaaaaaaaactaaacgccgaaattacttccgaaaaatattttatacatctttaaacgaaaaaaaaaaaaaaacgaaaaaaaaaaaaacgaaaaaccgcctcgaaaaaaaaacgacccgaataaactaaaactaaaccgtaaaaaatttcgtaaatctaaaacgtataaaatattatatctatacgcacgaacatccaaaaaaaccgcgcatacgcgcaaacccgaaatcctaatacccttaaacgtaactatactatatatatcgcgaatacctaaatatttctaaaacgacaaatatttccacgaccgcgtaaatccatcgaatataaattttatctcgaaaattacccgtataaatccgtttatatctacgcgtctctctataaatatttaacacta

SEQ ID NO: 38267 - DNA, 784 bp, Artificial Sequence
  chemically treated genomic DNA (Homo sapiens) CpG-island No: 38267
cgtgggggtatttggtttttagtagtttggtttatatttagtcgtaaagtttttttcgttggtttcgaggataggtatgaatttcggtttcggaaggcggttattattttttttgtttttcggttttttcgttttcgttttcgttgttgttcgttcgttttttttttttttcgcgggttcgttcgtttgcgtttttttttttttcgcgcgttagattagtttgtagtcgtggggttcgggagcgaggcggttggcgaatggagagggaagtttaagtgcgtcgcggttttcgggcggggagcggcggaggtcgggttacgtcgggggagggatttagtcggcgacggtcgaaaatgaatgggggagcggcggtcggggggcggggagggaggagttgaacgtcggggttgttttcgaggagtgttttgtatatttttaggcggaggaggaggagaagcgagaggaggagagacgggaggtcgtttcgagggaagggcggttcgggtgggttggggttgagtcgtagggagtttcgtgggtttggggcgtgtagggtgttgtgtttatgcgtacgagtatttaaagggatcgcgtatacgcgtaaattcggaattttggtgtttttaagcgtgattgtattgtgtgtgtcgcgagtatttgagtgtttttggggcggtaggtgtttttacggtcgcgtggatttatcgagtgtgggttttgtttcgggagttgttcgtgtgggttcgtttgtgtttgcgcgtttttttgtgagtgtttgatattg

SEQ ID NO: 38268 - DNA, 784 bp, Artificial Sequence
  chemically treated genomic DNA (Homo sapiens) CpG-island No: 38268
caatatcaaacactcacaaaaaaacgcgcaaacacaaacgaacccacacgaacaactcccgaaacaaaacccacactcgataaatccacgcgaccgtaaaaacacctaccgccccaaaaacactcaaatactcgcgacacacacaatacaatcacgcttaaaaacaccaaaattccgaatttacgcgtatacgcgatccctttaaatactcgtacgcataaacacaacaccctacacgccccaaacccacgaaactccctacgactcaaccccaacccacccgaaccgcccttccctcgaaacgacctcccgtctctcctcctctcgcttctcctcctcctccgcctaaaaatatacaaaacactcctcgaaaacaaccccgacgttcaactcctccctccccgccccccgaccgccgctcccccattcattttcgaccgtcgccgactaaatccctcccccgacgtaacccgacctccgccgctccccgcccgaaaaccgcgacgcacttaaacttccctctccattcgccaaccgcctcgctcccgaaccccacgactacaaactaatctaacgcgcgaaaaaaaaaaaaacgcaaacgaacgaacccgcgaaaaaaaaaaaaaacgaacgaacaacaacgaaaacgaaaacgaaaaaaccgaaaaacaaaaaaaataataaccgccttccgaaaccgaaattcatacctatcctcgaaaccaacgaaaaaaactttacgactaaatataaaccaaactactaaaaaccaaatacccccacg

SEQ ID NO: 38269 - DNA, 514 bp, Artificial Sequence
  chemically treated genomic DNA (Homo sapiens) CpG-island No: 38269
tcgaagagcggtgttgggtattcgagagattcggcggtggggaagttattttttttcgaagacgttgttttttagtaatcgtttttcgtttttgttattagtttttttttttcgttcggtttaggatcggttttgcgggcgtcgttaggtttagattaaggtgagtagtttttattcgatgtttggtttttgatttttagggtcgcggagaattggtcgcgggcgttcggggtcgggaatagaaagcgggatttgggggttatgggggattcggatagagatcgcgtttggacgtgtacgggtttggcgttcgttggtgtttagtatacggcgcggtgaggagcggcgagtattcggacgttatttggtttggtagggaacggaattcggggcgtataacgttatgggcggttttgttaggtttttgtttcgagtacgggaaatcgcgattttaatgcggtttatcgcgaaagtttcgtcgttttgtttggttttttttaatatttttgtgaga

SEQ ID NO: 38270 - DNA, 514 bp, Artificial Sequence
  chemically treated genomic DNA (Homo sapiens) CpG-island No: 38270
tctcacaaaaatattaaaaaaaaccaaacaaaacgacgaaactttcgcgataaaccgcattaaaatcgcgatttcccgtactcgaaacaaaaacctaacaaaaccgcccataacgttatacgccccgaattccgttccctaccaaaccaaataacgtccgaatactcgccgctcctcaccgcgccgtatactaaacaccaacgaacgccaaacccgtacacgtccaaacgcgatctctatccgaatcccccataacccccaaatcccgctttctattcccgaccccgaacgcccgcgaccaattctccgcgaccctaaaaatcaaaaaccaaacatcgaataaaaactactcaccttaatctaaacctaacgacgcccgcaaaaccgatcctaaaccgaacgaaaaaaaaaaactaataacaaaaacgaaaaacgattactaaaaaacaacgtcttcgaaaaaaaataacttccccaccgccgaatctctcgaatacccaacaccgctcttcga

SEQ ID NO: 38271 - DNA, 514 bp, Artificial Sequence
  chemically treated genomic DNA (Homo sapiens) CpG-island No: 38271
ttttataaaagtgttaaagagagttagataaaacgacgaagttttcgcgatgagtcgtattaaaatcgcggtttttcgtattcggagtagaggtttggtagggtcgtttatagcgttgtgcgtttcgggtttcgttttttattaggttaggtgacgttcgggtgttcgtcgttttttatcgcgtcgtatgttgagtattagcgaacgttaggttcgtgtacgtttaagcgcggtttttgttcggattttttatggtttttaggtttcgttttttgttttcggtttcggacgttcgcggttagtttttcgcgattttgagaattaagagttaagtatcgggtaggagttgtttattttggtttgggtttggcggcgttcgtagagtcggttttggatcgagcgaggaggaggggttaataatagaggcggagggcggttgttaggaaatagcgttttcgggaggaagtgatttttttatcgtcgggtttttcgggtatttaatatcgtttttcgg

SEQ ID NO: 38272 - DNA, 514 bp, Artificial Sequence
  chemically treated genomic DNA (Homo sapiens) CpG-island No: 38272
ccgaaaaacgatattaaatacccgaaaaacccgacgataaaaaaatcacttcctcccgaaaacgctatttcctaacaaccgccctccgcctctattattaacccctcctcctcgctcgatccaaaaccgactctacgaacgccgccaaacccaaaccaaaataaacaactcctacccgatacttaactcttaattctcaaaatcgcgaaaaactaaccgcgaacgtccgaaaccgaaaacaaaaaacgaaacctaaaaaccataaaaaatccgaacaaaaaccgcgcttaaacgtacacgaacctaacgttcgctaatactcaacatacgacgcgataaaaaacgacgaacacccgaacgtcacctaacctaataaaaaacgaaacccgaaacgcacaacgctataaacgaccctaccaaacctctactccgaatacgaaaaaccgcgattttaatacgactcatcgcgaaaacttcgtcgttttatctaactctctttaacacttttataaaa

SEQ ID NO: 38273 - DNA, 655 bp, Artificial Sequence
  chemically treated genomic DNA (Homo sapiens) CpG-island No: 38273
ttggtcgataggtttcgatttttcgtcgttttatttcgtagagattttagttttatttacgacgcgcgtaagtttgttcgtgggtcgttatggcgaggtcgcgggaagaggggaatttgcgggagggataagaagtgcggtaagttggggttaaagggttaaagggagatttcgggtagagaggggcgaggggtcgcggggtagcgcggttattttaggaagttagggtcgatttcgagttcggcgcgggttttcggtttggtcgtcgcggtttaggtttttgggtcggcgtgaggcgggcgcggcggtatttggtggtgttttgaggggggtcgtcgttatcgtttcgttagttgttgaagtcgtttggtacgttcgcggtcgggttgtagttgtagtagttggagggcgaagtgaaggagatatcgtttcgttcgtcgtaattttgtttttttttagataggatttcgtcgttgttttcggggttgttcgtcgcgtttgtttttgtagcgtagttcgttgttaattttaatttgttttagagcggttacgtggatcgatagcgtttcggttttgtaggtgggttgttttcgttcgtcggtggggattcggaaggtagaagttgttgggttttggattaggtagttattcgggt

SEQ ID NO: 38274 - DNA, 655 bp, Artificial Sequence
  chemically treated genomic DNA (Homo sapiens) CpG-island No: 38274
acccgaataactacctaatccaaaacccaacaacttctaccttccgaatccccaccgacgaacgaaaacaacccacctacaaaaccgaaacgctatcgatccacgtaaccgctctaaaacaaattaaaattaacaacgaactacgctacaaaaacaaacgcgacgaacaaccccgaaaacaacgacgaaatcctatctaaaaaaaaacaaaattacgacgaacgaaacgatatctccttcacttcgccctccaactactacaactacaacccgaccgcgaacgtaccaaacgacttcaacaactaacgaaacgataacgacgacccccctcaaaacaccaccaaataccgccgcgcccgcctcacgccgacccaaaaacctaaaccgcgacgaccaaaccgaaaacccgcgccgaactcgaaatcgaccctaacttcctaaaataaccgcgctaccccgcgacccctcgcccctctctacccgaaatctccctttaaccctttaaccccaacttaccgcacttcttatccctcccgcaaattcccctcttcccgcgacctcgccataacgacccacgaacaaacttacgcgcgtcgtaaataaaactaaaatctctacgaaataaaacgacgaaaaatcgaaacctatcgaccaa

SEQ ID NO: 38275 - DNA, 655 bp, Artificial Sequence
  chemically treated genomic DNA (Homo sapiens) CpG-island No: 38275
gttcggatagttgtttgatttaaggtttagtagtttttgtttttcggatttttatcgacggacggaggtagtttatttgtaggatcggggcgttgtcggtttacgtggtcgttttggagtaggttggagttggtagcgggttgcgttgtagggataggcgcggcggatagtttcgggggtagcggcggggttttgtttgggagaggatagggttgcggcgggcggaacggtgttttttttatttcgttttttagttgttgtagttgtagttcgatcgcgagcgtgttaagcggttttagtagttagcggagcggtggcggcggttttttttaggatattattaggtatcgtcgcgttcgttttacgtcgatttaggggtttaggtcgcggcggttaagtcggaggttcgcgtcggattcggagtcggttttggttttttaagatggtcgcgttgtttcgcggtttttcgtttttttttgttcgggatttttttttggttttttgattttagtttatcgtattttttgtttttttcgtagattttttttttttcgcggtttcgttatggcgatttacggatagatttgcgcgcgtcgtaagtaaagttgggatttttgcgggatggggcggcggagagtcgaagtttgtcgattag

SEQ ID NO: 38276 - DNA, 655 bp, Artificial Sequence
  chemically treated genomic DNA (Homo sapiens) CpG-island No: 38276
ctaatcgacaaacttcgactctccgccgccccatcccgcaaaaatcccaactttacttacgacgcgcgcaaatctatccgtaaatcgccataacgaaaccgcgaaaaaaaaaaaatctacgaaaaaaacaaaaaatacgataaactaaaatcaaaaaaccaaaaaaaaatcccgaacaaaaaaaaacgaaaaaccgcgaaacaacgcgaccatcttaaaaaaccaaaaccgactccgaatccgacgcgaacctccgacttaaccgccgcgacctaaacccctaaatcgacgtaaaacgaacgcgacgatacctaataatatcctaaaaaaaaccgccgccaccgctccgctaactactaaaaccgcttaacacgctcgcgatcgaactacaactacaacaactaaaaaacgaaataaaaaaaacaccgttccgcccgccgcaaccctatcctctcccaaacaaaaccccgccgctacccccgaaactatccgccgcgcctatccctacaacgcaacccgctaccaactccaacctactccaaaacgaccacgtaaaccgacaacgccccgatcctacaaataaactacctccgtccgtcgataaaaatccgaaaaacaaaaactactaaaccttaaatcaaacaactatccgaac

SEQ ID NO: 38277 - DNA, 609 bp, Artificial Sequence
  chemically treated genomic DNA (Homo sapiens) CpG-island No: 38277
tggaggcggacgaagaaggcggtagggtcgggggcgttagcgggaatttcggtcgtcgcgggtagtcgcggtttttttttttattttagggttcgggcggttatcgcgggcggatgagttaggcgagggggcgggtggtaaggggtgtaagcggacggagggtgggggcgtttttatgttcgcgtcgggggggtatcggaggtttcggggtaggggatgcgtcgttgtcggtgtttatagagggtcgtcgttattcgggcgtagagtttaggcgcgtttgttttcggagggtatcgggcgtagtaagtcgggtaggggagagggagtcgtcgtttaggcggcgtcgttatcgcgtttaagaaagataaaagggatcgggaacgggaggggaaaagttttttgttcggttttagatggattttagttttaaattttacgttataaagtttcgaagaggcgggttgggggcgggggtcggggcggatttttaggggcgtggttgcgcgtttgcgatttcggatcgtgttaatttcgtcgtcgttttaaaatttgtgggaaattttagttttgttatttattttttttggaggacgtagataggatttgttt

SEQ ID NO: 38278 - DNA, 609 bp, Artificial Sequence
  chemically treated genomic DNA (Homo sapiens) CpG-island No: 38278
aaacaaatcctatctacgtcctccaaaaaaaataaataacaaaactaaaatttcccacaaattttaaaacgacgacgaaattaacacgatccgaaatcgcaaacgcgcaaccacgcccctaaaaatccgccccgacccccgcccccaacccgcctcttcgaaactttataacgtaaaatttaaaactaaaatccatctaaaaccgaacaaaaaacttttcccctcccgttcccgatcccttttatctttcttaaacgcgataacgacgccgcctaaacgacgactccctctcccctacccgacttactacgcccgataccctccgaaaacaaacgcgcctaaactctacgcccgaataacgacgaccctctataaacaccgacaacgacgcatcccctaccccgaaacctccgatacccccccgacgcgaacataaaaacgcccccaccctccgtccgcttacaccccttaccacccgccccctcgcctaactcatccgcccgcgataaccgcccgaaccctaaaataaaaaaaaaaaccgcgactacccgcgacgaccgaaattcccgctaacgcccccgaccctaccgccttcttcgtccgcctcca

SEQ ID NO: 38279 - DNA, 609 bp, Artificial Sequence
  chemically treated genomic DNA (Homo sapiens) CpG-island No: 38279
gagtagattttgtttgcgttttttaggaggagtgggtggtaggattggggttttttataggttttggggcggcggcgagattggtacggttcggggtcgtaggcgcgtagttacgtttttggaagttcgtttcggttttcgtttttaattcgttttttcggggttttatggcgtgaggtttggggttgggatttatttggagtcgagtagaaaattttttttttttcgttttcggttttttttgttttttttggacgcggtggcggcgtcgtttgagcggcgatttttttttttttgttcggtttgttgcgttcggtgtttttcgagggtaggcgcgtttggattttgcgttcggatggcggcggttttttgtgagtatcggtagcggcgtattttttgtttcgaggttttcggtgttttttcggcgcgggtataggggcgtttttatttttcgttcgtttgtattttttgttattcgttttttcgtttgatttattcgttcgcggtggtcgttcgagttttgggatggggagggagatcgcggttgttcgcggcggtcgagattttcgttgacgttttcgattttgtcgtttttttcgttcgttttta

SEQ ID NO: 38280 - DNA, 609 bp, Artificial Sequence
  chemically treated genomic DNA (Homo sapiens) CpG-island No: 38280
taaaaacgaacgaaaaaaacgacaaaatcgaaaacgtcaacgaaaatctcgaccgccgcgaacaaccgcgatctccctccccatcccaaaactcgaacgaccaccgcgaacgaataaatcaaacgaaaaaacgaataacaaaaaatacaaacgaacgaaaaataaaaacgcccctatacccgcgccgaaaaaacaccgaaaacctcgaaacaaaaaatacgccgctaccgatactcacaaaaaaccgccgccatccgaacgcaaaatccaaacgcgcctaccctcgaaaaacaccgaacgcaacaaaccgaacaaaaaaaaaaaaatcgccgctcaaacgacgccgccaccgcgtccaaaaaaaacaaaaaaaaccgaaaacgaaaaaaaaaaaattttctactcgactccaaataaatcccaaccccaaacctcacgccataaaaccccgaaaaaacgaattaaaaacgaaaaccgaaacgaacttccaaaaacgtaactacgcgcctacgaccccgaaccgtaccaatctcgccgccgccccaaaacctataaaaaaccccaatcctaccacccactcctcctaaaaaacgcaaacaaaatctactc

SEQ ID NO: 38281 - DNA, 576 bp, Artificial Sequence
  chemically treated genomic DNA (Homo sapiens) CpG-island No: 38281
atttcgagagtttaaattattcgtagataaaatttatttttgggaataaagtattcgtttgtaggcgtttttttcgggttggaaggttggcgtgcggaaacggatatatttattcgtggggttcgtttttagttatcgcgggattatcggttatcgagttagggattcggtttttttagtttttcggagcggttggggagttttagtcgattcgtagtattttcggagtaggtatcgtaggattttggttttacgtttttcggacgttttttttttagatgtcgttcggcgggtcggggtttttttggcgggttgcgcgggcgttgcgcgagttaaattaaatttggtcggaaaagacgcggttaaggttcgtttcgtttacgtttttcgtcggttcggtaaggggtttcggagaacggtttgggggggcgagaattatgggcgggggaaatggaagatagagggaattgaagtacgggggttttcgatgagtagtgcggatgttcgattttaaatattaaagttaacgagaggtttaggttatttttttttgattttaaatatttagtgagtgga

SEQ ID NO: 38282 - DNA, 576 bp, Artificial Sequence
  chemically treated genomic DNA (Homo sapiens) CpG-island No: 38282
tccactcactaaatatttaaaatcaaaaaaaaataacctaaacctctcgttaactttaatatttaaaatcgaacatccgcactactcatcgaaaacccccgtacttcaattccctctatcttccatttcccccgcccataattctcgcccccccaaaccgttctccgaaaccccttaccgaaccgacgaaaaacgtaaacgaaacgaaccttaaccgcgtcttttccgaccaaatttaatttaactcgcgcaacgcccgcgcaacccgccaaaaaaaccccgacccgccgaacgacatctaaaaaaaaaacgtccgaaaaacgtaaaaccaaaatcctacgatacctactccgaaaatactacgaatcgactaaaactccccaaccgctccgaaaaactaaaaaaaccgaatccctaactcgataaccgataatcccgcgataactaaaaacgaaccccacgaataaatatatccgtttccgcacgccaaccttccaacccgaaaaaaacgcctacaaacgaatactttattcccaaaaataaattttatctacgaataatttaaactctcgaaat

SEQ ID NO: 38283 - DNA, 576 bp, Artificial Sequence
  chemically treated genomic DNA (Homo sapiens) CpG-island No: 38283
tttatttattggatgtttggggttaaggaggagtaatttgaatttttcgttggttttgatgtttggagtcgaatattcgtattgtttatcgaagattttcgtgttttagttttttttgttttttatttttttcgtttatggttttcgtttttttaagtcgtttttcggaattttttgtcgggtcggcgggaagcgtggacggagcgggttttggtcgcgtttttttcggttaggtttggtttagttcgcgtagcgttcgcgtagttcgttagggggatttcggttcgtcgggcggtatttgaggagaaagcgttcgaggggcgtggagttagggttttgcggtgtttgtttcgggaatattgcgagtcggttggagttttttagtcgtttcggagaattgggggagtcgggtttttggttcggtaatcggtggtttcgcggtagttagaggcgggttttacgggtgggtgtgttcgttttcgtacgttagttttttagttcgggaagagcgtttgtaagcgggtattttgtttttaaagatgggttttgtttgcgggtgatttgggttttcgaagt

SEQ ID NO: 38284 - DNA, 576 bp, Artificial Sequence
  chemically treated genomic DNA (Homo sapiens) CpG-island No: 38284
acttcgaaaacccaaatcacccgcaaacaaaacccatctttaaaaacaaaatacccgcttacaaacgctcttcccgaactaaaaaactaacgtacgaaaacgaacacacccacccgtaaaacccgcctctaactaccgcgaaaccaccgattaccgaaccaaaaacccgactcccccaattctccgaaacgactaaaaaactccaaccgactcgcaatattcccgaaacaaacaccgcaaaaccctaactccacgcccctcgaacgctttctcctcaaataccgcccgacgaaccgaaatccccctaacgaactacgcgaacgctacgcgaactaaaccaaacctaaccgaaaaaaacgcgaccaaaacccgctccgtccacgcttcccgccgacccgacaaaaaattccgaaaaacgacttaaaaaaacgaaaaccataaacgaaaaaaataaaaaacaaaaaaaactaaaacacgaaaatcttcgataaacaatacgaatattcgactccaaacatcaaaaccaacgaaaaattcaaattactcctccttaaccccaaacatccaataaataaa

SEQ ID NO: 38285 - DNA, 1600 bp, Artificial Sequence
  chemically treated genomic DNA (Homo sapiens) CpG-island No: 38285
atagaggagagcgcgatagtcgcgagttatattttgtaatgaaattttttagattttttgtcgggagagcggtttagacgcgttaggtttgtagtaggaggtcgcgtcgagggcgggtttttagaagtttataggtgagtatcggttttttttttttcggttttcggttcggaggaggcgggagtagtttttttgttttgattttatcgcgggcggcgtagggtcggtttggtttttcgtgggacggggaggggggcgggatgtgttatttaaatattagtggggacggtcggtggtggaattagtcgggtaggtcgggtagagtataagagtcggagggagcggtcgggcggtagacgtttgtagattattttagacgtcggagttcgagtttcgtcgagttttcgcgttttattcgttcgcgttcggttcgcgttttttcgttttataatggttcggggtttcggtttcgcgtcgttatcgttgcggttgtcgttgttgttgttggtgttggcggcggtgatcggttatacggtcgcgtaggataattgtacgtgttttattaataagatgatcgtgtgtagtttcgacggtttcggcggtcgttgttagtgtcgcgcgttgggttcgggtatggcggtcgattgttttacgttgatttttaagtgtttgttgtttaaggcgcgtatgagcgtttttaagaacgttcgtacgttggtgcggtcgagtgagtacgcgttcgtggataacgatggtttttacgatttcgattgcgatttcgagggtcgttttaaggcgcgttagtgtaattagacgtcggtgtgttggtgcgtgaattcggtgggcgtgcgtcgtacggataagggcgatttgagtttacgttgcgatgagttggtgcgtatttattatatttttattgatttgcgttatcgttttatcgtcggcgtttttaattatttagatttggacgtcgagttgaggcggttttttcgcgagcgttatcggttgtattttaagttcgtggcggtcgtgtattacgagtagtttattatttagatcgagttgcggtagaatacgttttagaaggtcgtcggtgaagtggatatcggcgatgtcgtttattatttcgagagggatattaagggcgagtttttattttagggtcgcggcggtttggatttgcgcgtgcgcggagaatttttgtaggtggagcgtacgtttatttattatttggacgagattttttcgaagttttttatgaagcgttttatcgtcggttttatcgtcgttatcgtggtggtcgtggtggttttcgtcgtcggtatggtcgttttggtgattattaatcggagaaagtcggggaagtataagaaggtggagattaaggaattgggggagttgagaaaggaatcgagtttgtaggtattcggcggggtaggggatggggtggggtatcggatttcggtatcgttttagatttaagtgagttacgttttttgatttttcggcgtaaaggagacgtttatttttttaaatttttgtttttttttttttttttgcgtatatattaggtttaatagattttggttttagggttttt

SEQ ID NO: 38286 - DNA, 1600 bp, Artificial Sequence
  chemically treated genomic DNA (Homo sapiens) CpG-island No: 38286
aaaaaccctaaaaccaaaatctattaaacctaatatatacgcaaaaaaaaaaaaaaaaacaaaaatttaaaaaaataaacgtctcctttacgccgaaaaatcaaaaaacgtaactcacttaaatctaaaacgataccgaaatccgataccccaccccatcccctaccccgccgaatacctacaaactcgattcctttctcaactcccccaattccttaatctccaccttcttatacttccccgactttctccgattaataatcaccaaaacgaccataccgacgacgaaaaccaccacgaccaccacgataacgacgataaaaccgacgataaaacgcttcataaaaaacttcgaaaaaatctcgtccaaataataaataaacgtacgctccacctacaaaaattctccgcgcacgcgcaaatccaaaccgccgcgaccctaaaataaaaactcgcccttaatatccctctcgaaataataaacgacatcgccgatatccacttcaccgacgaccttctaaaacgtattctaccgcaactcgatctaaataataaactactcgtaatacacgaccgccacgaacttaaaatacaaccgataacgctcgcgaaaaaaccgcctcaactcgacgtccaaatctaaataattaaaaacgccgacgataaaacgataacgcaaatcaataaaaatataataaatacgcaccaactcatcgcaacgtaaactcaaatcgcccttatccgtacgacgcacgcccaccgaattcacgcaccaacacaccgacgtctaattacactaacgcgccttaaaacgaccctcgaaatcgcaatcgaaatcgtaaaaaccatcgttatccacgaacgcgtactcactcgaccgcaccaacgtacgaacgttcttaaaaacgctcatacgcgccttaaacaacaaacacttaaaaatcaacgtaaaacaatcgaccgccatacccgaacccaacgcgcgacactaacaacgaccgccgaaaccgtcgaaactacacacgatcatcttattaataaaacacgtacaattatcctacgcgaccgtataaccgatcaccgccgccaacaccaacaacaacaacgacaaccgcaacgataacgacgcgaaaccgaaaccccgaaccattataaaacgaaaaaacgcgaaccgaacgcgaacgaataaaacgcgaaaactcgacgaaactcgaactccgacgtctaaaataatctacaaacgtctaccgcccgaccgctccctccgactcttatactctacccgacctacccgactaattccaccaccgaccgtccccactaatatttaaataacacatcccgcccccctccccgtcccacgaaaaaccaaaccgaccctacgccgcccgcgataaaatcaaaacaaaaaaactactcccgcctcctccgaaccgaaaaccgaaaaaaaaaaaaccgatactcacctataaacttctaaaaacccgccctcgacgcgacctcctactacaaacctaacgcgtctaaaccgctctcccgacaaaaaatctaaaaaatttcattacaaaatataactcgcgactatcgcgctctcctctat

SEQ ID NO: 38287 - DNA, 1600 bp, Artificial Sequence
  chemically treated genomic DNA (Homo sapiens) CpG-island No: 38287
ggagattttgaggttaggatttattaaatttggtgtgtgcgtaaaagggagggggaaggtaggaatttgaaaggataaacgttttttttgcgtcgaggaattaggaagcgtgatttatttgggtttgggacgatatcgaaattcggtattttattttattttttgtttcgtcgggtatttataagttcggttttttttttaatttttttagttttttgatttttatttttttgtattttttcgatttttttcggttggtgattattaggacggttatgtcggcgacgagggttattacgattattacgatgacggcgatgaggtcggcggtgaggcgttttatggagaatttcgggggaatttcgtttaggtaatagatgagcgtgcgttttatttgtaggggtttttcgcgtacgcgtaagtttaggtcgtcgcggttttggaatagagattcgtttttgatgtttttttcgaagtagtaggcggtatcgtcgatatttattttatcggcggttttttgagacgtgttttgtcgtagttcgatttggatggtgggttgttcgtagtgtacggtcgttacgaatttggggtgtagtcgatagcgttcgcggaagagtcgttttagttcggcgtttaggtttgagtggttgaaggcgtcggcggtggggcggtggcgtaggttaatgaggatgtggtgggtgcgtattagtttatcgtagcgtaggtttaggtcgtttttgttcgtgcggcgtacgtttatcgagtttacgtattagtatatcgacgtttggttgtattggcgcgttttgaagcggttttcggggtcgtagtcggggtcgtagaggttatcgttgtttacgagcgcgtgtttattcggtcgtattagcgtgcgggcgtttttgggggcgtttatgcgcgttttgagtagtagatatttggaggttagcgtggagtagtcgatcgttatgttcgagtttagcgcgcggtattggtagcggtcgtcggggtcgtcggggttgtatacggttattttgttggtgggatacgtgtagttgttttgcgcggtcgtgtggtcggttatcgtcgttagtattagtagtagtagcggtagtcgtagcggtggcggcgcgaggtcggggtttcgagttattgtggggcggaggaacgcggatcggacgcgggcggatgaggcgcggggattcggcggggttcgggtttcggcgtttgggatggtttgtaggcgtttgtcgttcggtcgtttttttcggtttttatattttattcgatttgttcggttggttttattatcgatcgtttttattggtatttgggtgatatatttcgttttttttttcgttttacggaaggttaagtcggttttgcgtcgttcgcgataggattagaatagggaagttgttttcgtttttttcggatcgaaagtcgggaaggggagaatcgatatttatttgtaggtttttggggattcgttttcggcgcggttttttgttatagatttggcgcgtttgggtcgttttttcggtagaaagtttaaagagttttattgtaaagtgtggttcgcgattgtcgcgtttttttttat

SEQ ID NO: 38288 - DNA, 1600 bp, Artificial Sequence
  chemically treated genomic DNA (Homo sapiens) CpG-island No: 38288
ataaaaaaaaacgcgacaatcgcgaaccacactttacaataaaactctttaaactttctaccgaaaaaacgacccaaacgcgccaaatctataacaaaaaaccgcgccgaaaacgaatccccaaaaacctacaaataaatatcgattctccccttcccgactttcgatccgaaaaaaacgaaaacaacttccctattctaatcctatcgcgaacgacgcaaaaccgacttaaccttccgtaaaacgaaaaaaaaaacgaaatatatcacccaaataccaataaaaacgatcgataataaaaccaaccgaacaaatcgaataaaatataaaaaccgaaaaaaacgaccgaacgacaaacgcctacaaaccatcccaaacgccgaaacccgaaccccgccgaatccccgcgcctcatccgcccgcgtccgatccgcgttcctccgccccacaataactcgaaaccccgacctcgcgccgccaccgctacgactaccgctactactactaatactaacgacgataaccgaccacacgaccgcgcaaaacaactacacgtatcccaccaacaaaataaccgtatacaaccccgacgaccccgacgaccgctaccaataccgcgcgctaaactcgaacataacgatcgactactccacgctaacctccaaatatctactactcaaaacgcgcataaacgcccccaaaaacgcccgcacgctaatacgaccgaataaacacgcgctcgtaaacaacgataacctctacgaccccgactacgaccccgaaaaccgcttcaaaacgcgccaatacaaccaaacgtcgatatactaatacgtaaactcgataaacgtacgccgcacgaacaaaaacgacctaaacctacgctacgataaactaatacgcacccaccacatcctcattaacctacgccaccgccccaccgccgacgccttcaaccactcaaacctaaacgccgaactaaaacgactcttccgcgaacgctatcgactacaccccaaattcgtaacgaccgtacactacgaacaacccaccatccaaatcgaactacgacaaaacacgtctcaaaaaaccgccgataaaataaatatcgacgataccgcctactacttcgaaaaaaacatcaaaaacgaatctctattccaaaaccgcgacgacctaaacttacgcgtacgcgaaaaacccctacaaataaaacgcacgctcatctattacctaaacgaaattcccccgaaattctccataaaacgcctcaccgccgacctcatcgccgtcatcgtaataatcgtaataaccctcgtcgccgacataaccgtcctaataatcaccaaccgaaaaaaatcgaaaaaatacaaaaaaataaaaatcaaaaaactaaaaaaattaaaaaaaaaaccgaacttataaatacccgacgaaacaaaaaataaaataaaataccgaatttcgatatcgtcccaaacccaaataaatcacgcttcctaattcctcgacgcaaaaaaaacgtttatcctttcaaattcctaccttccccctcccttttacgcacacaccaaatttaataaatcctaacctcaaaatctcc

SEQ ID NO: 38289 - DNA, 828 bp, Artificial Sequence
  chemically treated genomic DNA (Homo sapiens) CpG-island No: 38289
tttcgcgattttttgtattgtatttttttaagaatttagcgttagttttgggtttcggcggtcgagatttgggtagggcgtataggaaagtttaaaggtttaatgtatcgcgtagatttttttgcgggagaggggattgtaggggaaaagcggggtaaataaagtaaagtcgtcgtttattttttagttttttattttaatatttcgtatcggagttttcggattttttcgaattcgggatgtcgttcggatttcggtaaattatcgagtttttttttatttgagtcgcggtttttagtttttatttttacgcgcgggtcgggtcgttgggcgttgttattttaaaggtttcggagtttgagcggtttagggttagggttgcgaagcggcggagtcgcggtgtcgtcgggcggttgtaggaaagtttttttcgcgttagttgggtcgagtggagcggggcgggcggagtaggcggttggttaggtaggagcgcgttacggtcggtttcgcgtttttttcggcgtcgtcgttttacggttttcgggttttcgcggttattcggtttgtttagttttgttaatcgtaggtttagtcgtttatagtttcgttcgttaggttcgggatttagcgcgggcggggagtagaggggcgggggcgtatttgtttggttaatcgatttttttattatcgtttcgtttaggtcggattgggtagagtcgaggtttttcgtttcgagtatacgttttttagtttggtgtcggttcgagatgtcggcgggattatacgtttttttttttttcggagtttttaggtttttaggagtttaga

SEQ ID NO: 38290 - DNA, 828 bp, Artificial Sequence
  chemically treated genomic DNA (Homo sapiens) CpG-island No: 38290
tctaaactcctaaaaacctaaaaactccgaaaaaaaaaaaaacgtataatcccgccgacatctcgaaccgacaccaaactaaaaaacgtatactcgaaacgaaaaacctcgactctacccaatccgacctaaacgaaacgataataaaaaaatcgattaaccaaacaaatacgcccccgcccctctactccccgcccgcgctaaatcccgaacctaacgaacgaaactataaacgactaaacctacgattaacaaaactaaacaaaccgaataaccgcgaaaacccgaaaaccgtaaaacgacgacgccgaaaaaaacgcgaaaccgaccgtaacgcgctcctacctaaccaaccgcctactccgcccgccccgctccactcgacccaactaacgcgaaaaaaactttcctacaaccgcccgacgacaccgcgactccgccgcttcgcaaccctaaccctaaaccgctcaaactccgaaacctttaaaataacaacgcccaacgacccgacccgcgcgtaaaaataaaaactaaaaaccgcgactcaaataaaaaaaaactcgataatttaccgaaatccgaacgacatcccgaattcgaaaaaatccgaaaactccgatacgaaatattaaaataaaaaactaaaaaataaacgacgactttactttatttaccccgcttttcccctacaatcccctctcccgcaaaaaaatctacgcgatacattaaacctttaaactttcctatacgccctacccaaatctcgaccgccgaaacccaaaactaacgctaaattcttaaaaaaatacaatacaaaaaatcgcgaaa

SEQ ID NO: 38291 - DNA, 828 bp, Artificial Sequence
  chemically treated genomic DNA (Homo sapiens) CpG-island No: 38291
tttggatttttggaggtttggggatttcgggaggggagggggcgtgtggtttcgtcggtatttcgggtcggtattaggttggggagcgtgtgttcggagcggagggtttcggttttgtttagttcggtttgggcggggcggtggtggggaggtcgattgattaaataggtgcgttttcgtttttttgtttttcgttcgcgttgggtttcgggtttggcgggcggagttgtgggcggttgggtttgcgattggtagggttgggtaggtcgggtggtcgcgggagttcgggagtcgtagagcggcggcgtcgggggaggcgcggagtcggtcgtagcgcgtttttgtttggttagtcgtttatttcgttcgtttcgttttattcggtttagttggcgcgaaggaaatttttttgtagtcgttcggcgatatcgcgatttcgtcgtttcgtaattttggttttgggtcgtttaggtttcggagtttttgggatggtagcgtttagcggttcggttcgcgcgtagaggtaaaagttgggggtcgcggtttaggtggaggggggttcggtggtttgtcgggattcgagcggtatttcgggttcgagaggattcgggggtttcgatgcgaggtgttggggtaggggattgaggaatgggcggcgattttgttttatttatttcgttttttttttatagttttttttttcgtaaggaaatttgcgcgatgtattgagtttttaaatttttttgtgcgttttgtttagatttcgatcgtcgggatttagggttggcgttgggtttttgggagagtataatataggggatcgcgagg

SEQ ID NO: 38292 - DNA, 828 bp, Artificial Sequence
  chemically treated genomic DNA (Homo sapiens) CpG-island No: 38292
cctcgcgatcccctatattatactctcccaaaaacccaacgccaaccctaaatcccgacgatcgaaatctaaacaaaacgcacaaaaaaatttaaaaactcaatacatcgcgcaaatttccttacgaaaaaaaaaactataaaaaaaaaacgaaataaataaaacaaaatcgccgcccattcctcaatcccctaccccaacacctcgcatcgaaacccccgaatcctctcgaacccgaaataccgctcgaatcccgacaaaccaccgaacccccctccacctaaaccgcgacccccaacttttacctctacgcgcgaaccgaaccgctaaacgctaccatcccaaaaactccgaaacctaaacgacccaaaaccaaaattacgaaacgacgaaatcgcgatatcgccgaacgactacaaaaaaatttccttcgcgccaactaaaccgaataaaacgaaacgaacgaaataaacgactaaccaaacaaaaacgcgctacgaccgactccgcgcctcccccgacgccgccgctctacgactcccgaactcccgcgaccacccgacctacccaaccctaccaatcgcaaacccaaccgcccacaactccgcccgccaaacccgaaacccaacgcgaacgaaaaacaaaaaaacgaaaacgcacctatttaatcaatcgacctccccaccaccgccccgcccaaaccgaactaaacaaaaccgaaaccctccgctccgaacacacgctccccaacctaataccgacccgaaataccgacgaaaccacacgccccctcccctcccgaaatccccaaacctccaaaaatccaaa

SEQ ID NO: 38293 - DNA, 623 bp, Artificial Sequence
  chemically treated genomic DNA (Homo sapiens) CpG-island No: 38293
gtcggggtcgttttagtagtcggtagtagtaggaggatttttcggtgttttttttggcgttgtcgttcgcggatatgttgtcgttcgtcgggtatcgggtcgggtttgggcgcgtttatacgggttttatcggtcgtttcggatagttcggcgggcgtttacgcgttttttcgcgttcgttcgagcggtcgtcgaggttttggttgttttataaagtcgtttaaatttttttttcgttttttgttttttttcgtttttcgagtagtcggtttcgcggcgggggttggggattcggaggtcgggttggtatcggttcggaaagttagtgcgggagaaatttcggtttggaatcggcggggcgaggcggttcggagttttttcgggattttagacgggtcgtttcgagggttttggtttttattttcgttttcgagggttcgatcgtcgatttgagggcgtattaggtatttaatttcgttagcgcgggtagacggtgtatatttgtttgtgcgtttttcggagttcggggtaggacgtatgtttggggacggttatttttaattagggttcgtttttgttttaggttcgttgggttgagaaacgatttttattgtttcgtaggt

SEQ ID NO: 38294 - DNA, 623 bp, Artificial Sequence
  chemically treated genomic DNA (Homo sapiens) CpG-island No: 38294
acctacgaaacaataaaaatcgtttctcaacccaacgaacctaaaacaaaaacgaaccctaattaaaaataaccgtccccaaacatacgtcctaccccgaactccgaaaaacgcacaaacaaatatacaccgtctacccgcgctaacgaaattaaatacctaatacgccctcaaatcgacgatcgaaccctcgaaaacgaaaataaaaaccaaaaccctcgaaacgacccgtctaaaatcccgaaaaaactccgaaccgcctcgccccgccgattccaaaccgaaatttctcccgcactaactttccgaaccgataccaacccgacctccgaatccccaacccccgccgcgaaaccgactactcgaaaaacgaaaaaaaacaaaaaacgaaaaaaaaatttaaacgactttataaaacaaccaaaacctcgacgaccgctcgaacgaacgcgaaaaaacgcgtaaacgcccgccgaactatccgaaacgaccgataaaacccgtataaacgcgcccaaacccgacccgatacccgacgaacgacaacatatccgcgaacgacaacgccaaaaaaaacaccgaaaaatcctcctactactaccgactactaaaacgaccccgac

SEQ ID NO: 38295 - DNA, 623 bp, Artificial Sequence
  chemically treated genomic DNA (Homo sapiens) CpG-island No: 38295
gtttgcggagtagtgagggtcgttttttagtttagcgagtttggggtaggaacggattttaattgaaggtgatcgtttttaagtatgcgttttatttcgggtttcggagagcgtataagtaggtgtgtatcgtttattcgcgttggcgggattgggtgtttggtgcgtttttaggtcgacggtcgaattttcgggggcgggggtgggagttagaattttcgggacgattcgtttggggtttcggggaaatttcgggtcgtttcgtttcgtcgattttaggtcgggatttttttcgtattgatttttcgggtcggtgttagttcggttttcgggtttttagttttcgtcgcggggtcggttgttcggggagcgggagggggtaggaggcggaggaggagtttgagcgattttgtggggtagttagggtttcggcggtcgttcgggcgagcgcgggagaacgcgtgggcgttcgtcgggttgttcggagcggtcgatggggttcgtgtgagcgcgtttaggttcggttcggtgttcggcgggcggtagtatgttcgcgggcggtagcgttaggaagagtatcgggaggtttttttattattatcggttgttgaggcggtttcggt

SEQ ID NO: 38296 - DNA, 623 bp, Artificial Sequence
  chemically treated genomic DNA (Homo sapiens) CpG-island No: 38296
accgaaaccgcctcaacaaccgataataataaaaaaacctcccgatactcttcctaacgctaccgcccgcgaacatactaccgcccgccgaacaccgaaccgaacctaaacgcgctcacacgaaccccatcgaccgctccgaacaacccgacgaacgcccacgcgttctcccgcgctcgcccgaacgaccgccgaaaccctaactaccccacaaaatcgctcaaactcctcctccgcctcctaccccctcccgctccccgaacaaccgaccccgcgacgaaaactaaaaacccgaaaaccgaactaacaccgacccgaaaaatcaatacgaaaaaaatcccgacctaaaatcgacgaaacgaaacgacccgaaatttccccgaaaccccaaacgaatcgtcccgaaaattctaactcccacccccgcccccgaaaattcgaccgtcgacctaaaaacgcaccaaacacccaatcccgccaacgcgaataaacgatacacacctacttatacgctctccgaaacccgaaataaaacgcatacttaaaaacgatcaccttcaattaaaatccgttcctaccccaaactcgctaaactaaaaaacgaccctcactactccgcaaac

SEQ ID NO: 38297 - DNA, 722 bp, Artificial Sequence
  chemically treated genomic DNA (Homo sapiens) CpG-island No: 38297
atggttttttttacggtgaatttattttttagtaatgttcgattaattattacgtcgcgtatattagtgttacgtagggtcgttatattattaatgtcgttaatatcgtcggaggattgaaatgttatttgcggatatttggcgtatatttttttatataagagacgttagagtttgttagcgtgtcgtcgcgcgagatatcggtatatagtatatgttttaggtcgacgggtagatggtttttattagttgttttagtgaaacgttcgagtttttttgttagtcgttgattgttatttgtttgttgttttgttcgttaatacggatatttagcgttagtattaaggtatcggtatcgaagcgtttaaattagttttttattatattttgtgattttatcgcggtggagtcgattattacgcgcgtaacgttcgtttttagtaacgtcgttatatttttttcgttacgtacgtcgtcgttaatttgtatcggaacgttaacgttcgcgattagggtttaattagcgggatttgacgtttagtcggattttttgtttcggttagatttattaggtgtagtatttcggtattttgcgcggcgtaattttgtaatcgcggtagcgggtcgttatcgtaatcgcgttgtttgtcgtaatcgttttgatggagacgtattatagtgtcgtcgattaaatttaatgtcggaataattattatattttt

SEQ ID NO: 38298 - DNA, 722 bp, Artificial Sequence
  chemically treated genomic DNA (Homo sapiens) CpG-island No: 38298
aaaaatataataattattccgacattaaatttaatcgacgacactataatacgtctccatcaaaacgattacgacaaacaacgcgattacgataacgacccgctaccgcgattacaaaattacgccgcgcaaaataccgaaatactacacctaataaatctaaccgaaacaaaaaatccgactaaacgtcaaatcccgctaattaaaccctaatcgcgaacgttaacgttccgatacaaattaacgacgacgtacgtaacgaaaaaaatataacgacgttactaaaaacgaacgttacgcgcgtaataatcgactccaccgcgataaaatcacaaaatataataaaaaactaatttaaacgcttcgataccgataccttaatactaacgctaaatatccgtattaacgaacaaaacaacaaacaaataacaatcaacgactaacaaaaaaactcgaacgtttcactaaaacaactaataaaaaccatctacccgtcgacctaaaacatatactatataccgatatctcgcgcgacgacacgctaacaaactctaacgtctcttatataaaaaaatatacgccaaatatccgcaaataacatttcaatcctccgacgatattaacgacattaataatataacgaccctacgtaacactaatatacgcgacgtaataattaatcgaacattactaaaaaataaattcaccgtaaaaaaaaccat

SEQ ID NO: 38299 - DNA, 722 bp, Artificial Sequence
  chemically treated genomic DNA (Homo sapiens) CpG-island No: 38299
ggagatgtgatgattatttcggtattagatttaatcgacggtattgtggtgcgtttttattagggcgattacggtaaatagcgcgattacggtaacgattcgttgtcgcgattgtaggattacgtcgcgtagggtgtcgaagtgttgtatttggtggatttgatcggggtaaaagattcggttaaacgttaaatttcgttgattaaattttggtcgcgggcgttaacgtttcggtgtaggttggcggcggcgtgcgtagcgaagaagatgtggcggcgttattggaagcgggcgttgcgcgcgtagtggtcggttttatcgcggtgaaattataagatatggtgaaaggttggtttgaacgtttcggtgtcgatgttttagtgttggcgttggatgttcgtattgacgagtaaggtaataagtaggtggtagttagcggttggtaagagaattcgggcgttttattggaataattggtggaaattatttgttcgtcggtttgaaatatgtgttgtgtatcgatatttcgcgcgacggtacgttggtaggttttaacgttttttatatgaagaagtgtgcgttagatattcgtaggtggtattttagtttttcggcggtattggcgatattgatgatgtggcggttttgcgtggtattggtgtgcgcggcgtaatagttggtcgggtattattggaaggtaaatttatcgtgaaggaggttat

SEQ ID NO: 38300 - DNA, 722 bp, Artificial Sequence
  chemically treated genomic DNA (Homo sapiens) CpG-island No: 38300
ataacctccttcacgataaatttaccttccaataatacccgaccaactattacgccgcgcacaccaataccacgcaaaaccgccacatcatcaatatcgccaataccgccgaaaaactaaaataccacctacgaatatctaacgcacacttcttcatataaaaaacgttaaaacctaccaacgtaccgtcgcgcgaaatatcgatacacaacacatatttcaaaccgacgaacaaataatttccaccaattattccaataaaacgcccgaattctcttaccaaccgctaactaccacctacttattaccttactcgtcaatacgaacatccaacgccaacactaaaacatcgacaccgaaacgttcaaaccaacctttcaccatatcttataatttcaccgcgataaaaccgaccactacgcgcgcaacgcccgcttccaataacgccgccacatcttcttcgctacgcacgccgccgccaacctacaccgaaacgttaacgcccgcgaccaaaatttaatcaacgaaatttaacgtttaaccgaatcttttaccccgatcaaatccaccaaatacaacacttcgacaccctacgcgacgtaatcctacaatcgcgacaacgaatcgttaccgtaatcgcgctatttaccgtaatcgccctaataaaaacgcaccacaataccgtcgattaaatctaataccgaaataatcatcacatctcc

SEQ ID NO: 38301 - DNA, 521 bp, Artificial Sequence
  chemically treated genomic DNA (Homo sapiens) CpG-island No: 38301
gacggcgtcgagaatttttttattcgacgtagtaaggtgcgtattttggcgtatatttcgcggggtgaaaacggtttagttacgtagtcgttagtattaatttttagtttaagtaggcgatcgatttttttatttcgggtcgttaggaatagtataggtacgtcggatggagcgttagtaattggcggtataatttaaagtcgttaatattcggtagattaatatcgagaattatgacgtcgggtatttgtttgcgagttttatttagtatcggtaagtttcgtttaaagatttcgacggtaaaatttttttgttgtaatatgtagattagcgtgtcggttattttttgtttattttttattaattagatcgtttttcgttgtataaatcgtttttgttattgtcgttacggtatgataggaatcgcgttaatcgcgtttttcggcgaattttttataattttgtcggagtaagttagatagcgagcgcgttgcgtttggtattataaaagcgtacgaatt

SEQ ID NO: 38302 - DNA, 521 bp, Artificial Sequence
  chemically treated genomic DNA (Homo sapiens) CpG-island No: 38302
aattcgtacgcttttataataccaaacgcaacgcgctcgctatctaacttactccgacaaaattataaaaaattcgccgaaaaacgcgattaacgcgattcctatcataccgtaacgacaataacaaaaacgatttatacaacgaaaaacgatctaattaataaaaaataaacaaaaaataaccgacacgctaatctacatattacaacaaaaaaattttaccgtcgaaatctttaaacgaaacttaccgatactaaataaaactcgcaaacaaatacccgacgtcataattctcgatattaatctaccgaatattaacgactttaaattataccgccaattactaacgctccatccgacgtacctatactattcctaacgacccgaaataaaaaaatcgatcgcctacttaaactaaaaattaatactaacgactacgtaactaaaccgttttcaccccgcgaaatatacgccaaaatacgcaccttactacgtcgaataaaaaaattctcgacgccgtc

SEQ ID NO: 38303 - DNA, 521 bp, Artificial Sequence
  chemically treated genomic DNA (Homo sapiens) CpG-island No: 38303
agttcgtgcgtttttatgatgttaaacgtaacgcgttcgttatttggtttatttcgataaagttgtagaaggttcgtcgaaaaacgcgattagcgcggtttttgttatgtcgtggcggtaataatagaggcgatttatgtaacgggaaacggtttggttagtggaagatgagtaagggatagtcgatacgttggtttatatgttgtagtaggaaggttttgtcgtcgaggtttttgagcgaggtttgtcggtgttggataaagttcgtaagtaggtattcgacgttatgattttcgatgttggtttgtcggatattagcggttttgaattgtgtcgttagttattggcgttttattcggcgtatttgtattgtttttgacggttcgaagtgaagaggtcgatcgtttgtttgggttggaaattggtgttgacgattacgtggttaaatcgtttttatttcgcgaagtgtgcgttagggtgcgtattttattgcgtcgggtgaagaagttttcgacgtcgtt

SEQ ID NO: 38304 - DNA, 521 bp, Artificial Sequence
  chemically treated genomic DNA (Homo sapiens) CpG-island No: 38304
aacgacgtcgaaaacttcttcacccgacgcaataaaatacgcaccctaacgcacacttcgcgaaataaaaacgatttaaccacgtaatcgtcaacaccaatttccaacccaaacaaacgatcgacctcttcacttcgaaccgtcaaaaacaatacaaatacgccgaataaaacgccaataactaacgacacaattcaaaaccgctaatatccgacaaaccaacatcgaaaatcataacgtcgaatacctacttacgaactttatccaacaccgacaaacctcgctcaaaaacctcgacgacaaaaccttcctactacaacatataaaccaacgtatcgactatcccttactcatcttccactaaccaaaccgtttcccgttacataaatcgcctctattattaccgccacgacataacaaaaaccgcgctaatcgcgtttttcgacgaaccttctacaactttatcgaaataaaccaaataacgaacgcgttacgtttaacatcataaaaacgcacgaact

SEQ ID NO: 38305 - DNA, 558 bp, Artificial Sequence
  chemically treated genomic DNA (Homo sapiens) CpG-island No: 38305
ggtgttagcggcgtgttgtgtttgattggcggcgtgttgttgttgaaacgtcgtttgtttagtttacgcgtgcgtgtaattattatcggagcggatattttgattttgtcgttgttcgttatttagtgcgcgttgggtttgttgattatttcgtttttcgtttagtatatggacggtagcgagatgatgaaattgtttgttgggcgtagtcgtgtgattttttacgtggcgttttttaatattcgatgtgtggcgttaatttttcgtttgtatttgttgttggggatgacgtaatttttgttgttttcgttttcgcgtttgatatatatttggagcgtatcggtggagtatttgatacgtaagtattagttggtgcgcgttcgttattaagcgaattttagtttatatagattttgtttcgtcggggtttttttatgggtacggtgcggggtgagttgtcggatgcgtttcgtttattcgatttataggggaggatattgtaggttcggtaaacgtggtgttatcgggtaaaattagttcggagtaataggttttgat

SEQ ID NO: 38306 - DNA, 558 bp, Artificial Sequence
  chemically treated genomic DNA (Homo sapiens) CpG-island No: 38306
atcaaaacctattactccgaactaattttacccgataacaccacgtttaccgaacctacaatatcctcccctataaatcgaataaacgaaacgcatccgacaactcaccccgcaccgtacccataaaaaaaccccgacgaaacaaaatctatataaactaaaattcgcttaataacgaacgcgcaccaactaatacttacgtatcaaatactccaccgatacgctccaaatatatatcaaacgcgaaaacgaaaacaacaaaaattacgtcatccccaacaacaaatacaaacgaaaaattaacgccacacatcgaatattaaaaaacgccacgtaaaaaatcacacgactacgcccaacaaacaatttcatcatctcgctaccgtccatatactaaacgaaaaacgaaataatcaacaaacccaacgcgcactaaataacgaacaacgacaaaatcaaaatatccgctccgataataattacacgcacgcgtaaactaaacaaacgacgtttcaacaacaacacgccgccaatcaaacacaacacgccgctaacacc

SEQ ID NO: 38307 - DNA, 558 bp, Artificial Sequence
  chemically treated genomic DNA (Homo sapiens) CpG-island No: 38307
attaaaatttgttatttcgagttaattttgttcgatggtattacgtttatcgggtttataatatttttttttgtaggtcggataagcgaagcgtattcgataatttatttcgtatcgtgtttataaaaaaatttcgacgaagtagggtttatgtgaattaaaattcgtttagtgacgagcgcgtattagttggtatttacgtgttagatattttatcggtacgttttagatgtgtattagacgcgagaacgggaatagtaggaattacgttatttttagtaataggtgtagacggaagattaacgttatatatcgagtgttgagaagcgttacgtggaaggttatacgattgcgtttagtaaatagttttattatttcgttatcgtttatatgttgagcggagaacggaatggttaataggtttagcgcgtattggataacgagtagcgataggattaggatattcgtttcggtagtggttgtacgtacgcgtgggttgaatagacgacgttttagtaatagtacgtcgttaattagatatagtacgtcgttggtatt

SEQ ID NO: 38308 - DNA, 558 bp, Artificial Sequence
  chemically treated genomic DNA (Homo sapiens) CpG-island No: 38308
aataccaacgacgtactatatctaattaacgacgtactattactaaaacgtcgtctattcaacccacgcgtacgtacaaccactaccgaaacgaatatcctaatcctatcgctactcgttatccaatacgcgctaaacctattaaccattccgttctccgctcaacatataaacgataacgaaataataaaactatttactaaacgcaatcgtataaccttccacgtaacgcttctcaacactcgatatataacgttaatcttccgtctacacctattactaaaaataacgtaattcctactattcccgttctcgcgtctaatacacatctaaaacgtaccgataaaatatctaacacgtaaataccaactaatacgcgctcgtcactaaacgaattttaattcacataaaccctacttcgtcgaaatttttttataaacacgatacgaaataaattatcgaatacgcttcgcttatccgacctacaaaaaaaaatattataaacccgataaacgtaataccatcgaacaaaattaactcgaaataacaaattttaat

SEQ ID NO: 38309 - DNA, 532 bp, Artificial Sequence
  chemically treated genomic DNA (Homo sapiens) CpG-island No: 38309
ggcggcgattgatttgtaaattgtttaggatcgtttttttattattcgcgtttcgttggaagaagtcgagtaaacgttgattatttcggtggcgttggtgattttggtggtgtttttatttttgcgttcgggtcgcgttattattattttcgtcgtttcggtgtcggtttcgttgattggtacgtttgcggcgatgtatttgtgcggatttagttttaataatttttcgttaatggcgtttattatcgttattggtttcgtggtggatggacgttatcgtggtgttggaaaatattgtacgttatttggaagcgggaatgaaatcgttgtaagtcgtattgtaaggtagttcgcgaagtcggttttacggtgttgtcgatgagtttgttattggtggcggtgtttttgtcgttgttgttgatgggcggattgtcgggtcgattgttacgcgaatttgtcgtgacgttttttgtcgttattggtatatcgttgttggtttttttgatattaacgttaatgatgtgtggttgga

SEQ ID NO: 38310 - DNA, 532 bp, Artificial Sequence
  chemically treated genomic DNA (Homo sapiens) CpG-island No: 38310
tccaaccacacatcattaacgttaatatcaaaaaaaccaacaacgatataccaataacgacaaaaaacgtcacgacaaattcgcgtaacaatcgacccgacaatccgcccatcaacaacaacgacaaaaacaccgccaccaataacaaactcatcgacaacaccgtaaaaccgacttcgcgaactaccttacaatacgacttacaacgatttcattcccgcttccaaataacgtacaatattttccaacaccacgataacgtccatccaccacgaaaccaataacgataataaacgccattaacgaaaaattattaaaactaaatccgcacaaatacatcgccgcaaacgtaccaatcaacgaaaccgacaccgaaacgacgaaaataataataacgcgacccgaacgcaaaaataaaaacaccaccaaaatcaccaacgccaccgaaataatcaacgtttactcgacttcttccaacgaaacgcgaataataaaaaaacgatcctaaacaatttacaaatcaatcgccgcc

SEQ ID NO: 38311 - DNA, 532 bp, Artificial Sequence
  chemically treated genomic DNA (Homo sapiens) CpG-island No: 38311
tttagttatatattattggcgttaatgttagagaaattagtaacgatatattaatggcgatagaaagcgttacggtaaattcgcgtaatagtcggttcggtaattcgtttattaatagtagcggtaggaatatcgttattagtgatagatttatcgatagtatcgtaaaatcgatttcgcgagttattttgtagtgcggtttgtaacggttttattttcgtttttagatgacgtgtaatgttttttagtattacgatggcgtttatttattacgaaattagtagcgatggtgagcgttattaacgaaaggttattgagattgaattcgtataggtatatcgtcgtaaacgtattaattagcgaaatcggtatcgaaacggcgggaataatagtggcgcgattcgagcgtaggaataaaaatattattagaattattagcgttatcgagataattagcgtttgttcgattttttttagcgaggcgcgaatggtgggggagcgattttgggtaatttgtagattaatcgtcgtt

SEQ ID NO: 38312 - DNA, 532 bp, Artificial Sequence
  chemically treated genomic DNA (Homo sapiens) CpG-island No: 38312
aacgacgattaatctacaaattacccaaaatcgctcccccaccattcgcgcctcgctaaaaaaaatcgaacaaacgctaattatctcgataacgctaataattctaataatatttttattcctacgctcgaatcgcgccactattattcccgccgtttcgataccgatttcgctaattaatacgtttacgacgatatacctatacgaattcaatctcaataacctttcgttaataacgctcaccatcgctactaatttcgtaataaataaacgccatcgtaatactaaaaaacattacacgtcatctaaaaacgaaaataaaaccgttacaaaccgcactacaaaataactcgcgaaatcgattttacgatactatcgataaatctatcactaataacgatattcctaccgctactattaataaacgaattaccgaaccgactattacgcgaatttaccgtaacgctttctatcgccattaatatatcgttactaatttctctaacattaacgccaataatatataactaaa

SEQ ID NO: 38313 - DNA, 559 bp, Artificial Sequence
  chemically treated genomic DNA (Homo sapiens) CpG-island No: 38313
tacggtaggatcggtagggcgatgtttttttcggtttcgttatttatatttagtagtggtattaggtttttaaacgttagcgcgatatttagatcgttatcgttaatacggtaattattgtgatttagtaggttggttttacgatcgagacgcgaacgttattgcggttttattagtagtaatgaatagttagtcgtattatcgtcgatatttattattagtattcgtttttttttttgtaaggtggtttcgtaatttagtttagtcgcgatcggttcgtattggaatattacgtttttgaattcggtacgtttcgtcgcgcgttttagaattttttgcgtttgggtgtttgttttattatcgtttagtttttggaagttgatcggacgattaattatcgtttgagtaatcgtttttggtagttgtgtttgcgtttgttggcgaatgtgtaatattattgcgtagattagatttttaaatagcgttatttgttgcggttttaagtcgttggtatcgaggaacgattttggtgattttataaattatattttttttggat

SEQ ID NO: 38314 - DNA, 559 bp, Artificial Sequence
  chemically treated genomic DNA (Homo sapiens) CpG-island No: 38314
atccaaaaaaaatataatttataaaatcaccaaaatcgttcctcgataccaacgacttaaaaccgcaacaaataacgctatttaaaaatctaatctacgcaataatattacacattcgccaacaaacgcaaacacaactaccaaaaacgattactcaaacgataattaatcgtccgatcaacttccaaaaactaaacgataataaaacaaacacccaaacgcaaaaaattctaaaacgcgcgacgaaacgtaccgaattcaaaaacgtaatattccaatacgaaccgatcgcgactaaactaaattacgaaaccaccttacaaaaaaaaaaacgaatactaataataaatatcgacgataatacgactaactattcattactactaataaaaccgcaataacgttcgcgtctcgatcgtaaaaccaacctactaaatcacaataattaccgtattaacgataacgatctaaatatcgcgctaacgtttaaaaacctaataccactactaaatataaataacgaaaccgaaaaaaacatcgccctaccgatcctaccgta

SEQ ID NO: 38315 - DNA, 559 bp, Artificial Sequence
  chemically treated genomic DNA (Homo sapiens) CpG-island No: 38315
atttagaagaagtgtggtttgtgaaattattaaaatcgtttttcggtgttagcggtttaaaatcgtagtaggtagcgttgtttgaggatttggtttgcgtaatgatgttgtatattcgttagtaggcgtaggtatagttgttagaagcgattatttaggcggtgattggtcgttcgattaatttttaggggttgggcggtgatgaagtaaatatttaggcgtaagggattttggaacgcgcggcgaagcgtgtcggatttagggacgtggtattttagtacgagtcggtcgcggttgggttggattacgaagttattttgtaggaagaaaaacgggtgttggtggtggatatcggcggtggtacgattgattgtttattgttgttgatggggtcgtagtggcgttcgcgtttcgatcgtgaagttagtttgttgggttatagtggttgtcgtattggcggtaacgatttggatatcgcgttggcgtttaaaaatttgatgttattgttgggtatgggtggcgaaatcgaaaaaggtatcgttttgtcgattttgtcgtg

SEQ ID NO: 38316 - DNA, 559 bp, Artificial Sequence
  chemically treated genomic DNA (Homo sapiens) CpG-island No: 38316
cacgacaaaatcgacaaaacgatacctttttcgatttcgccacccatacccaacaataacatcaaatttttaaacgccaacgcgatatccaaatcgttaccgccaatacgacaaccactataacccaacaaactaacttcacgatcgaaacgcgaacgccactacgaccccatcaacaacaataaacaatcaatcgtaccaccgccgatatccaccaccaacacccgtttttcttcctacaaaataacttcgtaatccaacccaaccgcgaccgactcgtactaaaataccacgtccctaaatccgacacgcttcgccgcgcgttccaaaatcccttacgcctaaatatttacttcatcaccgcccaacccctaaaaattaatcgaacgaccaatcaccgcctaaataatcgcttctaacaactatacctacgcctactaacgaatatacaacatcattacgcaaaccaaatcctcaaacaacgctacctactacgattttaaaccgctaacaccgaaaaacgattttaataatttcacaaaccacacttcttctaaat

SEQ ID NO: 38317 - DNA, 546 bp, Artificial Sequence
  chemically treated genomic DNA (Homo sapiens) CpG-island No: 38317
tatcgcgtagtttagaagttattgtatgtgtcgtgttttcgtttgtatcggagttgcgttcgtagcgtttgttgattttaggttttagttgttcggggttaggttcgtttttcgtttcgtttttcgtttttcgtttcgtttcgtttttcgtttttcgttcggtacggttaaaggtgtcgtttcggttttttcgtttcgtttcgagtacgttttttatttcgtatcggttaatggtatcgtttcgttcgtttcgttttgggaacgtcggtaggtttcgggtgtagggcggtggtttaggggcggcggggaagatttggggtttgcgatttgttaggtgtttttaggttattgtttagttcgtcgcgcgttttcgagttttcgagggcgtttcgggacgcgaggagaaagtagttcgatttagtttcgagaggttcggtgtgcgggtagcggttagggattttgcggggtagcgcggatttttggatttttaataagggtcgttgcgtaggcgttgtaattattgtaggtatttgtttgtatgtttgg

SEQ ID NO: 38318 - DNA, 546 bp, Artificial Sequence
  chemically treated genomic DNA (Homo sapiens) CpG-island No: 38318
ccaaacatacaaacaaatacctacaataattacaacgcctacgcaacgacccttattaaaaatccaaaaatccgcgctaccccgcaaaatccctaaccgctacccgcacaccgaacctctcgaaactaaatcgaactactttctcctcgcgtcccgaaacgccctcgaaaactcgaaaacgcgcgacgaactaaacaataacctaaaaacacctaacaaatcgcaaaccccaaatcttccccgccgcccctaaaccaccgccctacacccgaaacctaccgacgttcccaaaacgaaacgaacgaaacgataccattaaccgatacgaaataaaaaacgtactcgaaacgaaacgaaaaaaccgaaacgacacctttaaccgtaccgaacgaaaaacgaaaaacgaaacgaaacgaaaaacgaaaaacgaaacgaaaaacgaacctaaccccgaacaactaaaacctaaaatcaacaaacgctacgaacgcaactccgatacaaacgaaaacacgacacatacaataacttctaaactacgcgata

SEQ ID NO: 38319 - DNA, 546 bp, Artificial Sequence
  chemically treated genomic DNA (Homo sapiens) CpG-island No: 38319
ttaggtatgtagataagtgtttgtagtgattgtagcgtttgcgtagcggtttttgttggaagtttaggagttcgcgttatttcgtaaagtttttggtcgttgttcgtatatcgaatttttcggggttgagtcgggttgtttttttttcgcgtttcggggcgttttcgggaattcgggagcgcgcggcgagttgaataatggtttggggatatttggtaggtcgtaggttttaaatttttttcgtcgtttttaggttatcgttttgtattcggaatttatcggcgtttttagagcggggcggacggggcggtgttattggtcggtgcggagtgaggggcgtgttcggggcgggacggagagatcggggcggtatttttggtcgtgtcgggcgagaggcggggagcggggcggggcgaggggcgaggggcggggcgaggggcgggtttggtttcgagtagttgaagtttggggttagtaggcgttgcgggcgtagtttcggtgtaagcgaggatacgatatatgtagtggtttttggattgcgcgatg

SEQ ID NO: 38320 - DNA, 546 bp, Artificial Sequence
  chemically treated genomic DNA (Homo sapiens) CpG-island No: 38320
catcgcgcaatccaaaaaccactacatatatcgtatcctcgcttacaccgaaactacgcccgcaacgcctactaaccccaaacttcaactactcgaaaccaaacccgcccctcgccccgcccctcgcccctcgccccgccccgctccccgcctctcgcccgacacgaccaaaaataccgccccgatctctccgtcccgccccgaacacgcccctcactccgcaccgaccaataacaccgccccgtccgccccgctctaaaaacgccgataaattccgaatacaaaacgataacctaaaaacgacgaaaaaaatttaaaacctacgacctaccaaatatccccaaaccattattcaactcgccgcgcgctcccgaattcccgaaaacgccccgaaacgcgaaaaaaaaacaacccgactcaaccccgaaaaattcgatatacgaacaacgaccaaaaactttacgaaataacgcgaactcctaaacttccaacaaaaaccgctacgcaaacgctacaatcactacaaacacttatctacatacctaa

SEQ ID NO: 38321 - DNA, 805 bp, Artificial Sequence
  chemically treated genomic DNA (Homo sapiens) CpG-island No: 38321
gacgttcgtttatacgtgaataaggttaatttatcgtggagtttgcgtttgaatttttgttttttaggttatttcggggttttagttgttcgggatgaaaaaacgatgttcgggtattaggggtcggggattagtaacgtcggcgtttagcgtaatcgttattttttttagttacggcgtacgcgttttttttttgttaaggaaggggcggggagtaggcggggcgggtatttttgaggttaatcgaaagcgagtattttcgtttttcgggtcgatggatttagtttgatttcggcggtgggcggaggaggcggggtaagtcgcgcggttaggaaggggcggggttcggggtttggaggcggggtttggggttgttagtttcgcgttcgtcgtcgcgttacggtttttcgtatgtcgtggttcgggtggttgttagcgttgtcgttcgtcgttcgttatttcggtattttaagtcgtttttcgtcgtttcggttcggcgcgtaggtaaggttggtcgcggttgtcgagttatcgcgttttttttttcgggttcggtttgacgcgcgggcgtttttttcgggtcgtgttagcgtcgtagttttcgattgcgttcgggggcggtttcggggggcgggacgagagttttttttatttttttaacgttttcgggcgtcggtttttttagttggggtttttcgtttggttttcgtagtttcggcgtagggagttgtttcgagttttttttttcgggtcgattatataattttcggttttggggcgggggtttttttttagttcgggtttt

SEQ ID NO: 38322 - DNA, 805 bp, Artificial Sequence
  chemically treated genomic DNA (Homo sapiens) CpG-island No: 38322
aaaacccgaactaaaaaaaaacccccgccccaaaaccgaaaattatataatcgacccgaaaaaaaaaactcgaaacaactccctacgccgaaactacgaaaaccaaacgaaaaaccccaactaaaaaaaccgacgcccgaaaacgttaaaaaaataaaaaaaactctcgtcccgccccccgaaaccgcccccgaacgcaatcgaaaactacgacgctaacacgacccgaaaaaaacgcccgcgcgtcaaaccgaacccgaaaaaaaaaacgcgataactcgacaaccgcgaccaaccttacctacgcgccgaaccgaaacgacgaaaaacgacttaaaataccgaaataacgaacgacgaacgacaacgctaacaaccacccgaaccacgacatacgaaaaaccgtaacgcgacgacgaacgcgaaactaacaaccccaaaccccgcctccaaaccccgaaccccgccccttcctaaccgcgcgacttaccccgcctcctccgcccaccgccgaaatcaaactaaatccatcgacccgaaaaacgaaaatactcgctttcgattaacctcaaaaatacccgccccgcctactccccgccccttccttaacaaaaaaaaaacgcgtacgccgtaactaaaaaaaataacgattacgctaaacgccgacgttactaatccccgacccctaatacccgaacatcgttttttcatcccgaacaactaaaaccccgaaataacctaaaaaacaaaaattcaaacgcaaactccacgataaattaaccttattcacgtataaacgaacgtc

SEQ ID NO: 38323 - DNA, 805 bp, Artificial Sequence
  chemically treated genomic DNA (Homo sapiens) CpG-island No: 38323
ggggttcgggttgaggaggggttttcgttttaggatcggaggttgtgtaatcggttcgggaaggggggttcgggatagttttttgcgtcggagttgcggaggttagacgggggattttagttgagggggtcggcgttcggaggcgttggggggatggggagggttttcgtttcgtttttcgggatcgttttcgggcgtagtcgggagttgcggcgttgatacggttcggagagggcgttcgcgcgttagatcgagttcgaggaggggggcgcgatggttcggtagtcgcggttagttttatttgcgcgtcgggtcggggcggcgggaggcggtttgggatgtcggggtggcgggcggcgggcggtagcgttggtagttattcgggttacggtatgcgaggagtcgtggcgcggcggcgggcgcgggattgatagttttaggtttcgtttttagatttcgggtttcgtttttttttggtcgcgcggtttgtttcgtttttttcgtttatcgtcggggttaaattgggtttatcggttcggagggcggggatgttcgttttcgattggttttaaaggtgttcgtttcgtttatttttcgttttttttttggtagggaagaggcgcgtgcgtcgtggttggggagggtagcggttacgttgagcgtcggcgttgttggttttcgatttttggtattcgggtatcgtttttttatttcgggtagttgggatttcgggatgatttaaggaataaggatttagacgtagattttacggtgaattggttttatttacgtgtgaacgaacgtt

SEQ ID NO: 38324 - DNA, 805 bp, Artificial Sequence
  chemically treated genomic DNA (Homo sapiens) CpG-island No: 38324
aacgttcgttcacacgtaaataaaaccaattcaccgtaaaatctacgtctaaatccttattccttaaatcatcccgaaatcccaactacccgaaataaaaaaacgatacccgaataccaaaaatcgaaaaccaacaacgccgacgctcaacgtaaccgctaccctccccaaccacgacgcacgcgcctcttccctaccaaaaaaaaaacgaaaaataaacgaaacgaacacctttaaaaccaatcgaaaacgaacatccccgccctccgaaccgataaacccaatttaaccccgacgataaacgaaaaaaacgaaacaaaccgcgcgaccaaaaaaaaacgaaacccgaaatctaaaaacgaaacctaaaactatcaatcccgcgcccgccgccgcgccacgactcctcgcataccgtaacccgaataactaccaacgctaccgcccgccgcccgccaccccgacatcccaaaccgcctcccgccgccccgacccgacgcgcaaataaaactaaccgcgactaccgaaccatcgcgcccccctcctcgaactcgatctaacgcgcgaacgccctctccgaaccgtatcaacgccgcaactcccgactacgcccgaaaacgatcccgaaaaacgaaacgaaaaccctccccatccccccaacgcctccgaacgccgaccccctcaactaaaatcccccgtctaacctccgcaactccgacgcaaaaaactatcccgaaccccccttcccgaaccgattacacaacctccgatcctaaaacgaaaacccctcctcaacccgaacccc

SEQ ID NO: 38325 - DNA, 569 bp, Artificial Sequence
  chemically treated genomic DNA (Homo sapiens) CpG-island No: 38325
tgcggtatcgtagtgcggggcgcgggatttatatttcggcgggcgtttttcgttcgggcgtagcgtttggtttttcggcgtagtcgatcgggtcgggaggcgagaggcgagaggcggttcggttttgtacgttcgttcggttagattcgttatgtagcggagtattttttcgcgggtagggagggtacggcggttatcgcgttgcgggttcgggggttgtagatatcggttgtttagaataggttttattcgtttttcggggcgtttattcgttcgtgcgtttattttcgggagtcgggttgtgttgggtcgtaattcgttagtttcggtggaggcggggtcgggagaataggggcggcgtcgtggtcggggcgagcgcggcgattaataggcggttttcggtcgggcgcggcgtcggggcgcgcggttgtagcggagtaggttgggaagcgtagttttcggttgagtttcgtcgcggtttcgtagttttttagtttcgttttttttcgataggtgttttttttcggaatcggggtttgaatttcgttatagttttgtaggggaggaag

SEQ ID NO: 38326 - DNA, 569 bp, Artificial Sequence
  chemically treated genomic DNA (Homo sapiens) CpG-island No: 38326
cttcctcccctacaaaactataacgaaattcaaaccccgattccgaaaaaaaacacctatcgaaaaaaaacgaaactaaaaaactacgaaaccgcgacgaaactcaaccgaaaactacgcttcccaacctactccgctacaaccgcgcgccccgacgccgcgcccgaccgaaaaccgcctattaatcgccgcgctcgccccgaccacgacgccgcccctattctcccgaccccgcctccaccgaaactaacgaattacgacccaacacaacccgactcccgaaaataaacgcacgaacgaataaacgccccgaaaaacgaataaaacctattctaaacaaccgatatctacaacccccgaacccgcaacgcgataaccgccgtaccctccctacccgcgaaaaaatactccgctacataacgaatctaaccgaacgaacgtacaaaaccgaaccgcctctcgcctctcgcctcccgacccgatcgactacgccgaaaaaccaaacgctacgcccgaacgaaaaacgcccgccgaaatataaatcccgcgccccgcactacgataccgca

SEQ ID NO: 38327 - DNA, 569 bp, Artificial Sequence
  chemically treated genomic DNA (Homo sapiens) CpG-island No: 38327
tttttttttttgtagagttgtggcggggtttagatttcgatttcgggagaggatatttgtcggggaagggcggggttgggggattgcggggtcgcgacgaggtttagtcgggaattacgttttttagtttgtttcgttgtagtcgcgcgtttcggcgtcgcgttcggtcgggagtcgtttgttgatcgtcgcgttcgtttcggttacggcgtcgtttttgttttttcggtttcgtttttatcggggttgacggattacggtttagtatagttcggttttcgggaatgagcgtacggacgggtgagcgtttcggggggcgggtggggtttgttttggatagtcggtgtttgtagttttcgggttcgtagcgcggtggtcgtcgtgttttttttgttcgcgggaggatgtttcgttatatggcgggtttgatcgggcgggcgtgtagagtcgggtcgtttttcgtttttcgtttttcggttcggtcggttgcgtcgggagattaggcgttgcgttcgggcgggaggcgttcgtcggggtgtgagtttcgcgtttcgtattgcggtgtcgta

SEQ ID NO: 38328 - DNA, 569 bp, Artificial Sequence
  chemically treated genomic DNA (Homo sapiens) CpG-island No: 38328
tacgacaccgcaatacgaaacgcgaaactcacaccccgacgaacgcctcccgcccgaacgcaacgcctaatctcccgacgcaaccgaccgaaccgaaaaacgaaaaacgaaaaacgacccgactctacacgcccgcccgatcaaacccgccatataacgaaacatcctcccgcgaacaaaaaaaacacgacgaccaccgcgctacgaacccgaaaactacaaacaccgactatccaaaacaaaccccacccgccccccgaaacgctcacccgtccgtacgctcattcccgaaaaccgaactatactaaaccgtaatccgtcaaccccgataaaaacgaaaccgaaaaaacaaaaacgacgccgtaaccgaaacgaacgcgacgatcaacaaacgactcccgaccgaacgcgacgccgaaacgcgcgactacaacgaaacaaactaaaaaacgtaattcccgactaaacctcgtcgcgaccccgcaatcccccaaccccgcccttccccgacaaatatcctctcccgaaatcgaaatctaaaccccgccacaactctacaaaaaaaaaaa

SEQ ID NO: 38329 - DNA, 533 bp, Artificial Sequence
  chemically treated genomic DNA (Homo sapiens) CpG-island No: 38329
gcgcgtttcgttgaatttcggttttttttcgtttttttttcgtgttttagattttttagtttttgttttttcggttttttttcggtttcgggtttcgttttttcgtttttttttttttcgaggttttttttttagtcgggcggggtagatcgtttcgtaaataggcggatggttcggggcgttgcgagcgtagatattcgtttttagagtcggtaattgattttttttagttgataatttatggtttgtatatgcgttttaatgcgggcgtttcgggaggcgcggtaggcggggcgggagcggggcgcgggtttgcgcggtcgttcgtttattcgttcgttcgtgttcgcgggagacgtgggcgtttttattcgggttgtttgtttagcgttttcgaggtcgcgcgcggcggaaggggtttgagttgggtcggacgtaaaggtcgggcggtttttgggcggcgtagggtttattggttggtttttcgaattgaatgcgggcgggggtatgtgggtattttttttttatgtagt

SEQ ID NO: 38330 - DNA, 533 bp, Artificial Sequence
  chemically treated genomic DNA (Homo sapiens) CpG-island No: 38330
actacataaaaaaaaaatacccacatacccccgcccgcattcaattcgaaaaaccaaccaataaaccctacgccgcccaaaaaccgcccgacctttacgtccgacccaactcaaaccccttccgccgcgcgcgacctcgaaaacgctaaacaaacaacccgaataaaaacgcccacgtctcccgcgaacacgaacgaacgaataaacgaacgaccgcgcaaacccgcgccccgctcccgccccgcctaccgcgcctcccgaaacgcccgcattaaaacgcatatacaaaccataaattatcaactaaaaaaaatcaattaccgactctaaaaacgaatatctacgctcgcaacgccccgaaccatccgcctatttacgaaacgatctaccccgcccgactaaaaaaaaaacctcgaaaaaaaaaaaaacgaaaaaacgaaacccgaaaccgaaaaaaaaccgaaaaaacaaaaactaaaaaatctaaaacacgaaaaaaaaacgaaaaaaaaccgaaattcaacgaaacgcgc

SEQ ID NO: 38331 - DNA, 533 bp, Artificial Sequence
  chemically treated genomic DNA (Homo sapiens) CpG-island No: 38331
gttgtatagggaaggggtgtttatatgttttcgttcgtatttagttcgaaggattagttagtaggttttgcgtcgtttagggatcgttcggtttttgcgttcggtttagtttaagtttttttcgtcgcgcgcggtttcgggagcgttgggtaggtagttcgggtgggagcgtttacgtttttcgcggatacggacggacggatggacgggcggtcgcgtaggttcgcgtttcgttttcgtttcgtttgtcgcgtttttcggggcgttcgtattaaagcgtatatgtaagttatgaattattaattgaaaggagttaattatcggttttaaaaacgagtgtttgcgttcgtagcgtttcgggttattcgtttatttacggagcgatttatttcgttcggttggggagggggtttcgggagggagagagacggagaaacggagttcgagatcgggagagagtcggagaggtagggattggagagtttgggatacgaaggagaggcggggagagatcgagatttagcgagacgcgt

SEQ ID NO: 38332 - DNA, 533 bp, Artificial Sequence
  chemically treated genomic DNA (Homo sapiens) CpG-island No: 38332
acgcgtctcgctaaatctcgatctctccccgcctctccttcgtatcccaaactctccaatccctacctctccgactctctcccgatctcgaactccgtttctccgtctctctccctcccgaaaccccctccccaaccgaacgaaataaatcgctccgtaaataaacgaataacccgaaacgctacgaacgcaaacactcgtttttaaaaccgataattaactcctttcaattaataattcataacttacatatacgctttaatacgaacgccccgaaaaacgcgacaaacgaaacgaaaacgaaacgcgaacctacgcgaccgcccgtccatccgtccgtccgtatccgcgaaaaacgtaaacgctcccacccgaactacctacccaacgctcccgaaaccgcgcgcgacgaaaaaaacttaaactaaaccgaacgcaaaaaccgaacgatccctaaacgacgcaaaacctactaactaatccttcgaactaaatacgaacgaaaacatataaacaccccttccctatacaac

SEQ ID NO: 38333 - DNA, 569 bp, Artificial Sequence
  chemically treated genomic DNA (Homo sapiens) CpG-island No: 38333
cgtttgttcggtttggcggggagcgggatgtcgttgggggcgatgttaggcgggtcgtttttgatagtttttaggttttggcgcgttttttcgtttttttcgcgtaggcgggcgtgggatttcggttgatttagttcgggttttgcggcggagcgggcgggttgcgcgtgcggcggttttaattgtcgcggtaggtagtagtaggttgaagggattatggtgtagtacgagttgtgggtcgcgttgtttggcgttttcggggtcgttttggtttgttgtttcgtggcggcggtcgtggttttgcgttggttcgggcgtcggacggcgcggggcgcggtggttcgggcgcgatagaggtagcgagcgggtttggagaatatggatagggcggcgtagcgttttcggttttaggtgattgtcggagcgtagtgggatgggcgcggtttgagggtattcgtagcggtatttttagtcgtcggattcgtcgagggataggggatggggcgggtagagtagatgtgtaattttttagaatttttttttgttttaagatatttcgtattttttga

SEQ ID NO: 38334 - DNA, 569 bp, Artificial Sequence
  chemically treated genomic DNA (Homo sapiens) CpG-island No: 38334
tcaaaaaatacgaaatatcttaaaacaaaaaaaaattctaaaaaattacacatctactctacccgccccatcccctatccctcgacgaatccgacgactaaaaataccgctacgaataccctcaaaccgcgcccatcccactacgctccgacaatcacctaaaaccgaaaacgctacgccgccctatccatattctccaaacccgctcgctacctctatcgcgcccgaaccaccgcgccccgcgccgtccgacgcccgaaccaacgcaaaaccacgaccgccgccacgaaacaacaaaccaaaacgaccccgaaaacgccaaacaacgcgacccacaactcgtactacaccataatcccttcaacctactactacctaccgcgacaattaaaaccgccgcacgcgcaacccgcccgctccgccgcaaaacccgaactaaatcaaccgaaatcccacgcccgcctacgcgaaaaaaacgaaaaaacgcgccaaaacctaaaaactatcaaaaacgacccgcctaacatcgcccccaacgacatcccgctccccgccaaaccgaacaaacg

SEQ ID NO: 38335 - DNA, 569 bp, Artificial Sequence
  chemically treated genomic DNA (Homo sapiens) CpG-island No: 38335
ttagaaagtgcggaatattttagggtaaggagagattttggagagttatatatttgttttgttcgttttattttttgtttttcggcgggttcggcggttgaaagtgtcgttgcgagtatttttaggtcgcgtttattttattacgtttcggtagttatttggagtcggaagcgttgcgtcgttttgtttatgttttttaggttcgttcgttgtttttgtcgcgttcggattatcgcgtttcgcgtcgttcggcgttcggattagcgtagggttacggtcgtcgttacgaagtagtaggttagggcgatttcggaggcgttaggtagcgcggtttatagttcgtattgtattatgatttttttagtttgttgttgtttatcgcgatagttgaagtcgtcgtacgcgtagttcgttcgtttcgtcgtaaaattcggattggattagtcgggattttacgttcgtttgcgcgggaggggcggggaagcgcgttagagtttagaggttattagaggcggttcgtttggtatcgtttttagcgatatttcgtttttcgttaagtcgagtaggcg

SEQ ID NO: 38336 - DNA, 569 bp, Artificial Sequence
  chemically treated genomic DNA (Homo sapiens) CpG-island No: 38336
cgcctactcgacttaacgaaaaacgaaatatcgctaaaaacgataccaaacgaaccgcctctaataacctctaaactctaacgcgcttccccgcccctcccgcgcaaacgaacgtaaaatcccgactaatccaatccgaattttacgacgaaacgaacgaactacgcgtacgacgacttcaactatcgcgataaacaacaacaaactaaaaaaatcataatacaatacgaactataaaccgcgctacctaacgcctccgaaatcgccctaacctactacttcgtaacgacgaccgtaaccctacgctaatccgaacgccgaacgacgcgaaacgcgataatccgaacgcgacaaaaacaacgaacgaacctaaaaaacataaacaaaacgacgcaacgcttccgactccaaataactaccgaaacgtaataaaataaacgcgacctaaaaatactcgcaacgacactttcaaccgccgaacccgccgaaaaacaaaaaataaaacgaacaaaacaaatatataactctccaaaatctctccttaccctaaaatattccgcactttctaa

SEQ ID NO: 38337 - DNA, 801 bp, Artificial Sequence
  chemically treated genomic DNA (Homo sapiens) CpG-island No: 38337
cgtttagttttaaggaaattacgtagtatttatattaaaaatagtttatacgagatcgtagtgtagataacggaaggatagggggtcgtagcggtcgggtttagcgcgtaggaaggtaataggcggtcgttagtcgtcgaggggtgttttcgttttcgtatcgagggaagcggtcgagttcgcgtcgattttttttttattcgtttatcgggatttaggcgtcgcgatggtttttcgaagcggttttgtaagtataagtcgcgtttgcgtttacgttcgttcgatttacggtttttagttcgtcgttatttttatcgttttttggttggcgtcggtttttagtttatttttatatcgggtttcgttttaggttattagcggaagtgcgggttcgtagtcgtagttattaattagttgttgtcgcgaggtaggtttcgttttcgcgttgagtcggtcggtcgtaggtttcgtttcggtcgttgttttttggttttggtgttttttagggggcggggtatgggaagagcggtcgcggtgtatcgtttacgtcgggcgttggcgttacgttcgggtagttggggttcgattaatttcgagttttcgttagggtggacggggagagtttgtcgcggaattttgatttcggtttcgttcggggttttttgcgggtggggcggtttcgggatgagttttgttgcgggtggggttagtttttattcgttggttattttcgtttttttttttttttttttttttttacgttttaggtgttttagcggatgtattacggtgacgaagtaa

SEQ ID NO: 38338 - DNA, 801 bp, Artificial Sequence
  chemically treated genomic DNA (Homo sapiens) CpG-island No: 38338
ttacttcgtcaccgtaatacatccgctaaaacacctaaaacgtaaaaaaaaaaaaaaaaaaaaaaaaacgaaaataaccaacgaataaaaactaaccccacccgcaacaaaactcatcccgaaaccgccccacccgcaaaaaaccccgaacgaaaccgaaatcaaaattccgcgacaaactctccccgtccaccctaacgaaaactcgaaattaatcgaaccccaactacccgaacgtaacgccaacgcccgacgtaaacgatacaccgcgaccgctcttcccataccccgccccctaaaaaacaccaaaaccaaaaaacaacgaccgaaacgaaacctacgaccgaccgactcaacgcgaaaacgaaacctacctcgcgacaacaactaattaataactacgactacgaacccgcacttccgctaataacctaaaacgaaacccgatataaaaataaactaaaaaccgacgccaaccaaaaaacgataaaaataacgacgaactaaaaaccgtaaatcgaacgaacgtaaacgcaaacgcgacttatacttacaaaaccgcttcgaaaaaccatcgcgacgcctaaatcccgataaacgaataaaaaaaaaatcgacgcgaactcgaccgcttccctcgatacgaaaacgaaaacacccctcgacgactaacgaccgcctattaccttcctacgcgctaaacccgaccgctacgaccccctatccttccgttatctacactacgatctcgtataaactatttttaatataaatactacgtaatttccttaaaactaaacg

SEQ ID NO: 38339 - DNA, 801 bp, Artificial Sequence
  chemically treated genomic DNA (Homo sapiens) CpG-island No: 38339
ttatttcgttatcgtagtatattcgttgagatatttgaggcgtggaaaaaagaagaaaaaagagggaacggaaatggttagcgggtaagggttgattttattcgtagtagagtttatttcggagtcgttttattcgtaggaagtttcgggcggggtcgaggttaaggtttcgcggtaaatttttttcgtttattttgacggggattcgggattggtcgggttttagttgttcggacgtgacgttagcgttcggcgtgggcggtgtatcgcggtcgttttttttatgtttcgttttttggggggtattaaaattagaaagtagcggtcggggcggggtttgcggtcggtcgatttagcgcgggggcggggtttatttcgcggtaatagttggttggtagttgcggttgcgggttcgtattttcgttggtggtttagagcggggttcggtatggaggtgggttagaggtcgacgttagttagagagcggtgagggtagcggcgggttggaggtcgtaggtcgggcgggcgtgagcgtaggcgcggtttgtgtttgtagggtcgtttcggggaattatcgcggcgtttaggtttcggtgggcggatgggggaagagtcggcgcgggttcggtcgtttttttcggtgcgggggcgggagtatttttcgacggttggcggtcgtttgttgtttttttgcgcgttggattcggtcgttgcgattttttgttttttcgttgtttatattgcggtttcgtgtgagttgtttttggtgtggatattgcgtagtttttttggggttgagcg

SEQ ID NO: 38340 - DNA, 801 bp, Artificial Sequence
  chemically treated genomic DNA (Homo sapiens) CpG-island No: 38340
cgctcaaccccaaaaaaactacgcaatatccacaccaaaaacaactcacacgaaaccgcaatataaacaacgaaaaaacaaaaaatcgcaacgaccgaatccaacgcgcaaaaaaacaacaaacgaccgccaaccgtcgaaaaatactcccgcccccgcaccgaaaaaaacgaccgaacccgcgccgactcttcccccatccgcccaccgaaacctaaacgccgcgataattccccgaaacgaccctacaaacacaaaccgcgcctacgctcacgcccgcccgacctacgacctccaacccgccgctaccctcaccgctctctaactaacgtcgacctctaacccacctccataccgaaccccgctctaaaccaccaacgaaaatacgaacccgcaaccgcaactaccaaccaactattaccgcgaaataaaccccgcccccgcgctaaatcgaccgaccgcaaaccccgccccgaccgctactttctaattttaataccccccaaaaaacgaaacataaaaaaaacgaccgcgatacaccgcccacgccgaacgctaacgtcacgtccgaacaactaaaacccgaccaatcccgaatccccgtcaaaataaacgaaaaaaatttaccgcgaaaccttaacctcgaccccgcccgaaacttcctacgaataaaacgactccgaaataaactctactacgaataaaatcaacccttacccgctaaccatttccgttccctcttttttcttcttttttccacgcctcaaatatctcaacgaatatactacgataacgaaataa

SEQ ID NO: 38341 - DNA, 1170 bp, Artificial Sequence
  chemically treated genomic DNA (Homo sapiens) CpG-island No: 38341
tttttgcgcgtaggggaggggcggggaggggttaatttttttttagaagatcgttcgcgatcgtcgtattttgttcgaggcgttgatggaagcggttaagatttatagtttcggttagattagttacgcgttgtacgacgtgggtggcgagtatcggcggaatatgtaaacgcgcgtgtttcgtcggagagaaaagttcgtttaatggcgggtttttcgtagggtcggtatagaagcgcgaggcggtgcggtttttggtcgaggtatacgtacgttttttgcgtcggttttgcgagatcgtcgatttgtcgcgatcggtttggtacgttttagtcgggtaagtcgaattagaacgtttttatcgagcgttttaatcgtatttatcgcgaggaggtgttcgattcgtatttgtttgttcgattggacgacgttttcgaggttacgtggcgttttttgatcgattataacgagtatcgtttttacgacgtttttagcggtatgatatcggttgagtatcgaaattattacgcggttagaaattttattttcgaattgttcgtttgacgggggaggttacgttgtaagatgttggacgatatcgtgtttttcgacgcgttgtatcgggtcggggattataattggcgtaagtttcgtcggatggacgataagcgttattttattattatcgtcgggagggtgagatggatcggaagttgggaggattgattgtagttatcggtttgttgtttgcgggttgcgcgacgaagttagttaattcgttagaggcgatttttgttttatcggatcgattgttcgtattttagatttcgattgtaggggacgttggtacgattatcgtcgtgcgcgacgtcgggtttttcggcggcgggtgttatatggtcgtttatatcgatggagtgtttgttgtacgtattggcgatcgggaataggcggttttttatgttttagtcggggagtatattgtcggtatcggttttataggtcgaggtatttgtcgtatcggcgaggagcgtttgcgtcgcgagacgcgggttgtagtcggtgtaggcgagagtaagaagtttcgtatttcgattaatttaaattcggggttagcgattgagtcgatcgtattttgagacgcgtatggtatttattaattgtattagt

SEQ ID NO: 38342 - DNA, 1170 bp, Artificial Sequence
  chemically treated genomic DNA (Homo sapiens) CpG-island No: 38342
actaatacaattaataaataccatacgcgtctcaaaatacgatcgactcaatcgctaaccccgaatttaaattaatcgaaatacgaaacttcttactctcgcctacaccgactacaacccgcgtctcgcgacgcaaacgctcctcgccgatacgacaaatacctcgacctataaaaccgataccgacaatatactccccgactaaaacataaaaaaccgcctattcccgatcgccaatacgtacaacaaacactccatcgatataaacgaccatataacacccgccgccgaaaaacccgacgtcgcgcacgacgataatcgtaccaacgtcccctacaatcgaaatctaaaatacgaacaatcgatccgataaaacaaaaatcgcctctaacgaattaactaacttcgtcgcgcaacccgcaaacaacaaaccgataactacaatcaatcctcccaacttccgatccatctcaccctcccgacgataataataaaataacgcttatcgtccatccgacgaaacttacgccaattataatccccgacccgatacaacgcgtcgaaaaacacgatatcgtccaacatcttacaacgtaacctcccccgtcaaacgaacaattcgaaaataaaatttctaaccgcgtaataatttcgatactcaaccgatatcataccgctaaaaacgtcgtaaaaacgatactcgttataatcgatcaaaaaacgccacgtaacctcgaaaacgtcgtccaatcgaacaaacaaatacgaatcgaacacctcctcgcgataaatacgattaaaacgctcgataaaaacgttctaattcgacttacccgactaaaacgtaccaaaccgatcgcgacaaatcgacgatctcgcaaaaccgacgcaaaaaacgtacgtatacctcgaccaaaaaccgcaccgcctcgcgcttctataccgaccctacgaaaaacccgccattaaacgaacttttctctccgacgaaacacgcgcgtttacatattccgccgatactcgccacccacgtcgtacaacgcgtaactaatctaaccgaaactataaatcttaaccgcttccatcaacgcctcgaacaaaatacgacgatcgcgaacgatcttctaaaaaaaaattaacccctccccgcccctcccctacgcgcaaaaa

SEQ ID NO: 38343 - DNA, 1170 bp, Artificial Sequence
  chemically treated genomic DNA (Homo sapiens) CpG-island No: 38343
gttgatgtaattgatgagtgttatgcgcgttttagaatgcggtcggtttaatcgttggtttcgagtttgggttgatcgagatgcggaattttttgttttcgtttgtatcgattatagttcgcgtttcgcggcgtaagcgtttttcgtcgatgcggtaggtgtttcggtttgtggggtcggtgtcgataatgtgtttttcggttggaatatggaaagtcgtttgttttcgatcgttaatgcgtgtagtaagtattttatcgatatagacggttatgtggtattcgtcgtcgaggaattcggcgtcgcgtacggcgatgatcgtgttagcgttttttgtaatcggagtttggaatgcgagtagtcggttcggtgggataggaatcgtttttgacgagttgattggtttcgtcgcgtagttcgtaagtaataggtcgatggttgtaattaatttttttagttttcgatttattttattttttcgacgatagtgatggggtggcgtttgtcgtttattcggcggggtttgcgttagttgtggttttcggttcggtatagcgcgtcgaagaatacgatgtcgtttaatattttgtaacgtaatttttttcgttaagcggatagttcgaaagtagagtttttggtcgcgtggtgatttcggtatttagtcggtgttatgtcgttgagggcgtcgtgggggcggtgttcgttgtagtcgattaggaagcgttacgtggtttcgaggacgtcgtttagtcgggtaaataggtacgggtcgagtattttttcgcgataggtgcggttgaagcgttcgatgaaggcgttttggttcggtttgttcggttggggcgtattaggtcgatcgcgataggtcgacgatttcgtaggatcggcgtagggggcgtgcgtgtatttcgattaggaatcgtatcgtttcgcgtttttgtgtcggttttacgaaaagttcgttattaggcgggttttttttttcgacgaggtacgcgcgtttatatatttcgtcggtattcgttatttacgtcgtatagcgcgtggttgatttggtcgaggttgtgggttttgatcgtttttattagcgtttcgaataaaatgcggcggtcgcgggcggttttttggaggaaggttaattttttttcgttttttttttgcgcgtagggg

SEQ ID NO: 38344 - DNA, 1170 bp, Artificial Sequence
  chemically treated genomic DNA (Homo sapiens) CpG-island No: 38344
cccctacgcgcaaaaaaaaaacgaaaaaaaattaaccttcctccaaaaaaccgcccgcgaccgccgcattttattcgaaacgctaataaaaacgatcaaaacccacaacctcgaccaaatcaaccacgcgctatacgacgtaaataacgaataccgacgaaatatataaacgcgcgtacctcgtcgaaaaaaaaaacccgcctaataacgaacttttcgtaaaaccgacacaaaaacgcgaaacgatacgattcctaatcgaaatacacgcacgccccctacgccgatcctacgaaatcgtcgacctatcgcgatcgacctaatacgccccaaccgaacaaaccgaaccaaaacgccttcatcgaacgcttcaaccgcacctatcgcgaaaaaatactcgacccgtacctatttacccgactaaacgacgtcctcgaaaccacgtaacgcttcctaatcgactacaacgaacaccgcccccacgacgccctcaacgacataacaccgactaaataccgaaatcaccacgcgaccaaaaactctactttcgaactatccgcttaacgaaaaaaattacgttacaaaatattaaacgacatcgtattcttcgacgcgctataccgaaccgaaaaccacaactaacgcaaaccccgccgaataaacgacaaacgccaccccatcactatcgtcgaaaaaataaaataaatcgaaaactaaaaaaattaattacaaccatcgacctattacttacgaactacgcgacgaaaccaatcaactcgtcaaaaacgattcctatcccaccgaaccgactactcgcattccaaactccgattacaaaaaacgctaacacgatcatcgccgtacgcgacgccgaattcctcgacgacgaataccacataaccgtctatatcgataaaatacttactacacgcattaacgatcgaaaacaaacgactttccatattccaaccgaaaaacacattatcgacaccgaccccacaaaccgaaacacctaccgcatcgacgaaaaacgcttacgccgcgaaacgcgaactataatcgatacaaacgaaaacaaaaaattccgcatctcgatcaacccaaactcgaaaccaacgattaaaccgaccgcattctaaaacgcgcataacactcatcaattacatcaac

SEQ ID NO: 38345 - DNA, 816 bp, Artificial Sequence
  chemically treated genomic DNA (Homo sapiens) CpG-island No: 38345
gtacgtggcgcggcggtggcggcgcggaggatttaggcgaaggcgaaggcgaaggcgaaggcgtaggcgaaggcgaaggcgtaggcggcgggaagttacgttaaagtcgtcgtcgtcgtcgttgtcggggtttgtttatagtttggtatcgggcggtagcggtggcggcggcggacgcggtaggtgtagcgatcgcgaagttcgggcggtcgcgcgttttcggaattttttcgcggttttcgaggtggtagtcgcgcgttattcggtagtttcgtagtcgagtttttgaatttttttggaaagttgcggggtagatacggtcgtagcggttgcggtaattcgaggaggaggaggaagaggaggacgacgagaaggagtaggtatagaaggaggaagcggcggagacgcgatgtcgggcgatttcggtcgttgtcgggcgcgttcgtttgtaattcggttgttggcgggcggcgtcgattttttttcgtgacgttacggttattatcgtcgtttttcgcgtcgcgtcgcgtcgggttcgcgttttcgttatcgaggtcgcgcgttcggtttcgcgtttttattggtcgcgttcgcgcgagcgagggacgtcgacgtgttagggagttaataggcgtagcgttcgtgagttcgttagcggattcggttcggatttcgttgtttttttgagaattcgtatatttttgagttcgtagttttgagtcgaatttcgagtttagtggtttcggtgtttataattacgagtgcgaggtaaagggagagggaggaagagattagagggagattagagaaagggaa

SEQ ID NO: 38346 - DNA, 816 bp, Artificial Sequence
  chemically treated genomic DNA (Homo sapiens) CpG-island No: 38346
ttccctttctctaatctccctctaatctcttcctccctctccctttacctcgcactcgtaattataaacaccgaaaccactaaactcgaaattcgactcaaaactacgaactcaaaaatatacgaattctcaaaaaaacaacgaaatccgaaccgaatccgctaacgaactcacgaacgctacgcctattaactccctaacacgtcgacgtccctcgctcgcgcgaacgcgaccaataaaaacgcgaaaccgaacgcgcgacctcgataacgaaaacgcgaacccgacgcgacgcgacgcgaaaaacgacgataataaccgtaacgtcacgaaaaaaaatcgacgccgcccgccaacaaccgaattacaaacgaacgcgcccgacaacgaccgaaatcgcccgacatcgcgtctccgccgcttcctccttctatacctactccttctcgtcgtcctcctcttcctcctcctcctcgaattaccgcaaccgctacgaccgtatctaccccgcaactttccaaaaaaattcaaaaactcgactacgaaactaccgaataacgcgcgactaccacctcgaaaaccgcgaaaaaattccgaaaacgcgcgaccgcccgaacttcgcgatcgctacacctaccgcgtccgccgccgccaccgctaccgcccgataccaaactataaacaaaccccgacaacgacgacgacgacgactttaacgtaacttcccgccgcctacgccttcgccttcgcctacgccttcgccttcgccttcgccttcgcctaaatcctccgcgccgccaccgccgcgccacgtac

SEQ ID NO: 38347 - DNA, 816 bp, Artificial Sequence
  chemically treated genomic DNA (Homo sapiens) CpG-island No: 38347
ttttttttttttggtttttttttgatttttttttttttttttttttgtttcgtattcgtgattgtggatatcgggattattggattcggagttcggtttagggttgcgggtttagggatgtgcgggtttttaaaagagtagcggagttcgagtcgagttcgttgacgggtttacgagcgttgcgtttattggttttttggtacgtcggcgtttttcgttcgcgcgggcgcggttaataggggcgcggggtcggacgcgcggtttcggtggcgggggcgcgggttcggcgcggcgcggcgcggggagcggcggtagtggtcgtgacgttacgggagggggtcggcgtcgttcgttagtagtcggattataagcgaacgcgttcggtagcggtcggagtcgttcggtatcgcgttttcgtcgttttttttttttgtgtttgttttttttcgtcgttttttttttttttttttttttcgggttgtcgtaatcgttgcggtcgtgtttgtttcgtaattttttaagaaagtttagaaattcggttacggggttgtcgagtggcgcgcggttgttatttcgggagtcgcgggggagtttcgagggcgcgcggtcgttcgggtttcgcggtcgttgtatttgtcgcgttcgtcgtcgttatcgttgtcgttcggtgttaggttgtgggtagatttcggtagcggcggcggcggcggttttggcgtagtttttcgtcgtttgcgttttcgttttcgtttgcgttttcgttttcgttttcgttttcgtttgggtttttcgcgtcgttatcgtcgcgttacgtgt

SEQ ID NO: 38348 - DNA, 816 bp, Artificial Sequence
  chemically treated genomic DNA (Homo sapiens) CpG-island No: 38348
acacgtaacgcgacgataacgacgcgaaaaacccaaacgaaaacgaaaacgaaaacgaaaacgcaaacgaaaacgaaaacgcaaacgacgaaaaactacgccaaaaccgccgccgccgccgctaccgaaatctacccacaacctaacaccgaacgacaacgataacgacgacgaacgcgacaaatacaacgaccgcgaaacccgaacgaccgcgcgccctcgaaactcccccgcgactcccgaaataacaaccgcgcgccactcgacaaccccgtaaccgaatttctaaactttcttaaaaaattacgaaacaaacacgaccgcaacgattacgacaacccgaaaaaaaaaaaaaaaaaaaaaacgacgaaaaaaaacaaacacaaaaaaaaaaaacgacgaaaacgcgataccgaacgactccgaccgctaccgaacgcgttcgcttataatccgactactaacgaacgacgccgaccccctcccgtaacgtcacgaccactaccgccgctccccgcgccgcgccgcgccgaacccgcgcccccgccaccgaaaccgcgcgtccgaccccgcgcccctattaaccgcgcccgcgcgaacgaaaaacgccgacgtaccaaaaaaccaataaacgcaacgctcgtaaacccgtcaacgaactcgactcgaactccgctactcttttaaaaacccgcacatccctaaacccgcaaccctaaaccgaactccgaatccaataatcccgatatccacaatcacgaatacgaaacaaaaaaaaaaaaaaaaaaaaatcaaaaaaaaaccaaaaaaaaaaaa

SEQ ID NO: 38349 - DNA, 613 bp, Artificial Sequence
  chemically treated genomic DNA (Homo sapiens) CpG-island No: 38349
  unsure (73..74, 76..77, 79..80, 107..108, 110, 140..141, 143, 579)
gtgtggttagcgtgttttcggtagttttttagagcgcggattttgggtttataacgtggagtgtggttagcgnnnnnnnngtagttttttagagcgcggattttggnntnataacgtggagtgtggttagcgcggttttnnnnagttttttagagcgcggattttgggtttataacgtggagtgtggttagcgaggtttcggtagttttttagagcgcggattttgggtttataacgtggagtgtggttagcgaggtttcggtagttttttagagcgcggattttgggtttataacgtggagtgtggttagtgtgttttcggtagttttttagagcgcggattttgggtttataacgtggagtgtggttagcgaggtttcggtagttttttagagcgcggattttgggtttataacgtggagtgtggttagcgaggtttcggtagttttttagagcgcggattttgggtttataacgtggagtgtggttagtgtgttttcggtagttttttagagcgcggattttgggtttataacgtggagtgtggttagcgaggtttcggtagttttttagagcgtngattttgggtttataacgtggagtgtggttagtg

SEQ ID NO: 38350 - DNA, 613 bp, Artificial Sequence
  chemically treated genomic DNA (Homo sapiens) CpG-island No: 38350
  unsure (35, 471..472, 474, 504, 506..507, 534..535, 537..538, 540..)
cactaaccacactccacgttataaacccaaaatcnacgctctaaaaaactaccgaaacctcgctaaccacactccacgttataaacccaaaatccgcgctctaaaaaactaccgaaaacacactaaccacactccacgttataaacccaaaatccgcgctctaaaaaactaccgaaacctcgctaaccacactccacgttataaacccaaaatccgcgctctaaaaaactaccgaaacctcgctaaccacactccacgttataaacccaaaatccgcgctctaaaaaactaccgaaaacacactaaccacactccacgttataaacccaaaatccgcgctctaaaaaactaccgaaacctcgctaaccacactccacgttataaacccaaaatccgcgctctaaaaaactaccgaaacctcgctaaccacactccacgttataaacccaaaatccgcgctctaaaaaactnnnnaaaaccgcgctaaccacactccacgttatnannccaaaatccgcgctctaaaaaactacnnnnnnnncgctaaccacactccacgttataaacccaaaatccgcgctctaaaaaactaccgaaaacacgctaaccacac

SEQ ID NO: 38351 - DNA, 613 bp, Artificial Sequence
  chemically treated genomic DNA (Homo sapiens) CpG-island No: 38351
  unsure (35, 471..472, 474, 504, 506..507, 534..535, 537..538, 540..)
tattgattatattttacgttatgggtttagagttngcgttttgaggagttgtcggggtttcgttgattatattttacgttatgggtttagagttcgcgttttgagaagttgtcggggatatattgattatattttacgttatgggtttagagttcgcgttttgaggagttgtcggggtttcgttgattatattttacgttatgggtttagagttcgcgttttgaggagttgtcggggtttcgttgattatattttacgttatgggtttagagttcgcgttttgagaagttgtcggggatatattgattatattttacgttatgggtttagagttcgcgttttgaggagttgtcggggtttcgttgattatattttacgttatgggtttagagttcgcgttttgaggagttgtcggggtttcgttgattatattttacgttatgggtttagagttcgcgttttgaggagttnnnnggggtcgcgttgattatattttacgttatngnnttagagttcgcgttttgaggagttgtnnnnnnnncgttgattatattttacgttatgggtttagagttcgcgttttgaggagttgtcggggatacgttgattatat

SEQ ID NO: 38352 - DNA, 613 bp, Artificial Sequence
  chemically treated genomic DNA (Homo sapiens) CpG-island No: 38352
  unsure (73..74, 76..77, 79..80, 107..108, 110, 140..141, 143, 579)
atataatcaacgtatccccgacaactcctcaaaacgcgaactctaaacccataacgtaaaatataatcaacgnnnnnnnnacaactcctcaaaacgcgaactctaanncnataacgtaaaatataatcaacgcgaccccnnnnaactcctcaaaacgcgaactctaaacccataacgtaaaatataatcaacgaaaccccgacaactcctcaaaacgcgaactctaaacccataacgtaaaatataatcaacgaaaccccgacaactcctcaaaacgcgaactctaaacccataacgtaaaatataatcaatatatccccgacaacttctcaaaacgcgaactctaaacccataacgtaaaatataatcaacgaaaccccgacaactcctcaaaacgcgaactctaaacccataacgtaaaatataatcaacgaaaccccgacaactcctcaaaacgcgaactctaaacccataacgtaaaatataatcaatatatccccgacaacttctcaaaacgcgaactctaaacccataacgtaaaatataatcaacgaaaccccgacaactcctcaaaacgcnaactctaaacccataacgtaaaatataatcaata

SEQ ID NO: 38353 - DNA, 1324 bp, Artificial Sequence
  chemically treated genomic DNA (Homo sapiens) CpG-island No: 38353
tttcgcgtttattggttggggtttttcgtttttgggcggagtggtgagggtcggttttcgtttttttgtttatggagcgcgtagttgttgcgtttttcgagcgttggggttgtttttaaagttttttatttagttttttaggttaattggggtttcgttttattttcgttttttttttcgtacgtttttcgtgtggtacggtttatattattagagtggcggcgcgtgtgggcgttcgtcgcgttttttcgttcgttttcgtcgggtcgtattttttatttcgagggtgtatttggtacggttcgcgtcgtttttttttttcgttcgggtggttatttttttttttttagtcggcggcgtttggtgtcgttcgggagaattaggttatcggtcggttttcgtgaaaataaaaataatcggtcgcgtcgtcgtaggtattcgaacgtcgcgagcggggtttggggacgcggagtcgagtgtagcgagcgaacgggagtagcggcgattcgtcggggggttagggcgttatggggtaggcgggtttcggttgcgcggggttttttcggcgtcgcggttagtgcgttcgtcgtttcggtcgttttagtttttcgcgtcgttcgtttggggaacgaggagtaggacgcggtttcggtggggttcgggtcgaacggttgcggatatttgggcgtcgaggagtcgagcgtcgtcgttttcggtatggattagtgcgtgacggtggagcgcgagttggagaaggtgttgtataagtttttaggttacgggtagttgtgtaagcgcggtttggaggagtttatcgattatatcggcggttttaagtacgagattttgtagagttacggtagggcgattcgcgtggtatcggggtaatgtgtaattgttcgagtttcggtttcggttcgcggcgggaattttttatttaatttttcgcgttttggttcggtttttgttttttttgaggcgcggaggtttttagatttttgagattttttttttttttcgttcgatttatttcgaatttgtcgcgatttcgttgttaatttagaaggagcgcgaattattcggaaatttagtcgggagcggcgggttttagttcggataaacgtgggtgagggggtcgtttatcgtatttgtaaattgtcgattttcgagtgggcgtttttcgtttttcgtttttagtcggtttcgggagttttacgtggtgttcgcggcgttgttttgtgggcggtgattgaatcgtttgggattttaggttttgagtgatgagggtagtgtaggaagtttcgttttttttttgtgtcgtttt

SEQ ID NO: 38354 - DNA, 1324 bp, Artificial Sequence
  chemically treated genomic DNA (Homo sapiens) CpG-island No: 38354
aaaacgacacaaaaaaaaaacgaaacttcctacactaccctcatcactcaaaacctaaaatcccaaacgattcaatcaccgcccacaaaacaacgccgcgaacaccacgtaaaactcccgaaaccgactaaaaacgaaaaacgaaaaacgcccactcgaaaatcgacaatttacaaatacgataaacgaccccctcacccacgtttatccgaactaaaacccgccgctcccgactaaatttccgaataattcgcgctccttctaaattaacaacgaaatcgcgacaaattcgaaataaatcgaacgaaaaaaaaaaaaaatctcaaaaatctaaaaacctccgcgcctcaaaaaaaacaaaaaccgaaccaaaacgcgaaaaattaaataaaaaattcccgccgcgaaccgaaaccgaaactcgaacaattacacattaccccgataccacgcgaatcgccctaccgtaactctacaaaatctcgtacttaaaaccgccgatataatcgataaactcctccaaaccgcgcttacacaactacccgtaacctaaaaacttatacaacaccttctccaactcgcgctccaccgtcacgcactaatccataccgaaaacgacgacgctcgactcctcgacgcccaaatatccgcaaccgttcgacccgaaccccaccgaaaccgcgtcctactcctcgttccccaaacgaacgacgcgaaaaactaaaacgaccgaaacgacgaacgcactaaccgcgacgccgaaaaaaccccgcgcaaccgaaacccgcctaccccataacgccctaaccccccgacgaatcgccgctactcccgttcgctcgctacactcgactccgcgtccccaaaccccgctcgcgacgttcgaatacctacgacgacgcgaccgattatttttattttcacgaaaaccgaccgataacctaattctcccgaacgacaccaaacgccgccgactaaaaaaaaaaaaataaccacccgaacgaaaaaaaaaaacgacgcgaaccgtaccaaatacaccctcgaaataaaaaatacgacccgacgaaaacgaacgaaaaaacgcgacgaacgcccacacgcgccgccactctaataatataaaccgtaccacacgaaaaacgtacgaaaaaaaaaacgaaaataaaacgaaaccccaattaacctaaaaaactaaataaaaaactttaaaaacaaccccaacgctcgaaaaacgcaacaactacgcgctccataaacaaaaaaacgaaaaccgaccctcaccactccgcccaaaaacgaaaaaccccaaccaataaacgcgaaa

SEQ ID NO: 38355 - DNA, 1324 bp, Artificial Sequence
  chemically treated genomic DNA (Homo sapiens) CpG-island No: 38355
ggggcggtatagaggggaaacggagttttttgtattgtttttattatttagaatttggggttttaggcgatttagttatcgtttatagaatagcgtcgcgggtattacgtgagattttcggggtcggttgggagcgggggacgaggggcgtttattcgggggtcggtagtttgtaggtgcgatgggcggtttttttatttacgtttattcggattggagttcgtcgttttcggttgggttttcgggtggttcgcgttttttttgaattggtagcgaggtcgcggtaggttcgaggtaaatcggacgaagaggggaaaaagttttaggggtttgggggttttcgcgttttaggggaggtaagggtcgggttagagcgcgaagggttgggtgagggattttcgtcgcgggtcgggatcggggttcgggtagttgtatattgtttcggtgttacgcgggtcgttttatcgtggttttgtaggatttcgtgtttgaggtcgtcggtgtagtcgatgagtttttttaggtcgcgtttgtatagttgttcgtagtttgagaatttgtgtagtattttttttagttcgcgttttatcgttacgtattgatttatgtcggaggcggcggcgttcggtttttcggcgtttaggtgttcgtagtcgttcggttcgggttttatcgaggtcgcgttttgtttttcgttttttaagcgggcggcgcgggaggttgaggcggtcgaggcggcgggcgtattagtcgcggcgtcgggggagtttcgcgtagtcggagttcgtttgttttatggcgttttagtttttcggcgagtcgtcgttgttttcgttcgttcgttgtattcggtttcgcgtttttaggtttcgttcgcgacgttcgggtgtttgcgacggcgcggtcgattgtttttgtttttacgggaatcgatcgatgatttggttttttcgggcggtattaagcgtcgtcgattggggggagggggatggttattcgggcgaggaaaggaggcggcgcgggtcgtattaagtatattttcggggtggggggtgcgattcggcgagaacgggcggaggaacgcgacgggcgtttatacgcgtcgttattttaatggtgtgggtcgtattatacggaaggcgtgcgagggagagggcgagggtggagcgaggttttaattggtttgaggagttaaatagggaattttggagatagttttagcgttcggagagcgtaataattacgcgttttataaataaggaggcggaaatcggtttttattatttcgtttagaagcggggaattttaattaatgggcgcgggg

SEQ ID NO: 38356 - DNA, 1324 bp, Artificial Sequence
  chemically treated genomic DNA (Homo sapiens) CpG-island No: 38356
ccccgcgcccattaattaaaattccccgcttctaaacgaaataataaaaaccgatttccgcctccttatttataaaacgcgtaattattacgctctccgaacgctaaaactatctccaaaattccctatttaactcctcaaaccaattaaaacctcgctccaccctcgccctctccctcgcacgccttccgtataatacgacccacaccattaaaataacgacgcgtataaacgcccgtcgcgttcctccgcccgttctcgccgaatcgcaccccccaccccgaaaatatacttaatacgacccgcgccgcctcctttcctcgcccgaataaccatccccctccccccaatcgacgacgcttaataccgcccgaaaaaaccaaatcatcgatcgattcccgtaaaaacaaaaacaatcgaccgcgccgtcgcaaacacccgaacgtcgcgaacgaaacctaaaaacgcgaaaccgaatacaacgaacgaacgaaaacaacgacgactcgccgaaaaactaaaacgccataaaacaaacgaactccgactacgcgaaactcccccgacgccgcgactaatacgcccgccgcctcgaccgcctcaacctcccgcgccgcccgcttaaaaaacgaaaaacaaaacgcgacctcgataaaacccgaaccgaacgactacgaacacctaaacgccgaaaaaccgaacgccgccgcctccgacataaatcaatacgtaacgataaaacgcgaactaaaaaaaatactacacaaattctcaaactacgaacaactatacaaacgcgacctaaaaaaactcatcgactacaccgacgacctcaaacacgaaatcctacaaaaccacgataaaacgacccgcgtaacaccgaaacaatatacaactacccgaaccccgatcccgacccgcgacgaaaatccctcacccaacccttcgcgctctaacccgacccttacctcccctaaaacgcgaaaacccccaaacccctaaaactttttcccctcttcgtccgatttacctcgaacctaccgcgacctcgctaccaattcaaaaaaaacgcgaaccacccgaaaacccaaccgaaaacgacgaactccaatccgaataaacgtaaataaaaaaaccgcccatcgcacctacaaactaccgacccccgaataaacgcccctcgtcccccgctcccaaccgaccccgaaaatctcacgtaatacccgcgacgctattctataaacgataactaaatcgcctaaaaccccaaattctaaataataaaaacaatacaaaaaactccgtttcccctctataccgcccc

SEQ ID NO: 38357 - DNA, 503 bp, Artificial Sequence
  chemically treated genomic DNA (Homo sapiens) CpG-island No: 38357
  unsure (346, 427, 450)
aggcgataatcgcgaaaaggagggtgatttttttcggcgggggtttcgggtgatattatattttttaaatgcgaaattaggtttcgggtcggtcgaaggcgtaatttttttttttcggcgttttatcggttttcgcgcgttttttttcgcgttcgagtttcgagttaagtagcgttttggggagcgcgttatggttttattagtgatcgttttgtttttgtcgttggttttgttgtttcgtgagtttgagacgttcgggaaggtaggggatggggcgggcggggggcggggggcgcggattgcgggtttagttcgttgtttgtcgtttgtagacgtcgttagcgangtttagtttcgggtgtcgtcgttggatcggatttggaatttggggcgagatagtggagttgaagtgttaggtgttgttgtntaattcgacgttcggttgttcgntgtttttttagcgcgcgcgtcgcgaagttttttatttttttttatattttttt

SEQ ID NO: 38358 - DNA, 503 bp, Artificial Sequence
  chemically treated genomic DNA (Homo sapiens) CpG-island No: 38358
  unsure (54, 77, 158)
aaaaaaatataaaaaaaaataaaaaacttcgcgacgcgcgcgctaaaaaaacancgaacaaccgaacgtcgaattanacaacaacacctaacacttcaactccactatctcgccccaaattccaaatccgatccaacgacgacacccgaaactaaacntcgctaacgacgtctacaaacgacaaacaacgaactaaacccgcaatccgcgccccccgccccccgcccgccccatcccctaccttcccgaacgtctcaaactcacgaaacaacaaaaccaacgacaaaaacaaaacgatcactaataaaaccataacgcgctccccaaaacgctacttaactcgaaactcgaacgcgaaaaaaaacgcgcgaaaaccgataaaacgccgaaaaaaaaaaattacgccttcgaccgacccgaaacctaatttcgcatttaaaaaatataatatcacccgaaacccccgccgaaaaaaatcaccctccttttcgcgattatcgcct

SEQ ID NO: 38359 - DNA, 503 bp, Artificial Sequence
  chemically treated genomic DNA (Homo sapiens) CpG-island No: 38359
  unsure (54, 77, 158)
gaagaggtatagaagaaagtgggaaatttcgcggcgcgcgcgttggaagagtancgagtagtcggacgtcgggttgnatagtagtatttggtattttagttttattgtttcgttttaggttttaggttcgatttagcggcgatattcggaattgggtntcgttggcggcgtttgtaggcggtaagtagcgagttgagttcgtagttcgcgtttttcgtttttcgttcgttttattttttgttttttcgggcgttttaaatttacggagtagtaaggttagcggtaggagtaaggcggttattggtaaggttatgacgcgttttttaggacgttgtttggttcgaagttcgggcgcgaggggaggcgcgcgggagtcggtggggcgtcgaggggggaaagttgcgttttcggtcggttcggagtttgatttcgtatttggaggatgtgatgttattcgaagttttcgtcgaggagagttattttttttttcgcggttgtcgttt

SEQ ID NO: 38360 - DNA, 503 bp, Artificial Sequence
  chemically treated genomic DNA (Homo sapiens) CpG-island No: 38360
  unsure (346, 427, 450)
aaacgacaaccgcgaaaaaaaaaataactctcctcgacgaaaacttcgaataacatcacatcctccaaatacgaaatcaaactccgaaccgaccgaaaacgcaactttcccccctcgacgccccaccgactcccgcgcgcctcccctcgcgcccgaacttcgaaccaaacaacgtcctaaaaaacgcgtcataaccttaccaataaccgccttactcctaccgctaaccttactactccgtaaatttaaaacgcccgaaaaaacaaaaaataaaacgaacgaaaaacgaaaaacgcgaactacgaactcaactcgctacttaccgcctacaaacgccgccaacganacccaattccgaatatcgccgctaaatcgaacctaaaacctaaaacgaaacaataaaactaaaataccaaatactactatncaacccgacgtccgactactcgntactcttccaacgcgcgcgccgcgaaatttcccactttcttctatacctcttc

SEQ ID NO: 38361 - DNA, 771 bp, Artificial Sequence
  chemically treated genomic DNA (Homo sapiens) CpG-island No: 38361
ggatcgttcgagcgtttttttgttttaaggaggcgatttcgatttcggatttcgggaaaacggcgagcgcgggtatcgaatttcggtaagggtcggagcgggttgttatcggttttcgtattttttttttgcggtcgcggtcggtcgttttttttttagtttgatagtcgttgtagttacggacggagcgtttttgttttagcgtcgtcgttcgttcggacgttcgtattttcgtgttttacgcggaggggggtagtgtcgggaagattttttcggatttttttttcgttttggtttttagatttcggaaaagcggttatttggcgcgcgggttggggcgagagtacgattcggtggaggaggaagagaagatagtggttttcggtttagggagatttgggaaatttgggagatttgtttcgtattaggtgatagttgttcgttgcgtacgcgtataggatttcggtcgttcgattattgcgtcgcgttttattttttcgtcgagggggtgggtgggaggtagcggcgaaggcgcgcgtatcgtcggttttttttgcgcgagggcgcgcgcgtcgttacgtgatcgttggggttcgtatttggtgagttacgtgggtttataaatagtttaaaggtgttcggtacgtttttgttttgggtttaattttcgcgttgtggttaatttaggtttgttggcgcgtatttttttgttttttggatataggtatattttatttttttcggaggggaaagatattcgcgtagaaggag

SEQ ID NO: 38362 - DNA, 771 bp, Artificial Sequence
  chemically treated genomic DNA (Homo sapiens) CpG-island No: 38362
ctccttctacgcgaatatctttcccctccgaaaaaaataaaatatacctatatccaaaaaacaaaaaaatacgcgccaacaaacctaaattaaccacaacgcgaaaattaaacccaaaacaaaaacgtaccgaacacctttaaactatttataaacccacgtaactcaccaaatacgaaccccaacgatcacgtaacgacgcgcgcgccctcgcgcaaaaaaaaccgacgatacgcgcgccttcgccgctacctcccacccaccccctcgacgaaaaaataaaacgcgacgcaataatcgaacgaccgaaatcctatacgcgtacgcaacgaacaactatcacctaatacgaaacaaatctcccaaatttcccaaatctccctaaaccgaaaaccactatcttctcttcctcctccaccgaatcgtactctcgccccaacccgcgcgccaaataaccgcttttccgaaatctaaaaaccaaaacgaaaaaaaaatccgaaaaaatcttcccgacactacccccctccgcgtaaaacacgaaaatacgaacgtccgaacgaacgacgacgctaaaacaaaaacgctccgtccgtaactacaacgactatcaaactaaaaaaaaaacgaccgaccgcgaccgcaaaaaaaaaatacgaaaaccgataacaacccgctccgacccttaccgaaattcgatacccgcgctcgccgttttcccgaaatccgaaatcgaaatcgcctccttaaaacaaaaaaacgctcgaacgatcc

SEQ ID NO: 38363 - DNA, 771 bp, Artificial Sequence
  chemically treated genomic DNA (Homo sapiens) CpG-island No: 38363
ttttttttacgcgagtatttttttttttcggaaagaatgggatatgtttgtgtttaaaggataagaagatgcgcgttagtaagtttaagttaattatagcgcggaagttgagtttaaagtaagagcgtgtcgggtatttttaagttgtttgtaagtttacgtgatttattaagtgcgggttttagcggttacgtgacggcgcgcgcgttttcgcgtagggagagtcggcggtgcgcgcgttttcgtcgttgttttttatttattttttcgacgggagggtgaggcgcggcgtagtgatcgggcggtcggggttttgtgcgcgtgcgtagcgaatagttgttatttagtgcggaataagttttttaaattttttaaatttttttgggtcggaggttattgtttttttttttttttttatcgagtcgtgttttcgttttaattcgcgcgttaggtaatcgttttttcggagtttgggggttagggcggggggagggttcggagaggttttttcggtattgttttttttcgcgtggggtacgggggtgcgggcgttcgggcgagcggcgacgttggggtagagacgtttcgttcgtgattgtagcgattgttaagttggggagggagcggtcggtcgcggtcgtaggggagggatgcgggggtcggtgatagttcgtttcggtttttatcgaggttcggtattcgcgttcgtcgttttttcgggattcggagtcggggtcgtttttttggggtagaggagcgttcgggcggttt

SEQ ID NO: 38364 - DNA, 771 bp, Artificial Sequence
  chemically treated genomic DNA (Homo sapiens) CpG-island No: 38364
aaaccgcccgaacgctcctctaccccaaaaaaacgaccccgactccgaatcccgaaaaaacgacgaacgcgaataccgaacctcgataaaaaccgaaacgaactatcaccgacccccgcatccctcccctacgaccgcgaccgaccgctccctccccaacttaacaatcgctacaatcacgaacgaaacgtctctaccccaacgtcgccgctcgcccgaacgcccgcacccccgtaccccacgcgaaaaaaaacaataccgaaaaaacctctccgaaccctccccccgccctaacccccaaactccgaaaaaacgattacctaacgcgcgaattaaaacgaaaacacgactcgataaaaaaaaaaaaaaaaacaataacctccgacccaaaaaaatttaaaaaatttaaaaaacttattccgcactaaataacaactattcgctacgcacgcgcacaaaaccccgaccgcccgatcactacgccgcgcctcaccctcccgtcgaaaaaataaataaaaaacaacgacgaaaacgcgcgcaccgccgactctccctacgcgaaaacgcgcgcgccgtcacgtaaccgctaaaacccgcacttaataaatcacgtaaacttacaaacaacttaaaaatacccgacacgctcttactttaaactcaacttccgcgctataattaacttaaacttactaacgcgcatcttcttatcctttaaacacaaacatatcccattctttccgaaaaaaaaaaatactcgcgtaaaaaaaa

SEQ ID NO: 38365 - DNA, 612 bp, Artificial Sequence
  chemically treated genomic DNA (Homo sapiens) CpG-island No: 38365
ggttttttggaagcgacgttttttgtgcgttacgtaatacgttgtaggaaaggtatattggggggtattacgtgatcgttaatcgttggggcgagtaggcgtttagaatttagcgatcgtttatggttagggagtttttagttacgtttttttttttaatattatttttcgcgttttatttaagtaagcgttattttttcgtagttttttgttttttaaagtttcggaagttttggtttttttaaggtggggaaacggaggaacggacgtgaagggagttgtgggacgcgcgatcgtggagttggattgtatcgagttttagcgcgtattcgggtttcgggagttttatcgagtcgtgacgttagaggcggggtcgagtattgggcgatttttgagttcggggtttcgcgggttcggcggttttttgtttcgtttttttgtttttgggttattttttttaagtgggaagatttaggttttgttaatcggttattcgagattttggagtaacggtcgcgtttgtttgtaaaattttttttattgtgtggtattcgttttgcgtaggtggagtttttaaatgggaatatttggacgaggttttgatgggaaacg

SEQ ID NO: 38366 - DNA, 612 bp, Artificial Sequence
  chemically treated genomic DNA (Homo sapiens) CpG-island No: 38366
cgtttcccatcaaaacctcgtccaaatattcccatttaaaaactccacctacgcaaaacgaataccacacaataaaaaaaattttacaaacaaacgcgaccgttactccaaaatctcgaataaccgattaacaaaacctaaatcttcccacttaaaaaaaataacccaaaaacaaaaaaacgaaacaaaaaaccgccgaacccgcgaaaccccgaactcaaaaatcgcccaatactcgaccccgcctctaacgtcacgactcgataaaactcccgaaacccgaatacgcgctaaaactcgatacaatccaactccacgatcgcgcgtcccacaactcccttcacgtccgttcctccgtttccccaccttaaaaaaaccaaaacttccgaaactttaaaaaacaaaaaactacgaaaaaataacgcttacttaaataaaacgcgaaaaataatattaaaaaaaaaaacgtaactaaaaactccctaaccataaacgatcgctaaattctaaacgcctactcgccccaacgattaacgatcacgtaataccccccaatatacctttcctacaacgtattacgtaacgcacaaaaaacgtcgcttccaaaaaacc

SEQ ID NO: 38367 - DNA, 612 bp, Artificial Sequence
  chemically treated genomic DNA (Homo sapiens) CpG-island No: 38367
cgttttttattagagtttcgtttaggtgtttttatttaaaggttttatttgcgtagggcgggtgttatataatgaggagagttttgtaaataaacgcggtcgttgttttaaggtttcgggtaatcgattggtaaaatttaggtttttttatttagggaagatggtttaagagtaagaaggcgaaataagaggtcgtcggattcgcgaagtttcgagtttagaggtcgtttagtgttcggtttcgtttttgacgttacggttcggtgggattttcggagttcggatgcgcgttgggattcggtgtagtttagttttacggtcgcgcgttttatagttttttttacgttcgttttttcgtttttttattttgggagggttaggattttcgaggttttagggggtaggaagttgcgagaaggtggcgtttgtttaggtgaggcgcggaggatggtattagagagaggaacgtgattggaagttttttggttatggacgatcgttgggttttaggcgtttgttcgttttagcggttgacggttacgtgatattttttagtgtattttttttgtagcgtgttacgtggcgtatagagaacgtcgtttttagaggatt

SEQ ID NO: 38368 - DNA, 612 bp, Artificial Sequence
  chemically treated genomic DNA (Homo sapiens) CpG-island No: 38368
aatcctctaaaaacgacgttctctatacgccacgtaacacgctacaaaaaaaatacactaaaaaatatcacgtaaccgtcaaccgctaaaacgaacaaacgcctaaaacccaacgatcgtccataaccaaaaaacttccaatcacgttcctctctctaataccatcctccgcgcctcacctaaacaaacgccaccttctcgcaacttcctaccccctaaaacctcgaaaatcctaaccctcccaaaataaaaaaacgaaaaaacgaacgtaaaaaaaactataaaacgcgcgaccgtaaaactaaactacaccgaatcccaacgcgcatccgaactccgaaaatcccaccgaaccgtaacgtcaaaaacgaaaccgaacactaaacgacctctaaactcgaaacttcgcgaatccgacgacctcttatttcgccttcttactcttaaaccatcttccctaaataaaaaaacctaaattttaccaatcgattacccgaaaccttaaaacaacgaccgcgtttatttacaaaactctcctcattatataacacccgccctacgcaaataaaacctttaaataaaaacacctaaacgaaactctaataaaaaacg

SEQ ID NO: 38369 - DNA, 898 bp, Artificial Sequence
  chemically treated genomic DNA (Homo sapiens) CpG-island No: 38369
acgcgaatttcgcgggtcggcgtggttttggtcgggtagggggcggggcgagcgtcggtgacgcggtcgttgttatgggaattcgtcgttcgttcgttttttggagttggagtcggagttgtcgttagtcgttcgttttaggttttttttgttagtcgtgcggttaggttcgcggggtggtcggggggagtcgggcggtagagaaggagggagcgggtacggttttttagtcgagatcggtaagtcgaagtttttgagtcgttcgttgtcgttgtcgtcgtcgtcgtcgcgatcgcgagggataaggataagcgtcgagtagcgtttgtttaattttcggaacgcgtattcgttttaacgtttagatacggatcgtgcgggtcgttttcgttttagcgtcgttttattttagttcggttcgcgttttggacgttttcgtatttttggtcggtttcggtttagtttcggtagttttttttcgttttcgtcgtagttttcgtcgtagtcgtagttttcgttatagtcgtcgtttttattttcggttttatttcgttcgcgatttttgtcggggtttcgatttcggttttattttcggtttcgttcgcggttttattaattttcgtttcggtttcgtattcggaggtttagtcgtgggtacgatgttgtttagttttatttagatttcgggggagtcgttgttcggcgtcgaggtgcgggatatttgtcgcggttttcgcgataacgtcgtgcgtttgtttttattgcgcggttgtcgtttttgcgatcgcgattttggtcgtatttgtcgggttttggtcggggttacgtttttggcgtagtttaattttaatttgggcgtcgtgtttagttttagtcgtattaagtagttggttgaggt

SEQ ID NO: 38370 - DNA, 898 bp, Artificial Sequence
  chemically treated genomic DNA (Homo sapiens) CpG-island No: 38370
acctcaaccaactacttaatacgactaaaactaaacacgacgcccaaattaaaattaaactacgccaaaaacgtaaccccgaccaaaacccgacaaatacgaccaaaatcgcgatcgcaaaaacgacaaccgcgcaataaaaacaaacgcacgacgttatcgcgaaaaccgcgacaaatatcccgcacctcgacgccgaacaacgactcccccgaaatctaaataaaactaaacaacatcgtacccacgactaaacctccgaatacgaaaccgaaacgaaaattaataaaaccgcgaacgaaaccgaaaataaaaccgaaatcgaaaccccgacaaaaatcgcgaacgaaataaaaccgaaaataaaaacgacgactataacgaaaactacgactacgacgaaaactacgacgaaaacgaaaaaaaactaccgaaactaaaccgaaaccgaccaaaaatacgaaaacgtccaaaacgcgaaccgaactaaaataaaacgacgctaaaacgaaaacgacccgcacgatccgtatctaaacgttaaaacgaatacgcgttccgaaaattaaacaaacgctactcgacgcttatccttatccctcgcgatcgcgacgacgacgacgacaacgacaacgaacgactcaaaaacttcgacttaccgatctcgactaaaaaaccgtacccgctccctccttctctaccgcccgactccccccgaccaccccgcgaacctaaccgcacgactaacaaaaaaaacctaaaacgaacgactaacgacaactccgactccaactccaaaaaacgaacgaacgacgaattcccataacaacgaccgcgtcaccgacgctcgccccgccccctacccgaccaaaaccacgccgacccgcgaaattcgcgt

SEQ ID NO: 38371 - DNA, 898 bp, Artificial Sequence
  chemically treated genomic DNA (Homo sapiens) CpG-island No: 38371
gttttagttagttgtttgatgcggttggggttggatacgacgtttaggttaaggttgagttgcgttagggacgtggtttcggttagggttcggtagatgcggttaaagtcgcggtcgtagaggcggtagtcgcgtagtgagagtaggcgtacggcgttgtcgcgaaggtcgcggtagatgtttcgtatttcggcgtcggatagcggttttttcgaaatttggatggagttgggtagtatcgtgtttacggttgggttttcgggtacggggtcggaacggaggttggtggggtcgcgggcggggtcggggatagggtcggggtcggggtttcggtaggggtcgcgggcggagtggggtcgggggtggaggcggcggttgtggcggaggttgcggttgcggcggaggttgcggcgggggcggagaagagttatcgggattgagtcggagtcggttagaggtgcggaggcgtttagggcgcgggtcgggttgaagtggggcggcgttggggcgggggcggttcgtacggttcgtgtttgggcgttggggcgggtgcgcgtttcgggggttgggtaggcgttgttcggcgtttgtttttgtttttcgcggtcgcggcggcggcggcggtagcggtagcgagcggtttaagggtttcggtttatcggtttcggttaggaggtcgtattcgttttttttttttttgtcgttcggtttttttcgattatttcgcgggtttggtcgtacggttggtagagagagtttgaggcgggcggttggcggtagtttcggttttagttttagagagcgagcgggcggcgagtttttatggtaacggtcgcgttatcggcgttcgtttcgttttttgttcggttaaggttacgtcggttcgcgaggttcgcgt

SEQ ID NO: 38372 - DNA, 898 bp, Artificial Sequence
  chemically treated genomic DNA (Homo sapiens) CpG-island No: 38372
acgcgaacctcgcgaaccgacgtaaccttaaccgaacaaaaaacgaaacgaacgccgataacgcgaccgttaccataaaaactcgccgcccgctcgctctctaaaactaaaaccgaaactaccgccaaccgcccgcctcaaactctctctaccaaccgtacgaccaaacccgcgaaataatcgaaaaaaaccgaacgacaaaaaaaaaaaaaacgaatacgacctcctaaccgaaaccgataaaccgaaacccttaaaccgctcgctaccgctaccgccgccgccgccgcgaccgcgaaaaacaaaaacaaacgccgaacaacgcctacccaacccccgaaacgcgcacccgccccaacgcccaaacacgaaccgtacgaaccgcccccgccccaacgccgccccacttcaacccgacccgcgccctaaacgcctccgcacctctaaccgactccgactcaatcccgataactcttctccgcccccgccgcaacctccgccgcaaccgcaacctccgccacaaccgccgcctccacccccgaccccactccgcccgcgacccctaccgaaaccccgaccccgaccctatccccgaccccgcccgcgaccccaccaacctccgttccgaccccgtacccgaaaacccaaccgtaaacacgatactacccaactccatccaaatttcgaaaaaaccgctatccgacgccgaaatacgaaacatctaccgcgaccttcgcgacaacgccgtacgcctactctcactacgcgactaccgcctctacgaccgcgactttaaccgcatctaccgaaccctaaccgaaaccacgtccctaacgcaactcaaccttaacctaaacgtcgtatccaaccccaaccgcatcaaacaactaactaaaac

SEQ ID NO: 38373 - DNA, 602 bp, Artificial Sequence
  chemically treated genomic DNA (Homo sapiens) CpG-island No: 38373
gagcggcggagaagcgagtgaggagggcgagcgcgaagtcgggaagaggggcgcgcgtggagggggtgtcgggcgtcgcgagggtttgtttcgggtatttgcgaacgcgcggcgtttttaaggagcgtttggttttcgttcgttagttttcggtcgcgacgcgtttagggcgcggagagggggtggggacggattgggattttgttatcgtttttatcggttgggttttggagtcgtttttaggataattttacgttggggagggcgttcgtcgagttttttcggtttgtgtagacggcgcgcgcggcgggagggcgcggattagcgtttttagttcggtttcgggcggaaggcgagcggagcgcggtcgcgcgggtagtagacggtagacggtgttcggcgtttacggggtgagtgtgtagtttcggggttgatttgggtagcgtcgtcgtcgtcggggaatcgtggatatcgaggtcgttggcgtggtcgaggcgtacgcggcgggagcggtcggagtagtcgttttagggtttttggtttttgtttcggtatcgtagtttcgtttgattcgggtgggggttagaggagggtcggtcgtt

SEQ ID NO: 38374 - DNA, 602 bp, Artificial Sequence
  chemically treated genomic DNA (Homo sapiens) CpG-island No: 38374
aacgaccgaccctcctctaacccccacccgaatcaaacgaaactacgataccgaaacaaaaaccaaaaaccctaaaacgactactccgaccgctcccgccgcgtacgcctcgaccacgccaacgacctcgatatccacgattccccgacgacgacgacgctacccaaatcaaccccgaaactacacactcaccccgtaaacgccgaacaccgtctaccgtctactacccgcgcgaccgcgctccgctcgccttccgcccgaaaccgaactaaaaacgctaatccgcgccctcccgccgcgcgcgccgtctacacaaaccgaaaaaactcgacgaacgccctccccaacgtaaaattatcctaaaaacgactccaaaacccaaccgataaaaacgataacaaaatcccaatccgtccccaccccctctccgcgccctaaacgcgtcgcgaccgaaaactaacgaacgaaaaccaaacgctccttaaaaacgccgcgcgttcgcaaatacccgaaacaaaccctcgcgacgcccgacaccccctccacgcgcgcccctcttcccgacttcgcgctcgccctcctcactcgcttctccgccgctc

SEQ ID NO: 38375 - DNA, 602 bp, Artificial Sequence
  chemically treated genomic DNA (Homo sapiens) CpG-island No: 38375
agcggtcggtttttttttggtttttattcgggttaggcggagttgcggtgtcggggtaggagttaggagttttgaggcggttgtttcggtcgttttcgtcgcgtacgtttcggttacgttagcgatttcggtgtttacgatttttcggcggcggcggcgttgtttaggttagtttcgaagttgtatatttatttcgtgggcgtcgggtatcgtttgtcgtttgttgttcgcgcggtcgcgtttcgttcgtttttcgttcggggtcgggttggggacgttggttcgcgttttttcgtcgcgcgcgtcgtttgtataggtcggggaggttcggcgggcgttttttttaacgtggagttattttgggagcggttttagggtttagtcggtgagggcgatggtagaattttaattcgtttttatttttttttcgcgttttgggcgcgtcgcggtcggaggttggcgggcgagagttaggcgttttttgagagcgtcgcgcgttcgtaggtgttcggagtaggttttcgcggcgttcggtattttttttacgcgcgttttttttttcggtttcgcgttcgttttttttattcgttttttcgtcgttt

SEQ ID NO: 38376 - DNA, 602 bp, Artificial Sequence
  chemically treated genomic DNA (Homo sapiens) CpG-island No: 38376
aaacgacgaaaaaacgaataaaaaaaacgaacgcgaaaccgaaaaaaaaaacgcgcgtaaaaaaaataccgaacgccgcgaaaacctactccgaacacctacgaacgcgcgacgctctcaaaaaacgcctaactctcgcccgccaacctccgaccgcgacgcgcccaaaacgcgaaaaaaaaataaaaacgaattaaaattctaccatcgccctcaccgactaaaccctaaaaccgctcccaaaataactccacgttaaaaaaaacgcccgccgaacctccccgacctatacaaacgacgcgcgcgacgaaaaaacgcgaaccaacgtccccaacccgaccccgaacgaaaaacgaacgaaacgcgaccgcgcgaacaacaaacgacaaacgatacccgacgcccacgaaataaatatacaacttcgaaactaacctaaacaacgccgccgccgccgaaaaatcgtaaacaccgaaatcgctaacgtaaccgaaacgtacgcgacgaaaacgaccgaaacaaccgcctcaaaactcctaactcctaccccgacaccgcaactccgcctaacccgaataaaaaccaaaaaaaaaccgaccgct

SEQ ID NO: 38377 - DNA, 624 bp, Artificial Sequence
  chemically treated genomic DNA (Homo sapiens) CpG-island No: 38377
tacgcgcgcgcgcgcgcgtatatatatatatacgtatattaaaaaattcggattagtcgcgtcgtagttgttttaatttttggaaaaggtaatcgagcgtttttcggatcgttgcgtatagtttcggtttcgatttggcgtttaaaatagagttagttttagtttttcgcgcggttagtttggtcgggtgtttttaaaaataaagcgaggagggaaggtatagatagattttgaaaatattcgggttatatacgtcgcgatttatagtttttttttagcgttggagtggagacggcgttcgtagcgttttgcgcgggtgaggttcgcgtagttgttggggaagagtttttttgttaggttgcgttgggttagcgtagtaagtggggttggtcgttatttcgttgtattcggtcgcgtttcgggtttcgtgcgttttcgttttagttggtttggagtttaattttcggtttcgtcgtcggttttttgcgttttcggagtgtttcgtagcgacgtcgggagtcgacgcgtcgcgcgggtatttagttatggttggggcgagtaggttgttttttttgtggttgggttgtttttgcgtgagtttggcgtagggagagagatcgaagt

SEQ ID NO: 38378 - DNA, 624 bp, Artificial Sequence
  chemically treated genomic DNA (Homo sapiens) CpG-island No: 38378
acttcgatctctctccctacgccaaactcacgcaaaaacaacccaaccacaaaaaaaacaacctactcgccccaaccataactaaatacccgcgcgacgcgtcgactcccgacgtcgctacgaaacactccgaaaacgcaaaaaaccgacgacgaaaccgaaaattaaactccaaaccaactaaaacgaaaacgcacgaaacccgaaacgcgaccgaatacaacgaaataacgaccaaccccacttactacgctaacccaacgcaacctaacaaaaaaactcttccccaacaactacgcgaacctcacccgcgcaaaacgctacgaacgccgtctccactccaacgctaaaaaaaaactataaatcgcgacgtatataacccgaatattttcaaaatctatctataccttccctcctcgctttatttttaaaaacacccgaccaaactaaccgcgcgaaaaactaaaactaactctattttaaacgccaaatcgaaaccgaaactatacgcaacgatccgaaaaacgctcgattaccttttccaaaaattaaaacaactacgacgcgactaatccgaattttttaatatacgtatatatatatatacgcgcgcgcgcgcgcgta

SEQ ID NO: 38379 - DNA, 624 bp, Artificial Sequence
  chemically treated genomic DNA (Homo sapiens) CpG-island No: 38379
gtttcggtttttttttttgcgttaggtttacgtagaagtagtttagttatagaaagagtagtttgttcgttttagttatggttaggtattcgcgcggcgcgtcggttttcggcgtcgttgcgggatatttcgaaggcgtaaggagtcggcggcggagtcgagggttgaattttaaattagttggggcgagggcgtacggagttcgggacgcggtcgggtgtagcgagatagcggttagttttatttgttgcgttgatttagcgtagtttgataggggggtttttttttagtagttgcgcggattttattcgcgtagggcgttgcgggcgtcgtttttattttaacgttgagaaagagttgtaggtcgcggcgtgtgtggttcgggtgtttttaagatttgtttgtatttttttttttcgttttatttttgggaatattcggttaaattggtcgcgcgagggattaggattagttttgttttgggcgttaggtcggagtcggggttgtgcgtagcggttcggagggcgttcgattgttttttttagggattggagtagttgcggcgcggttggttcgagttttttagtgtacgtgtgtgtgtgtgtgcgcgcgcgcgcgcgcgtg

SEQ ID NO: 38380 - DNA, 624 bp, Artificial Sequence
  chemically treated genomic DNA (Homo sapiens) CpG-island No: 38380
cacgcgcgcgcgcgcgcgcacacacacacacacgtacactaaaaaactcgaaccaaccgcgccgcaactactccaatccctaaaaaaaacaatcgaacgccctccgaaccgctacgcacaaccccgactccgacctaacgcccaaaacaaaactaatcctaatccctcgcgcgaccaatttaaccgaatattcccaaaaataaaacgaaaaaaaaaaatacaaacaaatcttaaaaacacccgaaccacacacgccgcgacctacaactctttctcaacgttaaaataaaaacgacgcccgcaacgccctacgcgaataaaatccgcgcaactactaaaaaaaaacccccctatcaaactacgctaaatcaacgcaacaaataaaactaaccgctatctcgctacacccgaccgcgtcccgaactccgtacgccctcgccccaactaatttaaaattcaaccctcgactccgccgccgactccttacgccttcgaaatatcccgcaacgacgccgaaaaccgacgcgccgcgcgaatacctaaccataactaaaacgaacaaactactctttctataactaaactacttctacgtaaacctaacgcaaaaaaaaaaaccgaaac

SEQ ID NO: 38381 - DNA, 609 bp, Artificial Sequence
  chemically treated genomic DNA (Homo sapiens) CpG-island No: 38381
cgggtgtcgcgagtaatgtaattggcgaagattatcgattttatgttggtttttttcgattcgtttttttttattagtagtatttttttttttatggttgtatttggtattattcgtcggggtatcgcggattgggtttgagggcgcggtttatacgtagcgtcgagggaggggtcgggggttgtcggggattcgtaggtcgcgtttcgtttcgtttcgtcgcgtagttgggtaggtaggagagtcgagagcgcgaattcggggttggagaggtcgcggacgggttggtttttatttagatgggagcgttcgcggttgttagtggtaacggttcgggagatacgttcgtttttcgggagggagtcgttgcgttttcgttattatttattttcggcggcgatttcgcgagagttttttcgtttcgtttttcgtgttcgacgagttttgaaaagtcgttgttttaatgaaatttaatcggggcggcgtgagttttaagatggaagggaagttcgaggatttcggttttttgttttgttgtagttgggtttgttgttgttaggggtacgtgtgtggttggtcgggggaaatgttgttttttcgtggttaaaa

SEQ ID NO: 38382 - DNA, 609 bp, Artificial Sequence
  chemically treated genomic DNA (Homo sapiens) CpG-island No: 38382
ttttaaccacgaaaaaacaacatttcccccgaccaaccacacacgtacccctaacaacaacaaacccaactacaacaaaacaaaaaaccgaaatcctcgaacttcccttccatcttaaaactcacgccgccccgattaaatttcattaaaacaacgacttttcaaaactcgtcgaacacgaaaaacgaaacgaaaaaactctcgcgaaatcgccgccgaaaataaataataacgaaaacgcaacgactccctcccgaaaaacgaacgtatctcccgaaccgttaccactaacaaccgcgaacgctcccatctaaataaaaaccaacccgtccgcgacctctccaaccccgaattcgcgctctcgactctcctacctacccaactacgcgacgaaacgaaacgaaacgcgacctacgaatccccgacaacccccgacccctccctcgacgctacgtataaaccgcgccctcaaacccaatccgcgataccccgacgaataataccaaatacaaccataaaaaaaaaaatactactaataaaaaaaaacgaatcgaaaaaaaccaacataaaatcgataatcttcgccaattacattactcgcgacacccg

SEQ ID NO: 38383 - DNA, 609 bp, Artificial Sequence
  chemically treated genomic DNA (Homo sapiens) CpG-island No: 38383
ttttggttacgagagggtagtatttttttcggttaattatatacgtatttttagtaatagtaaatttagttgtaatagaataaaagatcgaagttttcgagttttttttttattttagggtttacgtcgtttcggttaggttttattagagtagcggttttttaaggttcgtcgggtacggagggcggagcgagggagttttcgcgagatcgtcgtcggaagtgggtggtggcggggacgtagcggttttttttcggaaagcgagcgtatttttcgagtcgttgttattgatagtcgcgggcgtttttatttgagtaagagttagttcgttcgcggtttttttagtttcgggttcgcgttttcgatttttttgtttgtttagttgcgcggcggagcggagcgaggcgcggtttgcgagttttcggtagttttcgatttttttttcggcgttgcgtgtaggtcgcgtttttaggtttagttcgcggtgtttcggcgggtgatgttaaatatagttatgaagaaaaaggtgttgttgatggggaagagcgggtcggggaagattagtatgaggtcgataattttcgttaattatattgttcgcgatattcg

SEQ ID NO: 38384 - DNA, 609 bp, Artificial Sequence
  chemically treated genomic DNA (Homo sapiens) CpG-island No: 38384
cgaatatcgcgaacaatataattaacgaaaattatcgacctcatactaatcttccccgacccgctcttccccatcaacaacacctttttcttcataactatatttaacatcacccgccgaaacaccgcgaactaaacctaaaaacgcgacctacacgcaacgccgaaaaaaaaatcgaaaactaccgaaaactcgcaaaccgcgcctcgctccgctccgccgcgcaactaaacaaacaaaaaaatcgaaaacgcgaacccgaaactaaaaaaaccgcgaacgaactaactcttactcaaataaaaacgcccgcgactatcaataacaacgactcgaaaaatacgctcgctttccgaaaaaaaaccgctacgtccccgccaccacccacttccgacgacgatctcgcgaaaactccctcgctccgccctccgtacccgacgaaccttaaaaaaccgctactctaataaaacctaaccgaaacgacgtaaaccctaaaataaaaaaaaaactcgaaaacttcgatcttttattctattacaactaaatttactattactaaaaatacgtatataattaaccgaaaaaaatactaccctctcgtaaccaaaa

SEQ ID NO: 38385 - DNA, 956 bp, Artificial Sequence
  chemically treated genomic DNA (Homo sapiens) CpG-island No: 38385
gttacgtgattttttttttaaggaattttagttgtcggttttttagtaatcggtgcgtttcgtttagcgacgttcgcgtatttcggttggttttcgggggcggttgtggtaaggaggtgtttacggtcgcgttgtttattggttcgggttgtcgtcgtttagattcgttgttcgggcgttcgtaggcggtgttgtcggatgtttcgttttttggtcgttaggttcgtggttggttggtcgttgttgttatttttcggtcgtttttttgcggttagcgttttatttggggcgggaggaagaggggcgggattggggtttgattagtcgtcgtcgttttcgcggttgttatgattagcgggcgaggcgtttttcgtagtttcgcgtaacgttagtcgcggtcgtgcgttcgtcgtagtcgtttgcgttttagcgcggtcgcggtttttttcggttttgttagcgtcgtttgcgaggcggaggtaggatgaagatgattgtggatttcgaggagtgtttgaagattcgtttcgttttaggtaatcggtacgtcgttcggcgttatcgcggagttgttttttcggcgttgggggcgtgaaagtcgggttcgcgtattcggaggaggtttcgtcgttcgtttttttcgacggggcgagcggttgttgtcgtcgttttttattttgcgagggtattgtagtttttatcgagttttttcgaggggcgacgaagtggcggggacggggacgtcgttttttatttttttttttgttttttgtcggggcggacgtttcgaaggtcggcgtattttttttcgttgggggaaatggggtgtagtcgcgttttcgaagtttcgtttttttcgcgggcgttcgttttcgtttttttttttttttggttgtttttttttttttttttttttcgtttttttttggtttttattttttttttatttttttttt

SEQ ID NO: 38386 - DNA, 956 bp, Artificial Sequence
  chemically treated genomic DNA (Homo sapiens) CpG-island No: 38386
aaaaaaaaaataaaaaaaaaataaaaaccaaaaaaaaacgaaaaaaaaaaaaaaaaaaaaacaaccaaaaaaaaaaaaaaacgaaaacgaacgcccgcgaaaaaaacgaaacttcgaaaacgcgactacaccccatttcccccaacgaaaaaaaatacgccgaccttcgaaacgtccgccccgacaaaaaacaaaaaaaaaaataaaaaacgacgtccccgtccccgccacttcgtcgcccctcgaaaaaactcgataaaaactacaataccctcgcaaaataaaaaacgacgacaacaaccgctcgccccgtcgaaaaaaacgaacgacgaaacctcctccgaatacgcgaacccgactttcacgcccccaacgccgaaaaaacaactccgcgataacgccgaacgacgtaccgattacctaaaacgaaacgaatcttcaaacactcctcgaaatccacaatcatcttcatcctacctccgcctcgcaaacgacgctaacaaaaccgaaaaaaaccgcgaccgcgctaaaacgcaaacgactacgacgaacgcacgaccgcgactaacgttacgcgaaactacgaaaaacgcctcgcccgctaatcataacaaccgcgaaaacgacgacgactaatcaaaccccaatcccgcccctcttcctcccgccccaaataaaacgctaaccgcaaaaaaacgaccgaaaaataacaacaacgaccaaccaaccacgaacctaacgaccaaaaaacgaaacatccgacaacaccgcctacgaacgcccgaacaacgaatctaaacgacgacaacccgaaccaataaacaacgcgaccgtaaacacctccttaccacaaccgcccccgaaaaccaaccgaaatacgcgaacgtcgctaaacgaaacgcaccgattactaaaaaaccgacaactaaaattccttaaaaaaaaaatcacgtaac

SEQ ID NO: 38387 - DNA, 956 bp, Artificial Sequence
  chemically treated genomic DNA (Homo sapiens) CpG-island No: 38387
aaagagggggtggggagggggtggaaattaagaaggggcggaaggaagggggaaggaagagtagttagaggaggaagggggcgagagcgagcgttcgcgaaggggacgggatttcgggagcgcggttgtattttattttttttagcgggagagggtgcgtcggttttcggggcgttcgtttcggtagagggtaaggaaagaaatgagaggcgacgttttcgttttcgttatttcgtcgtttttcgggagggttcggtggggattgtagtgttttcgtagggtgggaaacggcggtaatagtcgttcgtttcgtcggaaggagcggacggcggggtttttttcgggtgcgcgggttcggtttttacgtttttagcgtcgggaaggtagtttcgcggtgacgtcgggcggcgtgtcggttatttgaagcggggcgagtttttagatatttttcgaaatttatagttatttttattttgttttcgtttcgtaggcggcgttggtaaagtcgaagggggtcgcggtcgcgttgggacgtagacggttacggcgggcgtacggtcgcgattagcgttgcgcggagttgcgaagggcgtttcgttcgttggttatagtagtcgcgaagacggcgacgattagttaggttttagtttcgtttttttttttttcgttttaagtagagcgttggtcgtagggaaacggtcggggagtgatagtagcggttagttagttacgaatttggcggttaaggggcggggtattcggtagtatcgtttgcgggcgttcgggtaacgggtttgagcgacggtaattcgagttaatgagtagcgcgatcgtgggtatttttttgttataatcgttttcgagggttaatcgggatgcgcgggcgtcgttaggcgggacgtatcggttgttgggaggtcggtagttgaggttttttgggaaggaagttacgtggt

SEQ ID NO: 38388 - DNA, 956 bp, Artificial Sequence
  chemically treated genomic DNA (Homo sapiens) CpG-island No: 38388
accacgtaacttccttcccaaaaaacctcaactaccgacctcccaacaaccgatacgtcccgcctaacgacgcccgcgcatcccgattaaccctcgaaaacgattataacaaaaaaatacccacgatcgcgctactcattaactcgaattaccgtcgctcaaacccgttacccgaacgcccgcaaacgatactaccgaataccccgccccttaaccgccaaattcgtaactaactaaccgctactatcactccccgaccgtttccctacgaccaacgctctacttaaaacgaaaaaaaaaaaaacgaaactaaaacctaactaatcgtcgccgtcttcgcgactactataaccaacgaacgaaacgcccttcgcaactccgcgcaacgctaatcgcgaccgtacgcccgccgtaaccgtctacgtcccaacgcgaccgcgacccccttcgactttaccaacgccgcctacgaaacgaaaacaaaataaaaataactataaatttcgaaaaatatctaaaaactcgccccgcttcaaataaccgacacgccgcccgacgtcaccgcgaaactaccttcccgacgctaaaaacgtaaaaaccgaacccgcgcacccgaaaaaaaccccgccgtccgctccttccgacgaaacgaacgactattaccgccgtttcccaccctacgaaaacactacaatccccaccgaaccctcccgaaaaacgacgaaataacgaaaacgaaaacgtcgcctctcatttctttccttaccctctaccgaaacgaacgccccgaaaaccgacgcaccctctcccgctaaaaaaaataaaatacaaccgcgctcccgaaatcccgtccccttcgcgaacgctcgctctcgcccccttcctcctctaactactcttccttcccccttccttccgccccttcttaatttccaccccctccccaccccctcttt

SEQ ID NO: 38389 - DNA, 833 bp, Artificial Sequence
  chemically treated genomic DNA (Homo sapiens) CpG-island No: 38389
ttcgagcggtattcgagtcgtatttacgtcgttcgttcgtttttggggtttgggtaggtaacgggttcggcgggaaggaggggtttttaggtcgttttttttagcgtttattttagtttttcgtcgatattttcgcggggttgttcggtcgacgttattatagaggaagtcgtagaggttttgttttttaagatttttttgatgggtcggtgcgaggtcgtcgaggtcgttattgtcgggcgtttcggttgtcggtttagggtcgttgtttggcgtggggttcgcgaagagaagggtcggtatagtagagattcgtaggtagtcgtagatttcgtttagggttaaagcggtcgtaattgttgtttcggaaacggttatcgtagcggttgttacgatataacgatttcgacgttagagttaacgtcgaacgggtggcggttattcgcgtatttttagttattgttatttgattcgcggttcgcggagagacgtcggtttagagttttagcgtaggagcgacgcgacgtcgaagttaagcggattcgttttttcgcgatatttagggaggaggcggggagagggcggggcgagaataaagtcgattttttcgtttcgtttttttcgtttcgttcgcgtgttattttcgttcggcgcggcgttgggaggcgggagttgtttttgagaattgcgggagagcgttcgggtttgttgtttttcggattcgcgcgtttttcgagtattttcgttttattattttgtgaggtcgtagtgttatttttattttttagattagtagattgagattcgaggtgacgttatttcgtagagaggtt

SEQ ID NO: 38390 - DNA, 833 bp, Artificial Sequence
  chemically treated genomic DNA (Homo sapiens) CpG-island No: 38390
aacctctctacgaaataacgtcacctcgaatctcaatctactaatctaaaaaataaaaataacactacgacctcacaaaataataaaacgaaaatactcgaaaaacgcgcgaatccgaaaaacaacaaacccgaacgctctcccgcaattctcaaaaacaactcccgcctcccaacgccgcgccgaacgaaaataacacgcgaacgaaacgaaaaaaacgaaacgaaaaaatcgactttattctcgccccgccctctccccgcctcctccctaaatatcgcgaaaaaacgaatccgcttaacttcgacgtcgcgtcgctcctacgctaaaactctaaaccgacgtctctccgcgaaccgcgaatcaaataacaataactaaaaatacgcgaataaccgccacccgttcgacgttaactctaacgtcgaaatcgttatatcgtaacaaccgctacgataaccgtttccgaaacaacaattacgaccgctttaaccctaaacgaaatctacgactacctacgaatctctactataccgacccttctcttcgcgaaccccacgccaaacaacgaccctaaaccgacaaccgaaacgcccgacaataacgacctcgacgacctcgcaccgacccatcaaaaaaatcttaaaaaacaaaacctctacgacttcctctataataacgtcgaccgaacaaccccgcgaaaatatcgacgaaaaactaaaataaacgctaaaaaaaacgacctaaaaacccctccttcccgccgaacccgttacctacccaaaccccaaaaacgaacgaacgacgtaaatacgactcgaataccgctcgaa

SEQ ID NO: 38391 - DNA, 833 bp, Artificial Sequence
  chemically treated genomic DNA (Homo sapiens) CpG-island No: 38391
aatttttttgcggagtgacgttatttcgagttttagtttgttgatttaaaaaataaaaataatattacggttttataaggtggtgggacgagggtgttcgagagacgcgcgggttcgggaagtagtaagttcgggcgttttttcgtagtttttagagatagttttcgttttttagcgtcgcgtcgggcgggggtagtacgcgggcgggacggagggggcggggcgaggaggtcggttttgttttcgtttcgtttttttttcgttttttttttagatatcgcgagagggcgggttcgtttggtttcggcgtcgcgtcgtttttgcgttggagttttaggtcggcgttttttcgcgagtcgcgggttaagtggtagtggttaagggtgcgcgagtagtcgttattcgttcggcgttggttttggcgtcggggtcgttgtgtcgtgataatcgttgcggtagtcgttttcgaggtagtagttgcggtcgttttagttttgagcgggatttgcggttgtttgcgagtttttgttgtgtcgattttttttttcgcggattttacgttaagtagcgattttgagtcgatagtcggagcgttcggtaatggcggtttcgacggtttcgtatcggtttattaaggggattttgaagaataagatttttacgattttttttatggtggcgtcggtcgaatagtttcgcgggaatgtcgacgaggagttgaggtgagcgttgggagggacggtttgggagtttttttttttcgtcgggttcgttatttatttagattttaggggcgggcgggcggcgtggatgcggttcgggtgtcgttcgag

SEQ ID NO: 38392 - DNA, 833 bp, Artificial Sequence
  chemically treated genomic DNA (Homo sapiens) CpG-island No: 38392
ctcgaacgacacccgaaccgcatccacgccgcccgcccgcccctaaaatctaaataaataacgaacccgacgaaaaaaaaaaactcccaaaccgtccctcccaacgctcacctcaactcctcgtcgacattcccgcgaaactattcgaccgacgccaccataaaaaaaatcgtaaaaatcttattcttcaaaatccccttaataaaccgatacgaaaccgtcgaaaccgccattaccgaacgctccgactatcgactcaaaatcgctacttaacgtaaaatccgcgaaaaaaaaaatcgacacaacaaaaactcgcaaacaaccgcaaatcccgctcaaaactaaaacgaccgcaactactacctcgaaaacgactaccgcaacgattatcacgacacaacgaccccgacgccaaaaccaacgccgaacgaataacgactactcgcgcacccttaaccactaccacttaacccgcgactcgcgaaaaaacgccgacctaaaactccaacgcaaaaacgacgcgacgccgaaaccaaacgaacccgccctctcgcgatatctaaaaaaaaaacgaaaaaaaaacgaaacgaaaacaaaaccgacctcctcgccccgccccctccgtcccgcccgcgtactacccccgcccgacgcgacgctaaaaaacgaaaactatctctaaaaactacgaaaaaacgcccgaacttactacttcccgaacccgcgcgtctctcgaacaccctcgtcccaccaccttataaaaccgtaatattatttttattttttaaatcaacaaactaaaactcgaaataacgtcactccgcaaaaaaatt

SEQ ID NO: 38393 - DNA, 1178 bp, Artificial Sequence
  chemically treated genomic DNA (Homo sapiens) CpG-island No: 38393
ttggcggagaaacggttatacgtttacggagttattgagaaggcgagcggaggcgtagttcgttcgttcgtcgcgggaattttaggttggggcgttgggcgcgcgaagatttagtcgtttcgtttattaagggcgcgtcggttttcggtcgtagtttttgggttggtagtcgtcgtcgcgtcgcgtttttattggtgttcggcggtgacgcggtcgagcgggtcggggttgtttggttcgggggcgggcgtggggcgcggggcgcggagcgcgaggggcgggggtcgggcgtattgttgatgaaatttggcgtcggaattcgttagttttcggcgtttatttagttcgcgtaggtaggtgtgagtagcgggttaattatttggtaggcgcgtacgcggtcgcgggttttcgttaatcgtagtttttattttttttttcgcgcgtcgcgttttcgtttcgtttcgtttcgttcggtttcgtcggtcgagcgttcgttggtttttgagcgcgttcgatagtttgtttgttcgcgattttgtcggagttttttcgtcgtcggtttggtgagtgttcggtttcgttaacgtagggggtagttttttgggttcgggttattacggagggggttttggcgtcgcgtggggtcgcggtagggcggcgcgggagtggcgagggttttcgcgtcgggaacgttgttattttttgggaagggttaggattagggtcgggcgggtttcggagtgggcgagcggggttggtgtttatgcgattgtcgtttttacggagtttattttggttttttgaaatcgcggcgtggtgtatgatgtaatatcgagtgagtaagcgtgggcgatttggcgatgttcgtttcgcgcgtttgttcggggattcgcgcgtcgttacgtacggggtggtcggggtgcgtaggcgggcggcgggtacgggggttagattgggaggtatacggagttcgtcggcggcgaggagatttttttttatatggcgcggtgtagagtatttcgtttcgttacgaggttcggggatgtgttattagtcgtgggtggggattttgttcggtcgttcggagggtggtttcgcggtaggtggtcggtttagggattttgttgttattttcgttcggtggtcgttttgatttagggcgtttggtttttcgtttg

SEQ ID NO: 38394 - DNA, 1178 bp, Artificial Sequence
  chemically treated genomic DNA (Homo sapiens) CpG-island No: 38394
caaacgaaaaaccaaacgccctaaatcaaaacgaccaccgaacgaaaataacaacaaaatccctaaaccgaccacctaccgcgaaaccaccctccgaacgaccgaacaaaatccccacccacgactaataacacatccccgaacctcgtaacgaaacgaaatactctacaccgcgccatataaaaaaaaatctcctcgccgccgacgaactccgtatacctcccaatctaacccccgtacccgccgcccgcctacgcaccccgaccaccccgtacgtaacgacgcgcgaatccccgaacaaacgcgcgaaacgaacatcgccaaatcgcccacgcttactcactcgatattacatcatacaccacgccgcgatttcaaaaaaccaaaataaactccgtaaaaacgacaatcgcataaacaccaaccccgctcgcccactccgaaacccgcccgaccctaatcctaacccttcccaaaaaataacaacgttcccgacgcgaaaaccctcgccactcccgcgccgccctaccgcgaccccacgcgacgccaaaaccccctccgtaataacccgaacccaaaaaactaccccctacgttaacgaaaccgaacactcaccaaaccgacgacgaaaaaactccgacaaaatcgcgaacaaacaaactatcgaacgcgctcaaaaaccaacgaacgctcgaccgacgaaaccgaacgaaacgaaacgaaacgaaaacgcgacgcgcgaaaaaaaaaataaaaactacgattaacgaaaacccgcgaccgcgtacgcgcctaccaaataattaacccgctactcacacctacctacgcgaactaaataaacgccgaaaactaacgaattccgacgccaaatttcatcaacaatacgcccgacccccgcccctcgcgctccgcgccccgcgccccacgcccgcccccgaaccaaacaaccccgacccgctcgaccgcgtcaccgccgaacaccaataaaaacgcgacgcgacgacgactaccaacccaaaaactacgaccgaaaaccgacgcgcccttaataaacgaaacgactaaatcttcgcgcgcccaacgccccaacctaaaattcccgcgacgaacgaacgaactacgcctccgctcgccttctcaataactccgtaaacgtataaccgtttctccgccaa

SEQ ID NO: 38395 - DNA, 1178 bp, Artificial Sequence
  chemically treated genomic DNA (Homo sapiens) CpG-island No: 38395
taagcggagagttaggcgttttaggttagggcggttatcgggcggggatggtagtagagtttttgggtcggttatttgtcgcgggattatttttcgggcggtcgggtagagtttttatttacggttgatgatatattttcggatttcgtggcggggcggggtgttttgtatcgcgttatgtaagggaaggttttttcgtcgtcggcgggtttcgtgtgttttttagtttggttttcgtgttcgtcgttcgtttacgtatttcgattatttcgtgcgtagcggcgcgcgggttttcggataggcgcgcggagcgggtatcgttagatcgtttacgtttatttattcggtgttgtattatgtattacgtcgcggttttagggagttaaaatggatttcgtggaggcgatagtcgtatgggtattagtttcgttcgtttatttcggggttcgttcggttttggttttggttttttttagaggatggtagcgttttcggcgcgggggttttcgttattttcgcgtcgttttgtcgcggttttacgcggcgttagggtttttttcgtgatgattcgggtttaaggagttgttttttgcgttggcggggtcgggtatttattaagtcggcggcgggggggtttcggtaggatcgcgaatagatagattgtcggacgcgtttaaggattaacggacgttcggtcggcgagatcgggcggggcggggcggggcgggggcgcggcgcgcggggagaggagtggaggttgcggttagcgggagttcgcggtcgcgtgcgcgtttgttaggtagttgattcgttgtttatatttgtttgcgcggattgaatgggcgtcgagggttggcgggtttcggcgttaggttttattagtagtgcgttcggttttcgtttttcgcgtttcgcgtttcgcgttttacgttcgttttcggattaggtagtttcggttcgttcggtcgcgttatcgtcgggtattaatgggagcgcggcgcggcggcggttgttagtttagaggttgcggtcggggatcgacgcgtttttggtgggcggggcggttgagttttcgcgcgtttagcgttttaatttggggttttcgcggcgggcgggcgggttgcgttttcgttcgtttttttagtagtttcgtaggcgtgtggtcgttttttcgttaa

SEQ ID NO: 38396 - DNA, 1178 bp, Artificial Sequence
  chemically treated genomic DNA (Homo sapiens) CpG-island No: 38396
ttaacgaaaaaacgaccacacgcctacgaaactactaaaaaaacgaacgaaaacgcaacccgcccgcccgccgcgaaaaccccaaattaaaacgctaaacgcgcgaaaactcaaccgccccgcccaccaaaaacgcgtcgatccccgaccgcaacctctaaactaacaaccgccgccgcgccgcgctcccattaatacccgacgataacgcgaccgaacgaaccgaaactacctaatccgaaaacgaacgtaaaacgcgaaacgcgaaacgcgaaaaacgaaaaccgaacgcactactaataaaacctaacgccgaaacccgccaaccctcgacgcccattcaatccgcgcaaacaaatataaacaacgaatcaactacctaacaaacgcgcacgcgaccgcgaactcccgctaaccgcaacctccactcctctccccgcgcgccgcgcccccgccccgccccgccccgcccgatctcgccgaccgaacgtccgttaatccttaaacgcgtccgacaatctatctattcgcgatcctaccgaaacccccccgccgccgacttaataaatacccgaccccgccaacgcaaaaaacaactccttaaacccgaatcatcacgaaaaaaaccctaacgccgcgtaaaaccgcgacaaaacgacgcgaaaataacgaaaacccccgcgccgaaaacgctaccatcctctaaaaaaaaccaaaaccaaaaccgaacgaaccccgaaataaacgaacgaaactaatacccatacgactatcgcctccacgaaatccattttaactccctaaaaccgcgacgtaatacataatacaacaccgaataaataaacgtaaacgatctaacgatacccgctccgcgcgcctatccgaaaacccgcgcgccgctacgcacgaaataatcgaaatacgtaaacgaacgacgaacacgaaaaccaaactaaaaaacacacgaaacccgccgacgacgaaaaaaccttcccttacataacgcgatacaaaacaccccgccccgccacgaaatccgaaaatatatcatcaaccgtaaataaaaactctacccgaccgcccgaaaaataatcccgcgacaaataaccgacccaaaaactctactaccatccccgcccgataaccgccctaacctaaaacgcctaactctccgctta

SEQ ID NO: 38397 - DNA, 510 bp, Artificial Sequence
  chemically treated genomic DNA (Homo sapiens) CpG-island No: 38397
gttgcgggtgcgcgttgggggtgtgtgggtcgtcgcgggtgggtttggggttcgtcgtcggtggtgtgtgcgggcgggcgggtcggggcgcggggggttgtggttcgttttcggggcgcggcggggcgtcgcgcgggcgcggcgtttcggcgcggggttcgcggttcgttgcggggggggcgcgggggcggttcggcgcggtcgcgcgtggttcgcgggttcgcgtcgcggttcgttgcgggttgggggggggtggttgtcgcggttttttgcggtttcggtgggcgcgtcgttttgcgttcggcgcgttcgtcgtgttcgtcgcggtgttgtggtcgcgtcgtcgggttcggttcgttcgggttgtgtcggtttcgtcggggcggtcgcggcggtcgtcgtttggttcggggtttggtcgcgcgtcgcggggcgcgggtcgttggtcgtgtcgtcgttgtcgtcgcgttgtcgtgcggtcgggtggcgggtttttcgcgttcggtagtt

SEQ ID NO: 38398 - DNA, 510 bp, Artificial Sequence
  chemically treated genomic DNA (Homo sapiens) CpG-island No: 38398
aactaccgaacgcgaaaaacccgccacccgaccgcacgacaacgcgacgacaacgacgacacgaccaacgacccgcgccccgcgacgcgcgaccaaaccccgaaccaaacgacgaccgccgcgaccgccccgacgaaaccgacacaacccgaacgaaccgaacccgacgacgcgaccacaacaccgcgacgaacacgacgaacgcgccgaacgcaaaacgacgcgcccaccgaaaccgcaaaaaaccgcgacaaccacccccccccaacccgcaacgaaccgcgacgcgaacccgcgaaccacgcgcgaccgcgccgaaccgcccccgcgccccccccgcaacgaaccgcgaaccccgcgccgaaacgccgcgcccgcgcgacgccccgccgcgccccgaaaacgaaccacaaccccccgcgccccgacccgcccgcccgcacacaccaccgacgacgaaccccaaacccacccgcgacgacccacacacccccaacgcgcacccgcaac

SEQ ID NO: 38399 - DNA, 510 bp, Artificial Sequence
  chemically treated genomic DNA (Homo sapiens) CpG-island No: 38399
agttgtcgggcgcgaggggttcgttattcgatcgtacgatagcgcggcggtagcggcggtacggttagcgattcgcgtttcgcgacgcgcgattaaatttcgggttaagcggcggtcgtcgcggtcgtttcggcgagatcggtataattcgagcgagtcgggttcgacggcgcggttataatatcgcggcgagtacggcgggcgcgtcgggcgtaggacggcgcgtttatcgagatcgtagagggtcgcggtaattatttttttttagttcgtagcggatcgcggcgcgggttcgcgggttacgcgcggtcgcgtcgggtcgttttcgcgtttttttcgtagcgagtcgcgagtttcgcgtcggagcgtcgcgttcgcgcgacgtttcgtcgcgtttcgggagcgggttatagtttttcgcgtttcggttcgttcgttcgtatatattatcggcggcgagttttaggtttattcgcggcggtttatatatttttagcgcgtattcgtagt

SEQ ID NO: 38400 - DNA, 510 bp, Artificial Sequence
  chemically treated genomic DNA (Homo sapiens) CpG-island No: 38400
actacgaatacgcgctaaaaatatataaaccgccgcgaataaacctaaaactcgccgccgataatatatacgaacgaacgaaccgaaacgcgaaaaactataacccgctcccgaaacgcgacgaaacgtcgcgcgaacgcgacgctccgacgcgaaactcgcgactcgctacgaaaaaaacgcgaaaacgacccgacgcgaccgcgcgtaacccgcgaacccgcgccgcgatccgctacgaactaaaaaaaaataattaccgcgaccctctacgatctcgataaacgcgccgtcctacgcccgacgcgcccgccgtactcgccgcgatattataaccgcgccgtcgaacccgactcgctcgaattataccgatctcgccgaaacgaccgcgacgaccgccgcttaacccgaaatttaatcgcgcgtcgcgaaacgcgaatcgctaaccgtaccgccgctaccgccgcgctatcgtacgatcgaataacgaacccctcgcgcccgacaact

SEQ ID NO: 38401 - DNA, 847 bp, Artificial Sequence
  chemically treated genomic DNA (Homo sapiens) CpG-island No: 38401
ggtcggttaagtcgaatatcggttatacgtaagcggcggcgggtgtggttggtgtgattaagatggtgatggcgatgcggtacgggtagttgttacgtacgttgtacgtggaatcgtcgtcgtcggaggtggattggtcggcggggacggtttaattttttacggagaatacgttttggtttaggagtggtcgtgttcgtcgggtgggggtgtcgtcgttcgggattagtggtattaacgcgtacgttattttcgaatagttttcgggagtgtcgagttagtttgcggggtcgggttcgggttttgtcgtggatgtttcggtggtgtcgtggatggtgtcgggtaaaatattcgaagcgttattcgcgtaggtaacggcgttgatgatttatttggacgagcgatttgatgttttttcgttggatgttgggtattcgttggcgttgatacggtcggcgttggatgagcgagcggtggtgttggggtcggatcgtgaaacgttgttgtgcggtgtgaaagcgttgtttgtcggttatgaggtttttgggttggtgatcggatttgtgggggttgggggtcgtatcgggtttgtgtttttcggttagggtcgttagtggttggggatgggtcgagggttttatcgggttttttcggtgttcgttgttagttttgacgaagttgtgttcgagttggtgtatatttgggttaggaaatcggggttcgggaggtggtgatcggtttcgatgtttattttttgatcgaacgttgggatttatcggatcgattatttgtaggcgttcgttgaagatttgattcgggggggttcgcgtagggggttgggtttttg

SEQ ID NO: 38402 - DNA, 847 bp, Artificial Sequence
  chemically treated genomic DNA (Homo sapiens) CpG-island No: 38402
caaaaacccaaccccctacgcgaacccccccgaatcaaatcttcaacgaacgcctacaaataatcgatccgataaatcccaacgttcgatcaaaaaataaacatcgaaaccgatcaccacctcccgaaccccgatttcctaacccaaatatacaccaactcgaacacaacttcgtcaaaactaacaacgaacaccgaaaaaacccgataaaaccctcgacccatccccaaccactaacgaccctaaccgaaaaacacaaacccgatacgacccccaacccccacaaatccgatcaccaacccaaaaacctcataaccgacaaacaacgctttcacaccgcacaacaacgtttcacgatccgaccccaacaccaccgctcgctcatccaacgccgaccgtatcaacgccaacgaatacccaacatccaacgaaaaaacatcaaatcgctcgtccaaataaatcatcaacgccgttacctacgcgaataacgcttcgaatattttacccgacaccatccacgacaccaccgaaacatccacgacaaaacccgaacccgaccccgcaaactaactcgacactcccgaaaactattcgaaaataacgtacgcgttaataccactaatcccgaacgacgacacccccacccgacgaacacgaccactcctaaaccaaaacgtattctccgtaaaaaattaaaccgtccccgccgaccaatccacctccgacgacgacgattccacgtacaacgtacgtaacaactacccgtaccgcatcgccatcaccatcttaatcacaccaaccacacccgccgccgcttacgtataaccgatattcgacttaaccgacc

SEQ ID NO: 38403 - DNA, 847 bp, Artificial Sequence
  chemically treated genomic DNA (Homo sapiens) CpG-island No: 38403
tagaggtttaattttttgcgcgaattttttcggattagatttttagcgagcgtttgtaagtgatcgattcgatgggttttaacgttcgattaagaaatgggtatcggaatcggttattatttttcggatttcgattttttggtttagatgtgtattagttcgggtatagtttcgttaaagttagtagcgaatatcgaaaaagttcggtaaagttttcggtttatttttagttattgacgattttgatcggaaaatataaattcgatgcggtttttagtttttatagattcggttattaatttagaagttttatgatcggtagatagcgtttttatatcgtataataacgttttacggttcgattttagtattatcgttcgtttatttagcgtcgatcgtgttaacgttagcgagtatttaatatttagcgaggagatattaggtcgttcgtttagataggttattaacgtcgttgtttgcgcggatagcgtttcgggtgttttgttcgatattatttacggtattatcggaatatttacgatagaattcgaattcggtttcgtagattgattcggtattttcgggggttgttcgaggatgacgtgcgcgttagtattattgatttcgaacgacgatatttttattcgacgaatacgattatttttgggttagggcgtgtttttcgtaaggagttgaatcgttttcgtcgattaatttattttcggcgacggcgattttacgtgtaacgtgcgtggtagttgttcgtgtcgtatcgttattattattttgattatattagttatattcgtcgtcgtttgcgtatgatcgatgttcgatttgatcgatt

SEQ ID NO: 38404 - DNA, 847 bp, Artificial Sequence
  chemically treated genomic DNA (Homo sapiens) CpG-island No: 38404
aatcgatcaaatcgaacatcgatcatacgcaaacgacgacgaatataactaatataatcaaaataataataacgatacgacacgaacaactaccacgcacgttacacgtaaaatcgccgtcgccgaaaataaattaatcgacgaaaacgattcaactccttacgaaaaacacgccctaacccaaaaataatcgtattcgtcgaataaaaatatcgtcgttcgaaatcaataatactaacgcgcacgtcatcctcgaacaacccccgaaaataccgaatcaatctacgaaaccgaattcgaattctatcgtaaatattccgataataccgtaaataatatcgaacaaaacacccgaaacgctatccgcgcaaacaacgacgttaataacctatctaaacgaacgacctaatatctcctcgctaaatattaaatactcgctaacgttaacacgatcgacgctaaataaacgaacgataatactaaaatcgaaccgtaaaacgttattatacgatataaaaacgctatctaccgatcataaaacttctaaattaataaccgaatctataaaaactaaaaaccgcatcgaatttatattttccgatcaaaatcgtcaataactaaaaataaaccgaaaactttaccgaactttttcgatattcgctactaactttaacgaaactatacccgaactaatacacatctaaaccaaaaaatcgaaatccgaaaaataataaccgattccgatacccatttcttaatcgaacgttaaaacccatcgaatcgatcacttacaaacgctcgctaaaaatctaatccgaaaaaattcgcgcaaaaaattaaacctcta

SEQ ID NO: 38405 - DNA, 856 bp, Artificial Sequence
  chemically treated genomic DNA (Homo sapiens) CpG-island No: 38405
tattaatttcgcgtttttcgtgttcggttttttcggttatagtagtttgttttttttttttttgtatttgtagtatgtgtagggtttgtcgtcgttggcggcgggatggcggatggcgtcgtatttcgtcgcggtcggattggtgtttacggtgttcggtcgtttgaatgttcgtttcggtttgtcgcggttgatggtcgcgggttatggtttgatcggcgtggttatgttgggtatgatgcggttcgaggcgtatacgttttggttcgagatcggatttttgatggtgatgttgggtttgggtatggggttggcggtgtcgtcgattagtatggcggttatggttacggtgtcgcgcgaacgttcgggtatggcgttcgttattatgaatgcgatgcgttagacgggtatgacgatcggtatcgcgttgttgggcgtattgatgagcgggcgcgcggtcgacgcgttgacgcgtacgatcgtttacgtcggcgttagcgatgcgtacggcgtggcgcgcgtcgtcgttacgcggtatgtgatgttcgagtagtcggtaagcgtcgtcgcgtggttcgtcgatgcgttggtcggcggtttttacgtcgcgatgttgatcgcgggcggtgtatcggtggtggtagttttgttgatgtgggtcgtggcgcgcggcgtaaaattcgcgttgtacgtcgtttgaacgtgcgatttcggcgttcggaattttatttttcggaattaaacggagcggattttaagtattcgtaataaagttgtcggtcgcgcggcgtttgggtaagatttttatttaataataggttaataattacgaggagaagattatgtagtttcgtaa

SEQ ID NO: 38406 - DNA, 856 bp, Artificial Sequence
  chemically treated genomic DNA (Homo sapiens) CpG-island No: 38406
ttacgaaactacataatcttctcctcgtaattattaacctattattaaataaaaatcttacccaaacgccgcgcgaccgacaactttattacgaatacttaaaatccgctccgtttaattccgaaaaataaaattccgaacgccgaaatcgcacgttcaaacgacgtacaacgcgaattttacgccgcgcgccacgacccacatcaacaaaactaccaccaccgatacaccgcccgcgatcaacatcgcgacgtaaaaaccgccgaccaacgcatcgacgaaccacgcgacgacgcttaccgactactcgaacatcacataccgcgtaacgacgacgcgcgccacgccgtacgcatcgctaacgccgacgtaaacgatcgtacgcgtcaacgcgtcgaccgcgcgcccgctcatcaatacgcccaacaacgcgataccgatcgtcatacccgtctaacgcatcgcattcataataacgaacgccatacccgaacgttcgcgcgacaccgtaaccataaccgccatactaatcgacgacaccgccaaccccatacccaaacccaacatcaccatcaaaaatccgatctcgaaccaaaacgtatacgcctcgaaccgcatcatacccaacataaccacgccgatcaaaccataacccgcgaccatcaaccgcgacaaaccgaaacgaacattcaaacgaccgaacaccgtaaacaccaatccgaccgcgacgaaatacgacgccatccgccatcccgccgccaacgacgacaaaccctacacatactacaaatacaaaaaaaaaaaaaacaaactactataaccgaaaaaaccgaacacgaaaaacgcgaaattaata

SEQ ID NO: 38407 - DNA, 856 bp, Artificial Sequence
  chemically treated genomic DNA (Homo sapiens) CpG-island No: 38407
ttgcgggattgtatggtttttttttcgtggttgttaatttgttattgggtgaggattttatttaagcgtcgcgcggtcggtagttttgttacggatgtttaaaattcgtttcgtttgatttcgaaaggtggaatttcgaacgtcgaaatcgtacgtttaggcggcgtgtagcgcgggttttgcgtcgcgcgttacgatttatattagtaaggttgttattatcgatgtatcgttcgcgattagtatcgcggcgtgaaagtcgtcggttagcgtatcggcgaattacgcggcgacgtttgtcggttgttcgggtattatatgtcgcgtgacggcggcgcgcgttacgtcgtgcgtatcgttgacgtcggcgtgggcgatcgtgcgcgttaacgcgtcgatcgcgcgttcgtttattagtgcgtttagtagcgcgatgtcgatcgttatgttcgtttggcgtatcgtatttatggtggcggacgttatgttcgagcgttcgcgcggtatcgtggttatgatcgttatgttggtcgacggtatcgttagttttatgtttaggtttagtattattattagggattcggtttcgagttagggcgtgtgcgtttcgaatcgtattatgtttagtatggttacgtcgattaggttatagttcgcgattattagtcgcggtaggtcgaagcgaatatttaggcggtcgaatatcgtggatattagttcggtcgcgacgaaatgcggcgttattcgttatttcgtcgttagcggcgataggttttgtatatgttgtagatatagggaaaagaagaataggttgttgtagtcggaaaagtcgagtacgaaagacgcgaagttggtg

SEQ ID NO: 38408 - DNA, 856 bp, Artificial Sequence
  chemically treated genomic DNA (Homo sapiens) CpG-island No: 38408
caccaacttcgcgtctttcgtactcgacttttccgactacaacaacctattcttcttttccctatatctacaacatatacaaaacctatcgccgctaacgacgaaataacgaataacgccgcatttcgtcgcgaccgaactaatatccacgatattcgaccgcctaaatattcgcttcgacctaccgcgactaataatcgcgaactataacctaatcgacgtaaccatactaaacataatacgattcgaaacgcacacgccctaactcgaaaccgaatccctaataataatactaaacctaaacataaaactaacgataccgtcgaccaacataacgatcataaccacgataccgcgcgaacgctcgaacataacgtccgccaccataaatacgatacgccaaacgaacataacgatcgacatcgcgctactaaacgcactaataaacgaacgcgcgatcgacgcgttaacgcgcacgatcgcccacgccgacgtcaacgatacgcacgacgtaacgcgcgccgccgtcacgcgacatataatacccgaacaaccgacaaacgtcgccgcgtaattcgccgatacgctaaccgacgactttcacgccgcgatactaatcgcgaacgatacatcgataataacaaccttactaatataaatcgtaacgcgcgacgcaaaacccgcgctacacgccgcctaaacgtacgatttcgacgttcgaaattccacctttcgaaatcaaacgaaacgaattttaaacatccgtaacaaaactaccgaccgcgcgacgcttaaataaaatcctcacccaataacaaattaacaaccacgaaaaaaaaaccatacaatcccgcaa

SEQ ID NO: 38409 - DNA, 822 bp, Artificial Sequence
  chemically treated genomic DNA (Homo sapiens) CpG-island No: 38409
tttttcgtttatttttttagtagcgttttttcgtcgttttttttttttttttttttttttttatcgttttttttcggtttattatcgttaatcgtttttttttttatttcgtatttttttttttttatgtttgttttagttttttttttattttttttttttttttttatcgttttttttttattttttttttttttttttatcgttttttttttatttttttttttttttttaatcgtttttttttttagttttttttttatttttttgtcgtttttatatttttatttttttttcgtagtagcgtttttttgtcgcgtttttttttttttttattatttttttttttttttttttatcgttttttttttacgtttttttttttttattgtttttttttcgcgttttttttataatcgttttttttttcgtttttttttttttatatcgttttttttttatgtttttttatcgtttcgtagtagcgtttgttagtcgtaattttttttttattttttttttttttttttttatcgttttttttttttagttttttatttttcgttattttttttttttttttattttttcgtagtagcgattttttgtcgcgttttttttttttcgtatttttttttttttttttttattttttatcgttttcgttttcgatcgtttttttgtttatttttttttcgcgttttttaattgttttttatttagaagcgttttacgcgtgcgttcgtttgtgtttttgcgtttggtgtgtttgtgcgtttagttagttttatgagttgggtttttgagtttcgttttaatagt

SEQ ID NO: 38410 - DNA, 822 bp, Artificial Sequence
  chemically treated genomic DNA (Homo sapiens) CpG-island No: 38410
actattaaaacgaaactcaaaaacccaactcataaaactaactaaacgcacaaacacaccaaacgcaaaaacacaaacgaacgcacgcgtaaaacgcttctaaataaaaaacaattaaaaaacgcgaaaaaaaaataaacaaaaaaacgatcgaaaacgaaaacgataaaaaataaaaaaaaaaaaaaaaaaatacgaaaaaaaaaaaacgcgacaaaaaatcgctactacgaaaaaataaaaaaaaaaaaaaaataacgaaaaataaaaaactaaaaaaaaaaaacgataaaaaaaaaaaaaaaaaaaataaaaaaaaaattacgactaacaaacgctactacgaaacgataaaaaaacataaaaaaaaaacgatataaaaaaaaaaaaacgaaaaaaaaaacgattataaaaaaaacgcgaaaaaaaaacaataaaaaaaaaaaaacgtaaaaaaaaaacgataaaaaaaaaaaaaaaaaaataataaaaaaaaaaaaaaacgcgacaaaaaaacgctactacgaaaaaaaaataaaaatataaaaacgacaaaaaaataaaaaaaaaactaaaaaaaaaaacgattaaaaaaaaaaaaaaaaataaaaaaaaaacgataaaaaaaaaaaaaaaaaataaaaaaaaaacgataaaaaaaaaaaaaaaaaataaaaaaaaaactaaaacaaacataaaaaaaaaaaaatacgaaataaaaaaaaaaacgattaacgataataaaccgaaaaaaaacgataaaaaaaaaaaaaaaaaaaaaaaaaacgacgaaaaaacgctactaaaaaaataaacgaaaaa

SEQ ID NO: 38411 - DNA, 822 bp, Artificial Sequence
  chemically treated genomic DNA (Homo sapiens) CpG-island No: 38411
gttgttggggcggagtttaggggtttagtttatggggttggttgggcgtatagatatattaggcgtagggatataggcgggcgtacgcgtggagcgtttttaggtgaaaggtagttggagagcgcgagaagggggtgggtaagaagacgatcgggggcgaagacggtggggagtggaagaggggagaagagggtgcggggagagaaaaacgcggtaggaagtcgttgttgcgagaaggtggggaggggaagaagatggcggagaataagaggttggggaaaaaagacgatgggagggggagagaagaaagtgggaagaagattgcgattgatagacgttgttgcgagacggtgggaggatatgggaagaaaacggtgtgaggggaagaaaacgggggagaaaacggttgtggggaaggcgcggggagaagatagtgaggagaagagggcgtggggagaggacggtggggaagaggaagagaagatggtgaggggagagaaaagcgcggtaggaagacgttgttgcgagaagaaggtggggatatggaggcggtaagaaaatggagaagaggttgggaaagaagacgattgggagaggagaagagggtgggaagaaggcgatggggagaggagaagagggtgggaagaaggcgatggggagaggagaagagggtgggaagaagattaaggtagatatgggaagaaaagggtgcgggatgaggaagaaaacggttggcggtaataggtcgggagaagacggtgaggagggggaggggagaagagggagcggcgggaagacgttgttgggggaataggcgggaag

SEQ ID NO: 38412 - DNA, 822 bp, Artificial Sequence
  chemically treated genomic DNA (Homo sapiens) CpG-island No: 38412
cttcccgcctattcccccaacaacgtcttcccgccgctccctcttctcccctccccctcctcaccgtcttctcccgacctattaccgccaaccgttttcttcctcatcccgcacccttttcttcccatatctaccttaatcttcttcccaccctcttctcctctccccatcgccttcttcccaccctcttctcctctccccatcgccttcttcccaccctcttctcctctcccaatcgtcttctttcccaacctcttctccattttcttaccgcctccatatccccaccttcttctcgcaacaacgtcttcctaccgcgcttttctctcccctcaccatcttctcttcctcttccccaccgtcctctccccacgccctcttctcctcactatcttctccccgcgccttccccacaaccgttttctcccccgttttcttcccctcacaccgttttcttcccatatcctcccaccgtctcgcaacaacgtctatcaatcgcaatcttcttcccactttcttctctccccctcccatcgtcttttttccccaacctcttattctccgccatcttcttcccctccccaccttctcgcaacaacgacttcctaccgcgtttttctctccccgcaccctcttctcccctcttccactccccaccgtcttcgcccccgatcgtcttcttacccacccccttctcgcgctctccaactacctttcacctaaaaacgctccacgcgtacgcccgcctatatccctacgcctaatatatctatacgcccaaccaaccccataaactaaacccctaaactccgccccaacaac

SEQ ID NO: 38413 - DNA, 592 bp, Artificial Sequence
  chemically treated genomic DNA (Homo sapiens) CpG-island No: 38413
gttattttattatatcgaatgtgtttggaattggggcgttgcggttggtcgtcgttcgatttttagtttaggcgcgatttaagcgtttttttttcgttattgcggttgtagagggtggggtacggcgggggatagcgaggacgtcgaagtatttttcgggttttgggacgtcgcggttttcggattcgaagtcgtttatttatcggaatacggttcgcgtacgtatttagcgacgttttcgttttacgtcgtcgtcggtgttattagttttagattcgttgatttaacgtttcgcgtatcgtcgcgggttagttacgtgattagtcgttttaattttaaatttcgaatttggcgttggatcgttcgagtttaggaaggtgtattttgcgcgttaggtttgggtttggtttcgttttcggaggcgtttaattagagagcgtagttaagtatgggtcgttattaaacgtattcgcgttattggttgcggcgtagcggcgggtagggtttgttttttcggggcgggtcggaggtcgcgtagtgtagttgcgtatttggggtagggatttgtagaattgattcgttttggttgtag

SEQ ID NO: 38414 - DNA, 592 bp, Artificial Sequence
  chemically treated genomic DNA (Homo sapiens) CpG-island No: 38414
ctacaaccaaaacgaatcaattctacaaatccctaccccaaatacgcaactacactacgcgacctccgacccgccccgaaaaaacaaaccctacccgccgctacgccgcaaccaataacgcgaatacgtttaataacgacccatacttaactacgctctctaattaaacgcctccgaaaacgaaaccaaacccaaacctaacgcgcaaaatacaccttcctaaactcgaacgatccaacgccaaattcgaaatttaaaattaaaacgactaatcacgtaactaacccgcgacgatacgcgaaacgttaaatcaacgaatctaaaactaataacaccgacgacgacgtaaaacgaaaacgtcgctaaatacgtacgcgaaccgtattccgataaataaacgacttcgaatccgaaaaccgcgacgtcccaaaacccgaaaaatacttcgacgtcctcgctatcccccgccgtaccccaccctctacaaccgcaataacgaaaaaaaaacgcttaaatcgcgcctaaactaaaaatcgaacgacgaccaaccgcaacgccccaattccaaacacattcgatataataaaataac

SEQ ID NO: 38415 - DNA, 592 bp, Artificial Sequence
  chemically treated genomic DNA (Homo sapiens) CpG-island No: 38415
ttgtagttaaagcgggttagttttgtaggtttttgttttaggtgcgtagttgtattacgcggttttcggttcgtttcggagaaataggttttgttcgtcgttgcgtcgtagttaatagcgcgggtgcgtttggtggcggtttatgtttggttgcgttttttgattgggcgttttcgggggcggggttaagtttaagtttggcgcgtagagtgtatttttttgagttcgagcggtttagcgttaagttcggggtttggggttggagcggttggttacgtggttggttcgcggcggtgcgcggggcgttgggttagcgggtttgggattggtggtatcggcggcggcgtaggacggaggcgtcgttaggtacgtgcgcgggtcgtgtttcggtaggtgggcggtttcgggttcgagggtcgcggcgttttagagttcggggggtgtttcggcgttttcgttgtttttcgtcgtattttattttttgtagtcgtaatgacgggaggggagcgtttgggtcgcgtttgggttggggatcgggcggcggttagtcgtagcgttttagttttaggtatattcggtatgatggggtggt

SEQ ID NO: 38416 - DNA, 592 bp, Artificial Sequence
  chemically treated genomic DNA (Homo sapiens) CpG-island No: 38416
accaccccatcataccgaatatacctaaaactaaaacgctacgactaaccgccgcccgatccccaacccaaacgcgacccaaacgctcccctcccgtcattacgactacaaaaaataaaatacgacgaaaaacaacgaaaacgccgaaacaccccccgaactctaaaacgccgcgaccctcgaacccgaaaccgcccacctaccgaaacacgacccgcgcacgtacctaacgacgcctccgtcctacgccgccgccgataccaccaatcccaaacccgctaacccaacgccccgcgcaccgccgcgaaccaaccacgtaaccaaccgctccaaccccaaaccccgaacttaacgctaaaccgctcgaactcaaaaaaatacactctacgcgccaaacttaaacttaaccccgcccccgaaaacgcccaatcaaaaaacgcaaccaaacataaaccgccaccaaacgcacccgcgctattaactacgacgcaacgacgaacaaaacctatttctccgaaacgaaccgaaaaccgcgtaatacaactacgcacctaaaacaaaaacctacaaaactaacccgctttaactacaa

SEQ ID NO: 38417 - DNA, 536 bp, Artificial Sequence
  chemically treated genomic DNA (Homo sapiens) CpG-island No: 38417
  unsure (503..504, 506)
gcgcggttaatggacgtttttagcgcggatagataggttttttgttggagttgggtagggcgaaaggattttagggcggggttttagtcgaggtcggtttcgtttatcgttgtagtcgcgtatgcgttatgtataggttgttttgggttttttcgcgtgtcgtttttattcggtttgtttcgcgtcgtcgttttcggaagtgggtttcgtttttttttaagcggagtatttgtgtttgaagttgtcgggtttgttacggtatcgcggggttgtagaaattcgggggttaagggcgggttgtttgtcgttatggttggtagttaggatatattcgatgttatcgtgatggcggatgagaggtgggtggtgaggtcgggttcgtatttcgttttgtttggtcgttttttagcggtttcgtcgtcggttgcggtttagggcggttgttggagtttggcgttttttgggcgtgcgtattggggagcgtttggtggtcgtggacgtannnntaagtgtgggtttgatgttttggttttttt

SEQ ID NO: 38418 - DNA, 536 bp, Artificial Sequence
  chemically treated genomic DNA (Homo sapiens) CpG-island No: 38418
  unsure (31..32, 34)
aaaaaaaccaaaacatcaaacccacacttannnntacgtccacgaccaccaaacgctccccaatacgcacgcccaaaaaacgccaaactccaacaaccgccctaaaccgcaaccgacgacgaaaccgctaaaaaacgaccaaacaaaacgaaatacgaacccgacctcaccacccacctctcatccgccatcacgataacatcgaatatatcctaactaccaaccataacgacaaacaacccgcccttaacccccgaatttctacaaccccgcgataccgtaacaaacccgacaacttcaaacacaaatactccgcttaaaaaaaaacgaaacccacttccgaaaacgacgacgcgaaacaaaccgaataaaaacgacacgcgaaaaaacccaaaacaacctatacataacgcatacgcgactacaacgataaacgaaaccgacctcgactaaaaccccgccctaaaatcctttcgccctacccaactccaacaaaaaacctatctatccgcgctaaaaacgtccattaaccgcgc

SEQ ID NO: 38419 - DNA, 536 bp, Artificial Sequence
  chemically treated genomic DNA (Homo sapiens) CpG-island No: 38419
  unsure (31..32, 34)
aagaggattagagtattaggtttatatttgnnnntgcgtttacggttattaggcgttttttaatgcgtacgtttaagggacgttaggttttagtagtcgttttgggtcgtagtcggcggcgaagtcgttgggagacgattagatagggcggggtgcgggttcggttttattatttattttttattcgttattacgatggtatcgaatatgttttgattgttagttatagcggtaagtagttcgtttttggttttcgggtttttgtagtttcgcggtgtcgtagtagattcggtagttttaggtataaatgtttcgtttgggaggagacgagatttattttcggaagcggcggcgcggggtaggtcgggtaagaacggtacgcgggagggtttaaagtagtttgtatatggcgtatgcgcggttgtagcggtgggcggggtcggtttcgattgaagtttcgttttggggttttttcgttttgtttagttttagtaaagggtttgtttgttcgcgttgggagcgtttattggtcgcgt

SEQ ID NO: 38420 - DNA, 536 bp, Artificial Sequence
  chemically treated genomic DNA (Homo sapiens) CpG-island No: 38420
  unsure (503..504, 506)
acgcgaccaataaacgctcccaacgcgaacaaacaaaccctttactaaaactaaacaaaacgaaaaaaccccaaaacgaaacttcaatcgaaaccgaccccgcccaccgctacaaccgcgcatacgccatatacaaactactttaaaccctcccgcgtaccgttcttacccgacctaccccgcgccgccgcttccgaaaataaatctcgtctcctcccaaacgaaacatttatacctaaaactaccgaatctactacgacaccgcgaaactacaaaaacccgaaaaccaaaaacgaactacttaccgctataactaacaatcaaaacatattcgataccatcgtaataacgaataaaaaataaataataaaaccgaacccgcaccccgccctatctaatcgtctcccaacgacttcgccgccgactacgacccaaaacgactactaaaacctaacgtcccttaaacgtacgcattaaaaaacgcctaataaccgtaaacgcannnncaaatataaacctaatactctaatcctctt

SEQ ID NO: 38421 - DNA, 507 bp, Artificial Sequence
  chemically treated genomic DNA (Homo sapiens) CpG-island No: 38421
tttcggttcgtcgttaatggtcgcggtcggtaggggcgggtcggggcgggtatttcgcggtttcgtttcgttttttcgtttttagtttttttttcgcggcggcgttattattagttcgcgttttttttcggttagggttatcgtcgttcgagcgttcgcgagggttggcgttttattttcggcgtaacgagtgttgcgtaacggtttacgcggtcgatacgatcggagcgagtttgcggaggagttcgggagtttttcgttttatcgtttcgttcgtttttggttttttttattttttcggtcgtcgcggtggttttgcgtttttcgcgatttttatttgttcgtagaggcgttttttgtttttttgagagtcgtagtttgttgggttatttgttgtcgattgagtattgcgggttgcggttattcgggcgtggttcggatttcggttttttttttttcgtatattttcgagaggagttttttattttggggtgggtaggagggaag

SEQ ID NO: 38422 - DNA, 507 bp, Artificial Sequence
  chemically treated genomic DNA (Homo sapiens) CpG-island No: 38422
cttccctcctacccaccccaaaataaaaaactcctctcgaaaatatacgaaaaaaaaaaaaccgaaatccgaaccacgcccgaataaccgcaacccgcaatactcaatcgacaacaaataacccaacaaactacgactctcaaaaaaacaaaaaacgcctctacgaacaaataaaaatcgcgaaaaacgcaaaaccaccgcgacgaccgaaaaaataaaaaaaaccaaaaacgaacgaaacgataaaacgaaaaactcccgaactcctccgcaaactcgctccgatcgtatcgaccgcgtaaaccgttacgcaacactcgttacgccgaaaataaaacgccaaccctcgcgaacgctcgaacgacgataaccctaaccgaaaaaaaacgcgaactaataataacgccgccgcgaaaaaaaaactaaaaacgaaaaaacgaaacgaaaccgcgaaatacccgccccgacccgcccctaccgaccgcgaccattaacgacgaaccgaaa

SEQ ID NO: 38423 - DNA, 507 bp, Artificial Sequence
  chemically treated genomic DNA (Homo sapiens) CpG-island No: 38423
ttttttttttgtttattttaaggtagagggtttttttcgggagtgtgcggggaaggggaggtcgaggttcgggttacgttcgggtagtcgtaattcgtagtgtttagtcggtaataggtagtttagtaggttgcggtttttaggaagataaaaagcgtttttgcgagtaagtgagggtcgcggggagcgtagagttatcgcggcgatcgggagggtgaagggagttaagagcggacggggcggtgggacggggggttttcgggttttttcgtaggttcgtttcggtcgtgtcggtcgcgtgggtcgttgcgtaatattcgttgcgtcgggaatggggcgttagttttcgcgggcgttcggacggcggtggttttggtcggggagggacgcgagttggtagtggcgtcgtcgcggagggggagttgagggcggggaggcggggcggggtcgcggagtgttcgtttcggttcgtttttgtcggtcgcggttattggcggcgggtcgggg

SEQ ID NO: 38424 - DNA, 507 bp, Artificial Sequence
  chemically treated genomic DNA (Homo sapiens) CpG-island No: 38424
ccccgacccgccgccaataaccgcgaccgacaaaaacgaaccgaaacgaacactccgcgaccccgccccgcctccccgccctcaactccccctccgcgacgacgccactaccaactcgcgtccctccccgaccaaaaccaccgccgtccgaacgcccgcgaaaactaacgccccattcccgacgcaacgaatattacgcaacgacccacgcgaccgacacgaccgaaacgaacctacgaaaaaacccgaaaaccccccgtcccaccgccccgtccgctcttaactcccttcaccctcccgatcgccgcgataactctacgctccccgcgaccctcacttactcgcaaaaacgctttttatcttcctaaaaaccgcaacctactaaactacctattaccgactaaacactacgaattacgactacccgaacgtaacccgaacctcgacctccccttccccgcacactcccgaaaaaaaccctctaccttaaaataaacaaaaaaaaaa

SEQ ID NO: 38425 - DNA, 520 bp, Artificial Sequence
  chemically treated genomic DNA (Homo sapiens) CpG-island No: 38425
atttcgatcgttaaggtagatttttcgcggggcggggcgcgcgacggagatttcgtttttttttttcgtcggcgcgggggatttttcggtgagtagtttaagggttttgggagaagtggggttaggatatggttagatttgagagtcggtcgtgaacgcgtgggggcgcgattacgggttcgtgcgaggggcgtcgtttttgggcggcggggcgtcgcgacgtttcgacgcgtcgatgttacgtttcgtgaagcggattcgtttttcgggcgtagcgcgcgtagggtgtcgcggcgggcgcgagaatcgaggcgtcgaagcgggttcgttgttcgatcgtttattttgtatcgtatacgcgttttattcgagttcgacgttcggtcgcgtttattggttacggcggttttttgtttttaaattcgcggagtggtttcgtacgatagtattcgcgatcgggcgagagcgagtggcgaagatacgcgttcgttggtcggcggatggcgttgtgttgattttt

SEQ ID NO: 38426 - DNA, 520 bp, Artificial Sequence
  chemically treated genomic DNA (Homo sapiens) CpG-island No: 38426
aaaaatcaacacaacgccatccgccgaccaacgaacgcgtatcttcgccactcgctctcgcccgatcgcgaatactatcgtacgaaaccactccgcgaatttaaaaacaaaaaaccgccgtaaccaataaacgcgaccgaacgtcgaactcgaataaaacgcgtatacgatacaaaataaacgatcgaacaacgaacccgcttcgacgcctcgattctcgcgcccgccgcgacaccctacgcgcgctacgcccgaaaaacgaatccgcttcacgaaacgtaacatcgacgcgtcgaaacgtcgcgacgccccgccgcccaaaaacgacgcccctcgcacgaacccgtaatcgcgcccccacgcgttcacgaccgactctcaaatctaaccatatcctaaccccacttctcccaaaacccttaaactactcaccgaaaaatcccccgcgccgacgaaaaaaaaaaacgaaatctccgtcgcgcgccccgccccgcgaaaaatctaccttaacgatcgaaat

SEQ ID NO: 38427 - DNA, 520 bp, Artificial Sequence
  chemically treated genomic DNA (Homo sapiens) CpG-island No: 38427
ggaggttagtatagcgttattcgtcggttaacgagcgcgtgttttcgttattcgttttcgttcggtcgcgggtgttgtcgtgcggggttatttcgcgggtttggaaatagggggtcgtcgtgattaatgggcgcgatcgggcgtcgagttcgagtggggcgcgtgtgcggtgtagaatggacgatcgggtaacgggttcgtttcggcgtttcggttttcgcgttcgtcgcggtattttgcgcgcgttgcgttcggagggcgagttcgttttacggaacgtggtatcggcgcgtcggaacgtcgcggcgtttcgtcgtttaggggcgacgtttttcgtacggattcgtggtcgcgtttttacgcgtttacggtcgatttttagatttgattatgttttgattttattttttttagaatttttgaattgtttatcgaggggtttttcgcgtcggcggggggaggagacggggttttcgtcgcgcgtttcgtttcgcggggggtttgttttagcggtcggagt

SEQ ID NO: 38428 - DNA, 520 bp, Artificial Sequence
  chemically treated genomic DNA (Homo sapiens) CpG-island No: 38428
actccgaccgctaaaacaaaccccccgcgaaacgaaacgcgcgacgaaaaccccgtctcctccccccgccgacgcgaaaaacccctcgataaacaattcaaaaattctaaaaaaaataaaatcaaaacataatcaaatctaaaaatcgaccgtaaacgcgtaaaaacgcgaccacgaatccgtacgaaaaacgtcgcccctaaacgacgaaacgccgcgacgttccgacgcgccgataccacgttccgtaaaacgaactcgccctccgaacgcaacgcgcgcaaaataccgcgacgaacgcgaaaaccgaaacgccgaaacgaacccgttacccgatcgtccattctacaccgcacacgcgccccactcgaactcgacgcccgatcgcgcccattaatcacgacgaccccctatttccaaacccgcgaaataaccccgcacgacaacacccgcgaccgaacgaaaacgaataacgaaaacacgcgctcgttaaccgacgaataacgctatactaacctcc

SEQ ID NO: 38429 - DNA, 519 bp, Artificial Sequence
  chemically treated genomic DNA (Homo sapiens) CpG-island No: 38429
ggatcggcgttcggcgcgtttttggtgtttttcgcgtgtaagtgagtatggtcggcgcgtagtattttgaagcgtttgcgacgtcgtaggaagttgtcgttttcgaatatgttttcgtagtcggggtgtagcgtttagaagttatttttgttaggttggtcgggttttcgcggaattttgatgaagtagtcgttgaaggagaggttgtggcgtaggttgttttgttagcgttgtgtgtgttcgcggtagtaggggaagcgttttatgatgaatttgtagatgtcgtttagcggtagtattttttcggtcgagtgttggattgttatggcggttagcgagatgtaagagtagggcggtttttggtcgttgtacgagttttttttcggtcgcggtatcgttttcggtttttttatcgtttttcggttcgtattggattatagaattttttcgtatttcgtttttggggtttggttgtttttattaatttttattcggtttttttagtttcgttattttgtt

SEQ ID NO: 38430 - DNA, 519 bp, Artificial Sequence
  chemically treated genomic DNA (Homo sapiens) CpG-island No: 38430
aacaaaataacgaaactaaaaaaaccgaataaaaattaataaaaacaaccaaaccccaaaaacgaaatacgaaaaaattctataatccaatacgaaccgaaaaacgataaaaaaaccgaaaacgataccgcgaccgaaaaaaaactcgtacaacgaccaaaaaccgccctactcttacatctcgctaaccgccataacaatccaacactcgaccgaaaaaatactaccgctaaacgacatctacaaattcatcataaaacgcttcccctactaccgcgaacacacacaacgctaacaaaacaacctacgccacaacctctccttcaacgactacttcatcaaaattccgcgaaaacccgaccaacctaacaaaaataacttctaaacgctacaccccgactacgaaaacatattcgaaaacgacaacttcctacgacgtcgcaaacgcttcaaaatactacgcgccgaccatactcacttacacgcgaaaaacaccaaaaacgcgccgaacgccgatcc

SEQ ID NO: 38431 - DNA, 519 bp, Artificial Sequence
  chemically treated genomic DNA (Homo sapiens) CpG-island No: 38431
ggtaaagtggcgggattggaggggtcgagtgggaattagtgggggtagttaggttttaggaacggagtgcggagagattttgtggtttagtgcgggtcggagggcggtggaggagtcgggggcgatgtcgcggtcggggaagagttcgtatagcgattaaaaatcgttttatttttatatttcgttgatcgttatggtaatttagtattcggtcgagaagatgttgtcgttgagcgatatttataagtttattatggagcgttttttttattatcgcgagtatatatagcgttggtagaatagtttgcgttataattttttttttaacgattgttttattaagatttcgcggaggttcgattagtttggtaagggtagtttttgggcgttgtatttcgattgcggggatatgttcgagaacggtagttttttgcggcgtcgtaagcgttttaaggtgttgcgcgtcgattatatttatttgtacgcgggaagtattaagagcgcgtcgggcgtcggttt

SEQ ID NO: 38432 - DNA, 519 bp, Artificial Sequence
  chemically treated genomic DNA (Homo sapiens) CpG-island No: 38432
aaaccgacgcccgacgcgctcttaatacttcccgcgtacaaataaatataatcgacgcgcaacaccttaaaacgcttacgacgccgcaaaaaactaccgttctcgaacatatccccgcaatcgaaatacaacgcccaaaaactacccttaccaaactaatcgaacctccgcgaaatcttaataaaacaatcgttaaaaaaaaaattataacgcaaactattctaccaacgctatatatactcgcgataataaaaaaaacgctccataataaacttataaatatcgctcaacgacaacatcttctcgaccgaatactaaattaccataacgatcaacgaaatataaaaataaaacgatttttaatcgctatacgaactcttccccgaccgcgacatcgcccccgactcctccaccgccctccgacccgcactaaaccacaaaatctctccgcactccgttcctaaaacctaactacccccactaattcccactcgacccctccaatcccgccactttacc

SEQ ID NO: 38433 - DNA, 654 bp, Artificial Sequence
  chemically treated genomic DNA (Homo sapiens) CpG-island No: 38433
cgagttttttttttagcgtttaagagatgagggttgcgggcggtagcggtaagcgaggaatcgaacgtatggaatttaagtttcggcggggtcggaatatacgtttttttaattttttatttcgtttcgtttttcgtcgttcgtaataaagtttgcgatagtcgtagttcgatttagttgtgtattcgcgggtttcggatttatcgttcgttcggtttggcgcggcgtttttatttcggaaacgttgggtggatttcgttgtaaatcgtaattttttatttagacggtagtcgcgtcgtcgcgtttcggttcgtttttggcgttataggtcgttcgtttcgcgtttttaaaagtatcgcgtttatttagaagtttacgttgtttcgcgacgtttatttattttttttaatatcgtcgttgttttaatcgtcgtttagtttatagtttgcggttagttggatttttagggtttcgttcggcgcgttaggagagtttaaggcgtaggcgtagcggggttttaaaggtatatggtcgtttttgcggtatagcgggttcgcgcgggttaggaaaaggagtaatcgagcggatagatagagtgtagtagagatcgggaaatttttttttttttttcgttttttttttaaagtattagtt

SEQ ID NO: 38434 - DNA, 654 bp, Artificial Sequence
  chemically treated genomic DNA (Homo sapiens) CpG-island No: 38434
aactaatactttaaaaaaaaaacgaaaaaaaaaaaaaaatttcccgatctctactacactctatctatccgctcgattactccttttcctaacccgcgcgaacccgctataccgcaaaaacgaccatatacctttaaaaccccgctacgcctacgccttaaactctcctaacgcgccgaacgaaaccctaaaaatccaactaaccgcaaactataaactaaacgacgattaaaacaacgacgatattaaaaaaaataaataaacgtcgcgaaacaacgtaaacttctaaataaacgcgatacttttaaaaacgcgaaacgaacgacctataacgccaaaaacgaaccgaaacgcgacgacgcgactaccgtctaaataaaaaattacgatttacaacgaaatccacccaacgtttccgaaataaaaacgccgcgccaaaccgaacgaacgataaatccgaaacccgcgaatacacaactaaatcgaactacgactatcgcaaactttattacgaacgacgaaaaacgaaacgaaataaaaaattaaaaaaacgtatattccgaccccgccgaaacttaaattccatacgttcgattcctcgcttaccgctaccgcccgcaaccctcatctcttaaacgctaaaaaaaaaactcg

SEQ ID NO: 38435 - DNA, 654 bp, Artificial Sequence
  chemically treated genomic DNA (Homo sapiens) CpG-island No: 38435
ggttggtgttttaaaagagaggcggaggggagagagggatttttcggtttttgttgtattttgtttattcgttcggttatttttttttttggttcgcgcgaattcgttgtgtcgtagaggcggttatgtatttttaaggtttcgttgcgtttgcgttttgggtttttttgacgcgtcgagcgggattttgaggatttagttggtcgtaggttatgggttgggcggcggttgagatagcggcgatattgggaggggtaggtgagcgtcgcgaggtagcgtgagtttttgagtgaacgcggtgtttttgggaacgcgggacgggcgatttgtggcgttaggagcgggtcgaggcgcggcggcgcggttgtcgtttggatgggaagttacggtttatagcgaagtttatttagcgttttcgaggtgaaggcgtcgcgttaggtcgggcgggcggtgagttcgggattcgcgggtatatagttgggtcgagttgcggttgtcgtaagttttgttgcgagcgacggagggcgaggcggggtggggggttgggagggcgtgtgtttcggtttcgtcggggtttaagttttatgcgttcgatttttcgtttgtcgttgtcgttcgtagtttttattttttgggcgttggggaagaaattcg

SEQ ID NO: 38436 - DNA, 654 bp, Artificial Sequence
  chemically treated genomic DNA (Homo sapiens) CpG-island No: 38436
cgaatttcttccccaacgcccaaaaaataaaaactacgaacgacaacgacaaacgaaaaatcgaacgcataaaacttaaaccccgacgaaaccgaaacacacgccctcccaaccccccaccccgcctcgccctccgtcgctcgcaacaaaacttacgacaaccgcaactcgacccaactatatacccgcgaatcccgaactcaccgcccgcccgacctaacgcgacgccttcacctcgaaaacgctaaataaacttcgctataaaccgtaacttcccatccaaacgacaaccgcgccgccgcgcctcgacccgctcctaacgccacaaatcgcccgtcccgcgttcccaaaaacaccgcgttcactcaaaaactcacgctacctcgcgacgctcacctacccctcccaatatcgccgctatctcaaccgccgcccaacccataacctacgaccaactaaatcctcaaaatcccgctcgacgcgtcaaaaaaacccaaaacgcaaacgcaacgaaaccttaaaaatacataaccgcctctacgacacaacgaattcgcgcgaaccaaaaaaaaaaataaccgaacgaataaacaaaatacaacaaaaaccgaaaaatccctctctcccctccgcctctcttttaaaacaccaacc

SEQ ID NO: 38437 - DNA, 821 bp, Artificial Sequence
  chemically treated genomic DNA (Homo sapiens) CpG-island No: 38437
tatacgtaagcggcggcgggtgtggttggtgtgattaagatggtgatggcgatgcggtacgggtagttgttacgtacgttgtacgtggaatcgtcgtcgtcggaggtggattggtcggcggggacggtttaattttttacggagaatacgttttggtttaggagtggtcgtgttcgtcgggtgggggtgtcgtcgttcgggattagtggtattaacgcgtacgttattttcgaatagttttcgggagtgtcgagttagtttgcggggtcgggttcgggttttgtcgtggatgtttcggtggtgtcgtggatggtgtcgggtaaaatattcgaagcgttattcgcgtaggtaacggcgttgatgatttatttggacgagcgatttgatgttttttcgttggatgttgggtattcgttggcgttgatacggtcggcgttggatgagcgagcggtggtgtttgggtcggatcgtgaaacgttggtgggcggggcgaaagtttttttgtcggttatgacgtttttgggttgcgttttgttttggtgattgtttcggtttttttggttttgttattgtcgtcgtcgtcgttcgtttcgttttttgtttcggcgttcgtttcgttttcgtcgtttttttcgttttttttttcgttttttcgtgtttgttcgtgttgttttcggttttcggttgtgagttttcgtgggtattgcgttcggttgttgttcgttgggtttgtcgttttggtttttttgtttattgttgttcgtttgcgcgtcgtgtcgtcgttgtttcgttttcgttttttttttttttttggttttcgt

SEQ ID NO: 38438 - DNA, 821 bp, Artificial Sequence
  chemically treated genomic DNA (Homo sapiens) CpG-island No: 38438
acgaaaaccaaaaaaaaaaaaaaaacgaaaacgaaacaacgacgacacgacgcgcaaacgaacaacaataaacaaaaaaaccaaaacgacaaacccaacgaacaacaaccgaacgcaatacccacgaaaactcacaaccgaaaaccgaaaacaacacgaacaaacacgaaaaaacgaaaaaaaaaacgaaaaaaacgacgaaaacgaaacgaacgccgaaacaaaaaacgaaacgaacgacgacgacgacaataacaaaaccaaaaaaaccgaaacaatcaccaaaacaaaacgcaacccaaaaacgtcataaccgacaaaaaaactttcgccccgcccaccaacgtttcacgatccgacccaaacaccaccgctcgctcatccaacgccgaccgtatcaacgccaacgaatacccaacatccaacgaaaaaacatcaaatcgctcgtccaaataaatcatcaacgccgttacctacgcgaataacgcttcgaatattttacccgacaccatccacgacaccaccgaaacatccacgacaaaacccgaacccgaccccgcaaactaactcgacactcccgaaaactattcgaaaataacgtacgcgttaataccactaatcccgaacgacgacacccccacccgacgaacacgaccactcctaaaccaaaacgtattctccgtaaaaaattaaaccgtccccgccgaccaatccacctccgacgacgacgattccacgtacaacgtacgtaacaactacccgtaccgcatcgccatcaccatcttaatcacaccaaccacacccgccgccgcttacgtata

SEQ ID NO: 38439 - DNA, 821 bp, Artificial Sequence
  chemically treated genomic DNA (Homo sapiens) CpG-island No: 38439
gcggaggttaaagaaagagggggaacgaagacgaaataacggcgatacgacgcgtaaacggataataataaataggagggttagaacgataagtttagcgaataataatcggacgtaatatttacgggaatttatagtcggggatcgaggataatacgaatagatacgagagggcgaaagggagaacgaaaaaagcggcgagaacggggcgaacgtcggaataaaaagcggagcgggcggcggcggcgatagtaatagggttagaaaggtcgaggtaattattaaagtagggcgtaatttaagagcgttatgatcggtagaaaggttttcgtttcgtttattaacgttttacggttcgatttaagtattatcgttcgtttatttagcgtcgatcgtgttaacgttagcgagtatttaatatttagcgaggagatattaggtcgttcgtttagataggttattaacgtcgttgtttgcgcggatagcgtttcgggtgttttgttcgatattatttacggtattatcggaatatttacgatagaattcgaattcggtttcgtagattgattcggtattttcgggggttgttcgaggatgacgtgcgcgttagtattattgatttcgaacgacgatatttttattcgacgaatacgattatttttgggttagggcgtgtttttcgtaaggagttgaatcgttttcgtcgattaatttattttcggcgacggcgattttacgtgtaacgtgcgtggtagttgttcgtgtcgtatcgttattattattttgattatattagttatattcgtcgtcgtttgcgtatg

SEQ ID NO: 38440 - DNA, 821 bp, Artificial Sequence
  chemically treated genomic DNA (Homo sapiens) CpG-island No: 38440
catacgcaaacgacgacgaatataactaatataatcaaaataataataacgatacgacacgaacaactaccacgcacgttacacgtaaaatcgccgtcgccgaaaataaattaatcgacgaaaacgattcaactccttacgaaaaacacgccctaacccaaaaataatcgtattcgtcgaataaaaatatcgtcgttcgaaatcaataatactaacgcgcacgtcatcctcgaacaacccccgaaaataccgaatcaatctacgaaaccgaattcgaattctatcgtaaatattccgataataccgtaaataatatcgaacaaaacacccgaaacgctatccgcgcaaacaacgacgttaataacctatctaaacgaacgacctaatatctcctcgctaaatattaaatactcgctaacgttaacacgatcgacgctaaataaacgaacgataatacttaaatcgaaccgtaaaacgttaataaacgaaacgaaaacctttctaccgatcataacgctcttaaattacgccctactttaataattacctcgacctttctaaccctattactatcgccgccgccgcccgctccgctttttattccgacgttcgccccgttctcgccgcttttttcgttctccctttcgccctctcgtatctattcgtattatcctcgatccccgactataaattcccgtaaatattacgtccgattattattcgctaaacttatcgttctaaccctcctatttattattatccgtttacgcgtcgtatcgccgttatttcgtcttcgttccccctctttctttaacctccgc

SEQ ID NO: 38441 - DNA, 638 bp, Artificial Sequence
  chemically treated genomic DNA (Homo sapiens) CpG-island No: 38441
ttttcggagttttttttttcgtgcgagttttcgcgcgcgcgtatagttatttcgttggtttgacgattgtggagaggcggtggagaggttttatttattttattcggtcgtcgtcggggattggggttttagcgagattttttcgggagaagtagtgtttaggaggttttttgaagtcggggaagttgtgtagtcgaagtcgtcgtcgcgtcggagttcgggatatcggttatttttcgcgttatttattttcgtcggtttcggttttttttggtttaggcgtcgcgcggattcggtagttgtttgcgtacgtcgagttttacggtcggtgtaagttttttttatcggggattgggattggggcgggtgcggggatggcggagacgttgtttgggtttttcggtcgggagaagacgagagttgggaacgttttggttcgatcgttttgtagtttgggcgattcgtcgtagtaggggttggtatttatttgttttagggcgcgcggggaggcgggcgtttttcgtgaggggtgcgttgcggatacgtgtagagttcggggaattttatttttttacgttagggtttaggattcggagttttaggaagaggaagtttaatagttttttttgggtgatttt

SEQ ID NO: 38442 - DNA, 638 bp, Artificial Sequence
  chemically treated genomic DNA (Homo sapiens) CpG-island No: 38442
aaaatcacccaaaaaaaactattaaacttcctcttcctaaaactccgaatcctaaaccctaacgtaaaaaaataaaattccccgaactctacacgtatccgcaacgcacccctcacgaaaaacgcccgcctccccgcgcgccctaaaacaaataaataccaacccctactacgacgaatcgcccaaactacaaaacgatcgaaccaaaacgttcccaactctcgtcttctcccgaccgaaaaacccaaacaacgtctccgccatccccgcacccgccccaatcccaatccccgataaaaaaaacttacaccgaccgtaaaactcgacgtacgcaaacaactaccgaatccgcgcgacgcctaaaccaaaaaaaaccgaaaccgacgaaaataaataacgcgaaaaataaccgatatcccgaactccgacgcgacgacgacttcgactacacaacttccccgacttcaaaaaacctcctaaacactacttctcccgaaaaaatctcgctaaaaccccaatccccgacgacgaccgaataaaataaataaaacctctccaccgcctctccacaatcgtcaaaccaacgaaataactatacgcgcgcgcgaaaactcgcacgaaaaaaaaaactccgaaaa

SEQ ID NO: 38443 - DNA, 638 bp, Artificial Sequence
  chemically treated genomic DNA (Homo sapiens) CpG-island No: 38443
ggggttatttagggaaaattattgggttttttttttttaaaatttcgaattttaaattttaacgtggagaggtgaagtttttcgaattttatacgtgttcgtagcgtattttttacggaaggcgttcgttttttcgcgcgttttggggtaagtgggtgttagtttttgttgcgacgggtcgtttaagttgtagggcggtcgggttagaacgtttttagttttcgttttttttcgatcgaggggtttaggtagcgttttcgttattttcgtattcgttttagttttagttttcgataagaaagatttgtatcgatcgtggagttcggcgtgcgtagatagttgtcgggttcgcgcggcgtttgggttagaggaagtcggagtcggcgagggtgggtggcgcggagggtggtcggtgtttcgggtttcggcgcggcggcggtttcggttgtatagttttttcggttttagaaaattttttgggtattgtttttttcggggaggtttcgttgggattttaattttcggcgacgatcgggtgggatggatgaagtttttttatcgtttttttataatcgttagattagcgggatgattgtacgcgcgcgcgagggttcgtacgaaaaagaaaatttcggagg

SEQ ID NO: 38444 - DNA, 638 bp, Artificial Sequence
  chemically treated genomic DNA (Homo sapiens) CpG-island No: 38444
cctccgaaattttctttttcgtacgaaccctcgcgcgcgcgtacaatcatcccgctaatctaacgattataaaaaaacgataaaaaaacttcatccatcccacccgatcgtcgccgaaaattaaaatcccaacgaaacctccccgaaaaaaacaatacccaaaaaattttctaaaaccgaaaaaactatacaaccgaaaccgccgccgcgccgaaacccgaaacaccgaccaccctccgcgccacccaccctcgccgactccgacttcctctaacccaaacgccgcgcgaacccgacaactatctacgcacgccgaactccacgatcgatacaaatctttcttatcgaaaactaaaactaaaacgaatacgaaaataacgaaaacgctacctaaacccctcgatcgaaaaaaaacgaaaactaaaaacgttctaacccgaccgccctacaacttaaacgacccgtcgcaacaaaaactaacacccacttaccccaaaacgcgcgaaaaaacgaacgccttccgtaaaaaatacgctacgaacacgtataaaattcgaaaaacttcacctctccacgttaaaatttaaaattcgaaattttaaaaaaaaaaaacccaataattttccctaaataacccc

SEQ ID NO: 38445 - DNA, 813 bp, Artificial Sequence
  chemically treated genomic DNA (Homo sapiens) CpG-island No: 38445
ttttttttgggttatatcgtttttttttttttcgcggaattcggatttttttttttattatttttttttcgtttcgttacgatagttttttattggacggaggtacggttaatttttttcgagttagggagtcgattggacgcgaggtttttgggtcgtttttagtttcgtcggattggttttttgcgcgttggcgtaacggaagaggcggtcggtcgagggcgcgtttttgttttggttggattgtcgcggaggaggcgagaaggaattcgacgttggggggtttgttcgggcggtagcgattgttgttgcggatgggagggggtcggttcggcgcgtttatggagcgttacggtagggttttcgttattttcgtttcgtcggttggggagtaggcggtcggggatttcgaagggcggcggtaggagttattgcggcgtcgggcgagtagcgcgtcggtgttcgcggtcggggtttcggttgagggtacgaggcgggatcgattgggtttttatagcggttttatttcggtttttcgttagcgcgtcgaaagtttgaggaaaaagcggtcgcgtaagtgtttcgtggggcgttttttcggttcgttttgttttttttttcggtttattttgttttttttcggtttcgtcgtcgtttttttcgcgcgcggatattgttttcgtacggtggtttttcgttggtgcgtggtttgatattcggttggaggtttcgggtgtttcgaaagcggtattttcgggggttttttcgtatttattggtatgtatttttcgtttgttggagtggagggttttt

SEQ ID NO: 38446 - DNA, 813 bp, Artificial Sequence
  chemically treated genomic DNA (Homo sapiens) CpG-island No: 38446
aaaaaccctccactccaacaaacgaaaaatacataccaataaatacgaaaaaacccccgaaaataccgctttcgaaacacccgaaacctccaaccgaatatcaaaccacgcaccaacgaaaaaccaccgtacgaaaacaatatccgcgcgcgaaaaaaacgacgacgaaaccgaaaaaaaacaaaataaaccgaaaaaaaaaacaaaacgaaccgaaaaaacgccccacgaaacacttacgcgaccgctttttcctcaaactttcgacgcgctaacgaaaaaccgaaataaaaccgctataaaaacccaatcgatcccgcctcgtaccctcaaccgaaaccccgaccgcgaacaccgacgcgctactcgcccgacgccgcaataactcctaccgccgcccttcgaaatccccgaccgcctactccccaaccgacgaaacgaaaataacgaaaaccctaccgtaacgctccataaacgcgccgaaccgaccccctcccatccgcaacaacaatcgctaccgcccgaacaaaccccccaacgtcgaattccttctcgcctcctccgcgacaatccaaccaaaacaaaaacgcgccctcgaccgaccgcctcttccgttacgccaacgcgcaaaaaaccaatccgacgaaactaaaaacgacccaaaaacctcgcgtccaatcgactccctaactcgaaaaaaattaaccgtacctccgtccaataaaaaactatcgtaacgaaacgaaaaaaaaataataaaaaaaaaaatccgaattccgcgaaaaaaaaaaaaacgatataacccaaaaaaaa

SEQ ID NO: 38447 - DNA, 813 bp, Artificial Sequence
  chemically treated genomic DNA (Homo sapiens) CpG-island No: 38447
aaaagttttttattttaataagcgggaagtgtatattaatgggtgcgggggggttttcgaaggtatcgttttcggagtattcgaggtttttagtcggatgttaggttacgtattaacgagggattatcgtgcggggatagtgttcgcgcgcgggaaaaacggcggcggggtcggaaggggatagggtgggtcggaagggggggtagggcgggtcgggagggcgttttacggaatatttacgcggtcgttttttttttaggttttcgacgcgttggcgggagatcgaggtggggtcgttgtaagagtttagtcgatttcgtttcgtgtttttagtcgaggtttcgatcgcgggtatcgacgcgttgttcgttcggcgtcgtagtggtttttgtcgtcgtttttcggggttttcggtcgtttgttttttagtcgacgagacggaggtggcggaagttttgtcgtggcgttttatgggcgcgtcgagtcggtttttttttattcgtagtagtagtcgttgtcgttcgagtaagttttttagcgtcggattttttttcgtttttttcgcggtagtttagttagagtagaggcgcgttttcggtcggtcgtttttttcgttgcgttaacgcgtaggaagttaattcgacgaggttggggacggtttaaaggtttcgcgtttagtcggttttttaattcgaggaggattgatcgtgttttcgtttaatgagaggttatcgtgacggggcggggagagggtggtggaggaggggattcgggtttcgcggaggaagagaaggcggtgtagtttagaagaga

SEQ ID NO: 38448 - DNA, 813 bp, Artificial Sequence
  chemically treated genomic DNA (Homo sapiens) CpG-island No: 38448
tctcttctaaactacaccgccttctcttcctccgcgaaacccgaatcccctcctccaccaccctctccccgccccgtcacgataacctctcattaaacgaaaacacgatcaatcctcctcgaattaaaaaaccgactaaacgcgaaacctttaaaccgtccccaacctcgtcgaattaacttcctacgcgttaacgcaacgaaaaaaacgaccgaccgaaaacgcgcctctactctaactaaactaccgcgaaaaaaacgaaaaaaaatccgacgctaaaaaacttactcgaacgacaacgactactactacgaataaaaaaaaaccgactcgacgcgcccataaaacgccacgacaaaacttccgccacctccgtctcgtcgactaaaaaacaaacgaccgaaaaccccgaaaaacgacgacaaaaaccactacgacgccgaacgaacaacgcgtcgatacccgcgatcgaaacctcgactaaaaacacgaaacgaaatcgactaaactcttacaacgaccccacctcgatctcccgccaacgcgtcgaaaacctaaaaaaaaaacgaccgcgtaaatattccgtaaaacgccctcccgacccgccctacccccccttccgacccaccctatccccttccgaccccgccgccgtttttcccgcgcgcgaacactatccccgcacgataatccctcgttaatacgtaacctaacatccgactaaaaacctcgaatactccgaaaacgataccttcgaaaacccccccgcacccattaatatacacttcccgcttattaaaataaaaaactttt

SEQ ID NO: 38449 - DNA, 580 bp, Artificial Sequence
  chemically treated genomic DNA (Homo sapiens) CpG-island No: 38449
ttgttttttgggttttttttcgtcgtttgcgttttttagttttacgtcggttatatcgcgtttcgagttttttttttattgtcgttgtttattgcggagtaggcggagtcgagtattttgagtgggtttagcgaatattcgagataggatttggttattattattggtggtgtttcgcgtattcggcggtggtgtcgttcgtcgtggtacgggtttttcgtagttgttcgtttcgtcgtagttaggaggagcgtggcgtttggcgtgtgtcgcgttcgggacgtaggcgtaagattcgcgcgtagagcgcgacgtgtgttattagttttgcgttatcgcgtttagcggtcgtacgcgcgttgttattagtatttgtcgttagtcgtgtggtatggggtacgttcggtacggagtcgtgtgcgcgcgatcggttagtgggtagtgcgtatttgtgacgtgcgtttttgtacggcgtcgtagcgtcggttcgattgcggttattttattttttttttcggttttcgttttggttacgtatcgtcgtcgtgtttttagttttttttttgagtttttttttttt

SEQ ID NO: 38450 - DNA, 580 bp, Artificial Sequence
  chemically treated genomic DNA (Homo sapiens) CpG-island No: 38450
aaaaaaaaaaaactcaaaaaaaaaactaaaaacacgacgacgatacgtaaccaaaacgaaaaccgaaaaaaaaaataaaataaccgcaatcgaaccgacgctacgacgccgtacaaaaacgcacgtcacaaatacgcactacccactaaccgatcgcgcgcacacgactccgtaccgaacgtaccccataccacacgactaacgacaaatactaataacaacgcgcgtacgaccgctaaacgcgataacgcaaaactaataacacacgtcgcgctctacgcgcgaatcttacgcctacgtcccgaacgcgacacacgccaaacgccacgctcctcctaactacgacgaaacgaacaactacgaaaaacccgtaccacgacgaacgacaccaccgccgaatacgcgaaacaccaccaataataataaccaaatcctatctcgaatattcgctaaacccactcaaaatactcgactccgcctactccgcaataaacaacgacaataaaaaaaaaactcgaaacgcgatataaccgacgtaaaactaaaaaacgcaaacgacgaaaaaaaacccaaaaaacaa

SEQ ID NO: 38451 - DNA, 580 bp, Artificial Sequence
  chemically treated genomic DNA (Homo sapiens) CpG-island No: 38451
gaggagaagggatttagaagaagaattgaaggtacgacggcgatgcgtaattaaggcggaggtcgagaagaaggatgaggtggtcgtagtcgggtcggcgttgcggcgtcgtgtaggggcgtacgttatagatgcgtattgtttattggtcggtcgcgcgtatacgatttcgtgtcgagcgtattttatgttatacgattagcgataagtgttggtagtagcgcgcgtgcggtcgttaagcgcgatgacgtagaattagtaatatacgtcgcgttttgcgcgcgaattttgcgtttgcgtttcgggcgcgatatacgttaagcgttacgttttttttggttgcgacgaaacgaatagttacgagagattcgtattacggcgggcggtattatcgtcgggtacgcgggatattattaatgataataattaagttttgtttcgagtgttcgttgggtttatttaggatgttcgatttcgtttgtttcgtagtgaatagcggtagtggagggggagttcgggacgcggtgtgatcgacgtggggttgagaagcgtaggcgacggggggaagtttagagggtag

SEQ ID NO: 38452 - DNA, 580 bp, Artificial Sequence
  chemically treated genomic DNA (Homo sapiens) CpG-island No: 38452
ctaccctctaaacttccccccgtcgcctacgcttctcaaccccacgtcgatcacaccgcgtcccgaactccccctccactaccgctattcactacgaaacaaacgaaatcgaacatcctaaataaacccaacgaacactcgaaacaaaacttaattattatcattaataatatcccgcgtacccgacgataataccgcccgccgtaatacgaatctctcgtaactattcgtttcgtcgcaaccaaaaaaaacgtaacgcttaacgtatatcgcgcccgaaacgcaaacgcaaaattcgcgcgcaaaacgcgacgtatattactaattctacgtcatcgcgcttaacgaccgcacgcgcgctactaccaacacttatcgctaatcgtataacataaaatacgctcgacacgaaatcgtatacgcgcgaccgaccaataaacaatacgcatctataacgtacgcccctacacgacgccgcaacgccgacccgactacgaccacctcatccttcttctcgacctccgccttaattacgcatcgccgtcgtaccttcaattcttcttctaaatcccttctcctc

SEQ ID NO: 38453 - DNA, 585 bp, Artificial Sequence
  chemically treated genomic DNA (Homo sapiens) CpG-island No: 38453
tgtttatgcggtgagagttagcgcgggaggcggcgagggcgcggggagatcggggagggggtgggtttcgcggcgttcgtcgttcgtttttacgcgcgttgtcggtatttgttcgttttgttgtaatttgttgtagtgtttgaaagagtagtaggagcgtatggaggtggggtcggggaaagattaggcggagtggttgtggggtgagcgcggagtgggtggggaggcggcggcggtggggaggggggattggttttagggggtgggatgggggagaacggggtagttcggcgtttatatatgttatatgtgttttttaagacggtcgggagcgtttgcgagttggatttggtggaggatgttgcggtaggtgtttcgtagagggttttagtcgttttgttataggttgggtttgtgcgtgagtcggtattcggtttttttttttatcgtgttcgtagttttgataattattttcggttttagcgcgtttaatcgtttttagttcgagggcgatttggagcgtttggtcgtttttagttatagtttggttaagatcgagcgtagtttggttagtagttttttttt

SEQ ID NO: 38454 - DNA, 585 bp, Artificial Sequence
  chemically treated genomic DNA (Homo sapiens) CpG-island No: 38454
aaaaaaaaactactaaccaaactacgctcgatcttaaccaaactataactaaaaacgaccaaacgctccaaatcgccctcgaactaaaaacgattaaacgcgctaaaaccgaaaataattatcaaaactacgaacacgataaaaaaaaaaaccgaataccgactcacgcacaaacccaacctataacaaaacgactaaaaccctctacgaaacacctaccgcaacatcctccaccaaatccaactcgcaaacgctcccgaccgtcttaaaaaacacatataacatatataaacgccgaactaccccgttctcccccatcccaccccctaaaaccaatcccccctccccaccgccgccgcctccccacccactccgcgctcaccccacaaccactccgcctaatctttccccgaccccacctccatacgctcctactactctttcaaacactacaacaaattacaacaaaacgaacaaataccgacaacgcgcgtaaaaacgaacgacgaacgccgcgaaacccaccccctccccgatctccccgcgccctcgccgcctcccgcgctaactctcaccgcataaaca

SEQ ID NO: 38455 - DNA, 585 bp, Artificial Sequence
  chemically treated genomic DNA (Homo sapiens) CpG-island No: 38455
gggaaaaggttgttggttaggttgcgttcgattttggttaggttgtggttgggagcgattaggcgttttaggtcgttttcgggttggaagcggttgagcgcgttgaggtcgaaggtgattgttaggattgcgggtacggtgaggaaaaagatcgggtgtcggtttacgtataaatttagtttgtggtagaacgattggagttttttgcgaagtatttgtcgtagtattttttattagatttagttcgtaggcgttttcggtcgttttaaaaagtatatgtgatatgtgtaagcgtcgggttatttcgtttttttttattttattttttggggttagttttttttttttatcgtcgtcgtttttttatttatttcgcgtttattttataattatttcgtttggttttttttcggttttatttttatgcgtttttattatttttttaaatattgtagtaagttgtagtaaggcgggtaaatatcgatagcgcgcgtgggggcgggcggcgggcgtcgcggggtttatttttttttcggttttttcgcgttttcgtcgtttttcgcgttggtttttatcgtatgagta

SEQ ID NO: 38456 - DNA, 585 bp, Artificial Sequence
  chemically treated genomic DNA (Homo sapiens) CpG-island No: 38456
tactcatacgataaaaaccaacgcgaaaaacgacgaaaacgcgaaaaaaccgaaaaaaaaataaaccccgcgacgcccgccgcccgcccccacgcgcgctatcgatatttacccgccttactacaacttactacaatatttaaaaaaataataaaaacgcataaaaataaaaccgaaaaaaaaccaaacgaaataattataaaataaacgcgaaataaataaaaaaacgacgacgataaaaaaaaaaaactaaccccaaaaaataaaataaaaaaaaacgaaataacccgacgcttacacatatcacatatactttttaaaacgaccgaaaacgcctacgaactaaatctaataaaaaatactacgacaaatacttcgcaaaaaactccaatcgttctaccacaaactaaatttatacgtaaaccgacacccgatctttttcctcaccgtacccgcaatcctaacaatcaccttcgacctcaacgcgctcaaccgcttccaacccgaaaacgacctaaaacgcctaatcgctcccaaccacaacctaaccaaaatcgaacgcaacctaaccaacaaccttttccc

SEQ ID NO: 38457 - DNA, 610 bp, Artificial Sequence
  chemically treated genomic DNA (Homo sapiens) CpG-island No: 38457
ttatattacgtattagcggacgcggagagcgagcgacgcgttagttgacggtcgatagacggtaagagtatcgggggaggtaaatagaggtcggcgtagaaggtcgtcgatcgagaaaaacgggtacgaggtacggtagtacgttataggagggtacggacgggcggatacggggcggaggagagcgcggagaggaggtgcgagacgtagggcggtatagggtagaagaacgagggcgcgttacggcgcgaagacgtagataagtcggcgtcggcggcggtatacgagaggtacggagcgagagagggtatagaatacggggaggcgaacgttaggaaagacgcgttagcgatacggcgtagggacggacgggacgaaatcgatacgtagtttacgcgattcgaggattataggtcgatagcgaggttaagcgggtagtagagagaggtaggtcggcgtagaggattacgtagaagcgcgtagaatttaaatttagcgagagtagaacgacggtagtaaagcggaaggtagtataacgtagaaagaatgagtcgtagggaaagattattattatggttagtttaagtcgagtttataacggggttttgtt

SEQ ID NO: 38458 - DNA, 610 bp, Artificial Sequence
  chemically treated genomic DNA (Homo sapiens) CpG-island No: 38458
aacaaaaccccgttataaactcgacttaaactaaccataataataatctttccctacgactcattctttctacgttatactaccttccgctttactaccgtcgttctactctcgctaaatttaaattctacgcgcttctacgtaatcctctacgccgacctacctctctctactacccgcttaacctcgctatcgacctataatcctcgaatcgcgtaaactacgtatcgatttcgtcccgtccgtccctacgccgtatcgctaacgcgtctttcctaacgttcgcctccccgtattctataccctctctcgctccgtacctctcgtataccgccgccgacgccgacttatctacgtcttcgcgccgtaacgcgccctcgttcttctaccctataccgccctacgtctcgcacctcctctccgcgctctcctccgccccgtatccgcccgtccgtaccctcctataacgtactaccgtacctcgtacccgtttttctcgatcgacgaccttctacgccgacctctatttacctcccccgatactcttaccgtctatcgaccgtcaactaacgcgtcgctcgctctccgcgtccgctaatacgtaatataa

SEQ ID NO: 38459 - DNA, 610 bp, Artificial Sequence
  chemically treated genomic DNA (Homo sapiens) CpG-island No: 38459
ggtagggtttcgttgtggattcggtttgagttgattatggtagtggtttttttttgcggtttattttttttgcgttgtattgtttttcgttttgttgtcgtcgttttgttttcgttggatttgggttttgcgcgtttttgcgtagttttttgcgtcggtttgtttttttttgttgttcgtttggtttcgttgtcggtttgtagttttcgggtcgcgtgggttgcgtgtcggtttcgtttcgttcgtttttgcgtcgtgtcgttggcgcgttttttttggcgttcgttttttcgtgttttgtgttttttttcgtttcgtgtttttcgtgtgtcgtcgtcggcgtcggtttgtttgcgttttcgcgtcgtggcgcgttttcgtttttttgttttgtgtcgttttgcgtttcgtatttttttttcgcgttttttttcgtttcgtgttcgttcgttcgtgtttttttgtggcgtgttgtcgtgtttcgtgttcgtttttttcggtcggcggttttttgcgtcggtttttgtttgtttttttcggtgtttttgtcgtttgtcggtcgttagttggcgcgtcgttcgtttttcgcgttcgttgatgcgtggtgtgg

SEQ ID NO: 38460 - DNA, 610 bp, Artificial Sequence
  chemically treated genomic DNA (Homo sapiens) CpG-island No: 38460
ccacaccacgcatcaacgaacgcgaaaaacgaacgacgcgccaactaacgaccgacaaacgacaaaaacaccgaaaaaaacaaacaaaaaccgacgcaaaaaaccgccgaccgaaaaaaacgaacacgaaacacgacaacacgccacaaaaaaacacgaacgaacgaacacgaaacgaaaaaaaacgcgaaaaaaaaatacgaaacgcaaaacgacacaaaacaaaaaaacgaaaacgcgccacgacgcgaaaacgcaaacaaaccgacgccgacgacgacacacgaaaaacacgaaacgaaaaaaaacacaaaacacgaaaaaacgaacgccaaaaaaaacgcgccaacgacacgacgcaaaaacgaacgaaacgaaaccgacacgcaacccacgcgacccgaaaactacaaaccgacaacgaaaccaaacgaacaacaaaaaaaaacaaaccgacgcaaaaaactacgcaaaaacgcgcaaaacccaaatccaacgaaaacaaaacgacgacaacaaaacgaaaaacaatacaacgcaaaaaaaataaaccgcaaaaaaaaaccactaccataatcaactcaaaccgaatccacaacgaaaccctacc

SEQ ID NO: 38461 - DNA, 515 bp, Artificial Sequence
  chemically treated genomic DNA (Homo sapiens) CpG-island No: 38461
agagcgcgtcgagttttttcgtaaggtaggacgttaacgtgagttttgggagaataagaggaggtagagtatagtttttcgcgttaaaatttcgtcggaaagttgttggttattggtcgatgggattttttagtatttttttcgggttagattttttcgatttcgggttttcgatagtggaaattttggttttggtttgttcgaagtagttttttaaagttcgtttggtattatacgtcggcgttgcgtcggtatcgcgggtcgtcgggagtttcgaaagatttatttatatttattttttggtcgagttattcggttcggtagattttatttgtcggggttcgttcgttggaaattgtgtagcgttgagggtagtttcggggattcgttcgttttgtagtcgtatcgtattatatcgttttaggttgcgttttttgaagtagattgttcggaagttttagaggaaagattggggggcgttgttgttattttttcgttttcgtttttcgtttggg

SEQ ID NO: 38462 - DNA, 515 bp, Artificial Sequence
  chemically treated genomic DNA (Homo sapiens) CpG-island No: 38462
cccaaacgaaaaacgaaaacgaaaaaataacaacaacgccccccaatctttcctctaaaacttccgaacaatctacttcaaaaaacgcaacctaaaacgatataatacgatacgactacaaaacgaacgaatccccgaaactaccctcaacgctacacaatttccaacgaacgaaccccgacaaataaaatctaccgaaccgaataactcgaccaaaaaataaatataaataaatctttcgaaactcccgacgacccgcgataccgacgcaacgccgacgtataataccaaacgaactttaaaaaactacttcgaacaaaccaaaaccaaaatttccactatcgaaaacccgaaatcgaaaaaatctaacccgaaaaaaatactaaaaaatcccatcgaccaataaccaacaactttccgacgaaattttaacgcgaaaaactatactctacctcctcttattctcccaaaactcacgttaacgtcctaccttacgaaaaaactcgacgcgctct

SEQ ID NO: 38463 - DNA, 515 bp, Artificial Sequence
  chemically treated genomic DNA (Homo sapiens) CpG-island No: 38463
tttaggcgaggggcggggacgagaaagtagtagtagcgttttttagttttttttttgaagttttcgaatagtttgttttagggagcgtagtttgaggcggtgtggtgcggtgcggttgtagggcgggcgagttttcggagttgtttttagcgttgtatagtttttagcgagcggatttcggtagatgaggtttgtcgagtcgggtggttcgattaaggagtgggtgtgggtgggtttttcggggttttcggcgattcgcggtgtcgacgtaacgtcgacgtatggtgttaagcgaattttaaaaagttgtttcggataaattagagttaggatttttattgtcggggattcgggatcggaagggtttagttcgagggaaatgttggaagattttatcggttagtgattagtaatttttcggcgagattttgacgcggagaattgtgttttgtttttttttatttttttaaagtttacgttggcgttttgttttgcgggggaattcggcgcgtttt

SEQ ID NO: 38464 - DNA, 515 bp, Artificial Sequence
  chemically treated genomic DNA (Homo sapiens) CpG-island No: 38464
aaaacgcgccgaattcccccgcaaaacaaaacgccaacgtaaactttaaaaaaataaaaaaaaacaaaacacaattctccgcgtcaaaatctcgccgaaaaattactaatcactaaccgataaaatcttccaacatttccctcgaactaaacccttccgatcccgaatccccgacaataaaaatcctaactctaatttatccgaaacaactttttaaaattcgcttaacaccatacgtcgacgttacgtcgacaccgcgaatcgccgaaaaccccgaaaaacccacccacacccactccttaatcgaaccacccgactcgacaaacctcatctaccgaaatccgctcgctaaaaactatacaacgctaaaaacaactccgaaaactcgcccgccctacaaccgcaccgcaccacaccgcctcaaactacgctccctaaaacaaactattcgaaaacttcaaaaaaaaaactaaaaaacgctactactactttctcgtccccgcccctcgcctaaa

SEQ ID NO: 38465 - DNA, 783 bp, Artificial Sequence
  chemically treated genomic DNA (Homo sapiens) CpG-island No: 38465
  unsure (294)
ttttcgttttttttttcgtttttttttttttcgcgtgtgttttttttttttttttttttgcgttttttgttgcgtttttggtcgtgttttgtttttttggtttcgttgttttgcgcgttgtttgtcgttcgttttttagtttttttttttttttttttgtttgggtttcgttttttttcgttttcgtcgttttcgttttttttttttttttttttcgtcgtttcgtttttcgttttttttgtttttttttttttcgtcggcgttcgtttttcgttttttttttttttttttttngcgttgtttttttttttcgtttcgttttttttttgttcgcgtttttttcgcgttggtcgttttttttttttttttcgtcgcgtgtttcgtttttttcgcggcgtggtttatgcgtgtttttcgtgtcgttttttttcgtttcggttttttggttcgtttgtttttcgtttcgttcgcgtttttttttttttttttcgtttagttttttcgttttttgtgcgcgcgtcgcgtttttgtcgttgtgcgttttgcgttttatttttcgtttttgttcgcgcgttacgcgtttagcgttatatttttttttgtttacgtagtatttcggagaaggggattatttgcgtagttttcgtttgcgttacgttcggagtgttgcgttttattattgttgttgtgcgcgcgttttatgagtcgtgtgtcgtgcgtatttgtgtttggcgtttagtcggcgttgatcgtttgttcgtgtcgtcgatatagtatatcgga

SEQ ID NO: 38466 - DNA, 783 bp, Artificial Sequence
  chemically treated genomic DNA (Homo sapiens) CpG-island No: 38466
  unsure (490)
tccgatatactatatcgacgacacgaacaaacgatcaacgccgactaaacgccaaacacaaatacgcacgacacacgactcataaaacgcgcgcacaacaacaataataaaacgcaacactccgaacgtaacgcaaacgaaaactacgcaaataatccccttctccgaaatactacgtaaacaaaaaaaaatataacgctaaacgcgtaacgcgcgaacaaaaacgaaaaataaaacgcaaaacgcacaacgacaaaaacgcgacgcgcgcacaaaaaacgaaaaaactaaacgaaaaaaaaaaaaaaaaacgcgaacgaaacgaaaaacaaacgaaccaaaaaaccgaaacgaaaaaaaacgacacgaaaaacacgcataaaccacgccgcgaaaaaaacgaaacacgcgacgaaaaaaaaaaaaaaaacgaccaacgcgaaaaaaacgcgaacaaaaaaaaaacgaaacgaaaaaaaaaaacaacgcnaaaaaaaaaaaaaaaaaaaacgaaaaacgaacgccgacgaaaaaaaaaaaaacaaaaaaaacgaaaaacgaaacgacgaaaaaaaaaaaaaaaaaaaacgaaaacgacgaaaacgaaaaaaaacgaaacccaaacaaaaaaaaaaaaaaaaaaactaaaaaacgaacgacaaacaacgcgcaaaacaacgaaaccaaaaaaacaaaacacgaccaaaaacgcaacaaaaaacgcaaaaaaaaaaaaaaaaaaaacacacgcgaaaaaaaaaaaaacgaaaaaaaaaacgaaaa

SEQ ID NO: 38467 - DNA, 783 bp, Artificial Sequence
  chemically treated genomic DNA (Homo sapiens) CpG-island No: 38467
  unsure (490)
ttcgatgtattgtgtcggcgatacgagtaggcgattaacgtcgattagacgttagatataagtacgtacgatatacgatttataaggcgcgcgtataatagtagtgatagaacgtaatatttcgggcgtggcgtaagcggaggttgcgtaggtagttttttttttcgaaatattacgtgagtaggggaaggtgtggcgttggacgcgtggcgcgcggatagaggcgggaaatggaacgtaagacgtatagcgataagggcgcgacgcgcgtataaggggcggaaaggttaggcgagaaaagggggaggggacgcgagcggaacggaagataagcgggttagaagatcggggcgggagggaacgatacgggaggtacgtatgggttacgtcgcgagggaagcggggtacgcgacggggggaaaggagagagcggttaacgcggaggaggcgcgggtagaggagaagcgggacgggggaggggagtagcgtngggaggggagagggaaggagcggggagcggacgtcggcgggagagaaaggagtaaggggggcgggaggcggggcggcgggagaaagagaagagaaggacgaagacggcgaagacgggggggggcggagtttaagtaagagaggaagagggggggttggaagacgggcgataggtagcgcgtagggtagcgggattagaaagataaggtacgattaagagcgtaataaaaggcgtaaaaaaggaaggaaaaaaagtatacgcgaaaggggggggggcggaggggagggcggggg

SEQ ID NO: 38468 - DNA, 783 bp, Artificial Sequence
  chemically treated genomic DNA (Homo sapiens) CpG-island No: 38468
  unsure (294)
cccccgccctcccctccgcccccccccctttcgcgtatactttttttccttccttttttacgccttttattacgctcttaatcgtaccttatctttctaatcccgctaccctacgcgctacctatcgcccgtcttccaaccccccctcttcctctcttacttaaactccgcccccccccgtcttcgccgtcttcgtccttctcttctctttctcccgccgccccgcctcccgccccccttactcctttctctcccgccgacgtccgctccccgctccttccctctcccctcccnacgctactcccctcccccgtcccgcttctcctctacccgcgcctcctccgcgttaaccgctctctcctttccccccgtcgcgtaccccgcttccctcgcgacgtaacccatacgtacctcccgtatcgttccctcccgccccgatcttctaacccgcttatcttccgttccgctcgcgtcccctcccccttttctcgcctaacctttccgccccttatacgcgcgtcgcgcccttatcgctatacgtcttacgttccatttcccgcctctatccgcgcgccacgcgtccaacgccacaccttcccctactcacgtaatatttcgaaaaaaaaaactacctacgcaacctccgcttacgccacgcccgaaatattacgttctatcactactattatacgcgcgccttataaatcgtatatcgtacgtacttatatctaacgtctaatcgacgttaatcgcctactcgtatcgccgacacaatacatcgaa

SEQ ID NO: 38469 - DNA, 593 bp, Artificial Sequence
  chemically treated genomic DNA (Homo sapiens) CpG-island No: 38469
tgggcgtagacggagcgttaggatacgggttttaggtttttggttagcggtgtggcgagtcggtatagcgtttatacgattatcgttataagttatttgtcgagttaacgttgtttaggtcgagttattttttcgggggtagattgtatttcgggattttttggcgtttttttattaaagttcgtttcgtttttttttgtcgcgttgcgttcggagtcgtttaggcgtttatttttcgtagtcgtcggttttgaagtgtttttttttcgtcggtttcggtgtcgttttttttcgttcggtcggttaggaggatttattgggtagtcgtttttaattcgggtatgggtttcggttttcgagggttcgtttttttgggtttttcgttgtcgtacgaggcgcgacgggggttttgcgttttcgggtgatttcgttcgatttcgttcgatttttcgagacgtttcggggttgcgcgtttttttttcgacggggttttttcgtagaggtttcggtgatcgtttcgacgtttcgatcgtttcgggatcgttgttattttggaagaagtgggggtttttttatagtataagttcggtttt

SEQ ID NO: 38470 - DNA, 593 bp, Artificial Sequence
  chemically treated genomic DNA (Homo sapiens) CpG-island No: 38470
aaaaccgaacttatactataaaaaaacccccacttcttccaaaataacaacgatcccgaaacgatcgaaacgtcgaaacgatcaccgaaacctctacgaaaaaaccccgtcgaaaaaaaaacgcgcaaccccgaaacgtctcgaaaaatcgaacgaaatcgaacgaaatcacccgaaaacgcaaaacccccgtcgcgcctcgtacgacaacgaaaaacccaaaaaaacgaaccctcgaaaaccgaaacccatacccgaattaaaaacgactacccaataaatcctcctaaccgaccgaacgaaaaaaaacgacaccgaaaccgacgaaaaaaaaacacttcaaaaccgacgactacgaaaaataaacgcctaaacgactccgaacgcaacgcgacaaaaaaaaacgaaacgaactttaataaaaaaacgccaaaaaatcccgaaatacaatctacccccgaaaaaataactcgacctaaacaacgttaactcgacaaataacttataacgataatcgtataaacgctataccgactcgccacaccgctaaccaaaaacctaaaacccgtatcctaacgctccgtctacgccca

SEQ ID NO: 38471 - DNA, 593 bp, Artificial Sequence
  chemically treated genomic DNA (Homo sapiens) CpG-island No: 38471
gggatcgagtttgtgttgtggggaaatttttattttttttaaggtgatagcgatttcgggacggtcgaggcgtcggggcggttatcgagatttttgcgggaagatttcgtcggggagagggcgcgtagtttcgaagcgtttcgggaagtcgagcggaatcgggcgggattattcgggggcgtagagttttcgtcgcgtttcgtgcggtagcggagagtttaggagaacgagttttcgggggtcgaagtttatgttcgggttgggggcggttgtttagtgagtttttttggtcggtcgggcggagaagagcgatatcgaagtcggcgggaggggagtattttaaggtcggcggttgcggaggatgggcgtttgagcggtttcgagcgtagcgcggtagaggaaggcgaggcgagttttggtgaggaggcgttaagggatttcgaagtgtagtttgttttcgggaagatggttcggtttgggtagcgttggttcggtaagtggtttgtggcgatggtcgtgtgggcgttgtgtcggttcgttatatcgttggttaagaatttggagttcgtattttgacgtttcgtttacgttta

SEQ ID NO: 38472 - DNA, 593 bp, Artificial Sequence
  chemically treated genomic DNA (Homo sapiens) CpG-island No: 38472
taaacgtaaacgaaacgtcaaaatacgaactccaaattcttaaccaacgatataacgaaccgacacaacgcccacacgaccatcgccacaaaccacttaccgaaccaacgctacccaaaccgaaccatcttcccgaaaacaaactacacttcgaaatcccttaacgcctcctcaccaaaactcgcctcgccttcctctaccgcgctacgctcgaaaccgctcaaacgcccatcctccgcaaccgccgaccttaaaatactcccctcccgccgacttcgatatcgctcttctccgcccgaccgaccaaaaaaactcactaaacaaccgcccccaacccgaacataaacttcgacccccgaaaactcgttctcctaaactctccgctaccgcacgaaacgcgacgaaaactctacgcccccgaataatcccgcccgattccgctcgacttcccgaaacgcttcgaaactacgcgccctctccccgacgaaatcttcccgcaaaaatctcgataaccgccccgacgcctcgaccgtcccgaaatcgctatcaccttaaaaaaaataaaaatttccccacaacacaaactcgatccc

SEQ ID NO: 38473 - DNA, 517 bp, Artificial Sequence
  chemically treated genomic DNA (Homo sapiens) CpG-island No: 38473
tacgtagacgattcggtaattgggttgtaggttcgcggttgcggagtgcgtaggcgcgtcgagatggtcgcgtttttggtcgtttagagtcggagcggttcgcggagttgcggaggtagttatggtcggggcgttgtgcggttgttggtttcgtttgggcggggttcgttcgtttatttcgttgggttcggtgagtttttcgggggagggaggtcggtcggtggtttaggggagggtcgtttttatttcgttttttgtttcggcgtttcggggtagagtttcgcggaagaagtagacgttggggtcgcgaatgtgtatgtgcgcgcgtgtaatgtgtgtgcgcgcgtagggtttgtatatgtttttgggggtttgggtgtatgtgtacgtttgtgtgtttgtatggtgttcgttagtgggtttttgcgcgtttatatttttggggggggggtgtgttcgttgatgtttgtttgtttgtgttagcgttatgtttttcgagtgtatttttgtgtgcgtg

SEQ ID NO: 38474 - DNA, 517 bp, Artificial Sequence
  chemically treated genomic DNA (Homo sapiens) CpG-island No: 38474
cacgcacacaaaaatacactcgaaaaacataacgctaacacaaacaaacaaacatcaacgaacacaccccccccccaaaaatataaacgcgcaaaaacccactaacgaacaccatacaaacacacaaacgtacacatacacccaaacccccaaaaacatatacaaaccctacgcgcgcacacacattacacgcgcgcacatacacattcgcgaccccaacgtctacttcttccgcgaaactctaccccgaaacgccgaaacaaaaaacgaaataaaaacgaccctcccctaaaccaccgaccgacctccctcccccgaaaaactcaccgaacccaacgaaataaacgaacgaaccccgcccaaacgaaaccaacaaccgcacaacgccccgaccataactacctccgcaactccgcgaaccgctccgactctaaacgaccaaaaacgcgaccatctcgacgcgcctacgcactccgcaaccgcgaacctacaacccaattaccgaatcgtctacgta

SEQ ID NO: 38475 - DNA, 517 bp, Artificial Sequence
  chemically treated genomic DNA (Homo sapiens) CpG-island No: 38475
tacgtatatagaaatatattcggaagatataacgttgatataagtaggtagatattaacgaatatattttttttttaaaaatataagcgcgtagaaatttattgacggatattatgtagatatataagcgtatatatatatttagatttttaagaatatatgtagattttgcgcgcgtatatatattatacgcgcgtatatgtatattcgcggttttagcgtttgtttttttcgcgggattttgtttcggggcgtcggggtaaggggcggggtaaagacggtttttttttgggttatcggtcggtttttttttttcgggagatttatcgggtttaacgggatgagcgggcgggtttcgtttaggcggaattagtagtcgtatagcgtttcgattatggttgttttcgtagtttcgcgggtcgtttcggttttaggcggttaggagcgcggttatttcggcgcgtttgcgtatttcgtagtcgcgggtttgtaatttagttatcgagtcgtttgcgtg

SEQ ID NO: 38476 - DNA, 517 bp, Artificial Sequence
  chemically treated genomic DNA (Homo sapiens) CpG-island No: 38476
cacgcaaacgactcgataactaaattacaaacccgcgactacgaaatacgcaaacgcgccgaaataaccgcgctcctaaccgcctaaaaccgaaacgacccgcgaaactacgaaaacaaccataatcgaaacgctatacgactactaattccgcctaaacgaaacccgcccgctcatcccgttaaacccgataaatctcccgaaaaaaaaaaaccgaccgataacccaaaaaaaaaccgtctttaccccgccccttaccccgacgccccgaaacaaaatcccgcgaaaaaaacaaacgctaaaaccgcgaatatacatatacgcgcgtataatatatatacgcgcgcaaaatctacatatattcttaaaaatctaaatatatatatacgcttatatatctacataatatccgtcaataaatttctacgcgcttatatttttaaaaaaaaaatatattcgttaatatctacctacttatatcaacgttatatcttccgaatatatttctatatacgta

SEQ ID NO: 38477 - DNA, 541 bp, Artificial Sequence
  chemically treated genomic DNA (Homo sapiens) CpG-island No: 38477
cgtgacgcgttagggtttttagcgtttttcgtttaggaggaggtttttttcggttttgtatttgatttgtttcgtcgtttgacggtttaagcggtcggagcggtttgtgggtgtttatgcggtcgggttagttcgggtaggaggagtaggggcgcgaacgcggatcggagatataggcggttcgggacgcggcggcggggtcggggcgcggagtagagtcgggtaggggagcgatacggaacggttggttatttgcggttcgggatagggagttttagaattttagttagtttttagttttaataatataagatggtcgatacgtcgttacgtacgttacgtgatcgcgttttcgtttcgttacgttttattgttgcgttttcgttttttttcgtttttttttttattttttagttttttacgatatttttttttttcgttattattcgtttttttgtttagatacgtttttgttcgagattcggatgaaaggttggaagagggcggggtcgtggtagtgcgtaggttttcgttgattttt

SEQ ID NO: 38478 - DNA, 541 bp, Artificial Sequence
  chemically treated genomic DNA (Homo sapiens) CpG-island No: 38478
aaaaatcaacgaaaacctacgcactaccacgaccccgccctcttccaacctttcatccgaatctcgaacaaaaacgtatctaaacaaaaaaacgaataataacgaaaaaaaaaaatatcgtaaaaaactaaaaaataaaaaaaaaaacgaaaaaaaacgaaaacgcaacaataaaacgtaacgaaacgaaaacgcgatcacgtaacgtacgtaacgacgtatcgaccatcttatattattaaaactaaaaactaactaaaattctaaaactccctatcccgaaccgcaaataaccaaccgttccgtatcgctcccctacccgactctactccgcgccccgaccccgccgccgcgtcccgaaccgcctatatctccgatccgcgttcgcgcccctactcctcctacccgaactaacccgaccgcataaacacccacaaaccgctccgaccgcttaaaccgtcaaacgacgaaacaaatcaaatacaaaaccgaaaaaaacctcctcctaaacgaaaaacgctaaaaaccctaacgcgtcacg

SEQ ID NO: 38479 - DNA, 541 bp, Artificial Sequence
  chemically treated genomic DNA (Homo sapiens) CpG-island No: 38479
aggggttagcgggagtttgcgtattgttacggtttcgtttttttttaattttttattcgggtttcgggtaggggcgtgtttgggtagaggggcgggtggtggcggaaaggaaggatgtcgtgggagattggagagtggggggggaagcgggaaggggcgggggcgtagtagtggggcgtggcggagcgggagcgcggttacgtgacgtgcgtggcgacgtgtcggttattttgtgttgttgaggttgaggattgattggggttttgagattttttgtttcggatcgtaggtaattagtcgtttcgtgtcgtttttttgttcggttttgtttcgcgtttcggtttcgtcgtcgcgtttcgggtcgtttgtgttttcggttcgcgttcgcgtttttgttttttttgttcgagttggttcggtcgtatggatatttataggtcgtttcggtcgtttgggtcgttaggcgacgggataggttaggtgtagggtcggagggagtttttttttgggcgaggggcgttgagggttttggcgcgttacg

SEQ ID NO: 38480 - DNA, 541 bp, Artificial Sequence
  chemically treated genomic DNA (Homo sapiens) CpG-island No: 38480
cgtaacgcgccaaaaccctcaacgcccctcgcccaaaaaaaaactccctccgaccctacacctaacctatcccgtcgcctaacgacccaaacgaccgaaacgacctataaatatccatacgaccgaaccaactcgaacaaaaaaaacaaaaacgcgaacgcgaaccgaaaacacaaacgacccgaaacgcgacgacgaaaccgaaacgcgaaacaaaaccgaacaaaaaaacgacacgaaacgactaattacctacgatccgaaacaaaaaatctcaaaaccccaatcaatcctcaacctcaacaacacaaaataaccgacacgtcgccacgcacgtcacgtaaccgcgctcccgctccgccacgccccactactacgcccccgccccttcccgcttccccccccactctccaatctcccacgacatccttcctttccgccaccacccgcccctctacccaaacacgcccctacccgaaacccgaataaaaaattaaaaaaaaacgaaaccgtaacaatacgcaaactcccgctaacccct

SEQ ID NO: 38481 - DNA, 681 bp, Artificial Sequence
  chemically treated genomic DNA (Homo sapiens) CpG-island No: 38481
ggggtcgtgtcgcgtttttttttttagtaatattcgttcgcgtatagttttggaggcgcggtttcgcggtattttcggttacgttttatttcgttttgttttcgttcgtcgagcgttcggtaggggcggtggttgcggcgttgcgattcgttcgcgttttttttcggtcgatttgggcgtagcgggcggggttcgggtaattcgttttttttttatttttttgtttcgtttttttcgtttttttcgcgtttttttatttagcgcggggtcggcgcggttgcggttggtttttattttggggtcggatggggagacgtgattgttacggttcgggttgcgtcgggaataggcgcgggggtgggaggggaggtcgggtttcggggtatttggcggtcgaggcgtttggagggggtagcggtcgggtttcgtttttagtatcgcgtttttaggcgcgggggaagggaaatgggcgtttttttggcgttcgaattttgtttgggtttcggcgagtgcgcgttaagttcgtttttttcgttttttgtttcgtcgcgttcgggtcgtttcgtagtagggagagttcggtttgggacggcgggcgggtttttttttggtgcgtagtaggttgttagggttttttttcgagattaggtgaagaatttgtgggttggagttagatttatt

SEQ ID NO: 38482 - DNA, 681 bp, Artificial Sequence
  chemically treated genomic DNA (Homo sapiens) CpG-island No: 38482
aataaatctaactccaacccacaaattcttcacctaatctcgaaaaaaaaccctaacaacctactacgcaccaaaaaaaaacccgcccgccgtcccaaaccgaactctccctactacgaaacgacccgaacgcgacgaaacaaaaaacgaaaaaaacgaacttaacgcgcactcgccgaaacccaaacaaaattcgaacgccaaaaaaacgcccatttcccttcccccgcgcctaaaaacgcgatactaaaaacgaaacccgaccgctaccccctccaaacgcctcgaccgccaaataccccgaaacccgacctcccctcccacccccgcgcctattcccgacgcaacccgaaccgtaacaatcacgtctccccatccgaccccaaaataaaaaccaaccgcaaccgcgccgaccccgcgctaaataaaaaaacgcgaaaaaaacgaaaaaaacgaaacaaaaaaataaaaaaaaaacgaattacccgaaccccgcccgctacgcccaaatcgaccgaaaaaaaacgcgaacgaatcgcaacgccgcaaccaccgcccctaccgaacgctcgacgaacgaaaacaaaacgaaataaaacgtaaccgaaaataccgcgaaaccgcgcctccaaaactatacgcgaacgaatattactaaaaaaaaaaacgcgacacgacccc

SEQ ID NO: 38483 - DNA, 681 bp, Artificial Sequence
  chemically treated genomic DNA (Homo sapiens) CpG-island No: 38483
aatggatttgattttaatttataaattttttatttggtttcgaaaagaggttttggtaatttattgcgtattagaggggaattcgttcgtcgttttaggtcgggttttttttgttgcggagcggttcgggcgcggcgggatagggaacggaaggaacgggtttggcgcgtattcgtcgaggtttaggtaggattcgagcgttagggaggcgtttattttttttttttcgcgtttgggaacgcggtgttgggggcggggttcgatcgttgttttttttaaacgtttcgatcgttaggtgtttcgaagttcggtttttttttttattttcgcgtttgttttcggcgtagttcgagtcgtggtagttacgtttttttattcggttttaaagtaagagttagtcgtagtcgcgtcgatttcgcgttgggtgggagggcgcggggagggcggggagggcggggtaaggaggtgaggggagggcgggttgttcgggtttcgttcgttgcgtttaggtcggtcggggagaggcgcgggcgagtcgtagcgtcgtaattatcgtttttgtcgggcgttcggcgagcgggggtagggcggggtgaggcgtggtcggggatgtcgcgaggtcgcgtttttagggttgtgcgcgggcgggtgttgttggggagaaaagcgcggtacggtttt

SEQ ID NO: 38484 - DNA, 681 bp, Artificial Sequence
  chemically treated genomic DNA (Homo sapiens) CpG-island No: 38484
aaaaccgtaccgcgcttttctccccaacaacacccgcccgcgcacaaccctaaaaacgcgacctcgcgacatccccgaccacgcctcaccccgccctacccccgctcgccgaacgcccgacaaaaacgataattacgacgctacgactcgcccgcgcctctccccgaccgacctaaacgcaacgaacgaaacccgaacaacccgccctcccctcacctccttaccccgccctccccgccctccccgcgccctcccacccaacgcgaaatcgacgcgactacgactaactcttactttaaaaccgaataaaaaaacgtaactaccacgactcgaactacgccgaaaacaaacgcgaaaataaaaaaaaaaaccgaacttcgaaacacctaacgatcgaaacgtttaaaaaaaacaacgatcgaaccccgcccccaacaccgcgttcccaaacgcgaaaaaaaaaaaataaacgcctccctaacgctcgaatcctacctaaacctcgacgaatacgcgccaaacccgttccttccgttccctatcccgccgcgcccgaaccgctccgcaacaaaaaaaacccgacctaaaacgacgaacgaattcccctctaatacgcaataaattaccaaaacctcttttcgaaaccaaataaaaaatttataaattaaaatcaaatccatt

SEQ ID NO: 38485 - DNA, 618 bp, Artificial Sequence
  chemically treated genomic DNA (Homo sapiens) CpG-island No: 38485
aacgtagcgcgagcgatacggggcgggggcgtttcgggcgcgttggttgggggttcgcggggcgtcgtttcgtagtggaagggggtagatttcggaagcggtcgtcggttgttgggggtgggagatttgtttttttttttagtcgttcgtcgttagttcgcgttgtaggtgatttggttagtgtcgatcgtttcgttttcgtttagtcgttttcgtggggtttttcggttttgcgcgttttaaacgatttcggttgtcgtttgttcggtagtttttcgcggttttttacgttttttcgtttttcgggtcgcgcggtaggtttttttgatgagttagcgggagttcgggagtttttaatcgtttcgggtatttgtttcggtgacgtattttgagttacgggcgttcgggtcgtcgtcgaggtcgagcgcgtagtcgggagcgtcgagcgtagtttttacgtttgtcgcgggcgtttatttagttcggttcggtttcgtattttttttttttcgtttttagcgtcgttcgttttgtattttttggtttagttttaggttgatattagacgttggtcgttcggttattttttgagttaatagttttcgaagtagagttcgt

SEQ ID NO: 38486 - DNA, 618 bp, Artificial Sequence
  chemically treated genomic DNA (Homo sapiens) CpG-island No: 38486
acgaactctacttcgaaaactattaactcaaaaaataaccgaacgaccaacgtctaatatcaacctaaaactaaaccaaaaaatacaaaacgaacgacgctaaaaacgaaaaaaaaaaaatacgaaaccgaaccgaactaaataaacgcccgcgacaaacgtaaaaactacgctcgacgctcccgactacgcgctcgacctcgacgacgacccgaacgcccgtaactcaaaatacgtcaccgaaacaaatacccgaaacgattaaaaactcccgaactcccgctaactcatcaaaaaaacctaccgcgcgacccgaaaaacgaaaaaacgtaaaaaaccgcgaaaaactaccgaacaaacgacaaccgaaatcgtttaaaacgcgcaaaaccgaaaaaccccacgaaaacgactaaacgaaaacgaaacgatcgacactaaccaaatcacctacaacgcgaactaacgacgaacgactaaaaaaaaaaacaaatctcccacccccaacaaccgacgaccgcttccgaaatctacccccttccactacgaaacgacgccccgcgaacccccaaccaacgcgcccgaaacgcccccgccccgtatcgctcgcgctacgtt

SEQ ID NO: 38487 - DNA, 618 bp, Artificial Sequence
  chemically treated genomic DNA (Homo sapiens) CpG-island No: 38487
gcgggttttgtttcggaaattgttgatttagagggtggtcgggcggttagcgtttgatgttagtttggagttgggttagggagtgtagggcgggcggcgttgggagcgagggaggaagggtgcggggtcgggtcgggttgggtgggcgttcgcggtaggcgtaggggttgcgttcggcgttttcggttgcgcgttcggtttcggcggcggttcgggcgttcgtgatttagggtgcgttatcggagtagatgttcggggcggttggaggttttcgggttttcgttgatttattagaaaggtttgtcgcgcggttcggggggcgggggaacgtgggggatcgcggggagttgtcgggtaggcggtagtcgaggtcgtttgaggcgcgtagagtcggaaaattttacggagacggttgggcgggggcggggcgatcggtattgattaggttatttgtagcgcgggttgacggcgggcgattgaaggagggagtaagttttttatttttagtagtcggcggtcgttttcgaagtttgtttttttttattgcggagcggcgtttcgcgggtttttagttagcgcgttcgaggcgttttcgtttcgtgtcgttcgcgttgcgtt

SEQ ID NO: 38488 - DNA, 618 bp, Artificial Sequence
  chemically treated genomic DNA (Homo sapiens) CpG-island No: 38488
aacgcaacgcgaacgacacgaaacgaaaacgcctcgaacgcgctaactaaaaacccgcgaaacgccgctccgcaataaaaaaaaacaaacttcgaaaacgaccgccgactactaaaaataaaaaacttactccctccttcaatcgcccgccgtcaacccgcgctacaaataacctaatcaataccgatcgccccgcccccgcccaaccgtctccgtaaaattttccgactctacgcgcctcaaacgacctcgactaccgcctacccgacaactccccgcgatcccccacgttcccccgccccccgaaccgcgcgacaaacctttctaataaatcaacgaaaacccgaaaacctccaaccgccccgaacatctactccgataacgcaccctaaatcacgaacgcccgaaccgccgccgaaaccgaacgcgcaaccgaaaacgccgaacgcaacccctacgcctaccgcgaacgcccacccaacccgacccgaccccgcacccttcctccctcgctcccaacgccgcccgccctacactccctaacccaactccaaactaacatcaaacgctaaccgcccgaccaccctctaaatcaacaatttccgaaacaaaacccgc

SEQ ID NO: 38489 - DNA, 896 bp, Artificial Sequence
  chemically treated genomic DNA (Homo sapiens) CpG-island No: 38489
agtggcggcggcggtcgaaggagaaatagaatagcgtaggtaaaagaagaaaggcgcgggttgggtgggaagaggattcggattcgttatattgtagagtagtagagcgagaaaggatgagaaaaggtagagaaggcgacggtagaagaaaaaaggaaaaattgcggtcgcgattagagtttgaaagtgtgagaaggcggcgttagcgacgttagtatttatattagggggcgtggtttggtgatattatagttggtcgggtagtcgcgcgagcggggcggaattcggttgtagttcggagaaaagggagggggacggaagaggaaggaggattgagttcgggagagagaggggaggggtcggcgcgcgatcgggttatgtaggtgtagattggtcggtcgtttttcgttttttagttattcgtagtttttcggtaggcgaagggcggtcgcgcgggtgtgggtcgagagagggaggcggttcggttggagcgcgtcgttcgttcgattttcgtcgtttttcgggcgtttgcgtttacgttgcggggtttagcgtattgtgagtcgggtcgagttttatgttggtagcgtttgagagttgttttgggtcggaggtggcgcgaattttgtgcggtttagagtgggtttggggtaagtttgtcggcgtcgttgtcgagttttcgcgtttagtttttttcgttttgtgaggtttgtagtttattttggggagtgttttttcgggttgaggcgttcgttttcggtgatgcggtatttttttagggaagcgagtttttcgtggttagaaaggatcggtttagtgttcgggtgttaaaaagggttgtgattacgtgaaaatgtttttagtgttcgaacgttgtaatacggtgtagtggaaat

SEQ ID NO: 38490 - DNA, 896 bp, Artificial Sequence
  chemically treated genomic DNA (Homo sapiens) CpG-island No: 38490
atttccactacaccgtattacaacgttcgaacactaaaaacattttcacgtaatcacaaccctttttaacacccgaacactaaaccgatcctttctaaccacgaaaaactcgcttccctaaaaaaataccgcatcaccgaaaacgaacgcctcaacccgaaaaaacactccccaaaataaactacaaacctcacaaaacgaaaaaaactaaacgcgaaaactcgacaacgacgccgacaaacttaccccaaacccactctaaaccgcacaaaattcgcgccacctccgacccaaaacaactctcaaacgctaccaacataaaactcgacccgactcacaatacgctaaaccccgcaacgtaaacgcaaacgcccgaaaaacgacgaaaatcgaacgaacgacgcgctccaaccgaaccgcctccctctctcgacccacacccgcgcgaccgcccttcgcctaccgaaaaactacgaataactaaaaaacgaaaaacgaccgaccaatctacacctacataacccgatcgcgcgccgacccctcccctctctctcccgaactcaatcctccttcctcttccgtccccctcccttttctccgaactacaaccgaattccgccccgctcgcgcgactacccgaccaactataatatcaccaaaccacgccccctaatataaatactaacgtcgctaacgccgccttctcacactttcaaactctaatcgcgaccgcaatttttccttttttcttctaccgtcgccttctctaccttttctcatcctttctcgctctactactctacaatataacgaatccgaatcctcttcccacccaacccgcgcctttcttcttttacctacgctattctatttctccttcgaccgccgccgccact

SEQ ID NO: 38491 - DNA, 896 bp, Artificial Sequence
  chemically treated genomic DNA (Homo sapiens) CpG-island No: 38491
atttttattgtatcgtattgtaacgttcgagtattgaggatatttttacgtggttataattttttttaatattcggatattgggtcggttttttttggttacgaggaattcgtttttttaaaggagtatcgtattatcgagggcgggcgttttagttcgggaggatattttttagggtaaattataggttttataaagcggagggagttggacgcgaaggttcggtagcggcgtcgataggtttattttaggtttattttaggtcgtatagggttcgcgttattttcggtttaggatagtttttagacgttgttagtatggagttcgattcggtttataatgcgttgggtttcgtagcgtgagcgtaggcgttcgagaggcggcgggggtcgggcggacggcgcgttttagtcgagtcgtttttttttttcggtttatattcgcgcggtcgtttttcgtttgtcggggagttgcgggtggttggagggcgggaagcgatcggttagtttgtatttgtatgattcggtcgcgcgtcgattttttttttttttttttcgggtttagtttttttttttttttcgtttttttttttttttttcgggttgtaatcgggtttcgtttcgttcgcgcggttgttcggttagttgtgatgttattaggttacgttttttaatataaatattggcgtcgttggcgtcgtttttttatatttttaggttttgatcgcggtcgtagttttttttttttttttttgtcgtcgttttttttgtttttttttattttttttcgttttgttgttttgtagtgtgacgagttcgaattttttttttatttagttcgcgtttttttttttttgtttgcgttgttttatttttttttcggtcgtcgtcgttatt

SEQ ID NO: 38492 - DNA, 896 bp, Artificial Sequence
  chemically treated genomic DNA (Homo sapiens) CpG-island No: 38492
aataacgacgacgaccgaaaaaaaaataaaacaacgcaaacaaaaaaaaaaaaacgcgaactaaataaaaaaaaaattcgaactcgtcacactacaaaacaacaaaacgaaaaaaaataaaaaaaaacaaaaaaaacgacgacaaaaaaaaaaaaaaaaaactacgaccgcgatcaaaacctaaaaatataaaaaaacgacgccaacgacgccaatatttatattaaaaaacgtaacctaataacatcacaactaaccgaacaaccgcgcgaacgaaacgaaacccgattacaacccgaaaaaaaaaaaaaaaaacgaaaaaaaaaaaaaaactaaacccgaaaaaaaaaaaaaaaaaatcgacgcgcgaccgaatcatacaaatacaaactaaccgatcgcttcccgccctccaaccacccgcaactccccgacaaacgaaaaacgaccgcgcgaatataaaccgaaaaaaaaaaacgactcgactaaaacgcgccgtccgcccgacccccgccgcctctcgaacgcctacgctcacgctacgaaacccaacgcattataaaccgaatcgaactccatactaacaacgtctaaaaactatcctaaaccgaaaataacgcgaaccctatacgacctaaaataaacctaaaataaacctatcgacgccgctaccgaaccttcgcgtccaactccctccgctttataaaacctataatttaccctaaaaaatatcctcccgaactaaaacgcccgccctcgataatacgatactcctttaaaaaaacgaattcctcgtaaccaaaaaaaaccgacccaatatccgaatattaaaaaaaattataaccacgtaaaaatatcctcaatactcgaacgttacaatacgatacaataaaaat

SEQ ID NO: 38493 - DNA, 526 bp, Artificial Sequence
  chemically treated genomic DNA (Homo sapiens) CpG-island No: 38493
  unsure (47, 251, 363, 444)
tttttttttttttttttttttttttttttttttttttttttcgtcgntggtttttttttttcgtttttttttttcgtcgttcgcgttcgtcgtggttttttttttttttttgtcgttttttcgtttttttcgttttcgtttcgtcgtttttttttttcgtcgttttttttcgtttttttgttcggtgcgttcgtgtttttcgttgttcgttttttttttgttttttcgtcgttttttcgcgtcgttttttncgtcgttttttttttttttttgttttcgtttttgtgttttgtttcgtttttttcgttttttcgtttttttttttttcgttttcgcgtgttcgtcgcgttcgtcgtcgttttnttttttttttcgtttttttttcgtttttttttttttttttttcgttttttttttcgtttttcgttttgttttttttttcgntttttttttttcgttttttttttttttgttttttttttcgtattttttttttttcgattttttttttttattgagtttcgtt

SEQ ID NO: 38494 - DNA, 526 bp, Artificial Sequence
  chemically treated genomic DNA (Homo sapiens) CpG-island No: 38494
  unsure (83, 164, 276, 480)
aacgaaactcaataaaaaaaaaaaatcgaaaaaaaaaaaatacgaaaaaaaaaacaaaaaaaaaaaaaacgaaaaaaaaaaancgaaaaaaaaaacaaaacgaaaaacgaaaaaaaaaacgaaaaaaaaaaaaaaaaaaacgaaaaaaaaacgaaaaaaaaaanaaaacgacgacgaacgcgacgaacacgcgaaaacgaaaaaaaaaaaaacgaaaaaacgaaaaaaacgaaacaaaacacaaaaacgaaaacaaaaaaaaaaaaaaaacgacgnaaaaaacgacgcgaaaaaacgacgaaaaaacaaaaaaaaaacgaacaacgaaaaacacgaacgcaccgaacaaaaaaacgaaaaaaaacgacgaaaaaaaaaaacgacgaaacgaaaacgaaaaaaacgaaaaaacgacaaaaaaaaaaaaaaaaccacgacgaacgcgaacgacgaaaaaaaaaaacgaaaaaaaaaaaccancgacgaaaaaaaaaaaaaaaaaaaaaaaaaaaaaaaaaaaaaaaaa

SEQ ID NO: 38495 - DNA, 526 bp, Artificial Sequence
  chemically treated genomic DNA (Homo sapiens) CpG-island No: 38495
  unsure (83, 164, 276, 480)
ggcgaaatttagtggaaaagaggaatcggaaaagaggggatacgaaaaaagggataagggggaggggagcggaaagaggggancggaaggggaaataggacggggagcgaagaaaggggcggaagggaagaggaaaagaacggaggggggacgaggaagaagangagacggcggcggacgcggcgaatacgcgaggacgaagggaaggaaaacgggggggcgggaagggcgggatagaatataaggacggggataaagaagagaaaggagcggcgngagagacggcgcggaggaacgacggagggataggaggaaagcgggtagcgaggaatacgggcgtatcgggtaaaaaggcgagagagaacgacgggagaagaagacgacgggacggggacgggaaagacgggagggcggtaaaggaaaaggaaggattacggcgagcgcgggcgacgagaagaaagggcgaggaaaggaaattancgacggggaagggaaaggagaggggaagaggagaaagggaaagggg

SEQ ID NO: 38496 - DNA, 526 bp, Artificial Sequence
  chemically treated genomic DNA (Homo sapiens) CpG-island No: 38496
  unsure (47, 251, 363, 444)
cccctttccctttctcctcttcccctctcctttcccttccccgtcgntaatttcctttcctcgccctttcttctcgtcgcccgcgctcgccgtaatccttccttttcctttaccgccctcccgtctttcccgtccccgtcccgtcgtcttcttctcccgtcgttctctctcgcctttttacccgatacgcccgtattcctcgctacccgctttcctcctatccctccgtcgttcctccgcgccgtctctcncgccgctcctttctcttctttatccccgtccttatattctatcccgcccttcccgcccccccgttttccttcccttcgtcctcgcgtattcgccgcgtccgccgccgtctcntcttcttcctcgtcccccctccgttcttttcctcttcccttccgcccctttcttcgctccccgtcctatttccccttccgntcccctctttccgctcccctcccccttatcccttttttcgtatcccctcttttccgattcctcttttccactaaatttcgcc

SEQ ID NO: 38497 - DNA, 524 bp, Artificial Sequence
  chemically treated genomic DNA (Homo sapiens) CpG-island No: 38497
ggtggtcgcgtagtagtgagataattgcgaagtggttgatggaggaagcgggtaatttagtgtgggaggtcgggaaggagaggcggcgagtgtgtcgaggcgatagtgtgacgcggcgtgggcgattggttaagggagtaagatagagtggagcgagaatagtggagtttgcgattgttgggggtacgcggagtgcgggttggtggtggcgtttcggttttagacgtcgtggtggtagatagtggagcggtgtggtcggtgaggtgtagaggttgttggcgttagcggtagcgtatacgtgttgagttggggtttatgggtcgttagttgttggttgagggtgtggagggcgatatggttgggtgtaagtattggtgagtaagcggtgtcgattattgcgggttggagttgatttaaggtggcgtagcgtcgatgttacggggaatgtaggtgtgagttattatagttggtcgtttgaatttatttgcgggttatgtgttacggtgtgtagaggagtgcgtggt

SEQ ID NO: 38498 - DNA, 524 bp, Artificial Sequence
  chemically treated genomic DNA (Homo sapiens) CpG-island No: 38498
accacgcactcctctacacaccgtaacacataacccgcaaataaattcaaacgaccaactataataactcacacctacattccccgtaacatcgacgctacgccaccttaaatcaactccaacccgcaataatcgacaccgcttactcaccaatacttacacccaaccatatcgccctccacaccctcaaccaacaactaacgacccataaaccccaactcaacacgtatacgctaccgctaacgccaacaacctctacacctcaccgaccacaccgctccactatctaccaccacgacgtctaaaaccgaaacgccaccaccaacccgcactccgcgtacccccaacaatcgcaaactccactattctcgctccactctatcttactcccttaaccaatcgcccacgccgcgtcacactatcgcctcgacacactcgccgcctctccttcccgacctcccacactaaattacccgcttcctccatcaaccacttcgcaattatctcactactacgcgaccacc

SEQ ID NO: 38499 - DNA, 524 bp, Artificial Sequence
  chemically treated genomic DNA (Homo sapiens) CpG-island No: 38499
attacgtatttttttatatatcgtaatatatggttcgtaagtaagtttaaacgattagttatggtggtttatatttatatttttcgtagtatcgacgttgcgttattttgaattagttttagttcgtaataatcgatatcgtttgtttattaatgtttatatttaattatatcgttttttatatttttaattaatagttggcggtttataaattttagtttaatacgtgtacgttatcgttaacgttaataatttttgtattttatcggttatatcgttttattatttattattacgacgtttggaatcggagcgttattattaattcgtatttcgcgtgtttttagtaatcgtaaattttattattttcgttttattttattttatttttttggttaatcgtttacgtcgcgttatattatcgtttcgatatattcgtcgtttttttttttcgattttttatattgaattattcgttttttttattagttatttcgtagttattttattattgcgcgattatt

SEQ ID NO: 38500 - DNA, 524 bp, Artificial Sequence
  chemically treated genomic DNA (Homo sapiens) CpG-island No: 38500
aataatcgcgcaataataaaataactacgaaataactaataaaaaaaacgaataattcaatataaaaaatcgaaaaaaaaaaacgacgaatatatcgaaacgataatataacgcgacgtaaacgattaaccaaaaaaataaaataaaataaaacgaaaataataaaatttacgattactaaaaacacgcgaaatacgaattaataataacgctccgattccaaacgtcgtaataataaataataaaacgatataaccgataaaatacaaaaattattaacgttaacgataacgtacacgtattaaactaaaatttataaaccgccaactattaattaaaaatataaaaaacgatataattaaatataaacattaataaacaaacgatatcgattattacgaactaaaactaattcaaaataacgcaacgtcgatactacgaaaaatataaatataaaccaccataactaatcgtttaaacttacttacgaaccatatattacgatatataaaaaaatacgtaat

SEQ ID NO: 38501 - DNA, 572 bp, Artificial Sequence
  chemically treated genomic DNA (Homo sapiens) CpG-island No: 38501
  unsure (87, 182..183, 185..186, 414, 424..425, 427, 465..466, 468)
attcgcggagaacgtttggatttggacgcgcgtttgttttttgtgttttcgttattatagcggcgcgggttttttcgacgtttcgtnagagttcggttagttttcggaagcggggtttttagttcgttaggaagtcgaagttttgtttcgagttcgacgtggtcgattgtagggagtttagnnnnntcgttatagagtcgtttttttcgaatatatacgtttggagggagtcgaagggcggtgtttataggtttatgtcggtttcgtagagtttggttagtacgtagttgtggatagtgttgtttattgcgtacgtttgaggtacgtagcgggagaggttttcgatttcgggtagtatgttttgtcgcgttttgggggcggttttcgtttgcgtttttcgggggttttatatgntcgcgatgtnnanggtttcggtgtttttttcgtcgtcgttttcgtcgtcgnnnnggacgatgttttcgtggatgtttttttcgtcgtcgatgatgtatggttgttttcggtgtcgttttatggataaaatgagtaatattagtattgttaggaataaa

SEQ ID NO: 38502 - DNA, 572 bp, Artificial Sequence
  chemically treated genomic DNA (Homo sapiens) CpG-island No: 38502
  unsure (105..106, 108, 146, 148..149, 159, 387..388, 390..391, 486)
tttattcctaacaatactaatattactcattttatccataaaacgacaccgaaaacaaccatacatcatcgacgacgaaaaaaacatccacgaaaacatcgtccnnnncgacgacgaaaacgacgacgaaaaaaacaccgaaaccntnnacatcgcgancatataaaacccccgaaaaacgcaaacgaaaaccgcccccaaaacgcgacaaaacatactacccgaaatcgaaaacctctcccgctacgtacctcaaacgtacgcaataaacaacactatccacaactacgtactaaccaaactctacgaaaccgacataaacctataaacaccgcccttcgactccctccaaacgtatatattcgaaaaaaacgactctataacgannnnnctaaactccctacaatcgaccacgtcgaactcgaaacaaaacttcgacttcctaacgaactaaaaaccccgcttccgaaaactaaccgaactctnacgaaacgtcgaaaaaacccgcgccgctataataacgaaaacacaaaaaacaaacgcgcgtccaaatccaaacgttctccgcgaat

SEQ ID NO: 38503 - DNA, 572 bp, Artificial Sequence
  chemically treated genomic DNA (Homo sapiens) CpG-island No: 38503
  unsure (105..106, 108, 146, 148..149, 159, 387..388, 390..391, 486)
tttgtttttggtagtgttggtgttgtttattttgtttatgaggcggtatcggaaataattatatattatcgacgacgaggaaaatatttacgagaatatcgtttnnnncgacgacgagggcggcggcgaggaggatatcgaggttntnnatatcgcggntatgtggaattttcgggaggcgtaggcgggggtcgtttttaagacgcggtaggatatgttgttcgagatcgagagtttttttcgttacgtgttttagacgtgcgtagtgaatagtattgtttatagttacgtgttggttaagttttacgaggtcgatatggatttgtgggtatcgtttttcgattttttttagacgtatatgttcgagggggacggttttgtggcggnnnnnttgagttttttgtagtcggttacgtcggattcggaatagagtttcgattttttgacggattgggggtttcgttttcggaagttggtcgagttttnacggggcgtcggagggattcgcgtcgttgtggtgacggaagtataggaggtaggcgcgcgtttaaatttagacgtttttcgcgggt

SEQ ID NO: 38504 - DNA, 572 bp, Artificial Sequence
  chemically treated genomic DNA (Homo sapiens) CpG-island No: 38504
  unsure (87, 182..183, 185..186, 414, 424..425, 427, 465..466, 468)
acccgcgaaaaacgtctaaatttaaacgcgcgcctacctcctatacttccgtcaccacaacgacgcgaatccctccgacgccccgtnaaaactcgaccaacttccgaaaacgaaacccccaatccgtcaaaaaatcgaaactctattccgaatccgacgtaaccgactacaaaaaactcaannnnnccgccacaaaaccgtccccctcgaacatatacgtctaaaaaaaatcgaaaaacgatacccacaaatccatatcgacctcgtaaaacttaaccaacacgtaactataaacaatactattcactacgcacgtctaaaacacgtaacgaaaaaaactctcgatctcgaacaacatatcctaccgcgtcttaaaaacgacccccgcctacgcctcccgaaaattccacatanccgcgatatnnanaacctcgatatcctcctcgccgccgccctcgtcgtcgnnnnaaacgatattctcgtaaatattttcctcgtcgtcgataatatataattatttccgataccgcctcataaacaaaataaacaacaccaacactaccaaaaacaaa

SEQ ID NO: 38505 - DNA, 855 bp, Artificial Sequence
  chemically treated genomic DNA (Homo sapiens) CpG-island No: 38505
cgtacgtttagtcgtttcgagagtcgtattcggcggattcggtttttaggttcgttttcggggtatttggcgggcgtttatttttcggggggtacgtgttttcgtacgtagcgcgagggtagcgggtgtttggttatttattaggaaaagtttcgcgcggatttttcggattgaggagggtgggaaattcggttgtttagcgttttattcgggcggtcggggttggcgtttttttgttttcggtcggcggttttattttgggataggtaattatgagttattcgtttcgcgggttatatgggtaacgtgattaaaataaagtttcggtattttaagtcgttagaaaaggggataacggagtttatcgggggcgggtataggaggcgggcgtaggcgggcggcgtcggggtcgtggggacgcggcgtcgagggggcggggtttggcgggaggttcgttttttttttacggtcggtagcgacgttcggatttttaggtagtcggattttagggcggggtatttttgcggattttagtttcgagagtttttcgcgttcggttttttatcggtagcggcggcgggttgcgggatttcggagatttcggcgcgttttttatagttatcgggattttacgcgttagtagcggttttttcgggaacgttttttagtttcgggagtacgcgggaaaagttttagcgtgttaatgagggagcgttttttttattacggttacgttcgggggtaggggttttttttagtcgtttttgagtttcgttagtttttttaatgtgataatgaacgaattgggaggtcgttgtatttacggttaattaaaacgttacgtttcggtttcga

SEQ ID NO: 38506 - DNA, 855 bp, Artificial Sequence
  chemically treated genomic DNA (Homo sapiens) CpG-island No: 38506
tcgaaaccgaaacgtaacgttttaattaaccgtaaatacaacgacctcccaattcgttcattatcacattaaaaaaactaacgaaactcaaaaacgactaaaaaaaacccctacccccgaacgtaaccgtaataaaaaaaacgctccctcattaacacgctaaaacttttcccgcgtactcccgaaactaaaaaacgttcccgaaaaaaccgctactaacgcgtaaaatcccgataactataaaaaacgcgccgaaatctccgaaatcccgcaacccgccgccgctaccgataaaaaaccgaacgcgaaaaactctcgaaactaaaatccgcaaaaataccccgccctaaaatccgactacctaaaaatccgaacgtcgctaccgaccgtaaaaaaaaaacgaacctcccgccaaaccccgccccctcgacgccgcgtccccacgaccccgacgccgcccgcctacgcccgcctcctatacccgcccccgataaactccgttatccccttttctaacgacttaaaataccgaaactttattttaatcacgttacccatataacccgcgaaacgaataactcataattacctatcccaaaataaaaccgccgaccgaaaacaaaaaaacgccaaccccgaccgcccgaataaaacgctaaacaaccgaatttcccaccctcctcaatccgaaaaatccgcgcgaaacttttcctaataaataaccaaacacccgctaccctcgcgctacgtacgaaaacacgtaccccccgaaaaataaacgcccgccaaataccccgaaaacgaacctaaaaaccgaatccgccgaatacgactctcgaaacgactaaacgtacg

SEQ ID NO: 38507 - DNA, 855 bp, Artificial Sequence
  chemically treated genomic DNA (Homo sapiens) CpG-island No: 38507
tcgaggtcgagacgtggcgttttgattggtcgtaagtatagcgattttttaattcgtttattattatattaagggagttaacggaatttaggagcgattaagggaagtttttgttttcgagcgtgatcgtaatgaggaaggcgtttttttattggtacgttggggtttttttcgcgtgttttcggggttgaaggacgttttcggggaagtcgttgttggcgcgtggggtttcggtggttgtgggggacgcgtcgggattttcgggatttcgtagttcgtcgtcgttgtcggtggggagtcggacgcggggggttttcggggttgaggttcgtaggggtgtttcgttttggagttcgattgtttaggagttcgggcgtcgttgtcggtcgtgggggaggggcgagtttttcgttaggtttcgttttttcggcgtcgcgtttttacggtttcggcgtcgttcgtttgcgttcgttttttgtgttcgttttcggtgagtttcgttgtttttttttttggcggtttaaaatatcgaaattttattttggttacgttgtttatgtgattcgcggagcggatgatttatggttgtttgttttaggatgaggtcgtcggtcgaaagtagagaagcgttagtttcggtcgttcgggtggagcgttgggtagtcgagttttttattttttttaattcggagagttcgcgcggggttttttttaataaatagttaggtattcgttgttttcgcgttgcgtacgggagtacgtgtttttcgggaggtgggcgttcgttaggtgtttcgggaacgagtttaggaatcgggttcgtcgagtgcggttttcggggcggttaggcgtgcg

SEQ ID NO: 38508 - DNA, 855 bp, Artificial Sequence
  chemically treated genomic DNA (Homo sapiens) CpG-island No: 38508
cgcacgcctaaccgccccgaaaaccgcactcgacgaacccgattcctaaactcgttcccgaaacacctaacgaacgcccacctcccgaaaaacacgtactcccgtacgcaacgcgaaaacaacgaatacctaactatttattaaaaaaaaccccgcgcgaactctccgaattaaaaaaaataaaaaactcgactacccaacgctccacccgaacgaccgaaactaacgcttctctactttcgaccgacgacctcatcctaaaacaaacaaccataaatcatccgctccgcgaatcacataaacaacgtaaccaaaataaaatttcgatattttaaaccgccaaaaaaaaaaacaacgaaactcaccgaaaacgaacacaaaaaacgaacgcaaacgaacgacgccgaaaccgtaaaaacgcgacgccgaaaaaacgaaacctaacgaaaaactcgcccctcccccacgaccgacaacgacgcccgaactcctaaacaatcgaactccaaaacgaaacacccctacgaacctcaaccccgaaaaccccccgcgtccgactccccaccgacaacgacgacgaactacgaaatcccgaaaatcccgacgcgtcccccacaaccaccgaaaccccacgcgccaacaacgacttccccgaaaacgtccttcaaccccgaaaacacgcgaaaaaaaccccaacgtaccaataaaaaaacgccttcctcattacgatcacgctcgaaaacaaaaacttcccttaatcgctcctaaattccgttaactcccttaatataataataaacgaattaaaaaatcgctatacttacgaccaatcaaaacgccacgtctcgacctcga

SEQ ID NO: 38509 - DNA, 752 bp, Artificial Sequence
  chemically treated genomic DNA (Homo sapiens) CpG-island No: 38509
tttcgcgtagcgcgtcgttttcgttttttttttcgtcgtcgttcgtttttttcgagttcgcggtttgtacgtcgttcgcgttttcggagtttatgagcgcgttggtttttcgtttcgttttcgttatgtagtttttcggtttttttaattacgcgcgttttaagtagtttatcgtcgcgtagaatttcgggttcgcgtcgggttacggtacgtcggtttttagttttagttcgtttagtttttcgtcgtttatgttttcgacgtcgaggtagttcggtcgcgttttcgtgtcgtttttcgcgtagtttttcggcgttgagttcgaggtttcgtggggttttttttcgtcgtcgttttcgttttcgttattttcggtttttagttttacggttgttttttcggtgttcgacgtgtttttattgtcgtcgttattatcgtcgttttcgagttcgggataggcgttttattgttcgtcgtttgttattcgtttcggttatagttagacgttcgcggttttttttagcgttttgttgttttcgtagtcgtcgtcggcggtcgttaacgttttggggttgtttaagggtgttattttcgcgtgagtaatcgtcgcggttttttatttttttgttttttcgtttcgggtcgttttgggatttttatatttttatatacgcgtttttattagtttgtaatttagagcgttttagtaatattttatatattttttttcgtgcgatgtaaaaatttttaat

SEQ ID NO: 38510 - DNA, 752 bp, Artificial Sequence
  chemically treated genomic DNA (Homo sapiens) CpG-island No: 38510
attaaaaatttttacatcgcacgaaaaaaaatatataaaatattactaaaacgctctaaattacaaactaataaaaacgcgtatataaaaatataaaaatcccaaaacgacccgaaacgaaaaaacaaaaaaataaaaaaccgcgacgattactcacgcgaaaataacacccttaaacaaccccaaaacgttaacgaccgccgacgacgactacgaaaacaacaaaacgctaaaaaaaaccgcgaacgtctaactataaccgaaacgaataacaaacgacgaacaataaaacgcctatcccgaactcgaaaacgacgataataacgacgacaataaaaacacgtcgaacaccgaaaaaacaaccgtaaaactaaaaaccgaaaataacgaaaacgaaaacgacgacgaaaaaaaaccccacgaaacctcgaactcaacgccgaaaaactacgcgaaaaacgacacgaaaacgcgaccgaactacctcgacgtcgaaaacataaacgacgaaaaactaaacgaactaaaactaaaaaccgacgtaccgtaacccgacgcgaacccgaaattctacgcgacgataaactacttaaaacgcgcgtaattaaaaaaaccgaaaaactacataacgaaaacgaaacgaaaaaccaacgcgctcataaactccgaaaacgcgaacgacgtacaaaccgcgaactcgaaaaaaacgaacgacgacgaaaaaaaaaacgaaaacgacgcgctacgcgaaa

SEQ ID NO: 38511 - DNA, 752 bp, Artificial Sequence
  chemically treated genomic DNA (Homo sapiens) CpG-island No: 38511
gttaagaatttttatatcgtacggagagaaatgtgtgaaatgttattggggcgttttgggttgtaggttgatgggagcgcgtgtatggagatgtgggagttttagggcgattcgaggcggaggggtagggaagtggaggatcgcggcggttatttacgcgggggtgatatttttgggtagttttagggcgttgacggtcgtcggcggcggttgcgagggtagtagagcgttgaggaaggtcgcgggcgtttggttgtggtcgaagcgggtggtaggcgacgagtagtgggacgtttgtttcgggttcgggagcggcggtggtggcggcggtagtgggaatacgtcgggtatcgggaaggtagtcgtggggttgaagatcgggggtggcgggggcgggggcgacggcgaggaggagttttacggggtttcgggtttagcgtcgaagggttgcgcgaagggcggtacgggggcgcggtcgaattgtttcggcgtcggggatatgggcgacgggaggttggacgagttggggttggaggtcggcgtgtcgtggttcgacgcgggttcgaggttttgcgcggcgatgaattgtttggggcgcgcgtagttgaaggagtcggaggattgtatggcgggggcggagcgggaggttagcgcgtttatgggtttcggggacgcgggcggcgtgtaggtcgcgagttcggggaaggcgggcggcggcgggaaggggggcgagggcggcgcgttgcgcgggg

SEQ ID NO: 38512 - DNA, 752 bp, Artificial Sequence
  chemically treated genomic DNA (Homo sapiens) CpG-island No: 38512
ccccgcgcaacgcgccgccctcgccccccttcccgccgccgcccgccttccccgaactcgcgacctacacgccgcccgcgtccccgaaacccataaacgcgctaacctcccgctccgcccccgccatacaatcctccgactccttcaactacgcgcgccccaaacaattcatcgccgcgcaaaacctcgaacccgcgtcgaaccacgacacgccgacctccaaccccaactcgtccaacctcccgtcgcccatatccccgacgccgaaacaattcgaccgcgcccccgtaccgcccttcgcgcaacccttcgacgctaaacccgaaaccccgtaaaactcctcctcgccgtcgcccccgcccccgccacccccgatcttcaaccccacgactaccttcccgatacccgacgtattcccactaccgccgccaccaccgccgctcccgaacccgaaacaaacgtcccactactcgtcgcctaccacccgcttcgaccacaaccaaacgcccgcgaccttcctcaacgctctactaccctcgcaaccgccgccgacgaccgtcaacgccctaaaactacccaaaaatatcacccccgcgtaaataaccgccgcgatcctccacttccctacccctccgcctcgaatcgccctaaaactcccacatctccatacacgcgctcccatcaacctacaacccaaaacgccccaataacatttcacacatttctctccgtacgatataaaaattcttaac

SEQ ID NO: 38513 - DNA, 652 bp, Artificial Sequence
  chemically treated genomic DNA (Homo sapiens) CpG-island No: 38513
aggggattggttggcgataatattttggcgataaggtggatagtgattttcgttcggttcgagttcgtttagtaggggaagtaattttattatcgttttcgcgtatcgttacgtgacgggaagagggcgtggtcgaagttcgtgattcggggggcgggcggggtagggggagggtattagaatgtgaaggattttcgcggttttgggtgtttagaaaggcggcgacgcggcggatgataatattaggtcgcgacgcgtttttggttaggcggcggttgtagtgttagttttggacgtcgtagtagtcgttgtcggtagtaagtcgattgagggaaggtgggggttcgttcgggttggtggatttcggggtcgaaagttttcgtttcgttcgggggttgagtcggtagtgttttcgcggtcgttgggtagcgtttttcgtttaggttcgcgttttagttgtcgtcgacgatagcggtcgagagaagttggggtttgattagacgtttacggggtttcggatttcggcgtcgcggcgatttcggaggaatcggttttttgcgtttcgtttttttgggagtttcgtacgggtgagtgttgttttatttttgaggttggggtgttgggttcgtattttttagggcgattgcgtatt

SEQ ID NO: 38514 - DNA, 652 bp, Artificial Sequence
  chemically treated genomic DNA (Homo sapiens) CpG-island No: 38514
aatacgcaatcgccctaaaaaatacgaacccaacaccccaacctcaaaaataaaacaacactcacccgtacgaaactcccaaaaaaacgaaacgcaaaaaaccgattcctccgaaatcgccgcgacgccgaaatccgaaaccccgtaaacgtctaatcaaaccccaacttctctcgaccgctatcgtcgacgacaactaaaacgcgaacctaaacgaaaaacgctacccaacgaccgcgaaaacactaccgactcaacccccgaacgaaacgaaaactttcgaccccgaaatccaccaacccgaacgaacccccaccttccctcaatcgacttactaccgacaacgactactacgacgtccaaaactaacactacaaccgccgcctaaccaaaaacgcgtcgcgacctaatattatcatccgccgcgtcgccgcctttctaaacacccaaaaccgcgaaaatccttcacattctaataccctccccctaccccgcccgccccccgaatcacgaacttcgaccacgccctcttcccgtcacgtaacgatacgcgaaaacgataataaaattacttcccctactaaacgaactcgaaccgaacgaaaatcactatccaccttatcgccaaaatattatcgccaaccaatcccct

SEQ ID NO: 38515 - DNA, 652 bp, Artificial Sequence
  chemically treated genomic DNA (Homo sapiens) CpG-island No: 38515
ggtgcgtagtcgttttgaggggtgcgaatttagtattttaattttaggaatggagtaatatttattcgtgcggagtttttagggaggcgggacgtaaggagtcggttttttcgaggtcgtcgcggcgtcggggttcgaggtttcgtaagcgtttagttagattttaatttttttcggtcgttgtcgtcggcggtagttggggcgcgagtttggacgaagggcgttgtttagcggtcgcggaggtattgtcggtttagttttcgagcggggcgggaattttcggtttcgaggtttattagttcgggcggatttttatttttttttagtcggtttgttatcggtagcggttattgcggcgtttaaagttaatattatagtcgtcgtttggttaggagcgcgtcgcggtttaatgttgttattcgtcgcgtcgtcgtttttttgggtatttagaatcgcgaagattttttatattttagtgttttttttttgtttcgttcgtttttcggattacgggtttcggttacgtttttttttcgttacgtgacggtgcgcggaggcggtggtggagttgttttttttgttaggcgggttcgaatcgggcgggagttattgtttattttgtcgttagggtgttatcgttagttagtttttt

SEQ ID NO: 38516 - DNA, 652 bp, Artificial Sequence
  chemically treated genomic DNA (Homo sapiens) CpG-island No: 38516
aaaaaactaactaacgataacaccctaacgacaaaataaacaataactcccgcccgattcgaacccgcctaacaaaaaaaacaactccaccaccgcctccgcgcaccgtcacgtaacgaaaaaaaaacgtaaccgaaacccgtaatccgaaaaacgaacgaaacaaaaaaaaaacactaaaatataaaaaatcttcgcgattctaaatacccaaaaaaacgacgacgcgacgaataacaacattaaaccgcgacgcgctcctaaccaaacgacgactataatattaactttaaacgccgcaataaccgctaccgataacaaaccgactaaaaaaaaataaaaatccgcccgaactaataaacctcgaaaccgaaaattcccgccccgctcgaaaactaaaccgacaatacctccgcgaccgctaaacaacgcccttcgtccaaactcgcgccccaactaccgccgacgacaacgaccgaaaaaaattaaaatctaactaaacgcttacgaaacctcgaaccccgacgccgcgacgacctcgaaaaaaccgactccttacgtcccgcctccctaaaaactccgcacgaataaatattactccattcctaaaattaaaatactaaattcgcacccctcaaaacgactacgcacc

SEQ ID NO: 38517 - DNA, 584 bp, Artificial Sequence
  chemically treated genomic DNA (Homo sapiens) CpG-island No: 38517
gtcgtcgtcgagggcgtttcgagcggtcgggtatttatattaacgcgtggtaaagtagcgtttagtttcgcggtttttttagggcgtcgtagattaaagtttggatgcgtcggtatttggcgttgttttttttgattgggcggtttagcggggttttggttaggagttcgatgttttgcggggtttttcgttgtttttcgtcgcggtcgtcgttttttagtagtagggtttcgtttttgtcggtttcggtttcgagcgttaaggtgatttgttttacgtcgtcgggcgttagttttatttttcgtttttcgtcgtcggtcgtcgtcgcgtttttttcggttgggttagtcgtttcgtcgttttcgtcgttttcgtcgtcgtcgtcgttagtcgttttcgtcgttttgcgcgttttgagttttatttgtttcgttttcgaagaacgtttcgtttttttcgttgttgttttgggaagaaggggcgttcggggtgcgtgaacgaggcggcggcggcggttgtaagttcgggaattttaatgttatgattcgcgcgtttttttttatttttttttaaaagtaggtaaa

SEQ ID NO: 38518 - DNA, 584 bp, Artificial Sequence
  chemically treated genomic DNA (Homo sapiens) CpG-island No: 38518
tttacctacttttaaaaaaaaataaaaaaaaacgcgcgaatcataacattaaaattcccgaacttacaaccgccgccgccgcctcgttcacgcaccccgaacgccccttcttcccaaaacaacaacgaaaaaaacgaaacgttcttcgaaaacgaaacaaataaaactcaaaacgcgcaaaacgacgaaaacgactaacgacgacgacgacgaaaacgacgaaaacgacgaaacgactaacccaaccgaaaaaaacgcgacgacgaccgacgacgaaaaacgaaaaataaaactaacgcccgacgacgtaaaacaaatcaccttaacgctcgaaaccgaaaccgacaaaaacgaaaccctactactaaaaaacgacgaccgcgacgaaaaacaacgaaaaaccccgcaaaacatcgaactcctaaccaaaaccccgctaaaccgcccaatcaaaaaaaacaacgccaaataccgacgcatccaaactttaatctacgacgccctaaaaaaaccgcgaaactaaacgctactttaccacgcgttaatataaatacccgaccgctcgaaacgccctcgacgacgac

SEQ ID NO: 38519 - DNA, 584 bp, Artificial Sequence
  chemically treated genomic DNA (Homo sapiens) CpG-island No: 38519
tttgtttgtttttgggggggggtggggaggggcgcgcggattatggtattggagttttcgggtttgtagtcgtcgtcgtcgtttcgtttacgtatttcgagcgttttttttttttagagtagtagcggagaaggcgaagcgtttttcgggggcgaggtagatggggtttaaggcgcgtagggcggcgggggcggttggcggcggcggcgacgggggcggcggaggcggcggggcggttaatttagtcggaggggacgcggcggcggtcggcgacgaggagcggaaagtggggttggcgttcggcgacgtggagtaagttattttggcgttcggggtcggagtcgataaagacgggattttgttgttggagggcggcggtcgcgacgaggggtagcggaggatttcgtagggtatcgggtttttggttaagatttcgttgagtcgtttagttaagagaaataacgttaagtatcggcgtatttaaattttgatttacgacgttttggagagatcgcggggttgggcgttgttttattacgcgttggtgtgagtattcggtcgttcggggcgttttcggcggcggt

SEQ ID NO: 38520 - DNA, 584 bp, Artificial Sequence
  chemically treated genomic DNA (Homo sapiens) CpG-island No: 38520
accgccgccgaaaacgccccgaacgaccgaatactcacaccaacgcgtaataaaacaacgcccaaccccgcgatctctccaaaacgtcgtaaatcaaaatttaaatacgccgatacttaacgttatttctcttaactaaacgactcaacgaaatcttaaccaaaaacccgataccctacgaaatcctccgctacccctcgtcgcgaccgccgccctccaacaacaaaatcccgtctttatcgactccgaccccgaacgccaaaataacttactccacgtcgccgaacgccaaccccactttccgctcctcgtcgccgaccgccgccgcgtcccctccgactaaattaaccgccccgccgcctccgccgcccccgtcgccgccgccgccaaccgcccccgccgccctacgcgccttaaaccccatctacctcgcccccgaaaaacgcttcgccttctccgctactactctaaaaaaaaaaaacgctcgaaatacgtaaacgaaacgacgacgacgactacaaacccgaaaactccaataccataatccgcgcgcccctccccacccccccccaaaaacaaacaaa

SEQ ID NO: 38521 - DNA, 505 bp, Artificial Sequence
  chemically treated genomic DNA (Homo sapiens) CpG-island No: 38521
cgagtcggcggcggcgagggtaagtttttttttgcggtacgatgtcgtttttgttggtgtttatttttttttcgtgcgtattattcggttgggcgttgttggtcggcggtatcggtggcggtggcgttggcggcggcggcggtggcgcgggtataggcggcggacgttaggagagagaggcgttgtcgttatagaagatcgaggtgttggtgttattgttttaggatgattcgtatttgtttttatttattcgggtgcggtcggttatcgagtatgttttgcgtagcgtggagggtaacgggattgggaggcggtttttgtcgtcgggtattcgtttttaggtggtttacgaggatttagattgtgggaatcgtgcgttttttagtttggtggatcgcgtggcggcggcgcggggcgttaagttagattttattttggggttagtgtgcgagtatgtagtagcgttagtggttcggtttgtatcgtattgggatttgtttatgtt

SEQ ID NO: 38522 - DNA, 505 bp, Artificial Sequence
  chemically treated genomic DNA (Homo sapiens) CpG-island No: 38522
aacataaacaaatcccaatacgatacaaaccgaaccactaacgctactacatactcgcacactaaccccaaaataaaatctaacttaacgccccgcgccgccgccacgcgatccaccaaactaaaaaacgcacgattcccacaatctaaatcctcgtaaaccacctaaaaacgaatacccgacgacaaaaaccgcctcccaatcccgttaccctccacgctacgcaaaacatactcgataaccgaccgcacccgaataaataaaaacaaatacgaatcatcctaaaacaataacaccaacacctcgatcttctataacgacaacgcctctctctcctaacgtccgccgcctatacccgcgccaccgccgccgccgccaacgccaccgccaccgataccgccgaccaacaacgcccaaccgaataatacgcacgaaaaaaaaataaacaccaacaaaaacgacatcgtaccgcaaaaaaaaacttaccctcgccgccgccgactcg

SEQ ID NO: 38523 - DNA, 505 bp, Artificial Sequence
  chemically treated genomic DNA (Homo sapiens) CpG-island No: 38523
agtatgggtaggttttagtgcgatgtaagtcgggttattggcgttgttgtatattcgtatattggttttaggataaggtttggtttggcgtttcgcgtcgtcgttacgcggtttattaagttgaagagcgtacggtttttatagtttgaattttcgtaagttatttggaagcgagtgttcggcggtagaagtcgttttttagtttcgttgttttttacgttgcgtagagtatattcgatggtcggtcgtattcgggtgagtgaaaataagtacgagttattttggggtagtaatattagtatttcgattttttgtggcggtagcgttttttttttttggcgttcgtcgtttatgttcgcgttatcgtcgtcgtcgttaacgttatcgttatcggtgtcgtcggttagtaacgtttagtcgagtagtacgtacggggagaaagtgagtattagtagagacggtatcgtgtcgtaagaaagagtttgttttcgtcgtcgtcgattcg

SEQ ID NO: 38524 - DNA, 505 bp, Artificial Sequence
  chemically treated genomic DNA (Homo sapiens) CpG-island No: 38524
cgaatcgacgacgacgaaaacaaactctttcttacgacacgataccgtctctactaatactcactttctccccgtacgtactactcgactaaacgttactaaccgacgacaccgataacgataacgttaacgacgacgacgataacgcgaacataaacgacgaacgccaaaaaaaaaaaacgctaccgccacaaaaaatcgaaatactaatattactaccccaaaataactcgtacttattttcactcacccgaatacgaccgaccatcgaatatactctacgcaacgtaaaaaacaacgaaactaaaaaacgacttctaccgccgaacactcgcttccaaataacttacgaaaattcaaactataaaaaccgtacgctcttcaacttaataaaccgcgtaacgacgacgcgaaacgccaaaccaaaccttatcctaaaaccaatatacgaatatacaacaacgccaataacccgacttacatcgcactaaaacctacccatact

SEQ ID NO: 38525 - DNA, 518 bp, Artificial Sequence
  chemically treated genomic DNA (Homo sapiens) CpG-island No: 38525
attttacgcgcgtggcgttcgtttacgttaagatgggcgagatgatgttcgttttgtttcgttattattattggagtcgcgttgtattggtttatagcgacgataagttggagcggaattgttattttattttcgagggggtttacgaggttttttaggaggagggtttgtatacgtttatttatagtttcgacgagattaaagatttggatttggaagatatcgtgcgtaatatttaggttagtgagagaggtgagtaggggcgcgtttcgggtttcgggttttaatttaatcgtttttcgcggttttttttgtatattcgtttattttgtagattttattttttattgcggcgttgaggtcgggtgcgcgcgggtattcgtttaggtatgcgtcgtgtggttgcgataatttttgacgatcgtttatcgcggtgtacgtagagggttttagggaggtgaaggggttggaggagagggcgtttgtagtttttgcgtgtttaggtttaataggtgttg

SEQ ID NO: 38526 - DNA, 518 bp, Artificial Sequence
  chemically treated genomic DNA (Homo sapiens) CpG-island No: 38526
caacacctattaaacctaaacacgcaaaaactacaaacgccctctcctccaaccccttcacctccctaaaaccctctacgtacaccgcgataaacgatcgtcaaaaattatcgcaaccacacgacgcatacctaaacgaatacccgcgcgcacccgacctcaacgccgcaataaaaaataaaatctacaaaataaacgaatatacaaaaaaaaccgcgaaaaacgattaaattaaaacccgaaacccgaaacgcgcccctactcacctctctcactaacctaaatattacgcacgatatcttccaaatccaaatctttaatctcgtcgaaactataaataaacgtatacaaaccctcctcctaaaaaacctcgtaaaccccctcgaaaataaaataacaattccgctccaacttatcgtcgctataaaccaatacaacgcgactccaataataataacgaaacaaaacgaacatcatctcgcccatcttaacgtaaacgaacgccacgcgcgtaaaat

SEQ ID NO: 38527 - DNA, 518 bp, Artificial Sequence
  chemically treated genomic DNA (Homo sapiens) CpG-island No: 38527
tagtatttgttggatttgggtacgtaggagttatagacgtttttttttttaatttttttatttttttgggattttttacgtatatcgcgatgggcggtcgttaaaggttgtcgtagttatacggcgtatatttgaacgagtgttcgcgcgtattcgattttagcgtcgtagtggggagtggggtttgtagagtggacgagtgtgtagggagagtcgcggagagcggttgggttagggttcggggttcgggacgcgtttttgtttattttttttattggtttggatattgcgtacgatgttttttagatttaagtttttggtttcgtcgaaattgtagatggacgtgtgtaaattttttttttggaagatttcgtggattttttcgagggtgaagtagtagtttcgttttagtttgtcgtcgttgtagattagtgtagcgcggttttagtggtggtggcggaatagggcgagtattatttcgtttattttggcgtaggcgggcgttacgcgcgtgaggt

SEQ ID NO: 38528 - DNA, 518 bp, Artificial Sequence
  chemically treated genomic DNA (Homo sapiens) CpG-island No: 38528
acctcacgcgcgtaacgcccgcctacgccaaaataaacgaaataatactcgccctattccgccaccaccactaaaaccgcgctacactaatctacaacgacgacaaactaaaacgaaactactacttcaccctcgaaaaaatccacgaaatcttccaaaaaaaaaatttacacacgtccatctacaatttcgacgaaaccaaaaacttaaatctaaaaaacatcgtacgcaatatccaaaccaataaaaaaaataaacaaaaacgcgtcccgaaccccgaaccctaacccaaccgctctccgcgactctccctacacactcgtccactctacaaaccccactccccactacgacgctaaaatcgaatacgcgcgaacactcgttcaaatatacgccgtataactacgacaacctttaacgaccgcccatcgcgatatacgtaaaaaatcccaaaaaaataaaaaaattaaaaaaaaaaacgtctataactcctacgtacccaaatccaacaaatacta

SEQ ID NO: 38529 - DNA, 521 bp, Artificial Sequence
  chemically treated genomic DNA (Homo sapiens) CpG-island No: 38529
ttttttttttttttttattggtgagttttttgtcgttcgcgtttagttttttttttttatattttttcgtttttttttttttttaattttttcgttttttttttattgcgtttttttttttttgaagtttcgcgcgttgtcgcggtttttttttttgtcgtttattttttatattgtttttttatttattttttcggttgtatttttaatgtgcgtttgtcgttttttttttgttgttttcgcgtcgcgcgttttttcgttttttttttcgtatttttcgtttattttcgattttcgttcgtgttagtcgttttttcgttcgttttttttttttcgtcgtttttcgtataatttcgttttcgtattgcgttttttttatttttttttttttttcgcgtttcgtttcgcgttttttttttattcgttttttttttcgttttttatttatttttttttttttttttttattcgtagtttagttttttcgcgtattcgttttttttcgtgtttttttttttcgt

SEQ ID NO: 38530 - DNA, 521 bp, Artificial Sequence
  chemically treated genomic DNA (Homo sapiens) CpG-island No: 38530
acgaaaaaaaaaaacacgaaaaaaaacgaatacgcgaaaaaactaaactacgaataaaaaaaaaaaaaaaaaaataaataaaaaacgaaaaaaaaaacgaataaaaaaaaaacgcgaaacgaaacgcgaaaaaaaaaaaaaaataaaaaaaacgcaatacgaaaacgaaattatacgaaaaacgacgaaaaaaaaaaaacgaacgaaaaaacgactaacacgaacgaaaatcgaaaataaacgaaaaatacgaaaaaaaaaacgaaaaaacgcgcgacgcgaaaacaacaaaaaaaaaacgacaaacgcacattaaaaatacaaccgaaaaaataaataaaaaaacaatataaaaaataaacgacaaaaaaaaaaaccgcgacaacgcgcgaaacttcaaaaaaaaaaaaacgcaataaaaaaaaaacgaaaaaattaaaaaaaaaaaaaaacgaaaaaatataaaaaaaaaaaactaaacgcgaacgacaaaaaactcaccaataaaaaaaaaaaaaaaa

SEQ ID NO: 38531 - DNA, 521 bp, Artificial Sequence
  chemically treated genomic DNA (Homo sapiens) CpG-island No: 38531
acggggaaaagggatacgggggggggcgaatacgcgaaagggttggattgcgggtgggggggggaaggaaagaataagtggggggcgggggggggaacgaatagggggggaacgcggggcggggcgcgaaaaaagggggggggtgaagaaaacgtaatgcggggacggggttgtgcggggggcggcgggaaaagaggggcgggcgaaggggcggttgatacgggcgggaatcggggatgggcgggggatgcgaaaagaaaagcgggggggcgcgcggcgcggaaataataaaggaaaagcggtaaacgtatattgggaatataatcggggggatagatagggggataatatgggggataaacgatagggggggggatcgcgatagcgcgcgggattttagggggaaggaagcgtaatggggggggggcgggaggattaaaaaagggagggggcggaaaaatatggggggggggggttggacgcgggcggtaaggggtttattagtggaaaaaaaagagagg

SEQ ID NO: 38532 - DNA, 521 bp, Artificial Sequence
  chemically treated genomic DNA (Homo sapiens) CpG-island No: 38532
cctctcttttttttccactaataaaccccttaccgcccgcgtccaaccccccccccccatatttttccgccccctcccttttttaatcctcccgccccccccccattacgcttccttccccctaaaatcccgcgcgctatcgcgatccccccccctatcgtttatcccccatattatccccctatctatccccccgattatattcccaatatacgtttaccgcttttcctttattatttccgcgccgcgcgcccccccgcttttcttttcgcatcccccgcccatccccgattcccgcccgtatcaaccgccccttcgcccgcccctcttttcccgccgccccccgcacaaccccgtccccgcattacgttttcttcacccccccccttttttcgcgccccgccccgcgttccccccctattcgttcccccccccgccccccacttattctttccttcccccccccacccgcaatccaaccctttcgcgtattcgcccccccccgtatcccttttccccgt

SEQ ID NO: 38533 - DNA, 553 bp, Artificial Sequence
  chemically treated genomic DNA (Homo sapiens) CpG-island No: 38533
tgttacgtcgttttgagattttagagggaaagtgtttttaggataaagtcgttttttattttcgtcggaggttgagcgtttcggggagtttggtcgtttcgcgggtttttttttcgtaagtttggtttttggggtgggtaagaacgttttgtgtcgttcggtttcgggagtaggcggtttcggaacgggttttttttttaattcggggtcgtaagtttgagttttaggcggtcggatttacgattcgggattcggattaaggatcggttttggattagcgttgggagtagtttaaaggttcgggggttgcgtaggcggtttttttttttcggcggcgggcgggtaggcgggtttcggcggttttttcggtcgttggggtggattattacggtagtttttgtaaaagacgttcgttcgttagttatcgacgatttcggattttatagtttataggtttcgtttttagtgtgggtttttcgtttaagttttagatttaggcgattttagagcgcggttggggttttcgttcgaggtcgtcggtattatttttttt

SEQ ID NO: 38534 - DNA, 553 bp, Artificial Sequence
  chemically treated genomic DNA (Homo sapiens) CpG-island No: 38534
aaaaaaaataataccgacgacctcgaacgaaaaccccaaccgcgctctaaaatcgcctaaatctaaaacttaaacgaaaaacccacactaaaaacgaaacctataaactataaaatccgaaatcgtcgataactaacgaacgaacgtcttttacaaaaactaccgtaataatccaccccaacgaccgaaaaaaccgccgaaacccgcctacccgcccgccgccgaaaaaaaaaaaccgcctacgcaacccccgaacctttaaactactcccaacgctaatccaaaaccgatccttaatccgaatcccgaatcgtaaatccgaccgcctaaaactcaaacttacgaccccgaattaaaaaaaaaacccgttccgaaaccgcctactcccgaaaccgaacgacacaaaacgttcttacccaccccaaaaaccaaacttacgaaaaaaaaacccgcgaaacgaccaaactccccgaaacgctcaacctccgacgaaaataaaaaacgactttatcctaaaaacactttccctctaaaatctcaaaacgacgtaaca

SEQ ID NO: 38535 - DNA, 553 bp, Artificial Sequence
  chemically treated genomic DNA (Homo sapiens) CpG-island No: 38535
agaaggggtggtgtcgacggtttcgggcggagattttagtcgcgttttggggtcgtttgggtttggggtttaggcggggggtttatattgggggcggggtttatggattgtgaagttcgaggtcgtcggtaattggcgggcgggcgttttttgtagaggttgtcgtagtaatttattttaacggtcggaggagtcgtcggagttcgtttgttcgttcgtcgtcgaaggagaggagtcgtttgcgtagttttcgggtttttgagttgtttttagcgttggtttagagtcgatttttgattcgggtttcggatcgtggattcggtcgtttagggtttagatttgcggtttcgggttgggaggaaaattcgtttcggagtcgtttgttttcggaatcggacggtatagggcgtttttgtttattttaggggttaggtttgcggagggggagttcgcggagcggttagatttttcggggcgtttagttttcggcgagggtgggagacggttttgttttggggatattttttttttggaattttaagacgacgtggta

SEQ ID NO: 38536 - DNA, 553 bp, Artificial Sequence
  chemically treated genomic DNA (Homo sapiens) CpG-island No: 38536
taccacgtcgtcttaaaattccaaaaaaaaaatatccccaaaacaaaaccgtctcccaccctcgccgaaaactaaacgccccgaaaaatctaaccgctccgcgaactccccctccgcaaacctaacccctaaaataaacaaaaacgccctataccgtccgattccgaaaacaaacgactccgaaacgaattttcctcccaacccgaaaccgcaaatctaaaccctaaacgaccgaatccacgatccgaaacccgaatcaaaaatcgactctaaaccaacgctaaaaacaactcaaaaacccgaaaactacgcaaacgactcctctccttcgacgacgaacgaacaaacgaactccgacgactcctccgaccgttaaaataaattactacgacaacctctacaaaaaacgcccgcccgccaattaccgacgacctcgaacttcacaatccataaaccccgcccccaatataaaccccccgcctaaaccccaaacccaaacgaccccaaaacgcgactaaaatctccgcccgaaaccgtcgacaccaccccttct

SEQ ID NO: 38537 - DNA, 801 bp, Artificial Sequence
  chemically treated genomic DNA (Homo sapiens) CpG-island No: 38537
agcggcggcggcgattgagagtcggggtcgcggcggcgttttttaggaagggtcgtacgaggcggcgggttcggcgggtttttcggaggaggcggttgcgttatggacgagttattttttagcgaggcggttttggagtaggcgttgggcgagtcgtgcgatttggacgcggcgttgttgatcgatatcgaaggtgcgttagggcgggtagggtttgaagttgcgtcgggtggcgcgagtagggggcgcgtaggtgtttttttggtttttgttttttttacgggcgttagtttcgtgttgtgttcgcgcgggatttttcggtgtttttgagttcggtgtttcgagttttatcgagtttttttggttttcgcgttagcgtttcgggtcgcgcgtttgtgggtgagggtttttgggtcgggtcggggttttttggcggtttcgggtcgggatacgtgcgtttttacgcgttttaggtcgggtgtcgttcgatcggtgattttttagttttgtgatggttacggttgaagttggggatttaggcgtcgtcgaagtttcgttttagttttagtcgtgacgtaattgcgaggttatttacggttatttttttcggttcgagagtttagttcggcgtcggagtttttgcgtatgcgtatgggcgttgtttcgcgtttttttttcgtttcgtgtcgggttttttcggtttgcgacgggtatagttttcgtatttatttattgatatttatcgaatgttaggtttcgttttaggtatcgagggtttatagatagatttgggtatttttt

SEQ ID NO: 38538 - DNA, 801 bp, Artificial Sequence
  chemically treated genomic DNA (Homo sapiens) CpG-island No: 38538
aaaaaatacccaaatctatctataaaccctcgatacctaaaacgaaacctaacattcgataaatatcaataaataaatacgaaaactatacccgtcgcaaaccgaaaaaacccgacacgaaacgaaaaaaaaacgcgaaacaacgcccatacgcatacgcaaaaactccgacgccgaactaaactctcgaaccgaaaaaaataaccgtaaataacctcgcaattacgtcacgactaaaactaaaacgaaacttcgacgacgcctaaatccccaacttcaaccgtaaccatcacaaaactaaaaaatcaccgatcgaacgacacccgacctaaaacgcgtaaaaacgcacgtatcccgacccgaaaccgccaaaaaaccccgacccgacccaaaaaccctcacccacaaacgcgcgacccgaaacgctaacgcgaaaaccaaaaaaactcgataaaactcgaaacaccgaactcaaaaacaccgaaaaatcccgcgcgaacacaacacgaaactaacgcccgtaaaaaaaacaaaaaccaaaaaaacacctacgcgccccctactcgcgccacccgacgcaacttcaaaccctacccgccctaacgcaccttcgatatcgatcaacaacgccgcgtccaaatcgcacgactcgcccaacgcctactccaaaaccgcctcgctaaaaaataactcgtccataacgcaaccgcctcctccgaaaaacccgccgaacccgccgcctcgtacgacccttcctaaaaaacgccgccgcgaccccgactctcaatcgccgccgccgct

SEQ ID NO: 38539 - DNA, 801 bp, Artificial Sequence
  chemically treated genomic DNA (Homo sapiens) CpG-island No: 38539
agggggtatttaggtttgtttgtaaattttcggtgtttaagacggggtttggtattcggtggatgttagtgaatgagtgcggaggttgtgttcgtcgtagatcgggagaattcgatacgaggcgggggaagggcgcgaggtagcgtttatgcgtatgcgtaagagtttcgacgtcgagttgaattttcgggtcggagggaatgatcgtgagtaatttcgtaattacgttacggttggggttggggcggagtttcggcgacgtttgggtttttagttttagtcgtggttattatagggttggagagttatcggtcgggcggtattcggtttgggacgcgtagaggcgtacgtgtttcggttcggagtcgttaagggatttcggttcggtttaggagtttttatttataagcgcgcggttcgagacgttagcgcgggaattagggaggttcggtgaggttcgggatatcgagtttagagatatcgggaagtttcgcgcgagtatagtacggagttggcgttcgtgggggagataaaggttagggagatatttgcgcgttttttattcgcgttattcggcgtagttttaagttttgttcgttttgacgtattttcgatgtcggttagtagcgtcgcgtttagatcgtacggttcgtttagcgtttgttttaaagtcgtttcgttgaagggtggttcgtttatggcgtagtcgtttttttcgggaggttcgtcgggttcgtcgtttcgtacggttttttttagggagcgtcgtcgcggtttcggtttttagtcgtcgtcgtcgtt

SEQ ID NO: 38540 - DNA, 801 bp, Artificial Sequence
  chemically treated genomic DNA (Homo sapiens) CpG-island No: 38540
aacgacgacgacgactaaaaaccgaaaccgcgacgacgctccctaaaaaaaaccgtacgaaacgacgaacccgacgaacctcccgaaaaaaacgactacgccataaacgaaccacccttcaacgaaacgactttaaaacaaacgctaaacgaaccgtacgatctaaacgcgacgctactaaccgacatcgaaaatacgtcaaaacgaacaaaacttaaaactacgccgaataacgcgaataaaaaacgcgcaaatatctccctaacctttatctcccccacgaacgccaactccgtactatactcgcgcgaaacttcccgatatctctaaactcgatatcccgaacctcaccgaacctccctaattcccgcgctaacgtctcgaaccgcgcgcttataaataaaaactcctaaaccgaaccgaaatcccttaacgactccgaaccgaaacacgtacgcctctacgcgtcccaaaccgaataccgcccgaccgataactctccaaccctataataaccacgactaaaactaaaaacccaaacgtcgccgaaactccgccccaaccccaaccgtaacgtaattacgaaattactcacgatcattccctccgacccgaaaattcaactcgacgtcgaaactcttacgcatacgcataaacgctacctcgcgcccttcccccgcctcgtatcgaattctcccgatctacgacgaacacaacctccgcactcattcactaacatccaccgaataccaaaccccgtcttaaacaccgaaaatttacaaacaaacctaaataccccct

SEQ ID NO: 38541 - DNA, 1154 bp, Artificial Sequence
  chemically treated genomic DNA (Homo sapiens) CpG-island No: 38541
tcggtaagggcgaggacgcgaaggatagaggtcgagagtaaaatttaaggttcgtgttgtttttttggcgttttgagtagtttcgacggtcggcggtgtggagaaatttgacggagaggtgcgttcggttcgtcgggttttaggtcgagatttttttttttaggtcgcggtatagtttcgttttcgtttttttttttttttttttatttttttttttaatgtttcggtttttattgggttttcgtcgttttttttaatttttcgttttcgtggtttaaatttattaacgttcgtaaataatgaataatggagcgtttttttttagtcgcgtaaggttgcgggcggggggttattgttagatgcgttcggttttggggagggggtatttatcgatcgggtgtagagggggttcgggcgcgcggtttcgtatacgtgtaatcgcggcgcgtaggcgggtatttcgttcggcggaggagggggaatttcgttttgttttttttaacgttattttttttggagttttttggtatcgaacgaggcgagagagcgcgcgcgagttttttagtcggagagggttatttttaatttgtttttttttttatatttgtttttcgggtttgcgcgttcgttcgttcgttttattagtcgaggacgcgggttttttatttcgttcggcggtttcggattttgagcgttttttttggttcgcggttttcgtttttgcgcgggtatcgtacggttaaattttagtttggaaaagatcgattaggagtcgcgtgtttttttgcgaaatattggaatcgggtgggatgggggcggggagttcggcgttgtcgttttttcgttttttttttttttttttatttcgcgcgtagagtggttgcgagaggcggtttttgtttttttttcgtaaaaagggggcggtcggttcggggtttcgagtttttcgttggttttcggttttttttttttaacgtttattttttttcggttatttacgaagttggggtttttaatacgtagatttttcggtagcggtggcgttaagtggggcgttgttttcgttttttatttttagttttttttttaagtcgttttaaataaatatattatttaaatagtagcgggttggtcgtattaataattttgaggta

SEQ ID NO: 38542 - DNA, 1154 bp, Artificial Sequence
  chemically treated genomic DNA (Homo sapiens) CpG-island No: 38542
tacctcaaaattattaatacgaccaacccgctactatttaaataatatatttatttaaaacgacttaaaaaaaaaactaaaaataaaaaacgaaaacaacgccccacttaacgccaccgctaccgaaaaatctacgtattaaaaaccccaacttcgtaaataaccgaaaaaaaataaacgttaaaaaaaaaaaaccgaaaaccaacgaaaaactcgaaaccccgaaccgaccgccccctttttacgaaaaaaaaacaaaaaccgcctctcgcaaccactctacgcgcgaaataaaaaaaaaaaaaaaaaacgaaaaaacgacaacgccgaactccccgcccccatcccacccgattccaatatttcgcaaaaaaacacgcgactcctaatcgatcttttccaaactaaaatttaaccgtacgatacccgcgcaaaaacgaaaaccgcgaaccaaaaaaaacgctcaaaatccgaaaccgccgaacgaaataaaaaacccgcgtcctcgactaataaaacgaacgaacgaacgcgcaaacccgaaaaacaaatataaaaaaaaaaacaaattaaaaataaccctctccgactaaaaaactcgcgcgcgctctctcgcctcgttcgataccaaaaaactccaaaaaaaataacgttaaaaaaaacaaaacgaaattccccctcctccgccgaacgaaatacccgcctacgcgccgcgattacacgtatacgaaaccgcgcgcccgaaccccctctacacccgatcgataaataccccctccccaaaaccgaacgcatctaacaataaccccccgcccgcaaccttacgcgactaaaaaaaaacgctccattattcattatttacgaacgttaataaatttaaaccacgaaaacgaaaaattaaaaaaaacgacgaaaacccaataaaaaccgaaacattaaaaaaaaaaataaaaaaaaaaaaaaaaaaacgaaaacgaaactataccgcgacctaaaaaaaaaaatctcgacctaaaacccgacgaaccgaacgcacctctccgtcaaatttctccacaccgccgaccgtcgaaactactcaaaacgccaaaaaaacaacacgaaccttaaattttactctcgacctctatccttcgcgtcctcgcccttaccga

SEQ ID NO: 38543 - DNA, 1154 bp, Artificial Sequence
  chemically treated genomic DNA (Homo sapiens) CpG-island No: 38543
tgttttaaagttgttggtacggttagttcgttgttgtttaaatggtgtgtttgtttagagcggtttagggagggaattggaaatggggggcgggggtagcgttttatttggcgttatcgttgtcggagggtttgcgtgttagaagttttagtttcgtaaatgatcgaagaagggtgggcgttgaggagggaaggtcgaaaattaacggagggttcggggtttcgggtcggtcgttttttttttgcggggggagagtaggagtcgtttttcgtagttattttgcgcgcggggtgggagggagagagggaggcgaagggacgatagcgtcgggtttttcgtttttattttattcggttttaatatttcgtagaaaggtacgcggtttttaatcggttttttttaggttgagatttagtcgtgcgatgttcgcgtaggggcgggggtcgcgggttaggggaggcgtttagagttcggagtcgtcgagcgaggtgaggagttcgcgttttcggttggtggagcgggcgggcgggcgcgtaaattcgagaggtagatatagaaaggggggtaggttaaaaataatttttttcggttgggaagttcgcgcgcgttttttcgtttcgttcggtgttagaggattttaggggaggtggcgttggggagggtagagcgggattttttttttttcgtcgggcggggtgttcgtttgcgcgtcgcggttgtacgtgtgcggggtcgcgcgttcgggttttttttgtattcggtcggtgggtgttttttttttaggatcgggcgtatttggtagtggtttttcgttcgtagttttgcgcggttggagggaagcgttttattatttattatttacgagcgttaataggtttgagttacgggggcggggggttggggggggcgacgaggatttagtggggatcgaagtattagaagaagggatagggagggagggggaagggcgggggcggggttgtgtcgcggtttggaggaagaggtttcggtttggggttcggcgagtcgggcgtattttttcgttaggtttttttatatcgtcggtcgtcgaggttgtttagggcgttaagagggtagtacgggttttagattttgttttcggtttttgtttttcgcgttttcgtttttatcga

SEQ ID NO: 38544 - DNA, 1154 bp, Artificial Sequence
  chemically treated genomic DNA (Homo sapiens) CpG-island No: 38544
tcgataaaaacgaaaacgcgaaaaacaaaaaccgaaaacaaaatctaaaacccgtactaccctcttaacgccctaaacaacctcgacgaccgacgatataaaaaaacctaacgaaaaaatacgcccgactcgccgaaccccaaaccgaaacctcttcctccaaaccgcgacacaaccccgcccccgcccttccccctccctccctatcccttcttctaatacttcgatccccactaaatcctcgtcgccccccccaaccccccgcccccgtaactcaaacctattaacgctcgtaaataataaataataaaacgcttccctccaaccgcgcaaaactacgaacgaaaaaccactaccaaatacgcccgatcctaaaaaaaaaacacccaccgaccgaatacaaaaaaaacccgaacgcgcgaccccgcacacgtacaaccgcgacgcgcaaacgaacaccccgcccgacgaaaaaaaaaaaatcccgctctaccctccccaacgccacctcccctaaaatcctctaacaccgaacgaaacgaaaaaacgcgcgcgaacttcccaaccgaaaaaaattatttttaacctacccccctttctatatctacctctcgaatttacgcgcccgcccgcccgctccaccaaccgaaaacgcgaactcctcacctcgctcgacgactccgaactctaaacgcctcccctaacccgcgacccccgcccctacgcgaacatcgcacgactaaatctcaacctaaaaaaaaccgattaaaaaccgcgtacctttctacgaaatattaaaaccgaataaaataaaaacgaaaaacccgacgctatcgtcccttcgcctccctctctccctcccaccccgcgcgcaaaataactacgaaaaacgactcctactctccccccgcaaaaaaaaaacgaccgacccgaaaccccgaaccctccgttaattttcgaccttccctcctcaacgcccacccttcttcgatcatttacgaaactaaaacttctaacacgcaaaccctccgacaacgataacgccaaataaaacgctacccccgccccccatttccaattccctccctaaaccgctctaaacaaacacaccatttaaacaacaacgaactaaccgtaccaacaactttaaaaca

SEQ ID NO: 38545 - DNA, 975 bp, Artificial Sequence
  chemically treated genomic DNA (Homo sapiens) CpG-island No: 38545
ggtcgcgtcgttttttgtttaaattagagattatttttatttgttaagggttttttaaatttttcgtttttaggtcgttaacgattatcgttttagttttagttttaggcgtcgtttggcggttgttttcggaagtcgtttgcgagtttcggggttttgatcgttgttgggtttgttcgtagatttgtttgattttagcgaatttggtttcgttttttttttattatacgttgaggattttaagacggcgatgaaagggttgaggttgtggcgacgggggcgtttagcggtatttttatttttttaaggatggcggaattaggtcgttgtcgggtagttttcgattcggaagtcgttcgcggcgcgaggttttcgttgtcgagcgcgggcgcggggggcggagttcggcggagacggggaaggggtcgtcgtggttgtcggttttcgagttgggggttgtcgcggatattgttaggtagacggcgagtatcgagcgcgggtggtcgcggtgttcgtgggttacgtttagttgcggttagaggcgatatgagtgtcgcggggttgttggtttcggtttcggtttaggttggagcgtcgtcggttttcgagtattatttcgaggaggatgaagagttggagagcgtcgaggacgacgagcgtagttgtcggggtcgcgagtcggacgaaggtgagttttgtcgttcgttcggtcgttcggagcggaggtgggatcgttgggggagggggtggggttgttcgggagaggggcggggcggttttcggggtttggggttgcgtggaggggtcgtcgggagttgcggggttcggggaagttatttttattcgtgttggagtagcggggaagttttgggtgcgttatattcgatcgtgatggggagaggggatttagatgttgttacgttgggggtttttttaagatttcgtttttttttttagtcgtttttgattgaattt

SEQ ID NO: 38546 - DNA, 975 bp, Artificial Sequence
  chemically treated genomic DNA (Homo sapiens) CpG-island No: 38546
aaattcaatcaaaaacgactaaaaaaaaaaacgaaatcttaaaaaaacccccaacgtaacaacatctaaatcccctctccccatcacgatcgaatataacgcacccaaaacttccccgctactccaacacgaataaaaataacttccccgaaccccgcaactcccgacgacccctccacgcaaccccaaaccccgaaaaccgccccgcccctctcccgaacaaccccaccccctcccccaacgatcccacctccgctccgaacgaccgaacgaacgacaaaactcaccttcgtccgactcgcgaccccgacaactacgctcgtcgtcctcgacgctctccaactcttcatcctcctcgaaataatactcgaaaaccgacgacgctccaacctaaaccgaaaccgaaaccaacaaccccgcgacactcatatcgcctctaaccgcaactaaacgtaacccacgaacaccgcgaccacccgcgctcgatactcgccgtctacctaacaatatccgcgacaacccccaactcgaaaaccgacaaccacgacgaccccttccccgtctccgccgaactccgccccccgcgcccgcgctcgacaacgaaaacctcgcgccgcgaacgacttccgaatcgaaaactacccgacaacgacctaattccgccatccttaaaaaaataaaaataccgctaaacgcccccgtcgccacaacctcaaccctttcatcgccgtcttaaaatcctcaacgtataataaaaaaaaaacgaaaccaaattcgctaaaatcaaacaaatctacgaacaaacccaacaacgatcaaaaccccgaaactcgcaaacgacttccgaaaacaaccgccaaacgacgcctaaaactaaaactaaaacgataatcgttaacgacctaaaaacgaaaaatttaaaaaacccttaacaaataaaaataatctctaatttaaacaaaaaacgacgcgacc

SEQ ID NO: 38547 - DNA, 975 bp, Artificial Sequence
  chemically treated genomic DNA (Homo sapiens) CpG-island No: 38547
aggtttaattagaaacggttgggagggaggacggggttttaaagggatttttagcgtgataatatttaagttttttttttttattacggtcgagtgtaacgtatttagggttttttcgttattttagtacggatgggggtaattttttcgagtttcgtaattttcggcggtttttttacgtagttttaggtttcggaggtcgtttcgtttttttttcgaatagttttatttttttttttagcggttttattttcgtttcgggcggtcgggcgagcggtaggatttattttcgttcgattcgcggtttcgatagttgcgttcgtcgttttcggcgttttttagttttttatttttttcggggtagtattcgggggtcggcggcgttttagtttgggtcggggtcggggttagtagtttcgcggtatttatgtcgtttttgatcgtagttgagcgtggtttacggatatcgcggttattcgcgttcggtattcgtcgtttgtttagtagtgttcgcggtagtttttaattcgaggatcggtagttacggcgatttttttttcgttttcgtcgagtttcgtttttcgcgttcgcgttcggtaacgggggtttcgcgtcgcgagcgattttcgggtcgagagttgttcgataacggtttgatttcgttatttttgggggagtggagatgtcgttggacgttttcgtcgttataattttagtttttttatcgtcgttttaaaatttttaacgtatagtgggggaggggcggagttaggttcgttagagttaggtaaatttacgggtaggtttagtagcggttaggatttcgaggttcgtaggcgattttcggagatagtcgttaggcggcgtttggagttagaattaaagcggtgatcgttagcgatttaggggcggagggtttgaagggtttttggtaggtggaggtggtttttaatttaagtagggaacgacgcgatt

SEQ ID NO: 38548 - DNA, 975 bp, Artificial Sequence
  chemically treated genomic DNA (Homo sapiens) CpG-island No: 38548
aatcgcgtcgttccctacttaaattaaaaaccacctccacctaccaaaaacccttcaaaccctccgcccctaaatcgctaacgatcaccgctttaattctaactccaaacgccgcctaacgactatctccgaaaatcgcctacgaacctcgaaatcctaaccgctactaaacctacccgtaaatttacctaactctaacgaacctaactccgcccctcccccactatacgttaaaaattttaaaacgacgataaaaaaactaaaattataacgacgaaaacgtccaacgacatctccactcccccaaaaataacgaaatcaaaccgttatcgaacaactctcgacccgaaaatcgctcgcgacgcgaaacccccgttaccgaacgcgaacgcgaaaaacgaaactcgacgaaaacgaaaaaaaaatcgccgtaactaccgatcctcgaattaaaaactaccgcgaacactactaaacaaacgacgaataccgaacgcgaataaccgcgatatccgtaaaccacgctcaactacgatcaaaaacgacataaataccgcgaaactactaaccccgaccccgacccaaactaaaacgccgccgacccccgaatactaccccgaaaaaaataaaaaactaaaaaacgccgaaaacgacgaacgcaactatcgaaaccgcgaatcgaacgaaaataaatcctaccgctcgcccgaccgcccgaaacgaaaataaaaccgctaaaaaaaaaaataaaactattcgaaaaaaaaacgaaacgacctccgaaacctaaaactacgtaaaaaaaccgccgaaaattacgaaactcgaaaaaattacccccatccgtactaaaataacgaaaaaaccctaaatacgttacactcgaccgtaataaaaaaaaaaaacttaaatattatcacgctaaaaatccctttaaaaccccgtcctccctcccaaccgtttctaattaaacct

SEQ ID NO: 38549 - DNA, 706 bp, Artificial Sequence
  chemically treated genomic DNA (Homo sapiens) CpG-island No: 38549
gtggttggggtcggttaagtcgaatatcggttatacgtaagcggcggcgggtgtggttggtgtgattaagatggtgatggcgatgcggtacgggtagttgttacgtacgttgtacgtggaatcgtcgtcgtcggaggtggattggtcggcggggacggtttaattttttacggagaatacgttttggtttaggagtggtcgtgttcgtcgggtgggggtgtcgtcgttcgggattagtggtattaacgcgtacgttattttcgaatagttttcgggagtgtcgagttagtttgcggggtcgggttcgggttttgtcgtggatgtttcggtggtgtcgtggatggtgtcgggtaaaatattcgaagcgttattcgcgtaggtaacggcgttgatgatttatttggacgagcgatttgatgttttttcgttggatgttgggtattcgttggcgttgatacggtcggcgttggatgagcgagcggtggtgttggggtcggatcgtgaaacgttgttgtgcggtgtgaaagcgttgtttgtcggttatgaggtttttgggttggtgatcggatttgtgggggttgggggtcgtatcgggtttgcgtttttcggttagggtggttaggggttggggatgggtcgggggttttatcggttttttcggggttcgttgttgtttggaaaaatttggtcgatttgaatgtttttt

SEQ ID NO: 38550 - DNA, 706 bp, Artificial Sequence
  chemically treated genomic DNA (Homo sapiens) CpG-island No: 38550
aaaaaacattcaaatcgaccaaatttttccaaacaacaacgaaccccgaaaaaaccgataaaacccccgacccatccccaacccctaaccaccctaaccgaaaaacgcaaacccgatacgacccccaacccccacaaatccgatcaccaacccaaaaacctcataaccgacaaacaacgctttcacaccgcacaacaacgtttcacgatccgaccccaacaccaccgctcgctcatccaacgccgaccgtatcaacgccaacgaatacccaacatccaacgaaaaaacatcaaatcgctcgtccaaataaatcatcaacgccgttacctacgcgaataacgcttcgaatattttacccgacaccatccacgacaccaccgaaacatccacgacaaaacccgaacccgaccccgcaaactaactcgacactcccgaaaactattcgaaaataacgtacgcgttaataccactaatcccgaacgacgacacccccacccgacgaacacgaccactcctaaaccaaaacgtattctccgtaaaaaattaaaccgtccccgccgaccaatccacctccgacgacgacgattccacgtacaacgtacgtaacaactacccgtaccgcatcgccatcaccatcttaatcacaccaaccacacccgccgccgcttacgtataaccgatattcgacttaaccgaccccaaccac

SEQ ID NO: 38551 - DNA, 706 bp, Artificial Sequence
  chemically treated genomic DNA (Homo sapiens) CpG-island No: 38551
aaaaggtatttaggtcggttaagtttttttaggtaatagcgaatttcgaaaaagtcggtaaagttttcggtttatttttagtttttgattattttgatcggaaaacgtaaattcgatgcggtttttagtttttatagattcggttattaatttagaagttttatgatcggtagatagcgtttttatatcgtataataacgttttacggttcgattttagtattatcgttcgtttatttagcgtcgatcgtgttaacgttagcgagtatttaatatttagcgaggagatattaggtcgttcgtttagataggttattaacgtcgttgtttgcgcggatagcgtttcgggtgttttgttcgatattatttacggtattatcggaatatttacgatagaattcgaattcggtttcgtagattgattcggtattttcgggggttgttcgaggatgacgtgcgcgttagtattattgatttcgaacgacgatatttttattcgacgaatacgattatttttgggttagggcgtgtttttcgtaaggagttgaatcgttttcgtcgattaatttattttcggcgacggcgattttacgtgtaacgtgcgtggtagttgttcgtgtcgtatcgttattattattttgattatattagttatattcgtcgtcgtttgcgtatgatcgatgttcgatttgatcgattttaattat

SEQ ID NO: 38552 - DNA, 706 bp, Artificial Sequence
  chemically treated genomic DNA (Homo sapiens) CpG-island No: 38552
ataattaaaatcgatcaaatcgaacatcgatcatacgcaaacgacgacgaatataactaatataatcaaaataataataacgatacgacacgaacaactaccacgcacgttacacgtaaaatcgccgtcgccgaaaataaattaatcgacgaaaacgattcaactccttacgaaaaacacgccctaacccaaaaataatcgtattcgtcgaataaaaatatcgtcgttcgaaatcaataatactaacgcgcacgtcatcctcgaacaacccccgaaaataccgaatcaatctacgaaaccgaattcgaattctatcgtaaatattccgataataccgtaaataatatcgaacaaaacacccgaaacgctatccgcgcaaacaacgacgttaataacctatctaaacgaacgacctaatatctcctcgctaaatattaaatactcgctaacgttaacacgatcgacgctaaataaacgaacgataatactaaaatcgaaccgtaaaacgttattatacgatataaaaacgctatctaccgatcataaaacttctaaattaataaccgaatctataaaaactaaaaaccgcatcgaatttacgttttccgatcaaaataatcaaaaactaaaaataaaccgaaaactttaccgactttttcgaaattcgctattacctaaaaaaacttaaccgacctaaatacctttt

SEQ ID NO: 38553 - DNA, 575 bp, Artificial Sequence
  chemically treated genomic DNA (Homo sapiens) CpG-island No: 38553
gtcggtttcgttttgttttcgttcgcgttgtcgtttttcgtttttttttttcgtcgtttttttcgttttcgtttttttttttttttttttcgtttcgtttttttttttttttttttttcggtcgtttttttttttttttttttttttttttttgttttttcgtcgtttcgttttttttttttttcgttttttgttgttcggttgtgcgttttttttttgttttttgtgttttgtttttgtcgttttttttttttcgtttttttttttttttcgtttttttttttttgggttttttttcgtttttttttgttttttttttcgtttttttttttttttttttcggttttttcgttttttttttgtttttttcgtttcggttcgttttttgttcgttttttttttttttgttcgtttttttcgttcgtttttcgtttttttttcggtttttcgtttttttttttttttttttttgttgttttttttttgttttttttttttttttttttttttgtttttcgtttgtttgttttcgtttttcgtttttttttttttcgtttttttttcgtgtgtgtttt

SEQ ID NO: 38554 - DNA, 575 bp, Artificial Sequence
  chemically treated genomic DNA (Homo sapiens) CpG-island No: 38554
aaaacacacacgaaaaaaaaacgaaaaaaaaaaaaacgaaaaacgaaaacaaacaaacgaaaaacaaaaaaaaaaaaaaaaaaaaaaaacaaaaaaaaaacaacaaaaaaaaaaaaaaaaaaaaacgaaaaaccgaaaaaaaaacgaaaaacgaacgaaaaaaacgaacaaaaaaaaaaaaaacgaacaaaaaacgaaccgaaacgaaaaaaacaaaaaaaaaacgaaaaaaccgaaaaaaaaaaaaaaaaaaacgaaaaaaaaaacaaaaaaaaacgaaaaaaaacccaaaaaaaaaaaaacgaaaaaaaaaaaaaaacgaaaaaaaaaaaacgacaaaaacaaaacacaaaaaacaaaaaaaaaacgcacaaccgaacaacaaaaaacgaaaaaaaaaaaaaacgaaacgacgaaaaaacaaaaaaaaaaaaaaaaaaaaaaaaaaaaacgaccgaaaaaaaaaaaaaaaaaaaaacgaaacgaaaaaaaaaaaaaaaaaaacgaaaacgaaaaaaacgacgaaaaaaaaaaacgaaaaacgacaacgcgaacgaaaacaaaacgaaaccgac

SEQ ID NO: 38555 - DNA, 575 bp, Artificial Sequence
  chemically treated genomic DNA (Homo sapiens) CpG-island No: 38555
aagatatatacgaaaagagagcgagggaaagggagacggagaacggagatagatagacgaaaagtagaaagagaggagggagggaagaatagagaaagggtaataggagggagaaagagaagagacgagaggtcggagagagggcgaagggcgaacgggggaggcgggtagaaggagaagaggcggataagaaacggatcggagcgaaagaagtaagggaggggcgaaaaggtcgggggggaaggagaggggaacgaaggagggagtaaagagaaacggaggaggatttaggggagaaggagcggaggagggaggggaacggaagagaggaaacgatagaggtagggtataagaagtaaaggggaaacgtatagtcgggtagtaagagacgggggaggaggaggacgaggcggcgaaggagtaaaggagaggagagaagggggaaagaaggcgatcgggggggaggaaaaaaggagagcggggcggaaggggaaggggggggggcggaggcggagggggcgacggggaaggggagcgggaagcggtagcgcgagcgagggtaagacggggtcggt

SEQ ID NO: 38556 - DNA, 575 bp, Artificial Sequence
  chemically treated genomic DNA (Homo sapiens) CpG-island No: 38556
accgaccccgtcttaccctcgctcgcgctaccgcttcccgctccccttccccgtcgccccctccgcctccgccccccccccttccccttccgccccgctctccttttttcctcccccccgatcgccttctttcccccttctctcctctcctttactccttcgccgcctcgtcctcctcctcccccgtctcttactacccgactatacgtttcccctttacttcttataccctacctctatcgtttcctctcttccgttcccctccctcctccgctccttctcccctaaatcctcctccgtttctctttactccctccttcgttcccctctccttcccccccgaccttttcgcccctcccttacttctttcgctccgatccgtttcttatccgcctcttctccttctacccgcctcccccgttcgcccttcgccctctctccgacctctcgtctcttctctttctccctcctattaccctttctctattcttccctccctcctctctttctacttttcgtctatctatctccgttctccgtctccctttccctcgctctcttttcgtatatatctt

SEQ ID NO: 38557 - DNA, 647 bp, Artificial Sequence
  chemically treated genomic DNA (Homo sapiens) CpG-island No: 38557
tcggttaagtcgaatatcggttatacgtaagcggcggcgggtgtggttggtgtgattaagatggtgatggcgatgcggtacgggtagttgttacgttcgttgtacgtggaatcgtcgtcgtcggaggtggattggtcggcggggacggtttaattttttacggagaatacgttttggtttaggagtggtcgtgttcgtcgggtgggggtgtcgtcgttcgggattagtggtattaacgcgtacgttattttcgaatagttttcgggagtgtcgagttagtttgcggggtcgggttcgggttttgtcgtggatgtttcggtggtgtcgtggatggtgtcgggtaaaatattcgaagcgttattcgcgtaggtaacggcgttgatgatttatttggacgagcgatttgatgttttttcgttggatgttgggtattcgttggcgttgatacggtcggcgttggatgagcgagcggtggtgttggggtcggatcgtgaaacgttgttgtgcggtgtgaaagcgttgtttgtcggatatgaggttttttggttgatgatcgaatttgtgagggtttgggggtcgtatacgatttgtgatttttcgaataggatgtattaatgatttggagatgagatcgaagagttttatcg

SEQ ID NO: 38558 - DNA, 647 bp, Artificial Sequence
  chemically treated genomic DNA (Homo sapiens) CpG-island No: 38558
cgataaaactcttcgatctcatctccaaatcattaatacatcctattcgaaaaatcacaaatcgtatacgacccccaaaccctcacaaattcgatcatcaaccaaaaaacctcatatccgacaaacaacgctttcacaccgcacaacaacgtttcacgatccgaccccaacaccaccgctcgctcatccaacgccgaccgtatcaacgccaacgaatacccaacatccaacgaaaaaacatcaaatcgctcgtccaaataaatcatcaacgccgttacctacgcgaataacgcttcgaatattttacccgacaccatccacgacaccaccgaaacatccacgacaaaacccgaacccgaccccgcaaactaactcgacactcccgaaaactattcgaaaataacgtacgcgttaataccactaatcccgaacgacgacacccccacccgacgaacacgaccactcctaaaccaaaacgtattctccgtaaaaaattaaaccgtccccgccgaccaatccacctccgacgacgacgattccacgtacaacgaacgtaacaactacccgtaccgcatcgccatcaccatcttaatcacaccaaccacacccgccgccgcttacgtataaccgatattcgacttaaccga

SEQ ID NO: 38559 - DNA, 647 bp, Artificial Sequence
  chemically treated genomic DNA (Homo sapiens) CpG-island No: 38559
cggtaaagtttttcggttttatttttaagttattggtgtattttgttcgaaaaattataaatcgtatgcggtttttaggtttttatagattcggttattaattaagaagttttatgttcggtagatagcgtttttatatcgtataataacgttttacggttcgattttagtattatcgttcgtttatttagcgtcgatcgtgttaacgttagcgagtatttaatatttagcgaggagatattaggtcgttcgtttagataggttattaacgtcgttgtttgcgcggatagcgtttcgggtgttttgttcgatattatttacggtattatcggaatatttacgatagaattcgaattcggtttcgtagattgattcggtattttcgggggttgttcgaggatgacgtgcgcgttagtattattgatttcgaacgacgatatttttattcgacgaatacgattatttttgggttagggcgtgtttttcgtaaggagttgaatcgttttcgtcgattaatttattttcggcgacggcgattttacgtgtaacgagcgtggtagttgttcgtgtcgtatcgttattattattttgattatattagttatattcgtcgtcgtttgcgtatgatcgatgttcgatttgatcga

SEQ ID NO: 38560 - DNA, 647 bp, Artificial Sequence
  chemically treated genomic DNA (Homo sapiens) CpG-island No: 38560
tcgatcaaatcgaacatcgatcatacgcaaacgacgacgaatataactaatataatcaaaataataataacgatacgacacgaacaactaccacgctcgttacacgtaaaatcgccgtcgccgaaaataaattaatcgacgaaaacgattcaactccttacgaaaaacacgccctaacccaaaaataatcgtattcgtcgaataaaaatatcgtcgttcgaaatcaataatactaacgcgcacgtcatcctcgaacaacccccgaaaataccgaatcaatctacgaaaccgaattcgaattctatcgtaaatattccgataataccgtaaataatatcgaacaaaacacccgaaacgctatccgcgcaaacaacgacgttaataacctatctaaacgaacgacctaatatctcctcgctaaatattaaatactcgctaacgttaacacgatcgacgctaaataaacgaacgataatactaaaatcgaaccgtaaaacgttattatacgatataaaaacgctatctaccgaacataaaacttcttaattaataaccgaatctataaaaacctaaaaaccgcatacgatttataatttttcgaacaaaatacaccaataacttaaaaataaaaccgaaaaactttaccg

SEQ ID NO: 38561 - DNA, 576 bp, Artificial Sequence
  chemically treated genomic DNA (Homo sapiens) CpG-island No: 38561
cgcgtataggtttagggcgtgcgcggggttcgagaagggaagtacggttagggggtcggtcgttttatggcgttttcgataggttgtcgaggacgtcgcggtcggggttgcgagagacgcggcgtttaggtatcgttgttataaataggcgggcgcgcggttttcgaggggcgggatgggcggggagacgtttgtatcgtttttttaatttttttgtgtcgggcgttatttgttttcgcgagcgcgcgttcgttgtttttcgcgcggcgttcgttttcggtttcgtaggttgagttatcgttgttcgcggtcggtttttttttttcgtttttttgcgttttttcgttgacgttcgggtcgggatagcgagtgataagtgttaggttcgagggcggttttcgtcgtcgggatcgggggtttttcggggttgtttacgatttattcggttcggttgttgaatttaattcgggagaggcgagttcggttttgaaattaaagttatttttttttttacgttagattttttaagggcgtcggtttaggtttcggggcggttgggtataatggttttttgtt

SEQ ID NO: 38562 - DNA, 576 bp, Artificial Sequence
  chemically treated genomic DNA (Homo sapiens) CpG-island No: 38562
aacaaaaaaccattatacccaaccgccccgaaacctaaaccgacgcccttaaaaaatctaacgtaaaaaaaaaaataactttaatttcaaaaccgaactcgcctctcccgaattaaattcaacaaccgaaccgaataaatcgtaaacaaccccgaaaaacccccgatcccgacgacgaaaaccgccctcgaacctaacacttatcactcgctatcccgacccgaacgtcaacgaaaaaacgcaaaaaaacgaaaaaaaaaaaccgaccgcgaacaacgataactcaacctacgaaaccgaaaacgaacgccgcgcgaaaaacaacgaacgcgcgctcgcgaaaacaaataacgcccgacacaaaaaaattaaaaaaacgatacaaacgtctccccgcccatcccgcccctcgaaaaccgcgcgcccgcctatttataacaacgatacctaaacgccgcgtctctcgcaaccccgaccgcgacgtcctcgacaacctatcgaaaacgccataaaacgaccgaccccctaaccgtacttcccttctcgaaccccgcgcacgccctaaacctatacgcg

SEQ ID NO: 38563 - DNA, 576 bp, Artificial Sequence
  chemically treated genomic DNA (Homo sapiens) CpG-island No: 38563
aataaaaagttattgtatttagtcgtttcgggatttgggtcggcgtttttgggaagtttggcgtgaaaggaggggtggttttggttttagggtcgagttcgtttttttcgggttgggtttagtagtcgggtcgggtgggtcgtgggtaatttcgggaggttttcggtttcggcgacggaggtcgttttcggatttggtatttgttattcgttgtttcggttcgggcgttagcggggagacgtagaagggcggagggagggagtcggtcgcggatagcggtgatttagtttgcggagtcgggggcgggcgtcgcgcgggggatagcgaacgcgcgttcgcgggggtaggtggcgttcggtatagaggggttaagggggcggtgtagacgttttttcgtttatttcgtttttcgagagtcgcgcgttcgtttatttatagtagcggtgtttaggcgtcgcgtttttcgtagtttcggtcgcggcgttttcgataatttatcgaaggcgttatggagcgatcggttttttggtcgtgttttttttttcggatttcgcgtacgttttgagtttgtgcgcg

SEQ ID NO: 38564 - DNA, 576 bp, Artificial Sequence
  chemically treated genomic DNA (Homo sapiens) CpG-island No: 38564
cgcgcacaaactcaaaacgtacgcgaaatccgaaaaaaaaaacacgaccaaaaaaccgatcgctccataacgccttcgataaattatcgaaaacgccgcgaccgaaactacgaaaaacgcgacgcctaaacaccgctactataaataaacgaacgcgcgactctcgaaaaacgaaataaacgaaaaaacgtctacaccgcccccttaacccctctataccgaacgccacctacccccgcgaacgcgcgttcgctatcccccgcgcgacgcccgcccccgactccgcaaactaaatcaccgctatccgcgaccgactccctccctccgcccttctacgtctccccgctaacgcccgaaccgaaacaacgaataacaaataccaaatccgaaaacgacctccgtcgccgaaaccgaaaacctcccgaaattacccacgacccacccgacccgactactaaacccaacccgaaaaaaacgaactcgaccctaaaaccaaaaccacccctcctttcacgccaaacttcccaaaaacgccgacccaaatcccgaaacgactaaatacaataactttttatt

SEQ ID NO: 38565 - DNA, 536 bp, Artificial Sequence
  chemically treated genomic DNA (Homo sapiens) CpG-island No: 38565
ggcgttagcgttacgagcgtaggaaattataggttttaaaatgtagcgcggttaattcgtcgattcgcggtttcgagggcggtttggggtttgtcgggagttgtagtttcgaaaaatcgtaacgcgtttacgagtcgttcgggtaaaagaattatttgtagggttattgcgatttattgtttatttgttttcgcggcgaattttttagaatcggggttttttaggaatttaatcgattttagtcgagggtcgttattcgtttttagttgttagttagtttagagttttcgcgggtagaggcgcgtagtcggcgttgagtttattgtattttcgttttttattttcggttcgttgttttgtgttttcggcggaaattgttttttcgcggagggggttcgtttgtttttcggtttttttaggtttatacggcgttttgcgcgttttgtgttcggtttcgttggttagtgaattttatttttatcgtttataggtagaaatttggggtttcgttcgtttttttttttgatgttattttt

SEQ ID NO: 38566 - DNA, 536 bp, Artificial Sequence
  chemically treated genomic DNA (Homo sapiens) CpG-island No: 38566
aaaaataacatcaaaaaaaaaaacgaacgaaaccccaaatttctacctataaacgataaaaataaaattcactaaccaacgaaaccgaacacaaaacgcgcaaaacgccgtataaacctaaaaaaaccgaaaaacaaacgaaccccctccgcgaaaaaacaatttccgccgaaaacacaaaacaacgaaccgaaaataaaaaacgaaaatacaataaactcaacgccgactacgcgcctctacccgcgaaaactctaaactaactaacaactaaaaacgaataacgaccctcgactaaaatcgattaaattcctaaaaaaccccgattctaaaaaattcgccgcgaaaacaaataaacaataaatcgcaataaccctacaaataattcttttacccgaacgactcgtaaacgcgttacgatttttcgaaactacaactcccgacaaaccccaaaccgccctcgaaaccgcgaatcgacgaattaaccgcgctacattttaaaacctataatttcctacgctcgtaacgctaacgcc

SEQ ID NO: 38567 - DNA, 536 bp, Artificial Sequence
  chemically treated genomic DNA (Homo sapiens) CpG-island No: 38567
gggaatgatattaagggaggagacgggcgggattttagatttttgtttgtgggcgatggaagtgaggtttattggttagcggagtcggatatagaacgcgtaaaacgtcgtgtaggtttggaggagtcgaagagtaggcggatttttttcgcgggggaatagttttcgtcgggagtataaagtaacggatcggaagtggggggcggaagtgtagtgggtttagcgtcgattgcgcgtttttgttcgcgaaaattttgagttggttgatagttggggacgggtggcggttttcgattggagtcggttgagtttttgagggatttcggttttggaaggttcgtcgcggagataagtgagtagtgagtcgtagtgattttataagtggtttttttattcgagcggttcgtaggcgcgttgcggtttttcgaaattatagttttcggtaggttttaagtcgttttcggggtcgcgggtcggcggattggtcgcgttgtattttgggatttgtagttttttgcgttcgtggcgttggcgtt

SEQ ID NO: 38568 - DNA, 536 bp, Artificial Sequence
  chemically treated genomic DNA (Homo sapiens) CpG-island No: 38568
aacgccaacgccacgaacgcaaaaaactacaaatcccaaaatacaacgcgaccaatccgccgacccgcgaccccgaaaacgacttaaaacctaccgaaaactataatttcgaaaaaccgcaacgcgcctacgaaccgctcgaataaaaaaaccacttataaaatcactacgactcactactcacttatctccgcgacgaaccttccaaaaccgaaatccctcaaaaactcaaccgactccaatcgaaaaccgccacccgtccccaactatcaaccaactcaaaattttcgcgaacaaaaacgcgcaatcgacgctaaacccactacacttccgccccccacttccgatccgttactttatactcccgacgaaaactattcccccgcgaaaaaaatccgcctactcttcgactcctccaaacctacacgacgttttacgcgttctatatccgactccgctaaccaataaacctcacttccatcgcccacaaacaaaaatctaaaatcccgcccgtctcctcccttaatatcattccc

SEQ ID NO: 38569 - DNA, 782 bp, Artificial Sequence
  chemically treated genomic DNA (Homo sapiens) CpG-island No: 38569
tttttttttttttttttttatatttttttttcgttttcgtagttttttttttttttttttttttttttttaattttttttttttttttttttcgtttttttttttaattttttttttttttttttttgtttttttttttttttttttttcgtcgcgttcgtttttcgttcgttttcgttttttttattttttttttttttttttttcggtattgtagtattagtcgtttgtagtttcggtcgttatttgcgtttttttagttttcgtaggtttaatcgtcgttagtattatggttagtattattttcggtaggtttcggggttacgggttttgtggggcggcgggatttgagtagaggtttcgtttggtttcgtttggggtagcggtcggtagcggacgttaatttttttttttttattttgcgcgttgtaagtttgggttcgattcgttcgaggttggggtttgcggcgtcggcggggttggtggggcgttgggttgcgaggcgtcgcgtcggggagcgttcgggatcgggacgtcgggcgggggcgtttcgtttttgggggagtagcgtgttacgtagggcgcgattgtcgtagggtggtttttagattcgggcgtgggttcgcgatcgggtgggcgcgttcgcgatgtgcgggcggggtttttggggcgttcggcgattcgagatttgggttcgttagagttttcgtggggaggcggggagagggtgggattttttgttaaagttttagtcgggaattcggcgtttttcgcgttagtgt

SEQ ID NO: 38570 - DNA, 782 bp, Artificial Sequence
  chemically treated genomic DNA (Homo sapiens) CpG-island No: 38570
acactaacgcgaaaaacgccgaattcccgactaaaactttaacaaaaaatcccaccctctccccgcctccccacgaaaactctaacgaacccaaatctcgaatcgccgaacgccccaaaaaccccgcccgcacatcgcgaacgcgcccacccgatcgcgaacccacgcccgaatctaaaaaccaccctacgacaatcgcgccctacgtaacacgctactcccccaaaaacgaaacgcccccgcccgacgtcccgatcccgaacgctccccgacgcgacgcctcgcaacccaacgccccaccaaccccgccgacgccgcaaaccccaacctcgaacgaatcgaacccaaacttacaacgcgcaaaataaaaaaaaaaaaattaacgtccgctaccgaccgctaccccaaacgaaaccaaacgaaacctctactcaaatcccgccgccccacaaaacccgtaaccccgaaacctaccgaaaataatactaaccataatactaacgacgattaaacctacgaaaactaaaaaaacgcaaataacgaccgaaactacaaacgactaatactacaataccgaaaaaaaaaaaaaaaaaaaataaaaaaaacgaaaacgaacgaaaaacgaacgcgacgaaaaaaaaaaaaaaaaaaaaacaaaaaaaaaaaaaaaaaaaattaaaaaaaaaaacgaaaaaaaaaaaaaaaaaaaattaaaaaaaaaaaaaaaaaaaaaaaaaaaactacgaaaacgaaaaaaaaatataaaaaaaaaaaaaaaaaaa

SEQ ID NO: 38571 - DNA, 782 bp, Artificial Sequence
  chemically treated genomic DNA (Homo sapiens) CpG-island No: 38571
gtattggcgcggggagcgtcgggttttcggttggggttttggtagagggttttatttttttttcgtttttttacgaaggttttggcggatttagatttcgggtcgtcggacgttttagggatttcgttcgtatatcgcgagcgcgtttattcggtcgcgagtttacgttcgggtttgggagttattttgcggtagtcgcgttttgcgtggtacgttgtttttttaggggcgaggcgttttcgttcgacgtttcggtttcgagcgtttttcggcgcggcgtttcgtagtttagcgttttattagtttcgtcggcgtcgtagattttagtttcgggcgggtcgggtttaggtttgtaacgcgtagggtaggagaagggaaattggcgttcgttgtcggtcgttgttttaggcgaggttagacgaggtttttgtttagatttcgtcgttttataaagttcgtggtttcggagtttatcggaaatggtgttggttatggtgttggcggcggttgggtttgcggaggttggagaggcgtaagtggcggtcggagttgtagacggttggtgttgtagtgtcggggaggggaggggagaggagtggagggagcgagggcgggcgggaggcgggcgcggcgggagagagagagggagggagatagagggagagagagagagggttgggggaaggagcggggggaggagggagggagggttgggggaaggagagagagagagagagagattgcgggggcgggggaaggatgtaaggaggaagggagggaga

SEQ ID NO: 38572 - DNA, 782 bp, Artificial Sequence
  chemically treated genomic DNA (Homo sapiens) CpG-island No: 38572
tctccctcccttcctccttacatccttcccccgcccccgcaatctctctctctctctctctccttcccccaaccctccctccctcctccccccgctccttcccccaaccctctctctctctccctctatctccctccctctctctctcccgccgcgcccgcctcccgcccgccctcgctccctccactcctctcccctcccctccccgacactacaacaccaaccgtctacaactccgaccgccacttacgcctctccaacctccgcaaacccaaccgccgccaacaccataaccaacaccatttccgataaactccgaaaccacgaactttataaaacgacgaaatctaaacaaaaacctcgtctaacctcgcctaaaacaacgaccgacaacgaacgccaatttcccttctcctaccctacgcgttacaaacctaaacccgacccgcccgaaactaaaatctacgacgccgacgaaactaataaaacgctaaactacgaaacgccgcgccgaaaaacgctcgaaaccgaaacgtcgaacgaaaacgcctcgcccctaaaaaaacaacgtaccacgcaaaacgcgactaccgcaaaataactcccaaacccgaacgtaaactcgcgaccgaataaacgcgctcgcgatatacgaacgaaatccctaaaacgtccgacgacccgaaatctaaatccgccaaaaccttcgtaaaaaaacgaaaaaaaaataaaaccctctaccaaaaccccaaccgaaaacccgacgctccccgcgccaatac

SEQ ID NO: 38573 - DNA, 519 bp, Artificial Sequence
  chemically treated genomic DNA (Homo sapiens) CpG-island No: 38573
ttttcgggcggcgcggcgcgggcggcggtcggatttagggcgggggtcggcggttcggttagttcggttcggttcggggtcgcgttttgagagttagttttcgtcgttgtagtttcggcgttcggtcggtcggttatggagcgtttttcgtttcgcgtcgtcggtcgggattttagtgcgttgcgggtcgaggcgtcgtggttgcgcgcggagggttcggggtcgcgcgtcgcgttcgtgacggtgtttacgtcgtcgtaggtatcgggcgtcggtgggcgggggcgtcgattaagtttttttcgttgtaaagatggcgttagtgttgtttaaatttcgggttttcgggggcggggtagcggggagggcggtcgcgtcggttcgcgcgtgttcgtgggtttcgtcggggttgcgtcgggcggtcggggagtttttttcgtcgcgtcgggttgcgggcgtattaaaacgtaggtattatttatttttttttattttaaattttattttatgatttttttt

SEQ ID NO: 38574 - DNA, 519 bp, Artificial Sequence
  chemically treated genomic DNA (Homo sapiens) CpG-island No: 38574
aaaaaaaatcataaaataaaatttaaaataaaaaaaaataaataatacctacgttttaatacgcccgcaacccgacgcgacgaaaaaaactccccgaccgcccgacgcaaccccgacgaaacccacgaacacgcgcgaaccgacgcgaccgccctccccgctaccccgcccccgaaaacccgaaatttaaacaacactaacgccatctttacaacgaaaaaaacttaatcgacgcccccgcccaccgacgcccgatacctacgacgacgtaaacaccgtcacgaacgcgacgcgcgaccccgaaccctccgcgcgcaaccacgacgcctcgacccgcaacgcactaaaatcccgaccgacgacgcgaaacgaaaaacgctccataaccgaccgaccgaacgccgaaactacaacgacgaaaactaactctcaaaacgcgaccccgaaccgaaccgaactaaccgaaccgccgacccccgccctaaatccgaccgccgcccgcgccgcgccgcccgaaaa

SEQ ID NO: 38575 - DNA, 519 bp, Artificial Sequence
  chemically treated genomic DNA (Homo sapiens) CpG-island No: 38575
agaaggaattataaaataaaatttggaataaaaaggaatagatggtgtttgcgttttgatacgttcgtagttcggcgcggcgggaagggtttttcggtcgttcggcgtagtttcggcgggatttacggatacgcgcggatcgacgcggtcgtttttttcgttgtttcgttttcgggggttcgaagtttgggtagtattgacgttatttttgtagcgagagaaatttggtcggcgttttcgtttatcggcgttcggtatttgcggcggcgtgggtatcgttacgggcgcggcgcgcggtttcggatttttcgcgcgtagttacggcgtttcggttcgtagcgtattggggtttcggtcggcggcgcggggcggggggcgttttatggtcggtcggtcgggcgtcgaggttgtagcggcgagggttgatttttaggacgcggtttcgggtcgggtcgggttggtcgggtcgtcgattttcgttttggattcggtcgtcgttcgcgtcgcgtcgttcggagg

SEQ ID NO: 38576 - DNA, 519 bp, Artificial Sequence
  chemically treated genomic DNA (Homo sapiens) CpG-island No: 38576
cctccgaacgacgcgacgcgaacgacgaccgaatccaaaacgaaaatcgacgacccgaccaacccgacccgacccgaaaccgcgtcctaaaaatcaaccctcgccgctacaacctcgacgcccgaccgaccgaccataaaacgccccccgccccgcgccgccgaccgaaaccccaatacgctacgaaccgaaacgccgtaactacgcgcgaaaaatccgaaaccgcgcgccgcgcccgtaacgatacccacgccgccgcaaataccgaacgccgataaacgaaaacgccgaccaaatttctctcgctacaaaaataacgtcaatactacccaaacttcgaacccccgaaaacgaaacaacgaaaaaaacgaccgcgtcgatccgcgcgtatccgtaaatcccgccgaaactacgccgaacgaccgaaaaacccttcccgccgcgccgaactacgaacgtatcaaaacgcaaacaccatctattcctttttattccaaattttattttataattccttct

SEQ ID NO: 38577 - DNA, 753 bp, Artificial Sequence
  chemically treated genomic DNA (Homo sapiens) CpG-island No: 38577
cggggtggtttttatgggtcgcgtttttgcgggtcgggtgtttgcggggtggtttttgggaatcgcgtttttgcgggtcgggtgtttgcggggtggtttttggggatcgcgtttttgcgggtcgggtgtttgcggggtggtttttggggatcgcgtttttgcgggtcgggtgtttgcggggtggtttttgtgggtcgcgtttttgtggggtggtttttgtgggtcgcgtttttgtggggtggtttttgcgggtcgcgtggtggtttttgcgggtcgggtgtttgcggggtggtttttgtgggtcgcgtttttgcgggtcgggtgtttgcggggtggtttttgcgggtcgtatttttgcggcgtggttttttcgggatgggtttatcgaggaggtcgttggaggtcgagttcgcgttcgttcgcggcgttaagatggaggtaggaagcgtcgtcgttcgcgttcgttatcgttcgcgtcgttcgtttgacgtcgtcgttgcgtttgacgtcgtcgttcgcgcggtcgttttttcgtcggttttttttttttttcgtcgtaacgttttgacgtttcgtagggatttttgattggacggcggcgcgtgagcggagcgagaggtttcgtcgcgggggggtcgcgggttcgtcggcgtcgtttatttggggtcgcgtcgggtttgtttaggtattcggcgggggcggcggcgtcgggagttgcggcggcggcgggcggcggcggcggtcgcgggtttt

SEQ ID NO: 38578 - DNA, 753 bp, Artificial Sequence
  chemically treated genomic DNA (Homo sapiens) CpG-island No: 38578
aaaacccgcgaccgccgccgccgcccgccgccgccgcaactcccgacgccgccgcccccgccgaatacctaaacaaacccgacgcgaccccaaataaacgacgccgacgaacccgcgacccccccgcgacgaaacctctcgctccgctcacgcgccgccgtccaatcaaaaatccctacgaaacgtcaaaacgttacgacgaaaaaaaaaaaaaaccgacgaaaaaacgaccgcgcgaacgacgacgtcaaacgcaacgacgacgtcaaacgaacgacgcgaacgataacgaacgcgaacgacgacgcttcctacctccatcttaacgccgcgaacgaacgcgaactcgacctccaacgacctcctcgataaacccatcccgaaaaaaccacgccgcaaaaatacgacccgcaaaaaccaccccgcaaacacccgacccgcaaaaacgcgacccacaaaaaccaccccgcaaacacccgacccgcaaaaaccaccacgcgacccgcaaaaaccaccccacaaaaacgcgacccacaaaaaccaccccacaaaaacgcgacccacaaaaaccaccccgcaaacacccgacccgcaaaaacgcgatccccaaaaaccaccccgcaaacacccgacccgcaaaaacgcgatccccaaaaaccaccccgcaaacacccgacccgcaaaaacgcgattcccaaaaaccaccccgcaaacacccgacccgcaaaaacgcgacccataaaaaccaccccg

SEQ ID NO: 38579 - DNA, 753 bp, Artificial Sequence
  chemically treated genomic DNA (Homo sapiens) CpG-island No: 38579
gaagttcgcggtcgtcgtcgtcgttcgtcgtcgtcgtagttttcgacgtcgtcgttttcgtcgggtgtttaagtaggttcggcgcggttttaggtaagcggcgtcggcgagttcgcggttttttcgcggcgaggtttttcgtttcgtttacgcgtcgtcgtttagttaggggtttttgcggagcgttaggacgttacggcggggggaggggagggtcggcggaggggcggtcgcgcgggcggcggcgttaggcgtaacggcggcgttaggcgggcggcgcgggcggtggcgggcgcgggcggcggcgttttttgtttttattttggcgtcgcgggcgggcgcgggttcggtttttagcggttttttcggtggatttatttcggggggattacgtcgtaggggtgcgattcgtagggattatttcgtaggtattcgattcgtagggacgcgatttatagggattatttcgtaggtattcgattcgtaggggttattacgcgattcgtaggggttattttatagggacgcgatttatagggattattttatagggacgcgatttataaggattatttcgtaggtattcgattcgtagggacgcgatttttaggggttatttcgtaggtattcgattcgtagggacgcgatttttaggggttatttcgtaggtattcgattcgtagggacgcgatttttaggggttatttcgtaggtattcgattcgtagggacgcgatttatagggattatttcg

SEQ ID NO: 38580 - DNA, 753 bp, Artificial Sequence
  chemically treated genomic DNA (Homo sapiens) CpG-island No: 38580
cgaaataatccctataaatcgcgtccctacgaatcgaatacctacgaaataacccctaaaaatcgcgtccctacgaatcgaatacctacgaaataacccctaaaaatcgcgtccctacgaatcgaatacctacgaaataacccctaaaaatcgcgtccctacgaatcgaatacctacgaaataatccttataaatcgcgtccctataaaataatccctataaatcgcgtccctataaaataacccctacgaatcgcgtaataacccctacgaatcgaatacctacgaaataatccctataaatcgcgtccctacgaatcgaatacctacgaaataatccctacgaatcgcacccctacgacgtaatccccccgaaataaatccaccgaaaaaaccgctaaaaaccgaacccgcgcccgcccgcgacgccaaaataaaaacaaaaaacgccgccgcccgcgcccgccaccgcccgcgccgcccgcctaacgccgccgttacgcctaacgccgccgcccgcgcgaccgcccctccgccgaccctcccctccccccgccgtaacgtcctaacgctccgcaaaaacccctaactaaacgacgacgcgtaaacgaaacgaaaaacctcgccgcgaaaaaaccgcgaactcgccgacgccgcttacctaaaaccgcgccgaacctacttaaacacccgacgaaaacgacgacgtcgaaaactacgacgacgacgaacgacgacgacgaccgcgaacttc

SEQ ID NO: 38581 - DNA, 536 bp, Artificial Sequence
  chemically treated genomic DNA (Homo sapiens) CpG-island No: 38581
atagggagattattgtcggggggggggtaaaaaatcgtcgggcgattagatagaaaaaataagaatagggacgggggggcggtacggggggggtggtggcgtgatatttaggcggggagacgaggaagtttcggcgcggaaaaagatgaggtacggagacgggagaaggcgtgcgaagttgcgaatagaatcggggttgggcggggaagggcggtatacgttttgataggagaggaattggggtattttatgggggaggggggggcgatagttcggcgtgggatagggggtcgtaacgtttcgaatttatttaagatcgcggatgcgttattaaataaaagttttcgagggaacgtgacggacgataggaaaagagggggcggggtttaggaggagaggttggaaaataattcgcgcgttgaggagggtacgggtttcggcgcgtcggggagacgtaggcggcgttgtaattgcgtcgggagatgtgttagcggatttattgtcgcgattttttgagtatattcgtatttgttgtt

SEQ ID NO: 38582 - DNA, 536 bp, Artificial Sequence
  chemically treated genomic DNA (Homo sapiens) CpG-island No: 38582
aacaacaaatacgaatatactcaaaaaatcgcgacaataaatccgctaacacatctcccgacgcaattacaacgccgcctacgtctccccgacgcgccgaaacccgtaccctcctcaacgcgcgaattattttccaacctctcctcctaaaccccgccccctcttttcctatcgtccgtcacgttccctcgaaaacttttatttaataacgcatccgcgatcttaaataaattcgaaacgttacgaccccctatcccacgccgaactatcgcccccccctcccccataaaataccccaattcctctcctatcaaaacgtataccgcccttccccgcccaaccccgattctattcgcaacttcgcacgccttctcccgtctccgtacctcatctttttccgcgccgaaacttcctcgtctccccgcctaaatatcacgccaccaccccccccgtaccgcccccccgtccctattcttattttttctatctaatcgcccgacgattttttaccccccccccgacaataatctccctat

SEQ ID NO: 38583 - DNA, 536 bp, Artificial Sequence
  chemically treated genomic DNA (Homo sapiens) CpG-island No: 38583
gatagtaagtacgaatatatttaaagaatcgcggtaatgggttcgttgatatatttttcggcgtagttgtagcgtcgtttgcgttttttcggcgcgtcggagttcgtgttttttttagcgcgcgggttgttttttagtttttttttttgaatttcgttttttttttttttgtcgttcgttacgttttttcgggagtttttgtttggtaacgtattcgcggttttgggtagattcgagacgttgcgattttttattttacgtcggattgtcgttttttttttttttataggatgttttagttttttttttgttagagcgtgtatcgttttttttcgtttagtttcgattttattcgtaatttcgtacgttttttttcgttttcgtgttttattttttttcgcgtcgggattttttcgttttttcgtttaggtattacgttattatttttttcgtgtcgttttttcgtttttatttttattttttttgtttgatcgttcggcgattttttatttttttttcggtagtagtttttttgt

SEQ ID NO: 38584 - DNA, 536 bp, Artificial Sequence
  chemically treated genomic DNA (Homo sapiens) CpG-island No: 38584
acaaaaaaactactaccgaaaaaaaaataaaaaatcgccgaacgatcaaacaaaaaaaataaaaataaaaacgaaaaaacgacacgaaaaaaataataacgtaatacctaaacgaaaaaacgaaaaaatcccgacgcgaaaaaaaataaaacacgaaaacgaaaaaaaacgtacgaaattacgaataaaatcgaaactaaacgaaaaaaaacgatacacgctctaacaaaaaaaaaactaaaacatcctataaaaaaaaaaaaaacgacaatccgacgtaaaataaaaaatcgcaacgtctcgaatctacccaaaaccgcgaatacgttaccaaacaaaaactcccgaaaaaacgtaacgaacgacaaaaaaaaaaaaaacgaaattcaaaaaaaaaaactaaaaaacaacccgcgcgctaaaaaaaacacgaactccgacgcgccgaaaaaacgcaaacgacgctacaactacgccgaaaaatatatcaacgaacccattaccgcgattctttaaatatattcgtacttactatc

SEQ ID NO: 38585 - DNA, 1099 bp, Artificial Sequence
  chemically treated genomic DNA (Homo sapiens) CpG-island No: 38585
taggcgcgttttttttttcggggttttatgtgtcgtcggttttcggacggtaaattagggttcgggtgggggcgatggggggttcgcggtttcggtgtttttggttagtttcggaggcgtacgggttaggtcgcggggcgagaagcgagcgcgggagggcggtagttggcggagcgggaagggagcggggcggttgcggttgcggcgcggaggagcgttatttacgttcgggttcgcgttaggcgttgacgtgggcggttttgtttcggttttcgggttcgtagggttttcggggcggacggcgttttcgttagcggcgttgagttcggttcgattttgttcgattttttcggggataggcggtttagaacgtgcggaatattaggttcggggttttcgtcgggttgtagtttcgcgagtttttcgttaggttttcgtttcgtttcgtttcgtagtcgcgtttcggtcgggcgggttttgagtcgttcgcgtgagttcgtgcgtcgttcgcgttgggaattaggagattaatcgcgaggtttcgttcgcgcgcgtcgtcgtgttttcgttcgcgcggtcgtcggagcgcggtttagcggcgcggcggagattcggtacggcggcggttaggcgtaggcgggcgggcggagtagcggacggcgtcgaggtcgttttacgcgtcgggttcgcggcggcgtagcgcgtcggagtggtcggggttcgcggtcgttcgcgtttttcgatgggtagttcgtatttgtttaataagggtttgtcgtttggtaaggtcgcgcgcgcgcgcgttttcggtcgcgggcgggggcggggcggggcgggtgtcgcgcgggcggggggcgcgggggcggatcgagcgcgcgttcgcgggtcgtcggttttgtgtgcgagtgcgcgtgcgcgtcggcgttcgcgcgtggtcgcggtcgggggcgggatcgcgggaagggttttgcgtatgcgcgggtcgttgcgtgtgcgcgagcgtcgtagtttgtttttttcgttcgcggttcgtgtaggtgatataaaagggtttgtgggtttttgggttgtttcgtcggatttttagttttatcgattt

SEQ ID NO: 38586 - DNA, 1099 bp, Artificial Sequence
  chemically treated genomic DNA (Homo sapiens) CpG-island No: 38586
aaatcgataaaactaaaaatccgacgaaacaacccaaaaacccacaaacccttttatatcacctacacgaaccgcgaacgaaaaaaacaaactacgacgctcgcgcacacgcaacgacccgcgcatacgcaaaacccttcccgcgatcccgcccccgaccgcgaccacgcgcgaacgccgacgcgcacgcgcactcgcacacaaaaccgacgacccgcgaacgcgcgctcgatccgcccccgcgccccccgcccgcgcgacacccgccccgccccgcccccgcccgcgaccgaaaacgcgcgcgcgcgcgaccttaccaaacgacaaacccttattaaacaaatacgaactacccatcgaaaaacgcgaacgaccgcgaaccccgaccactccgacgcgctacgccgccgcgaacccgacgcgtaaaacgacctcgacgccgtccgctactccgcccgcccgcctacgcctaaccgccgccgtaccgaatctccgccgcgccgctaaaccgcgctccgacgaccgcgcgaacgaaaacacgacgacgcgcgcgaacgaaacctcgcgattaatctcctaattcccaacgcgaacgacgcacgaactcacgcgaacgactcaaaacccgcccgaccgaaacgcgactacgaaacgaaacgaaacgaaaacctaacgaaaaactcgcgaaactacaacccgacgaaaaccccgaacctaatattccgcacgttctaaaccgcctatccccgaaaaaatcgaacaaaatcgaaccgaactcaacgccgctaacgaaaacgccgtccgccccgaaaaccctacgaacccgaaaaccgaaacaaaaccgcccacgtcaacgcctaacgcgaacccgaacgtaaataacgctcctccgcgccgcaaccgcaaccgccccgctcccttcccgctccgccaactaccgccctcccgcgctcgcttctcgccccgcgacctaacccgtacgcctccgaaactaaccaaaaacaccgaaaccgcgaaccccccatcgcccccacccgaaccctaatttaccgtccgaaaaccgacgacacataaaaccccgaaaaaaaaaacgcgccta

SEQ ID NO: 38587 - DNA, 1099 bp, Artificial Sequence
  chemically treated genomic DNA (Homo sapiens) CpG-island No: 38587
gggtcggtggagttgggggttcggcggggtagtttagaggtttataggtttttttgtgttatttgtacgggtcgcgggcggggagagtagattgcggcgttcgcgtatacgtagcggttcgcgtatgcgtaagatttttttcgcggtttcgttttcgatcgcggttacgcgcggacgtcggcgcgtacgcgtattcgtatataaagtcggcggttcgcgggcgcgcgttcggttcgttttcgcgtttttcgttcgcgcggtattcgtttcgtttcgttttcgttcgcggtcggaaacgcgcgcgcgcgcggttttattaagcggtaggtttttgttgagtaagtgcgagttgtttatcgagaggcgcgagcggtcgcgggtttcgattatttcggcgcgttgcgtcgtcgcgagttcggcgcgtggggcggtttcggcgtcgttcgttgtttcgttcgttcgtttgcgtttggtcgtcgtcgtgtcgagttttcgtcgcgtcgttgagtcgcgtttcgacgatcgcgcgggcggggatacggcggcgcgcgcgggcggggtttcgcggttggttttttggtttttagcgcgggcggcgtacggatttacgcgggcggtttagggttcgttcggtcgggacgcggttgcggggcggggcggggcgggagtttggcgggaagttcgcggggttgtagttcggcggaggtttcgggtttggtgtttcgtacgttttaaatcgtttgttttcgaggaagtcgggtagggtcgggtcggatttagcgtcgttggcgggagcgtcgttcgtttcgaggattttgcgggttcggaagtcgagatagggtcgtttacgttagcgtttggcgcgggttcgaacgtaaatggcgttttttcgcgtcgtagtcgtagtcgtttcgtttttttttcgtttcgttagttgtcgttttttcgcgttcgtttttcgtttcgcggtttggttcgtgcgttttcgaggttggttaggggtatcgaggtcgcgggttttttatcgtttttattcgagttttgatttatcgttcgagagtcggcggtatatgggatttcgagaggagaagcgcgtttg

SEQ ID NO: 38588 - DNA, 1099 bp, Artificial Sequence
  chemically treated genomic DNA (Homo sapiens) CpG-island No: 38588
caaacgcgcttctcctctcgaaatcccatataccgccgactctcgaacgataaatcaaaactcgaataaaaacgataaaaaacccgcgacctcgatacccctaaccaacctcgaaaacgcacgaaccaaaccgcgaaacgaaaaacgaacgcgaaaaaacgacaactaacgaaacgaaaaaaaaacgaaacgactacgactacgacgcgaaaaaacgccatttacgttcgaacccgcgccaaacgctaacgtaaacgaccctatctcgacttccgaacccgcaaaatcctcgaaacgaacgacgctcccgccaacgacgctaaatccgacccgaccctacccgacttcctcgaaaacaaacgatttaaaacgtacgaaacaccaaacccgaaacctccgccgaactacaaccccgcgaacttcccgccaaactcccgccccgccccgccccgcaaccgcgtcccgaccgaacgaaccctaaaccgcccgcgtaaatccgtacgccgcccgcgctaaaaaccaaaaaaccaaccgcgaaaccccgcccgcgcgcgccgccgtatccccgcccgcgcgatcgtcgaaacgcgactcaacgacgcgacgaaaactcgacacgacgacgaccaaacgcaaacgaacgaacgaaacaacgaacgacgccgaaaccgccccacgcgccgaactcgcgacgacgcaacgcgccgaaataatcgaaacccgcgaccgctcgcgcctctcgataaacaactcgcacttactcaacaaaaacctaccgcttaataaaaccgcgcgcgcgcgcgtttccgaccgcgaacgaaaacgaaacgaaacgaataccgcgcgaacgaaaaacgcgaaaacgaaccgaacgcgcgcccgcgaaccgccgactttatatacgaatacgcgtacgcgccgacgtccgcgcgtaaccgcgatcgaaaacgaaaccgcgaaaaaaatcttacgcatacgcgaaccgctacgtatacgcgaacgccgcaatctactctccccgcccgcgacccgtacaaataacacaaaaaaacctataaacctctaaactaccccgccgaacccccaactccaccgaccc

SEQ ID NO: 38589 - DNA, 750 bp, Artificial Sequence
  chemically treated genomic DNA (Homo sapiens) CpG-island No: 38589
tttcgtcggattcgggacggtatttcgggtttcgattttcggtcgttatttcgttttcggttatgatttcgtggttgggtttgcggggtcgggatggggcgggagtcgtgcgtagttcggggtgttttggggcgcgcgttttcgggttattcgcgggagcgcgtttttcgcggggaggtcgtcggcgatcgtggtcgcgcgttgtgggggaaggggacggggcgcgggtgtcgggtatgatcgtggaggaggtcgttgtttttagatcgggtttaaagcgtagttttcggcggtgacgcgggagggttcggggttttcgttttcgcgaatttcgcgaggtttcggatcggtttagcgtttttatttgtttttgtttgggttcgtttaggtttcggggcgtttttttcgcgggttgcggtcgcggaagtagggagtacgggcgggcgtcgggtttgttattatcgttattttgtagcgttcgcgttttgggtcggttcgagtcgttgcgcggagtttttttttttttcgattcggttgtaaaggtagagttcgtgcgtttgagtttcgggtcgagattggagcgttttttggcggtttttaagggcgtcggtgtttggaagttcggtttgggttagattttttttgttgtcgttttcgtgattgtcgggatagaatttttttttagtggggaaaagggaaggcggtcgcgtttttttcggtgttttgagtggggaggtgaaattttgagag

SEQ ID NO: 38590 - DNA, 750 bp, Artificial Sequence
  chemically treated genomic DNA (Homo sapiens) CpG-island No: 38590
ctctcaaaatttcacctccccactcaaaacaccgaaaaaaacgcgaccgccttcccttttccccactaaaaaaaaattctatcccgacaatcacgaaaacgacaacaaaaaaaatctaacccaaaccgaacttccaaacaccgacgcccttaaaaaccgccaaaaaacgctccaatctcgacccgaaactcaaacgcacgaactctacctttacaaccgaatcgaaaaaaaaaaaaactccgcgcaacgactcgaaccgacccaaaacgcgaacgctacaaaataacgataataacaaacccgacgcccgcccgtactccctacttccgcgaccgcaacccgcgaaaaaaacgccccgaaacctaaacgaacccaaacaaaaacaaataaaaacgctaaaccgatccgaaacctcgcgaaattcgcgaaaacgaaaaccccgaaccctcccgcgtcaccgccgaaaactacgctttaaacccgatctaaaaacaacgacctcctccacgatcatacccgacacccgcgccccgtccccttcccccacaacgcgcgaccacgatcgccgacgacctccccgcgaaaaacgcgctcccgcgaataacccgaaaacgcgcgccccaaaacaccccgaactacgcacgactcccgccccatcccgaccccgcaaacccaaccacgaaatcataaccgaaaacgaaataacgaccgaaaatcgaaacccgaaataccgtcccgaatccgacgaaa

SEQ ID NO: 38591 - DNA, 750 bp, Artificial Sequence
  chemically treated genomic DNA (Homo sapiens) CpG-island No: 38591
tttttagggttttatttttttatttagggtatcgggaagggcgcgatcgtttttttttttttttattggaagggaattttgtttcggtaattacggagacgatagtaaaagggatttggtttaggtcgggtttttagatatcggcgtttttggaggtcgttagagaacgttttagtttcggttcggggtttaggcgtacggattttgtttttgtagtcgggtcgagggaaagagaggtttcgcgtagcggttcgggtcggtttaggacgcgggcgttgtaagatggcgatggtggtaagttcggcgttcgttcgtgttttttgttttcgcggtcgtagttcgcgaggaaggcgtttcgggatttgggcgggtttaggtaagggtaggtgggggcgttgggtcggttcgggatttcgcggagttcgcgggaacggagatttcgggttttttcgcgttatcgtcgggggttgcgttttgggttcggtttgagggtagcggttttttttacggttatattcggtattcgcgtttcgttttttttttttatagcgcgcggttacggtcgtcggcggttttttcgcgggaggcgcgttttcgcgagtggttcgggagcgcgcgttttaggatatttcgagttgcgtacggttttcgttttatttcggtttcgtaggtttagttacggggttatgatcggggacggggtagcggtcggggatcgggattcggggtgtcgtttcgggttcgacgggg

SEQ ID NO: 38592 - DNA, 750 bp, Artificial Sequence
  chemically treated genomic DNA (Homo sapiens) CpG-island No: 38592
ccccgtcgaacccgaaacgacaccccgaatcccgatccccgaccgctaccccgtccccgatcataaccccgtaactaaacctacgaaaccgaaataaaacgaaaaccgtacgcaactcgaaatatcctaaaacgcgcgctcccgaaccactcgcgaaaacgcgcctcccgcgaaaaaaccgccgacgaccgtaaccgcgcgctataaaaaaaaaaaacgaaacgcgaataccgaatataaccgtaaaaaaaaccgctaccctcaaaccgaacccaaaacgcaacccccgacgataacgcgaaaaaacccgaaatctccgttcccgcgaactccgcgaaatcccgaaccgacccaacgcccccacctacccttacctaaacccgcccaaatcccgaaacgccttcctcgcgaactacgaccgcgaaaacaaaaaacacgaacgaacgccgaacttaccaccatcgccatcttacaacgcccgcgtcctaaaccgacccgaaccgctacgcgaaacctctctttccctcgacccgactacaaaaacaaaatccgtacgcctaaaccccgaaccgaaactaaaacgttctctaacgacctccaaaaacgccgatatctaaaaacccgacctaaaccaaatcccttttactatcgtctccgtaattaccgaaacaaaattcccttccaataaaaaaaaaaaaaaacgatcgcgcccttcccgataccctaaataaaaaaataaaaccctaaaaa

SEQ ID NO: 38593 - DNA, 874 bp, Artificial Sequence
  chemically treated genomic DNA (Homo sapiens) CpG-island No: 38593
cggttatcgtgttttgcgggatggtggcgaagttgggggaggagaaggtgaagtcgttgttcgtttcggcgtcgtaggggtataggtttagcgtcgtttgttttcgttaacggttttcgtcgtataggtttaggttgtttacgtttacgaattagtcggggttgggtacgatgcgtattataaacgagatttgcggcgatagcggtttagcgcgtttggtttcggtttttcggatttcgttttcggtcggtttcgcgtttattagcgagtgtttgcgttgtatttttagtttcgtcgacgtttgttcggtgtcgttggggacggcgggcgtcgaaaatatcgcgtgtacgttttgtagcgtttttttcgtcgtttcgattttttttattagcgtttaggtttcgtcgcgtttcgtaaagtcgcgtagttcgttattgacgtattggttttttttttatatgttgtagtcggagttatgcgcggtttttgtaggattattcggtcgcgtcgcggattatggttagatattgcggtcgggtttggattttagggggcgttttaggaaattttttttcgtcgttcgtagggaattatggtttttagttacgtcggatcgtgatattttgtggttgtttttgtcgcgatttatttgcgtttttttcgtgagcgttttttgtttttatcgtattttcggaatcgtatatcgtaggcgttcggtaaatattttggtgttagagtttttcgacgttagtacgttttagattgggaagcgtcgtcgtgtagttgtgcggggggtttcggcgtcgtagtttttttggtggagtaggaggcgaggagggggttgtatttatttagtagcgaagattattgcgta

SEQ ID NO: 38594 - DNA, 874 bp, Artificial Sequence
  chemically treated genomic DNA (Homo sapiens) CpG-island No: 38594
tacgcaataatcttcgctactaaataaatacaaccccctcctcgcctcctactccaccaaaaaaactacgacgccgaaaccccccgcacaactacacgacgacgcttcccaatctaaaacgtactaacgtcgaaaaactctaacaccaaaatatttaccgaacgcctacgatatacgattccgaaaatacgataaaaacaaaaaacgctcacgaaaaaaacgcaaataaatcgcgacaaaaacaaccacaaaatatcacgatccgacgtaactaaaaaccataattccctacgaacgacgaaaaaaaatttcctaaaacgccccctaaaatccaaacccgaccgcaatatctaaccataatccgcgacgcgaccgaataatcctacaaaaaccgcgcataactccgactacaacatataaaaaaaaaaccaatacgtcaataacgaactacgcgactttacgaaacgcgacgaaacctaaacgctaataaaaaaaatcgaaacgacgaaaaaaacgctacaaaacgtacacgcgatattttcgacgcccgccgtccccaacgacaccgaacaaacgtcgacgaaactaaaaatacaacgcaaacactcgctaataaacgcgaaaccgaccgaaaacgaaatccgaaaaaccgaaaccaaacgcgctaaaccgctatcgccgcaaatctcgtttataatacgcatcgtacccaaccccgactaattcgtaaacgtaaacaacctaaacctatacgacgaaaaccgttaacgaaaacaaacgacgctaaacctatacccctacgacgccgaaacgaacaacgacttcaccttctcctcccccaacttcgccaccatcccgcaaaacacgataaccg

SEQ ID NO: 38595 - DNA, 874 bp, Artificial Sequence
  chemically treated genomic DNA (Homo sapiens) CpG-island No: 38595
tgcgtagtggttttcgttgttgggtaagtatagtttttttttcgttttttgttttattaggagggttgcggcgtcggagtttttcgtatagttgtacggcggcgttttttagtttggggcgtgttgacgtcgggagattttaatattagaatgtttgtcgagcgtttgcggtgtgcggtttcggggatgcggtgggggtagggggcgtttacggggagggcgtaggtgggtcgcggtaggggtagttatagggtgttacggttcgacgtgattgggggttatggttttttgcgggcggcggggagggattttttggggcgttttttggaatttaagttcgatcgtagtgtttgattatggttcgcggcgcggtcgggtggttttgtaggggtcgcgtatagtttcgattatagtatgtggaggaagaattagtacgttagtaacgggttgcgcgattttgcggagcgcggcgaggtttgggcgttgatgaaggagatcgaggcggcgggggaggcgttgtagagcgtgtacgcggtgttttcggcgttcgtcgtttttagcggtatcgggtagacgtcggcggagttggaggtgtagcgtaggtattcgttggtgagcgcggggtcggtcgggggcggggttcggggggtcggggttaggcgcgttgagtcgttgtcgtcgtaggtttcgtttgtggtgcgtatcgtgtttagtttcgattggttcgtgggcgtggatagtttggatttgtgcgacggggatcgttggcgggaataggcggcgttggatttgtatttttacgacgtcgggacggatagcggttttattttttttttttttaatttcgttattatttcgtaggatacggtgatcg

SEQ ID NO: 38596 - DNA, 874 bp, Artificial Sequence
  chemically treated genomic DNA (Homo sapiens) CpG-island No: 38596
cgatcaccgtatcctacgaaataataacgaaattaaaaaaaaaaaaaataaaaccgctatccgtcccgacgtcgtaaaaatacaaatccaacgccgcctattcccgccaacgatccccgtcgcacaaatccaaactatccacgcccacgaaccaatcgaaactaaacacgatacgcaccacaaacgaaacctacgacgacaacgactcaacgcgcctaaccccgaccccccgaaccccgcccccgaccgaccccgcgctcaccaacgaatacctacgctacacctccaactccgccgacgtctacccgataccgctaaaaacgacgaacgccgaaaacaccgcgtacacgctctacaacgcctcccccgccgcctcgatctccttcatcaacgcccaaacctcgccgcgctccgcaaaatcgcgcaacccgttactaacgtactaattcttcctccacatactataatcgaaactatacgcgacccctacaaaaccacccgaccgcgccgcgaaccataatcaaacactacgatcgaacttaaattccaaaaaacgccccaaaaaatccctccccgccgcccgcaaaaaaccataacccccaatcacgtcgaaccgtaacaccctataactacccctaccgcgacccacctacgccctccccgtaaacgccccctacccccaccgcatccccgaaaccgcacaccgcaaacgctcgacaaacattctaatattaaaatctcccgacgtcaacacgccccaaactaaaaaacgccgccgtacaactatacgaaaaactccgacgccgcaaccctcctaataaaacaaaaaacgaaaaaaaaactatacttacccaacaacgaaaaccactacgca

SEQ ID NO: 38597 - DNA, 518 bp, Artificial Sequence
  chemically treated genomic DNA (Homo sapiens) CpG-island No: 38597
tttcgtttttttttggttttttgcgttttcgtttttttttggttttttgcgttttcgtttttttttggttttttgcgttttcgtttttttttggttttttgcgttttcgtttttttttggttttttgcgttttcgtttttttttggttttttgcgttttcgtttttttttggttttttgcgttttcgtttttttttggttttttgcgttttcgtttttttttggttttttgcgttttcgtttttttttggttttttgcgttttcgtttttttttggttttttgcgttttcgtttttttttggttttttgcgttttcgtttttttttggttttttgcgttttcgtttttttttggttttttgcgttttcgtttttttttggttttttgcgttttcgtttttttttggttttttgcgttttcgtttttttttggttttttgcgttttcgtttttttttggttttttgcgttttcgtttttttttggttaagggttgtatttttgcgttttgtgagttttg

SEQ ID NO: 38598 - DNA, 518 bp, Artificial Sequence
  chemically treated genomic DNA (Homo sapiens) CpG-island No: 38598
caaaactcacaaaacgcaaaaatacaacccttaaccaaaaaaaaacgaaaacgcaaaaaaccaaaaaaaaacgaaaacgcaaaaaaccaaaaaaaaacgaaaacgcaaaaaaccaaaaaaaaacgaaaacgcaaaaaaccaaaaaaaaacgaaaacgcaaaaaaccaaaaaaaaacgaaaacgcaaaaaaccaaaaaaaaacgaaaacgcaaaaaaccaaaaaaaaacgaaaacgcaaaaaaccaaaaaaaaacgaaaacgcaaaaaaccaaaaaaaaacgaaaacgcaaaaaaccaaaaaaaaacgaaaacgcaaaaaaccaaaaaaaaacgaaaacgcaaaaaaccaaaaaaaaacgaaaacgcaaaaaaccaaaaaaaaacgaaaacgcaaaaaaccaaaaaaaaacgaaaacgcaaaaaaccaaaaaaaaacgaaaacgcaaaaaaccaaaaaaaaacgaaaacgcaaaaaaccaaaaaaaaacgaaaacgcaaaaaaccaaaaaaaaacgaaa

SEQ ID NO: 38599 - DNA, 518 bp, Artificial Sequence
  chemically treated genomic DNA (Homo sapiens) CpG-island No: 38599
tagagtttatagaacgtaaggatgtagtttttgattagggaggagcgaggacgtagaggattagggaggagcgaggacgtagaggattagggaggagcgaggacgtagaggattagggaggagcgaggacgtagaggattagggaggagcgaggacgtagaggattagggaggagcgaggacgtagaggattagggaggagcgaggacgtagaggattagggaggagcgaggacgtagaggattagggaggagcgaggacgtagaggattagggaggagcgaggacgtagaggattagggaggagcgaggacgtagaggattagggaggagcgaggacgtagaggattagggaggagcgaggacgtagaggattagggaggagcgaggacgtagaggattagggaggagcgaggacgtagaggattagggaggagcgaggacgtagaggattagggaggagcgaggacgtagaggattagggaggagcgaggacgtagaggattagggaggagcgagg

SEQ ID NO: 38600 - DNA, 518 bp, Artificial Sequence
  chemically treated genomic DNA (Homo sapiens) CpG-island No: 38600
cctcgctcctccctaatcctctacgtcctcgctcctccctaatcctctacgtcctcgctcctccctaatcctctacgtcctcgctcctccctaatcctctacgtcctcgctcctccctaatcctctacgtcctcgctcctccctaatcctctacgtcctcgctcctccctaatcctctacgtcctcgctcctccctaatcctctacgtcctcgctcctccctaatcctctacgtcctcgctcctccctaatcctctacgtcctcgctcctccctaatcctctacgtcctcgctcctccctaatcctctacgtcctcgctcctccctaatcctctacgtcctcgctcctccctaatcctctacgtcctcgctcctccctaatcctctacgtcctcgctcctccctaatcctctacgtcctcgctcctccctaatcctctacgtcctcgctcctccctaatcctctacgtcctcgctcctccctaatcaaaaactacatccttacgttctataaactcta

SEQ ID NO: 38601 - DNA, 623 bp, Artificial Sequence
  chemically treated genomic DNA (Homo sapiens) CpG-island No: 38601
tcgacggggagagtttaggacgtcgtggatattatggaaatggtatcgacggggagagtttaggacgtcgtggatattatggaaatggtatcgacggggagagtttaggacgtcgtggatattatggaaatggtatcgacggggagagtttaggacgtcgtggatattatggaaatggtatcgacggggagagtttaggacgttttggatattatggaaatggtatcgacggggagagtttaggacgtcgtggatattatggaaatggtatcgacggggagagtttaggacgtcgtggatattatggaaatggtatcgacggggagagtttaggacgtcgtggatattatggaaatggtatcgacggggagagtttaggacgtcgcggatattatggaaatggtatcgacggggagagtttaggacgtcgtggatattatggaaatggtatcgacggggagagtttaggacgtcgcggatattatggaaatggtatcgacggggagagttcggaaatggtattaacggggagagtttagaatatcgtggatattttggaaatggtatcgatggggagagtttagaacgtcgtggatattatggaaatagtatttatagcgaga

SEQ ID NO: 38602 - DNA, 623 bp, Artificial Sequence
  chemically treated genomic DNA (Homo sapiens) CpG-island No: 38602
tctcgctataaatactatttccataatatccacgacgttctaaactctccccatcgataccatttccaaaatatccacgatattctaaactctccccgttaataccatttccgaactctccccgtcgataccatttccataatatccgcgacgtcctaaactctccccgtcgataccatttccataatatccacgacgtcctaaactctccccgtcgataccatttccataatatccgcgacgtcctaaactctccccgtcgataccatttccataatatccacgacgtcctaaactctccccgtcgataccatttccataatatccacgacgtcctaaactctccccgtcgataccatttccataatatccacgacgtcctaaactctccccgtcgataccatttccataatatccaaaacgtcctaaactctccccgtcgataccatttccataatatccacgacgtcctaaactctccccgtcgataccatttccataatatccacgacgtcctaaactctccccgtcgataccatttccataatatccacgacgtcctaaactctccccgtcgataccatttccataatatccacgacgtcctaaactctccccgtcga

SEQ ID NO: 38603 - DNA, 623 bp, Artificial Sequence
  chemically treated genomic DNA (Homo sapiens) CpG-island No: 38603
tttcgttatgggtgttatttttatgatatttacggcgttttaagttttttttatcggtgttatttttaagatatttacggtgttttgaatttttttcgttggtgttattttcgagtttttttcgtcggtgttatttttatgatattcgcggcgttttgagtttttttcgtcggtgttatttttatgatatttacggcgttttgagtttttttcgtcggtgttatttttatgatattcgcggcgttttgagtttttttcgtcggtgttatttttatgatatttacggcgttttgagtttttttcgtcggtgttatttttatgatatttacggcgttttgagtttttttcgtcggtgttatttttatgatatttacggcgttttgagtttttttcgtcggtgttatttttatgatatttagggcgttttgagtttttttcgtcggtgttatttttatgatatttacggcgttttgagtttttttcgtcggtgttatttttatgatatttacggcgttttgagtttttttcgtcggtgttatttttatgatatttacggcgttttgagtttttttcgtcggtgttatttttatgatatttacggcgttttgagtttttttcgtcgg

SEQ ID NO: 38604 - DNA, 623 bp, Artificial Sequence
  chemically treated genomic DNA (Homo sapiens) CpG-island No: 38604
ccgacgaaaaaaactcaaaacgccgtaaatatcataaaaataacaccgacgaaaaaaactcaaaacgccgtaaatatcataaaaataacaccgacgaaaaaaactcaaaacgccgtaaatatcataaaaataacaccgacgaaaaaaactcaaaacgccgtaaatatcataaaaataacaccgacgaaaaaaactcaaaacgccctaaatatcataaaaataacaccgacgaaaaaaactcaaaacgccgtaaatatcataaaaataacaccgacgaaaaaaactcaaaacgccgtaaatatcataaaaataacaccgacgaaaaaaactcaaaacgccgtaaatatcataaaaataacaccgacgaaaaaaactcaaaacgccgcgaatatcataaaaataacaccgacgaaaaaaactcaaaacgccgtaaatatcataaaaataacaccgacgaaaaaaactcaaaacgccgcgaatatcataaaaataacaccgacgaaaaaaactcgaaaataacaccaacgaaaaaaattcaaaacaccgtaaatatcttaaaaataacaccgataaaaaaaacttaaaacgccgtaaatatcataaaaataacacccataacgaaa

SEQ ID NO: 38605 - DNA, 746 bp, Artificial Sequence
  chemically treated genomic DNA (Homo sapiens) CpG-island No: 38605
gcgttatcgcgggagttaggtttcgtagtagagggtttcgggttcgtttcggggtgggggcgttcggggtgtgtcgcgttttcggggtttacgtttcgggcgggttttcgggtttcggtagggcgcgaggcggcggcggggtcggttggtaggttgatgatgatgatgttttgtgttcgtagtcgatgggaggtagcgtgagttcgagagagtttagagtagtcgcggtggtagcgttggagcgtagttttttttcgtttttataatgtatagggcggcggcggtggcggcggcggtagcggaggtagtatcgcgggtcgtcgaagtggttgcggcggcggcggcgatttttaggatttcgggtaggtggagcgttcgcggttgttcgcggcgagttcgggagtgatggcgaggtttttgcgggcggttagcgtttgaggcgtttcgtttcgtttcgtttcgcgcggtttttttcgttcggttttgttttgttttgttttttgtcggcggttgcgggcgttttttagttcgttcgggcggtcgtttaggcgaggtgcggttttcgtataggcggggggcgtaggcgcgcggggttcgttatggttgcgtcggagttttatataaaggtaaggtatttcgcggtcggcgtcgaggattggggttgtgcggttttcgtcgttagttgttaggttggggagggggcgggagcgtcgggtttaggcgagttttattagcgttattttttt

SEQ ID NO: 38606 - DNA, 746 bp, Artificial Sequence
  chemically treated genomic DNA (Homo sapiens) CpG-island No: 38606
aaaaaaataacgctaataaaactcgcctaaacccgacgctcccgccccctccccaacctaacaactaacgacgaaaaccgcacaaccccaatcctcgacgccgaccgcgaaataccttacctttatataaaactccgacgcaaccataacgaaccccgcgcgcctacgccccccgcctatacgaaaaccgcacctcgcctaaacgaccgcccgaacgaactaaaaaacgcccgcaaccgccgacaaaaaacaaaacaaaacaaaaccgaacgaaaaaaaccgcgcgaaacgaaacgaaacgaaacgcctcaaacgctaaccgcccgcaaaaacctcgccatcactcccgaactcgccgcgaacaaccgcgaacgctccacctacccgaaatcctaaaaatcgccgccgccgccgcaaccacttcgacgacccgcgatactacctccgctaccgccgccgccaccgccgccgccctatacattataaaaacgaaaaaaaactacgctccaacgctaccaccgcgactactctaaactctctcgaactcacgctacctcccatcgactacgaacacaaaacatcatcatcatcaacctaccaaccgaccccgccgccgcctcgcgccctaccgaaacccgaaaacccgcccgaaacgtaaaccccgaaaacgcgacacaccccgaacgcccccaccccgaaacgaacccgaaaccctctactacgaaacctaactcccgcgataacgc

SEQ ID NO: 38607 - DNA, 746 bp, Artificial Sequence
  chemically treated genomic DNA (Homo sapiens) CpG-island No: 38607
aaggggatggcgttggtggggttcgtttgggttcggcgttttcgttttttttttagtttgatagttggcggcgagggtcgtatagttttagttttcgacgtcggtcgcggggtgttttatttttgtgtagagtttcgacgtagttatggcgggtttcgcgcgtttacgtttttcgtttgtgcggaggtcgtatttcgtttgggcggtcgttcgagcggattaggaagcgttcgtagtcgtcggtagggagtagggtagggtagggtcgggcggggagggtcgcgcggggcggggcggggcggggcgttttaggcgttggtcgttcgtaggggtttcgttattattttcgggttcgtcgcgagtagtcgcgagcgttttatttgttcggggttttaggggtcgtcgtcgtcgtcgtagttatttcggcggttcgcgatgttgttttcgttgtcgtcgtcgttatcgtcgtcgttttgtgtattatgggagcgggaggaggttgcgttttagcgttgttatcgcggttgttttgggttttttcgggtttacgttgttttttatcggttacgagtatagagtattattattattagtttgttagtcggtttcgtcgtcgtttcgcgttttgtcgaggttcggaaattcgttcgggacgtgagtttcgagggcgcggtatatttcgggcgtttttatttcgaagcgagttcggggttttttgttgcggagtttagttttcgcggtagcgt

SEQ ID NO: 38608 - DNA, 746 bp, Artificial Sequence
  chemically treated genomic DNA (Homo sapiens) CpG-island No: 38608
acgctaccgcgaaaactaaactccgcaacaaaaaaccccgaactcgcttcgaaataaaaacgcccgaaatataccgcgccctcgaaactcacgtcccgaacgaatttccgaacctcgacaaaacgcgaaacgacgacgaaaccgactaacaaactaataataataatactctatactcgtaaccgataaaaaacaacgtaaacccgaaaaaacccaaaacaaccgcgataacaacgctaaaacgcaacctcctcccgctcccataatacacaaaacgacgacgataacgacgacgacaacgaaaacaacatcgcgaaccgccgaaataactacgacgacgacgacgacccctaaaaccccgaacaaataaaacgctcgcgactactcgcgacgaacccgaaaataataacgaaacccctacgaacgaccaacgcctaaaacgccccgccccgccccgccccgcgcgaccctccccgcccgaccctaccctaccctactccctaccgacgactacgaacgcttcctaatccgctcgaacgaccgcccaaacgaaatacgacctccgcacaaacgaaaaacgtaaacgcgcgaaacccgccataactacgtcgaaactctacacaaaaataaaacaccccgcgaccgacgtcgaaaactaaaactatacgaccctcgccgccaactatcaaactaaaaaaaaaacgaaaacgccgaacccaaacgaaccccaccaacgccatcccctt

SEQ ID NO: 38609 - DNA, 546 bp, Artificial Sequence
  chemically treated genomic DNA (Homo sapiens) CpG-island No: 38609
gttgacgaagattgtcgggatatttattcgtttttattttcgttgttttttacgggatacgggttgttgtgatttcgcgggtattgttatttcgttttatgtttttaatttttttcgtttatcgtagttatatttttttagtttatttattaatattttttatatattttttttatttcgtgattattcgtcgatattatcgcggttcgttacggcgtttagatgttgtttttttatttttttcgcgtaagataattagttttttcgtttattttttatcgttttcgtttaggttcgatatatatcgtttttttttttttttaaattatacgagttttcgttattcgcgcgttttttattttacgtttttataatttttaagttttttttcgcgtcgtcggtcgtcgtttcgcgaggttttcgcgttaggttttttatatttttttttttttaaatattaacgtaataatttatagaggatatacgagggcgtttacgagattcgtgggtattattttcgtgggagcgttcgtgcgtttcgatcgg

SEQ ID NO: 38610 - DNA, 546 bp, Artificial Sequence
  chemically treated genomic DNA (Homo sapiens) CpG-island No: 38610
ccgatcgaaacgcacgaacgctcccacgaaaataatacccacgaatctcgtaaacgccctcgtatatcctctataaattattacgttaatatttaaaaaaaaaaaaatataaaaaacctaacgcgaaaacctcgcgaaacgacgaccgacgacgcgaaaaaaaacttaaaaattataaaaacgtaaaataaaaaacgcgcgaataacgaaaactcgtataatttaaaaaaaaaaaaaaacgatatatatcgaacctaaacgaaaacgataaaaaataaacgaaaaaactaattatcttacgcgaaaaaaataaaaaaacaacatctaaacgccgtaacgaaccgcgataatatcgacgaataatcacgaaataaaaaaaatatataaaaaatattaataaataaactaaaaaaatataactacgataaacgaaaaaaattaaaaacataaaacgaaataacaatacccgcgaaatcacaacaacccgtatcccgtaaaaaacaacgaaaataaaaacgaataaatatcccgacaatcttcgtcaac

SEQ ID NO: 38611 - DNA, 546 bp, Artificial Sequence
  chemically treated genomic DNA (Homo sapiens) CpG-island No: 38611
tcggtcggggcgtacgagcgtttttacgggggtggtgtttacgggtttcgtgggcgttttcgtgtgttttttgtgggttgttgcgttggtgtttgggggggggggggtgtggggggtttggcgcgggggtttcgcggggcggcggtcggcggcgcggaggggggtttgagggttgtgggggcgtggggtggggggcgcgcgggtggcgggggttcgtgtggtttgggggggggggggggcggtgtgtgtcggatttgggcgggggcggtggggggtgggcggggaggttggttgttttgcgcggggggggtgggggggtaatatttgggcgtcgtggcgggtcgcggtagtgtcggcgggtggttacgaggtagggggggtatgtagggggtgttagtgggtgggttgggggggtgtggttacggtaggcggagaggattgagggtatggggcggagtggtagtgttcgcgaagttataataattcgtgtttcgtgggaaatagcgagggtgggggcgggtgagtgtttcggtaattttcgttagt

SEQ ID NO: 38612 - DNA, 546 bp, Artificial Sequence
  chemically treated genomic DNA (Homo sapiens) CpG-island No: 38612
actaacgaaaattaccgaaacactcacccgcccccaccctcgctatttcccacgaaacacgaattattataacttcgcgaacactaccactccgccccataccctcaatcctctccgcctaccgtaaccacacccccccaacccacccactaacaccccctacataccccccctacctcgtaaccacccgccgacactaccgcgacccgccacgacgcccaaatattacccccccaccccccccgcgcaaaacaaccaacctccccgcccaccccccaccgcccccgcccaaatccgacacacaccgcccccccccccccccaaaccacacgaacccccgccacccgcgcgccccccaccccacgcccccacaaccctcaaacccccctccgcgccgccgaccgccgccccgcgaaacccccgcgccaaaccccccacacccccccccccccaaacaccaacgcaacaacccacaaaaaacacacgaaaacgcccacgaaacccgtaaacaccacccccgtaaaaacgctcgtacgccccgaccga

SEQ ID NO: 38613 - DNA, 507 bp, Artificial Sequence
  chemically treated genomic DNA (Homo sapiens) CpG-island No: 38613
tttttttcgtttttttgtcgcgtttcgttttttttgttttttttttttttttttttttttttttcgttttttcgttttttcgttttttttgttttttttgttgtttttttgtgtcgcgggtttttttcgttcgtcgttcgttttttttgcgtcgcgcgttttttttttcgtttttttttcgttgcgcgtcgtttgggtttcgcggtttcgcgcgtcgtcgtttcgttcggcgacgcgggtcggtgttttcgttttttgtttgtttcgcgttttttcgttcgttttggttcggtcgtcgggtttttggtttttttgttgtcgtgcgcggcgtttgtttcgcggcgcgttttttcggcggtttcgtcgtcgcgtttcgttttcgcgtttttttcgtttttcgttttcgttcgcgttgcgtttcgtttttgtttttttttttcgtgggtcggcgttcgtgttcggcgcgttgtttcggtttttttgggttttcgtcgtcgttttcgtttt

SEQ ID NO: 38614 - DNA, 507 bp, Artificial Sequence
  chemically treated genomic DNA (Homo sapiens) CpG-island No: 38614
aaaacgaaaacgacgacgaaaacccaaaaaaaccgaaacaacgcgccgaacacgaacgccgacccacgaaaaaaaaaaacaaaaacgaaacgcaacgcgaacgaaaacgaaaaacgaaaaaaacgcgaaaacgaaacgcgacgacgaaaccgccgaaaaaacgcgccgcgaaacaaacgccgcgcacgacaacaaaaaaaccaaaaacccgacgaccgaaccaaaacgaacgaaaaaacgcgaaacaaacaaaaaacgaaaacaccgacccgcgtcgccgaacgaaacgacgacgcgcgaaaccgcgaaacccaaacgacgcgcaacgaaaaaaaaacgaaaaaaaaaacgcgcgacgcaaaaaaaacgaacgacgaacgaaaaaaacccgcgacacaaaaaaacaacaaaaaaaacaaaaaaaacgaaaaaacgaaaaaacgaaaaaaaaaaaaaaaaaaaaaaaaaaaacaaaaaaaacgaaacgcgacaaaaaaacgaaaaaaa

SEQ ID NO: 38615 - DNA, 507 bp, Artificial Sequence
  chemically treated genomic DNA (Homo sapiens) CpG-island No: 38615
gaggcgagagcgacggcgaggatttagggggatcggagtaacgcgtcgggtacgagcgtcggtttacgagggaggggggtagaggcggggcgtagcgcgagcgggggcggggagcggggggagcgcgggggcggggcgcggcggcggaatcgtcgggggggcgcgtcgcgaagtaaacgtcgcgtacggtagtagagaggttaggggttcgacgatcgggttagaacgggcgggggagcgcgaagtagatagggagcgggaatatcggttcgcgtcgtcgagcgaggcgacggcgcgcgggatcgcgaggtttaaacgacgcgtaacgaggaaggagcgaggagaggggcgcgcggcgtagggagagcgagcggcgagcgggggggattcgcggtatagggaggtaataaaagaagtaggaagggcggggaagcgaaggagcgagagaaagagagggaaaaaaaagggggatagggaaggcgaggcgcgataaaagagcgaagaggg

SEQ ID NO: 38616 - DNA, 507 bp, Artificial Sequence
  chemically treated genomic DNA (Homo sapiens) CpG-island No: 38616
ccctcttcgctcttttatcgcgcctcgccttccctatcccccttttttttccctctctttctctcgctccttcgcttccccgcccttcctacttcttttattacctccctataccgcgaatcccccccgctcgccgctcgctctccctacgccgcgcgcccctctcctcgctccttcctcgttacgcgtcgtttaaacctcgcgatcccgcgcgccgtcgcctcgctcgacgacgcgaaccgatattcccgctccctatctacttcgcgctcccccgcccgttctaacccgatcgtcgaacccctaacctctctactaccgtacgcgacgtttacttcgcgacgcgcccccccgacgattccgccgccgcgccccgcccccgcgctccccccgctccccgcccccgctcgcgctacgccccgcctctacccccctccctcgtaaaccgacgctcgtacccgacgcgttactccgatccccctaaatcctcgccgtcgctctcgcctc

SEQ ID NO: 38617 - DNA, 615 bp, Artificial Sequence
  chemically treated genomic DNA (Homo sapiens) CpG-island No: 38617
gttgtggttggggtcggttaagtcgaatatcggttatacgtaagcggcggcgggtgtggttggtgtgattaagatggtgatggcgatgcggtacgggtagttgttacgtacgttgtacgtggaatcgtcgtcgtcggaggtggattggtcggcggggacggtttaattttttacggagaatacgttttggtttaggagtggtcgtgttcgtcgggtgggggtgtcgtcgttcgggattagtggtattaacgcgtacgttattttcgaatagttttcgggagtgtcgagttagtttgcggggtcgggttcgggttttgtcgtggatgtttcggtggtgtcgtggatggtgtcgggtaaaatattcgaagcgttattcgcgtaggtaacggcgttgatgatttatttggacgagcgatttgatgttttttcgttggatgttgggtattcgttggcgttgatacggtcggcgttggatgagcgagcggtggtgttgatgtcggatcgtgatacgttgatgtgcgtggtgatagtgttgtttgtcggatatgaggtttttggattgttgatcgatttgtggcggttggaggttagatcgtttttgggttttagttaggg

SEQ ID NO: 38618 - DNA, 615 bp, Artificial Sequence
  chemically treated genomic DNA (Homo sapiens) CpG-island No: 38618
ccctaactaaaacccaaaaacgatctaacctccaaccgccacaaatcgatcaacaatccaaaaacctcatatccgacaaacaacactatcaccacgcacatcaacgtatcacgatccgacatcaacaccaccgctcgctcatccaacgccgaccgtatcaacgccaacgaatacccaacatccaacgaaaaaacatcaaatcgctcgtccaaataaatcatcaacgccgttacctacgcgaataacgcttcgaatattttacccgacaccatccacgacaccaccgaaacatccacgacaaaacccgaacccgaccccgcaaactaactcgacactcccgaaaactattcgaaaataacgtacgcgttaataccactaatcccgaacgacgacacccccacccgacgaacacgaccactcctaaaccaaaacgtattctccgtaaaaaattaaaccgtccccgccgaccaatccacctccgacgacgacgattccacgtacaacgtacgtaacaactacccgtaccgcatcgccatcaccatcttaatcacaccaaccacacccgccgccgcttacgtataaccgatattcgacttaaccgaccccaaccacaac

SEQ ID NO: 38619 - DNA, 615 bp, Artificial Sequence
  chemically treated genomic DNA (Homo sapiens) CpG-island No: 38619
ttttgattgaaatttaaaaacgatttggtttttagtcgttatagatcggttagtaatttagaagttttatgttcggtagatagtattattattacgtatattaacgtgttacggttcgatattagtattatcgttcgtttatttagcgtcgatcgtgttaacgttagcgagtatttaatatttagcgaggagatattaggtcgttcgtttagataggttattaacgtcgttgtttgcgcggatagcgtttcgggtgttttgttcgatattatttacggtattatcggaatatttacgatagaattcgaattcggtttcgtagattgattcggtattttcgggggttgttcgaggatgacgtgcgcgttagtattattgatttcgaacgacgatatttttattcgacgaatacgattatttttgggttagggcgtgtttttcgtaaggagttgaatcgttttcgtcgattaatttattttcggcgacggcgattttacgtgtaacgtgcgtggtagttgttcgtgtcgtatcgttattattattttgattatattagttatattcgtcgtcgtttgcgtatgatcgatgttcgatttgatcgattttaattataat

SEQ ID NO: 38620 - DNA, 615 bp, Artificial Sequence
  chemically treated genomic DNA (Homo sapiens) CpG-island No: 38620
attataattaaaatcgatcaaatcgaacatcgatcatacgcaaacgacgacgaatataactaatataatcaaaataataataacgatacgacacgaacaactaccacgcacgttacacgtaaaatcgccgtcgccgaaaataaattaatcgacgaaaacgattcaactccttacgaaaaacacgccctaacccaaaaataatcgtattcgtcgaataaaaatatcgtcgttcgaaatcaataatactaacgcgcacgtcatcctcgaacaacccccgaaaataccgaatcaatctacgaaaccgaattcgaattctatcgtaaatattccgataataccgtaaataatatcgaacaaaacacccgaaacgctatccgcgcaaacaacgacgttaataacctatctaaacgaacgacctaatatctcctcgctaaatattaaatactcgctaacgttaacacgatcgacgctaaataaacgaacgataatactaatatcgaaccgtaacacgttaatatacgtaataataatactatctaccgaacataaaacttctaaattactaaccgatctataacgactaaaaaccaaatcgtttttaaatttcaatcaaaa

SEQ ID NO: 38621 - DNA, 545 bp, Artificial Sequence
  chemically treated genomic DNA (Homo sapiens) CpG-island No: 38621
gttttgtcggggtttagggcgtgaaggatcgtgggggattcgatggattttggggcgttcgttgggggtttcgcgcggggatttttcggttgtttgagaggcggaggtagtaagaagtaggaaaaggaattggggggacgcgagcgagtggtaggtttttttcggtggtcgtcgagcgcgcgtttagtttggggaacgcgttgtttgcgtattcgggcgcgttcgggaaggtcggttcgttggtatcgcgttagttttcgagttgtttgtgtatgtttattttttttattagaggttgtttatttttattttttggtttttttcgttttttttgacggtttcgggagcgtttgtgcgcgcgcgtgtgtgcgtgttcgtgtgttcgcgcgcgatcggcgatttcgtttcgcgtttttgtttttaaagggaagggcgtttcgtcgggcgtcgcggggtttaaatgaatatgggaatttgcgttggggaaggttcgttaggttttgttggtttaggaggttcggattatagtttagtttgcgtcgttg

SEQ ID NO: 38622 - DNA, 545 bp, Artificial Sequence
  chemically treated genomic DNA (Homo sapiens) CpG-island No: 38622
caacgacgcaaactaaactataatccgaacctcctaaaccaacaaaacctaacgaaccttccccaacgcaaattcccatattcatttaaaccccgcgacgcccgacgaaacgcccttccctttaaaaacaaaaacgcgaaacgaaatcgccgatcgcgcgcgaacacacgaacacgcacacacgcgcgcgcacaaacgctcccgaaaccgtcaaaaaaaacgaaaaaaaccaaaaaataaaaataaacaacctctaataaaaaaaataaacatacacaaacaactcgaaaactaacgcgataccaacgaaccgaccttcccgaacgcgcccgaatacgcaaacaacgcgttccccaaactaaacgcgcgctcgacgaccaccgaaaaaaacctaccactcgctcgcgtccccccaattccttttcctacttcttactacctccgcctctcaaacaaccgaaaaatccccgcgcgaaacccccaacgaacgccccaaaatccatcgaatcccccacgatccttcacgccctaaaccccgacaaaac

SEQ ID NO: 38623 - DNA, 545 bp, Artificial Sequence
  chemically treated genomic DNA (Homo sapiens) CpG-island No: 38623
tagcgacgtagattgggttgtaattcgggttttttgggttagtagggtttggcgggttttttttagcgtaggtttttatgtttatttaggtttcgcgacgttcggcgggacgtttttttttttagggataggggcgcggggcggggtcgtcggtcgcgcgcgggtatacgggtacgtatatacgcgcgcgtatagacgttttcggagtcgttagaggaggcgaaaggaattaagaagtgaaagtgagtaatttttagtgaaagaaatagatatgtatagatagttcggaaattgacgcggtgttagcgagtcggttttttcgggcgcgttcgggtgcgtaggtagcgcgttttttaagttgggcgcgcgttcggcggttatcgaggagggtttgttattcgttcgcgtttttttagtttttttttttgttttttgttgttttcgttttttaagtagtcgggaggttttcgcgcgaggtttttagcgggcgttttaggatttatcgggttttttacgattttttacgttttggatttcggtaaagt

SEQ ID NO: 38624 - DNA, 545 bp, Artificial Sequence
  chemically treated genomic DNA (Homo sapiens) CpG-island No: 38624
actttaccgaaatccaaaacgtaaaaaatcgtaaaaaacccgataaatcctaaaacgcccgctaaaaacctcgcgcgaaaacctcccgactacttaaaaaacgaaaacaacaaaaaacaaaaaaaaaaactaaaaaaacgcgaacgaataacaaaccctcctcgataaccgccgaacgcgcgcccaacttaaaaaacgcgctacctacgcacccgaacgcgcccgaaaaaaccgactcgctaacaccgcgtcaatttccgaactatctatacatatctatttctttcactaaaaattactcactttcacttcttaattcctttcgcctcctctaacgactccgaaaacgtctatacgcgcgcgtatatacgtacccgtatacccgcgcgcgaccgacgaccccgccccgcgcccctatccctaaaaaaaaaaacgtcccgccgaacgtcgcgaaacctaaataaacataaaaacctacgctaaaaaaaacccgccaaaccctactaacccaaaaaacccgaattacaacccaatctacgtcgcta

SEQ ID NO: 38625 - DNA, 700 bp, Artificial Sequence
  chemically treated genomic DNA (Homo sapiens) CpG-island No: 38625
gatcgtttcgattataatgataatttttatattaacgtacgttcgcgtgcggggtgtttttttttttttttttacgttttttatttaaaagttgtataatttggttcgagtttacggtggcggttgtcgttttagtatcgttcgttaggtaattgttttggcgaattattcggtttaaggagtaaaataggtttttcgagtaaaatcgtgcgtttcggtacgtttagtttttcggttttcggttttttacgtttttatttttaatagggattttagttttagggatatcgggcgcgtgcgcgattttaattagttatttatgggcgaattaattatgtagttgttatgggcgggggggtcggtaggggttatgcgacgcggagattattcggtcgcggtggcggtttttttgtcgggtttcggggtcgggaggcgtttttacgtcgttcggggaggatttcgttgtgagaaagttgtttcggggtggggttcgggaggagcgcgggggaatttgaggaagcgggagagacggttcggagattttttaattagattgggaggggagaggggggcgggcgacggagttggaaagagcgggtcgcggagatcggggcgtgggaagagtttggtttaggtattttttttttttttttttttttttatttttatttttattgcgagtttattacgtgttattgcg

SEQ ID NO: 38626 - DNA, 700 bp, Artificial Sequence
  chemically treated genomic DNA (Homo sapiens) CpG-island No: 38626
cgcaataacacgtaataaactcgcaataaaaataaaaataaaaaaaaaaaaaaaaaaaaaaaatacctaaaccaaactcttcccacgccccgatctccgcgacccgctctttccaactccgtcgcccgcccccctctcccctcccaatctaattaaaaaatctccgaaccgtctctcccgcttcctcaaattcccccgcgctcctcccgaaccccaccccgaaacaactttctcacaacgaaatcctccccgaacgacgtaaaaacgcctcccgaccccgaaacccgacaaaaaaaccgccaccgcgaccgaataatctccgcgtcgcataacccctaccgacccccccgcccataacaactacataattaattcgcccataaataactaattaaaatcgcgcacgcgcccgatatccctaaaactaaaatccctattaaaaataaaaacgtaaaaaaccgaaaaccgaaaaactaaacgtaccgaaacgcacgattttactcgaaaaacctattttactccttaaaccgaataattcgccaaaacaattacctaacgaacgatactaaaacgacaaccgccaccgtaaactcgaaccaaattatacaacttttaaataaaaaacgtaaaaaaaaaaaaaaaaacaccccgcacgcgaacgtacgttaatataaaaattatcattataatcgaaacgatc

SEQ ID NO: 38627 - DNA, 700 bp, Artificial Sequence
  chemically treated genomic DNA (Homo sapiens) CpG-island No: 38627
cgtagtggtacgtagtgggttcgtagtaaggatggggatgaaggaaggaaggaagggaagaaatgtttaggttaggttttttttacgtttcggttttcgcggttcgttttttttagtttcgtcgttcgtttttttttttttttttagtttaattgggaggttttcgagtcgtttttttcgtttttttaggttttttcgcgtttttttcggattttatttcgaggtagtttttttataacgggatttttttcgggcggcgtggggacgtttttcgatttcgaggttcggtaggagagtcgttatcgcggtcgggtggttttcgcgtcgtatggtttttgtcggttttttcgtttatggtagttatataattaattcgtttataaataattgattggggtcgcgtacgcgttcggtgtttttaggattgggatttttgttaggggtaggggcgtggggggtcgggggtcgaggggttgggcgtgtcggggcgtacggttttgttcggggggtttgttttgttttttaggtcgggtggttcgttaaagtagttgtttgacgagcggtgttggagcgatagtcgttatcgtaagttcggattagattgtatagtttttgagtaagaggcgtgggagagggaaagaggatatttcgtacgcgggcgtgcgttggtatagaagttattattgtgatcggagcggtt

SEQ ID NO: 38628 - DNA, 700 bp, Artificial Sequence
  chemically treated genomic DNA (Homo sapiens) CpG-island No: 38628
aaccgctccgatcacaataataacttctataccaacgcacgcccgcgtacgaaatatcctctttccctctcccacgcctcttactcaaaaactatacaatctaatccgaacttacgataacgactatcgctccaacaccgctcgtcaaacaactactttaacgaaccacccgacctaaaaaacaaaacaaaccccccgaacaaaaccgtacgccccgacacgcccaacccctcgacccccgaccccccacgcccctacccctaacaaaaatcccaatcctaaaaacaccgaacgcgtacgcgaccccaatcaattatttataaacgaattaattatataactaccataaacgaaaaaaccgacaaaaaccatacgacgcgaaaaccacccgaccgcgataacgactctcctaccgaacctcgaaatcgaaaaacgtccccacgccgcccgaaaaaaatcccgttataaaaaaactacctcgaaataaaatccgaaaaaaacgcgaaaaaacctaaaaaaacgaaaaaaacgactcgaaaacctcccaattaaactaaaaaaaaaaaaaaaaacgaacgacgaaactaaaaaaaacgaaccgcgaaaaccgaaacgtaaaaaaaacctaacctaaacatttcttcccttccttccttccttcatccccatccttactacgaacccactacgtaccactacg

SEQ ID NO: 38629 - DNA, 691 bp, Artificial Sequence
  chemically treated genomic DNA (Homo sapiens) CpG-island No: 38629
cggggtcgttttaggttttgttagtttgacgttaagttcggtcggcggggtttcgttttgtataaatagacgtcgtaggttagcgtcggggtcgggggcggcgatgatttagggtttcgagacgggtcgggaagcggaaagttgtgtgtagatgatattagtcggtcgcgagggcgggagggggtcggtttcgggaaacggcggtttggcgggcggttcggggtagggcgtggagaggcggtcgcggggcgggggcggggacgtcgggacgggacgttcgggattacgaaaaatgtttttattttcgttcgtttcggatttaggtttcggagttcggtttcgtttttcgtcggcgaggagcgggttttattcgtttgtaaagatttcgcgttttttcgcgtttcggaggtagtcgtatttattttgttgcgtttttgtattttaattatcgtcgtattaatatttatgagtcgggattcgagggggatcgcgggttgttatttttttcgttcgttttttttttatcgtattttttttttcgggttgagtcgtgggttttttttttttcgtttttaatttcgttcgtattaatcgttggtgcgtagtagatttgggggaggggggttggtgtgagtgtgagtatgagtgtgagcgagtgtgagtggggaggggtcgagtgtgagtttgtgtt

SEQ ID NO: 38630 - DNA, 691 bp, Artificial Sequence
  chemically treated genomic DNA (Homo sapiens) CpG-island No: 38630
aacacaaactcacactcgacccctccccactcacactcgctcacactcatactcacactcacaccaacccccctcccccaaatctactacgcaccaacgattaatacgaacgaaattaaaaacgaaaaaaaaaaaacccacgactcaacccgaaaaaaaaaatacgataaaaaaaaaacgaacgaaaaaaataacaacccgcgatccccctcgaatcccgactcataaatattaatacgacgataattaaaatacaaaaacgcaacaaaataaatacgactacctccgaaacgcgaaaaaacgcgaaatctttacaaacgaataaaacccgctcctcgccgacgaaaaacgaaaccgaactccgaaacctaaatccgaaacgaacgaaaataaaaacatttttcgtaatcccgaacgtcccgtcccgacgtccccgcccccgccccgcgaccgcctctccacgccctaccccgaaccgcccgccaaaccgccgtttcccgaaaccgaccccctcccgccctcgcgaccgactaatatcatctacacacaactttccgcttcccgacccgtctcgaaaccctaaatcatcgccgcccccgaccccgacgctaacctacgacgtctatttatacaaaacgaaaccccgccgaccgaacttaacgtcaaactaacaaaacctaaaacgaccccg

SEQ ID NO: 38631 - DNA, 691 bp, Artificial Sequence
  chemically treated genomic DNA (Homo sapiens) CpG-island No: 38631
ggtatagatttatattcggtttttttttatttatattcgtttatatttatgtttatatttatattaattttttttttttaaatttgttgcgtattaacggttggtgcgagcggggttgagaacgggaggaaaaaagtttacgatttagttcgggaagaggggtgcggtgggggaagggcgggcgagggaaatgatagttcgcggtttttttcgagtttcggtttatgaatattaatacggcggtaattaaaatgtagggacgtagtaggatggatgcggttgttttcggagcgcgggggagcgcggagtttttgtaggcgggtgaagttcgtttttcgtcggcgaaaagcggggtcgggtttcggggtttgggttcggggcgggcgggagtggggatatttttcgtggtttcgagcgtttcgtttcggcgttttcgttttcgtttcgcggtcgtttttttacgttttgtttcgggtcgttcgttaggtcgtcgtttttcggagtcggttttttttcgttttcgcggtcggttgatgttatttgtatataatttttcgtttttcggttcgtttcggggttttgagttatcgtcgttttcggtttcgacgttggtttgcggcgtttgtttgtgtagagcgaggtttcgtcggtcgggtttgacgttaggttggtagggtttggaacggtttcg

SEQ ID NO: 38632 - DNA, 691 bp, Artificial Sequence
  chemically treated genomic DNA (Homo sapiens) CpG-island No: 38632
cgaaaccgttccaaaccctaccaacctaacgtcaaacccgaccgacgaaacctcgctctacacaaacaaacgccgcaaaccaacgtcgaaaccgaaaacgacgataactcaaaaccccgaaacgaaccgaaaaacgaaaaattatatacaaataacatcaaccgaccgcgaaaacgaaaaaaaaccgactccgaaaaacgacgacctaacgaacgacccgaaacaaaacgtaaaaaaacgaccgcgaaacgaaaacgaaaacgccgaaacgaaacgctcgaaaccacgaaaaatatccccactcccgcccgccccgaacccaaaccccgaaacccgaccccgcttttcgccgacgaaaaacgaacttcacccgcctacaaaaactccgcgctcccccgcgctccgaaaacaaccgcatccatcctactacgtccctacattttaattaccgccgtattaatattcataaaccgaaactcgaaaaaaaccgcgaactatcatttccctcgcccgcccttcccccaccgcacccctcttcccgaactaaatcgtaaacttttttcctcccgttctcaaccccgctcgcaccaaccgttaatacgcaacaaatttaaaaaaaaaaaattaatataaatataaacataaatataaacgaatataaataaaaaaaaaccgaatataaatctatacc

SEQ ID NO: 38633 - DNA, 639 bp, Artificial Sequence
  chemically treated genomic DNA (Homo sapiens) CpG-island No: 38633
agattcgggtaaaggatcggagaggtgattagatatttcgggtaggtagcggaggtcggttttgttgagcgattttcgttagcgacgatttttaggggtttaggttttacgtttattaattgggtattagttttttttatttcggggagtcgagtttttgggaagtagcgtttgggggcgtcggcgatcggttggggtcgtttttttgttttttcgttttgggttcgatcgtcgggcgcgaggcgtgtagggcgcggcgcgggttcgggcgtttagtttagcggaaaggaatgttttgttcggcgggggaggtcgtggtttcgaggtcgtgtttattttcgttcgtttcgggttttatttattgcggttttgaagttcggttcgtttcgttcgtcgggtttcgcggggtgattttttttacgattgcggtttttcgtttttcgttcggtcgtcgttggcggattttaaagtcggggcgagtttttaaatcggggagtcggtttcgtttttacgtcgcggcggcgttttttttttttttttttcgtcgttcgttttttttttttttttttttataatttaaaagtttgttaagttggttttagatttttggcgtcgggtttcgttttaggaaagaaaaat

SEQ ID NO: 38634 - DNA, 639 bp, Artificial Sequence
  chemically treated genomic DNA (Homo sapiens) CpG-island No: 38634
atttttctttcctaaaacgaaacccgacgccaaaaatctaaaaccaacttaacaaacttttaaattataaaaaaaaaaaaaaaaaaaacgaacgacgaaaaaaaaaaaaaaaaaacgccgccgcgacgtaaaaacgaaaccgactccccgatttaaaaactcgccccgactttaaaatccgccaacgacgaccgaacgaaaaacgaaaaaccgcaatcgtaaaaaaaatcaccccgcgaaacccgacgaacgaaacgaaccgaacttcaaaaccgcaataaataaaacccgaaacgaacgaaaataaacacgacctcgaaaccacgacctcccccgccgaacaaaacattcctttccgctaaactaaacgcccgaacccgcgccgcgccctacacgcctcgcgcccgacgatcgaacccaaaacgaaaaaacaaaaaaacgaccccaaccgatcgccgacgcccccaaacgctacttcccaaaaactcgactccccgaaataaaaaaaactaatacccaattaataaacgtaaaacctaaacccctaaaaatcgtcgctaacgaaaatcgctcaacaaaaccgacctccgctacctacccgaaatatctaatcacctctccgatcctttacccgaatct

SEQ ID NO: 38635 - DNA, 639 bp, Artificial Sequence
  chemically treated genomic DNA (Homo sapiens) CpG-island No: 38635
gttttttttttttggagcggagttcggcgttaggagtttggaattagtttgataggtttttgagttatggaggggggagggggagaggcgggcggcgggaagggggaagggagggcgtcgtcgcggcgtgggggcggggtcggtttttcggtttggagattcgtttcgattttggggttcgttagcggcggtcgggcggagggcgggggatcgtaatcgtggggggagttatttcgcggggttcggcgggcgaaacgggtcgggttttagagtcgtagtaaatgaggttcggggcgggcgggggtggatacggtttcggggttacggtttttttcgtcgagtaaggtattttttttcgttgaattgggcgttcgggttcgcgtcgcgttttgtacgtttcgcgttcggcgatcgggtttagggcgggggagtagggaggcggttttagtcggtcgtcggcgtttttaggcgttgttttttaggagttcggtttttcgggatggaagggattgatatttagttaatgggcgtggagtttgagtttttgagggtcgtcgttaacgggggtcgtttagtagggtcggttttcgttgtttgttcggggtgtttaattattttttcgattttttgttcggattt

SEQ ID NO: 38636 - DNA, 639 bp, Artificial Sequence
  chemically treated genomic DNA (Homo sapiens) CpG-island No: 38636
aaatccgaacaaaaaatcgaaaaaataattaaacaccccgaacaaacaacgaaaaccgaccctactaaacgacccccgttaacgacgaccctcaaaaactcaaactccacgcccattaactaaatatcaatcccttccatcccgaaaaaccgaactcctaaaaaacaacgcctaaaaacgccgacgaccgactaaaaccgcctccctactcccccgccctaaacccgatcgccgaacgcgaaacgtacaaaacgcgacgcgaacccgaacgcccaattcaacgaaaaaaaataccttactcgacgaaaaaaaccgtaaccccgaaaccgtatccacccccgcccgccccgaacctcatttactacgactctaaaacccgacccgtttcgcccgccgaaccccgcgaaataactccccccacgattacgatcccccgccctccgcccgaccgccgctaacgaaccccaaaatcgaaacgaatctccaaaccgaaaaaccgaccccgcccccacgccgcgacgacgccctcccttcccccttcccgccgcccgcctctccccctcccccctccataactcaaaaacctatcaaactaattccaaactcctaacgccgaactccgctccaaaaaaaaaaaac

SEQ ID NO: 38637 - DNA, 578 bp, Artificial Sequence
  chemically treated genomic DNA (Homo sapiens) CpG-island No: 38637
gcggtcgttttttttttttttttcgttttttttttttttttttttttttcgttttttttttttttttttttgtttttttttttttttttttttgttttttttttttttttttttttttcgtcgttttttttttgtttcgttttttttttttttgtttttcgtcgttcgtttttttttttttcgttttttttttttttcgttttttttttttttttttttttttttttttcgttttttttttttttttttttttcgttcgtttttttttttcgttcggttttcggtttttcgtttttttttttttttttttttttcggttcgttttttttcgttttttcgtttttttttcgtttttgttcgtgtttttttcgttttttttttttcgttttttttttttttcgtttcgttcgttttttttcgtttttcgttttttttttttttttttgttttttttttcgcgttcgtgtgtcgcgttggttcgcgttttttttttttttttttttttttcgtcgtcgtttttttttttttcgcgtcgtttttcgtcgtttttgttttttttcgcgttttttcgtttgtcg

SEQ ID NO: 38638 - DNA, 578 bp, Artificial Sequence
  chemically treated genomic DNA (Homo sapiens) CpG-island No: 38638
cgacaaacgaaaaaacgcgaaaaaaaacaaaaacgacgaaaaacgacgcgaaaaaaaaaaaaacgacgacgaaaaaaaaaaaaaaaaaaaaaaaacgcgaaccaacgcgacacacgaacgcgaaaaaaaaaacaaaaaaaaaaaaaaaaaacgaaaaacgaaaaaaaacgaacgaaacgaaaaaaaaaaaaaacgaaaaaaaaaaaacgaaaaaaacacgaacaaaaacgaaaaaaaaacgaaaaaacgaaaaaaaacgaaccgaaaaaaaaaaaaaaaaaaaaaaacgaaaaaccgaaaaccgaacgaaaaaaaaaaacgaacgaaaaaaaaaaaaaaaaaaaaaacgaaaaaaaaaaaaaaaaaaaaaaaaaaaaaacgaaaaaaaaaaaaaacgaaaaaaaaaaaaacgaacgacgaaaaacaaaaaaaaaaaaaacgaaacaaaaaaaaaacgacgaaaaaaaaaaaaaaaaaaaaaaaacaaaaaaaaaaaaaaaaaaaaacaaaaaaaaaaaaaaaaaaaacgaaaaaaaaaaaaaaaaaaaaaaaacgaaaaaaaaaaaaaaaacgaccgc

SEQ ID NO: 38639 - DNA, 578 bp, Artificial Sequence
  chemically treated genomic DNA (Homo sapiens) CpG-island No: 38639
cggtaagcgggggaacgcgaaagaaaataggggcggcggagaacggcgcgagaaaaaagagaacgacggcggggaaaggaaaaaaaaaaaaaaggcgcggattagcgcggtatacgggcgcgaaaaaaaaaataaaggggggagagaaagacggggggcggaaagaaacgggcggggcggaaaggaaagggggcggaaaaaagagggcgaaggaaatacgggtaagggcgggaaaaaagcggggagacgaaaaagggcggatcgggaggagggaaagagaaaaaaggcggggaatcggagatcgggcggggaaagaaaacgggcggaaaaaggagagagaaaaagaacggggggagaagggagaaaaaggaaaaaggggcgggggggggggagggcgaaaggggggaaaacggacggcgggggatagggggggggaaaacggggtagaagggaagcggcggggaaagggggggaaagggggagataagggggggggggggggaaaataagggaagggggggaaaaggcggggggaaaagggaggggaggggggcggaagggaaagggggggcgatcgt

SEQ ID NO: 38640 - DNA, 578 bp, Artificial Sequence
  chemically treated genomic DNA (Homo sapiens) CpG-island No: 38640
acgatcgccccccctttcccttccgcccccctcccctcccttttccccccgccttttcccccccttcccttattttcccccccccccccccttatctccccctttccccccctttccccgccgcttcccttctaccccgttttccccccccctatcccccgccgtccgttttcccccctttcgccctcccccccccccgcccctttttcctttttctcccttctccccccgttctttttctctctcctttttccgcccgttttctttccccgcccgatctccgattccccgccttttttctctttccctcctcccgatccgccctttttcgtctccccgcttttttcccgcccttacccgtatttccttcgccctcttttttccgccccctttcctttccgccccgcccgtttctttccgccccccgtctttctctcccccctttattttttttttcgcgcccgtataccgcgctaatccgcgccttttttttttttttcctttccccgccgtcgttctcttttttctcgcgccgttctccgccgcccctattttctttcgcgttcccccgcttaccg

SEQ ID NO: 38641 - DNA, 506 bp, Artificial Sequence
  chemically treated genomic DNA (Homo sapiens) CpG-island No: 38641
  unsure (61)
tttttttttttcgttttttttttttttttttttttttttttttcgtttttgtttttttttntttttgttgtttttttttttttttttcgtcgttttttttttgttttttttcggttttttcgtttttttttgtttttttttgttttttttttgtttttcgttttttttttttttttttttttcgtttttttttcgttttttttttttttcgttgtttttgcggtttttttttttcgttttcgttcgttttttttttttttttcgcgttttttttcgttttttttttttcgtgttttttttcgttgtttttttttgtttttcgtttttttcgtttgttggtttttttttttttcgttttttcgtttttttcgtttttttttttttttttttttgtttttttttttttttcggtttttcgtttttttttttcgtttttttgtttttttttgtttttttttcgttttcgttttttttttttttttttttttcgttttgtgttttcgttt

SEQ ID NO: 38642 - DNA, 506 bp, Artificial Sequence
  chemically treated genomic DNA (Homo sapiens) CpG-island No: 38642
  unsure (446)
aaacgaaaacacaaaacgaaaaaaaaaaaaaaaaaaaaaacgaaaacgaaaaaaaaacaaaaaaaaacaaaaaaacgaaaaaaaaaaacgaaaaaccgaaaaaaaaaaaaaaacaaaaaaaaaaaaaaaaaaaaacgaaaaaaacgaaaaaacgaaaaaaaaaaaaaccaacaaacgaaaaaaacgaaaaacaaaaaaaaacaacgaaaaaaaacacgaaaaaaaaaaaacgaaaaaaaacgcgaaaaaaaaaaaaaaaacgaacgaaaacgaaaaaaaaaaaccgcaaaaacaacgaaaaaaaaaaaaaacgaaaaaaaaacgaaaaaaaaaaaaaaaaaaaaaacgaaaaacaaaaaaaaaacaaaaaaaaacaaaaaaaaacgaaaaaaccgaaaaaaaacaaaaaaaaaacgacgaaaaaaaaaaaaaaaaacaacaaaaanaaaaaaaaacaaaaacgaaaaaaaaaaaaaaaaaaaaaaaaaaaaaacgaaaaaaaaaaa

SEQ ID NO: 38643 - DNA, 506 bp, Artificial Sequence
  chemically treated genomic DNA (Homo sapiens) CpG-island No: 38643
  unsure (446)
aaacggaaatataagacgggggagggggggagaaaaaaagcgggaacgagaaaaaagtaaaaaaaaatagggaagcgaggaggggaagcgaggaatcggagggggggggaaaataaaaggggagaaaagggggaacgagaaaagcgggggggcgaaaggaaaagaggttaataggcgaaaaaagcggaaggtaggaaaggataacggaaaagaatacggggaggagggggcgaagaggaacgcgaaaagaaagaggggaacgggcggagacggggaagaagaatcgtaaaaataacgggaaagaaggggggcggaaagaaagcgaaagggggaaaggggagaaaagcggggaataaagggagaatagaggagggtagggaaaaacgggggggtcgggggaaaataaaggaagggcggcgggaaaaggaaagagggataataaagangggggggaataggagcgggaaggaaaggggaggggaagggaaaaaggcggaaggggggga

SEQ ID NO: 38644 - DNA, 506 bp, Artificial Sequence
  chemically treated genomic DNA (Homo sapiens) CpG-island No: 38644
  unsure (61)
tcccccccttccgcctttttcccttcccctcccctttccttcccgctcctattcccccccntctttattatccctctttccttttcccgccgcccttcctttattttcccccgacccccccgtttttccctaccctcctctattctccctttattccccgcttttctcccctttccccctttcgctttctttccgccccccttctttcccgttatttttacgattcttcttccccgtctccgcccgttcccctctttcttttcgcgttcctcttcgccccctcctccccgtattcttttccgttatcctttcctaccttccgcttttttcgcctattaacctcttttcctttcgcccccccgcttttctcgttcccccttttctccccttttattttccccccccctccgattcctcgcttcccctcctcgcttccctatttttttttacttttttctcgttcccgctttttttctccccccctcccccgtcttatatttccgttt

SEQ ID NO: 38645 - DNA, 518 bp, Artificial Sequence
  chemically treated genomic DNA (Homo sapiens) CpG-island No: 38645
tgttcgcgcgtttttttttttgtttttttttttttttttttttttttttttttttttttttttttttttttttttttttttttttcgttttttttgttttttttttttttcgtttttttttttttcgttttttcgttttttttttttttttttttcgttttttttttttttttttttttttttcgtttttttcggtttcgttcgttttttgttttttttttcgttttttcggtttttttttttggtttttttttcgttttttttcgttttttttttttttttttttttttttttttttttttttttttttttttgttttttttttttttttttcgttttttcgtttgcggtttttttcgttttttcgtttgcgttttttcgttgttttttttttttttttttttttttttttcgtttttttggtttttttcgtttttttttttttttttttcgtttttcgtttttcgtttttttttttcgtttttttttttttttttttcgttttcgtttattcggcg

SEQ ID NO: 38646 - DNA, 518 bp, Artificial Sequence
  chemically treated genomic DNA (Homo sapiens) CpG-island No: 38646
cgccgaataaacgaaaacgaaaaaaaaaaaaaaaaaaacgaaaaaaaaaaacgaaaaacgaaaaacgaaaaaaaaaaaaaaaaaaacgaaaaaaaccaaaaaaacgaaaaaaaaaaaaaaaaaaaaaaaaaaaacaacgaaaaaacgcaaacgaaaaaacgaaaaaaaccgcaaacgaaaaaacgaaaaaaaaaaaaaaaaaacaaaaaaaaaaaaaaaaaaaaaaaaaaaaaaaaaaaaaaaaaaaaaaaacgaaaaaaaacgaaaaaaaaaccaaaaaaaaaaaccgaaaaaacgaaaaaaaaaacaaaaaacgaacgaaaccgaaaaaaacgaaaaaaaaaaaaaaaaaaaaaaaaaacgaaaaaaaaaaaaaaaaaaaacgaaaaaacgaaaaaaaaaaaaacgaaaaaaaaaaaaaacaaaaaaaacgaaaaaaaaaaaaaaaaaaaaaaaaaaaaaaaaaaaaaaaaaaaaaaaaaaaaaaaaaaaaaaacaaaaaaaaaaacgcgcgaaca

SEQ ID NO: 38647 - DNA, 518 bp, Artificial Sequence
  chemically treated genomic DNA (Homo sapiens) CpG-island No: 38647
cgtcgagtaggcgggggcgaaagggaaaagaagggggacgggggggggaaacggggggcggggggcgggggggagaagaaggggggcggggaggattaggaaaacgggggaaaaaagggggggggggggggagataacggggaaacgtaaacggaagaacgagggggatcgtagacgagagggcggaaaaggggggggggagataaaggggggaaaggggaagggaagggggggggggaaagggaaagggaacgggggaagacggggggggggttaggaagggaagtcggggaaacgggggaaggggtaagaggcgagcggggtcgggggggacggggaggaaggggaagaagggggggggcggggggagaaaaaaggggaaacggggaaacgggggaggaggggacggaggagagggggaatagggggggcggagggagaagaagggaaggggggggaaagggaaaaggaagaaaagggggggggaagggaggggtaggggggggggcgcgcggata

SEQ ID NO: 38648 - DNA, 518 bp, Artificial Sequence
  chemically treated genomic DNA (Homo sapiens) CpG-island No: 38648
tatccgcgcgcccccccccctacccctcccttcccccccccttttcttccttttccctttccccccccttcccttcttctccctccgccccccctattccccctctcctccgtcccctcctcccccgtttccccgtttccccttttttctccccccgcccccccccttcttccccttcctccccgtcccccccgaccccgctcgcctcttaccccttcccccgtttccccgacttcccttcctaaccccccccccgtcttcccccgttccctttccctttcccccccccccttcccttcccctttcccccctttatctccccccccccttttccgccctctcgtctacgatccccctcgttcttccgtttacgtttccccgttatctcccccccccccccccttttttcccccgttttcctaatcctccccgccccccttcttctcccccccgccccccgccccccgtttcccccccccgtcccccttcttttccctttcgcccccgcctactcgacg

SEQ ID NO: 38649 - DNA, 573 bp, Artificial Sequence
  chemically treated genomic DNA (Homo sapiens) CpG-island No: 38649
ttttttcgttttttttttcgtttcgcggtttcgcgtttcgttcgtttttttttttcgttttttcgcgtcgtcgttttttttttttcgttttttttcgttttttcgtttttttttttttttttttcgttttttgttttttttttcgtttcgcgttcgcgttttttgtcgtgtttgttttttgttttttttttttttttttttttttttttttttttttcgttttttttttttttcgttcgttcgtcgtttttgttttttttcgcgtttttcgttttcgtgttgtcgtttttttttgtgtttcgttttttttttttttttttttttgtttttttttttttttttttttttttttcgtttttcgtttttcgtgtgtgcgtgttttttttttttcgcgttttttttttttttttcgtttttttttttttttcgtttttcgtttttttcgtcgttttttttttttcgattttttttcgttttcgtttttttttcgcgtttgcgtttggtcgttttcgtttttttgtttcgttttttcgttttttttttttttttttttttttttttttttttcgtttt

SEQ ID NO: 38650 - DNA, 573 bp, Artificial Sequence
  chemically treated genomic DNA (Homo sapiens) CpG-island No: 38650
aaaacgaaaaaaaaaaaaaaaaaaaaaaaaaaaaaaaaaacgaaaaaacgaaacaaaaaaacgaaaacgaccaaacgcaaacgcgaaaaaaaaacgaaaacgaaaaaaaatcgaaaaaaaaaaaacgacgaaaaaaacgaaaaacgaaaaaaaaaaaaaaacgaaaaaaaaaaaaaaaacgcgaaaaaaaaaaaacacgcacacacgaaaaacgaaaaacgaaaaaaaaaaaaaaaaaaaaaaaaaaacaaaaaaaaaaaaaaaaaaaaaacgaaacacaaaaaaaaacgacaacacgaaaacgaaaaacgcgaaaaaaaacaaaaacgacgaacgaacgaaaaaaaaaaaaaacgaaaaaaaaaaaaaaaaaaaaaaaaaaaaaaaaaaaacaaaaaacaaacacgacaaaaaacgcgaacgcgaaacgaaaaaaaaaacaaaaaacgaaaaaaaaaaaaaaaaaaacgaaaaaacgaaaaaaaacgaaaaaaaaaaaacgacgacgcgaaaaaacgaaaaaaaaaaacgaacgaaacgcgaaaccgcgaaacgaaaaaaaaaacgaaaaaa

SEQ ID NO: 38651 - DNA, 573 bp, Artificial Sequence
  chemically treated genomic DNA (Homo sapiens) CpG-island No: 38651
aggacgaaaaggggggggggagggggggagaaaaaggagacggggggacgaaataaaaaaacgggggcgattaggcgtaggcgcggaaaaaaaacggaagcgggagaaaatcgggaaagaagaaacggcgggaggaacgagaaacgggggggaaagaaagacggaggaaaagagggaagcgcggaagaaagggggtacgtatatacggggagcggggagcggaaaggagaaaaggggggggggaagagtaagaggaggagaaaagaaaaggcggagtataggaaagagcgatagtacgggggcgagaaacgcgaaaaaaaataaaaacggcgggcgggcggggagaggggaaagcgggaaaaaagggagggggggaaaaaggggggggggaataagaggtaaatacggtaaggggcgcggacgcggggcggaaggggggataaaaggcgggggggggggggagaagaacgggaaggcggggaaaaacggggggggggaaacgacggcgcgggggggcgggaggaaaaagcgagcggagcgcggaatcgcgggacggagggaagaacgaggggg

SEQ ID NO: 38652 - DNA, 573 bp, Artificial Sequence
  chemically treated genomic DNA (Homo sapiens) CpG-island No: 38652
ccccctcgttcttccctccgtcccgcgattccgcgctccgctcgctttttcctcccgcccccccgcgccgtcgtttccccccccccgtttttccccgccttcccgttcttctcccccccccccccgccttttatccccccttccgccccgcgtccgcgccccttaccgtatttacctcttattcccccccccctttttccccccctcccttttttcccgctttcccctctccccgcccgcccgccgtttttattttttttcgcgtttctcgcccccgtactatcgctctttcctatactccgccttttcttttctcctcctcttactcttccccccccccttttctcctttccgctccccgctccccgtatatacgtaccccctttcttccgcgcttccctcttttcctccgtctttctttcccccccgtttctcgttcctcccgccgtttcttctttcccgattttctcccgcttccgttttttttccgcgcctacgcctaatcgcccccgtttttttatttcgtccccccgtctcctttttctccccccctccccccccccttttcgtcct

SEQ ID NO: 38653 - DNA, 553 bp, Artificial Sequence
  chemically treated genomic DNA (Homo sapiens) CpG-island No: 38653
  unsure (459)
tttcgttttgtgttttttttttacgcgtcgggtttgcggttttttttttttttttttttttttttttttcgtttttttcgtttgcgtttttcgttttcggtggtttgttttcgttttttttcgtttttttttcgttttttttttttttttcgtttttttttttttttcgtttttgtttttcgtgttttttcggtgtcgggcggtttcgttttttcgtgttttttttttgtgtttttttcgttgtcgttcggttttttgtttttttcgtttcggtgttgttttttttttttttttttgtttttttttttttggtgcgcgtttttttttttttttttcgtttttttcgcgttttttttttcgttttcgttcgtttttttttttttcgttttttttttttttttttttttttcgtttttttttttttttttttttttttcgtttgtttttttttttttgttnttttttttttgtttttgtcgcgcggttgcgttgtttcgttttgttttgtgtgttcgtcgttttttttttcgtttttcgtttttttttttttttt

SEQ ID NO: 38654 - DNA, 553 bp, Artificial Sequence
  chemically treated genomic DNA (Homo sapiens) CpG-island No: 38654
  unsure (95)
aaaaaaaaaaaaaaaacgaaaaacgaaaaaaaaaacgacgaacacacaaaacaaaacgaaacaacgcaaccgcgcgacaaaaacaaaaaaaaaanaacaaaaaaaaaaaaacaaacgaaaaaaaaaaaaaaaaaaaaaaaaacgaaaaaaaaaaaaaaaaaaaaaaaacgaaaaaaaaaaaaacgaacgaaaacgaaaaaaaaaacgcgaaaaaaacgaaaaaaaaaaaaaaaaacgcgcaccaaaaaaaaaaaaacaaaaaaaaaaaaaaaaaacaacaccgaaacgaaaaaaacaaaaaaccgaacgacaacgaaaaaaacacaaaaaaaaaacacgaaaaaacgaaaccgcccgacaccgaaaaaacacgaaaaacaaaaacgaaaaaaaaaaaaaaacgaaaaaaaaaaaaaaaacgaaaaaaaaacgaaaaaaaacgaaaacaaaccaccgaaaacgaaaaacgcaaacgaaaaaaacgaaaaaaaaaaaaaaaaaaaaaaaaaaaaaaccgcaaacccgacgcgtaaaaaaaaaacacaaaacgaaa

SEQ ID NO: 38655 - DNA, 553 bp, Artificial Sequence
  chemically treated genomic DNA (Homo sapiens) CpG-island No: 38655
  unsure (95)
aggaggaaaagaggggcggggggcggaaaaagagacggcgggtatataaaataaaacggggtaacgtagtcgcgcgataaaaataaaaggggggnaatagggaagggaagataggcggggaaaagaaaggggggggaaaaagcggggaaaagagggaaaggggaaaaacggggagaggaaaggcgaacgggggcggaagggaaaacgcggggggagcggagggagggaaaagaagcgcgtattaaaaaagggaagatagggggggaagggaaaaataatatcggggcggggggggtaggggatcgggcgataacggagggggtataggggggggatacgaggggacgggatcgttcggtatcggaggggtacggggaataaaggcgggggggggaaaaaaacggagggggggaaaagggcggggggaagacgggggggggcggaggtagattatcgggagcggaaggcgtaggcggggagggcggaaagaaaaaggggaagagggggggggggatcgtaaattcgacgcgtaagggaaggatataaagcgggg

SEQ ID NO: 38656 - DNA, 553 bp, Artificial Sequence
  chemically treated genomic DNA (Homo sapiens) CpG-island No: 38656
  unsure (459)
ccccgctttatatccttcccttacgcgtcgaatttacgatccccccccccctcttcccctttttctttccgccctccccgcctacgccttccgctcccgataatctacctccgcccccccccgtcttccccccgcccttttccccccctccgtttttttcccccccccgcctttattccccgtacccctccgataccgaacgatcccgtcccctcgtatcccccccctataccccctccgttatcgcccgatcccctaccccccccgccccgatattatttttcccttccccccctatcttcccttttttaatacgcgcttcttttccctccctccgctccccccgcgttttcccttccgcccccgttcgcctttcctctccccgtttttcccctttccctcttttccccgctttttcccccccctttcttttccccgcctatcttcccttccctattnccccccttttatttttatcgcgcgactacgttaccccgttttattttatatacccgccgtctctttttccgccccccgcccctcttttcctcct

SEQ ID NO: 38657 - DNA, 1092 bp, Artificial Sequence
  chemically treated genomic DNA (Homo sapiens) CpG-island No: 38657
tttaggtgcgggttcgagtgataagaacgtttacgtattttcgggagagaacgaaaaggtgttcgggtttggcgggggcggggaacgttaggggttggtgggaattgaggggttttcggttttcgggaagcggagtttcgggtcggtcgcgggtcgcgggttacgtagggagtacggggttttcgtcgtttttaggtcgcgttttttagcgttttttgcggttcgtgtttagcgcggtcgtcgtagtttcgacgtcgtagtcggacgtggggtttagggggcgttgtggtttagcggcgtcggcggtaggagcggttattcgacgttggaggtttcgttgaggattttcgtttgtcgtatttcggtcgtttcgtcgtagttttgcgttttcggttcggttcggcggcgttttttcgggattcgcgtggttgtcgcggttcgggcgtcgatgcggttgggcgggtgtcgggttttagtagtagtagtagtcgtagttgcggttatcgtagtttttataggagtgggaggtttcgcggcggcgtttggggtcgcgtcggtgtttttcggaggaggttttcggtttagggacgattttcgtggttatgttgaagcggaggcggtcgttgttcgaggtgagtgtggcgcggcgtggttcggggttcgttcgtttttcgtcgtttgtgggggttttggcggtagatcgcgggtcgggcggacggggcgttttgttattgcggtcgttttttttattttgcggttttggggttttagtttttttttttcgcgtttttcgggaggttgaaggtcgtggggggcgattaggtttcgcgtcgttgggaagttttcgtttcggtttcggtttcggcgcggtcgggtgtgtggagttgggggtcggtaggagtacggtcgtttttcgggtttgtatgggttcgggtcgagcgtagttttttagttcgggttttgtacgtatatttcggagggaggtagatgacgtttgtttgtaaataagttttggtttttacgcgttttatatcgagttttttagaatttcggttgtggcggggaaagggggaggagaggaaggttagggtg

SEQ ID NO: 38658 - DNA, 1092 bp, Artificial Sequence
  chemically treated genomic DNA (Homo sapiens) CpG-island No: 38658
caccctaaccttcctctcctccccctttccccgccacaaccgaaattctaaaaaactcgatataaaacgcgtaaaaaccaaaacttatttacaaacaaacgtcatctacctccctccgaaatatacgtacaaaacccgaactaaaaaactacgctcgacccgaacccatacaaacccgaaaaacgaccgtactcctaccgacccccaactccacacacccgaccgcgccgaaaccgaaaccgaaacgaaaacttcccaacgacgcgaaacctaatcgccccccacgaccttcaacctcccgaaaaacgcgaaaaaaaaaaactaaaaccccaaaaccgcaaaataaaaaaaacgaccgcaataacaaaacgccccgtccgcccgacccgcgatctaccgccaaaacccccacaaacgacgaaaaacgaacgaaccccgaaccacgccgcgccacactcacctcgaacaacgaccgcctccgcttcaacataaccacgaaaatcgtccctaaaccgaaaacctcctccgaaaaacaccgacgcgaccccaaacgccgccgcgaaacctcccactcctataaaaactacgataaccgcaactacgactactactactactaaaacccgacacccgcccaaccgcatcgacgcccgaaccgcgacaaccacgcgaatcccgaaaaaacgccgccgaaccgaaccgaaaacgcaaaactacgacgaaacgaccgaaatacgacaaacgaaaatcctcaacgaaacctccaacgtcgaataaccgctcctaccgccgacgccgctaaaccacaacgccccctaaaccccacgtccgactacgacgtcgaaactacgacgaccgcgctaaacacgaaccgcaaaaaacgctaaaaaacgcgacctaaaaacgacgaaaaccccgtactccctacgtaacccgcgacccgcgaccgacccgaaactccgcttcccgaaaaccgaaaacccctcaattcccaccaacccctaacgttccccgcccccgccaaacccgaacaccttttcgttctctcccgaaaatacgtaaacgttcttatcactcgaacccgcacctaaa

SEQ ID NO: 38659 - DNA, 1092 bp, Artificial Sequence
  chemically treated genomic DNA (Homo sapiens) CpG-island No: 38659
tattttggtttttttttttttttttttttttcgttataatcgggattttgagggattcggtatgggacgcgtggaagttaaagtttgtttgtaaataggcgttatttgttttttttcgggatgtacgtgtagggttcgggttaagaggttgcgttcggttcgggtttatgtaaattcgaaaggcggtcgtgtttttgtcggtttttagttttatatattcggtcgcgtcggaatcgaggtcggagcgagggttttttaacggcgcggggtttaatcgttttttacggtttttagtttttcgggggacgcggggagaaagggttgaggttttaggatcgtagggtgggggaggcgatcgtagtggtaggacgtttcgttcgttcggttcgcggtttgtcgttagggtttttataggcggcgggaggcgggcgagtttcggattacgtcgcgttatatttatttcgagtagcggtcgttttcgttttagtatggttacgggggtcgtttttgagtcgaaagtttttttcggagggtatcggcgcggttttaggcgtcgtcgcgaaattttttatttttgtaggagttgcggtagtcgtagttgcggttgttattgttgttaaggttcggtattcgtttagtcgtatcggcgttcgggtcgcggtagttacgcggatttcggaggagcgtcgtcgagtcgggtcgggggcgtaaggttgcggcgggacgatcgaggtgcggtaggcggggatttttagcgaagtttttagcgtcgggtggtcgtttttgtcgtcggcgtcgttgggttatagcgttttttggattttacgttcggttacggcgtcgggattgcggcggtcgcgttgggtacgagtcgtagggaacgttaaggagcgcggtttgggggcggcgagggtttcgtgttttttgcgtagttcgcggttcgcggtcggttcgggatttcgtttttcgggaatcggaagttttttagtttttattaatttttggcgtttttcgttttcgttagattcgagtattttttcgttttttttcgaagatacgtgaacgtttttgttattcggattcgtatttgag

SEQ ID NO: 38660 - DNA, 1092 bp, Artificial Sequence
  chemically treated genomic DNA (Homo sapiens) CpG-island No: 38660
ctcaaatacgaatccgaataacaaaaacgttcacgtatcttcgaaaaaaaacgaaaaaatactcgaatctaacgaaaacgaaaaacgccaaaaattaataaaaactaaaaaacttccgattcccgaaaaacgaaatcccgaaccgaccgcgaaccgcgaactacgcaaaaaacacgaaaccctcgccgcccccaaaccgcgctccttaacgttccctacgactcgtacccaacgcgaccgccgcaatcccgacgccgtaaccgaacgtaaaatccaaaaaacgctataacccaacgacgccgacgacaaaaacgaccacccgacgctaaaaacttcgctaaaaatccccgcctaccgcacctcgatcgtcccgccgcaaccttacgcccccgacccgactcgacgacgctcctccgaaatccgcgtaactaccgcgacccgaacgccgatacgactaaacgaataccgaaccttaacaacaataacaaccgcaactacgactaccgcaactcctacaaaaataaaaaatttcgcgacgacgcctaaaaccgcgccgataccctccgaaaaaaactttcgactcaaaaacgacccccgtaaccatactaaaacgaaaacgaccgctactcgaaataaatataacgcgacgtaatccgaaactcgcccgcctcccgccgcctataaaaaccctaacgacaaaccgcgaaccgaacgaacgaaacgtcctaccactacgatcgcctcccccaccctacgatcctaaaacctcaaccctttctccccgcgtcccccgaaaaactaaaaaccgtaaaaaacgattaaaccccgcgccgttaaaaaaccctcgctccgacctcgattccgacgcgaccgaatatataaaactaaaaaccgacaaaaacacgaccgcctttcgaatttacataaacccgaaccgaacgcaacctcttaacccgaaccctacacgtacatcccgaaaaaaaacaaataacgcctatttacaaacaaactttaacttccacgcgtcccataccgaatccctcaaaatcccgattataacgaaaaaaaaaaaaaaaaaaaaaaaccaaaata

SEQ ID NO: 38661 - DNA, 560 bp, Artificial Sequence
  chemically treated genomic DNA (Homo sapiens) CpG-island No: 38661
tagcggggttgtgaagtgtaaatcgtttcgaggtaattcgagaacgggaggattgttattagttcgttaggagagtgcgatgtttcggttcgtttcggagtagggaaatttttgcgggaggttgcgttggtatcggtcgtttggcgcggttcgcgcggattcgggcgacgggatacgtagcgcggtattgttattttgtgggtatcggcggtagcggcgcggcggggcgaagtcggcgagcgagcgattcgcggttcggagttcgacgtcggttagcgaacgttcgtaggaacgcgtcggtcgagcgggagttcgcgggggcggggcgcgcggtttcggttacgtgggttagtaataggtagtagttaatgagaacgcgagttaggtggtgcgtgcgttcgtcgcgcgcggaaggtaaggggttcgggagaaggcgtgggcgcgttacgggttcggtgggatcgcgggtggggaagtttagaaagtttgtttttttttgttaggagtcgtttgtcgtaggcgggatgaacgagagttgtaaaatgggattgttttatttt

SEQ ID NO: 38662 - DNA, 560 bp, Artificial Sequence
  chemically treated genomic DNA (Homo sapiens) CpG-island No: 38662
aaaataaaacaatcccattttacaactctcgttcatcccgcctacgacaaacgactcctaacaaaaaaaaacaaactttctaaacttccccacccgcgatcccaccgaacccgtaacgcgcccacgccttctcccgaaccccttaccttccgcgcgcgacgaacgcacgcaccacctaactcgcgttctcattaactactacctattactaacccacgtaaccgaaaccgcgcgccccgcccccgcgaactcccgctcgaccgacgcgttcctacgaacgttcgctaaccgacgtcgaactccgaaccgcgaatcgctcgctcgccgacttcgccccgccgcgccgctaccgccgatacccacaaaataacaataccgcgctacgtatcccgtcgcccgaatccgcgcgaaccgcgccaaacgaccgataccaacgcaacctcccgcaaaaatttccctactccgaaacgaaccgaaacatcgcactctcctaacgaactaataacaatcctcccgttctcgaattacctcgaaacgatttacacttcacaaccccgcta

SEQ ID NO: 38663 - DNA, 560 bp, Artificial Sequence
  chemically treated genomic DNA (Homo sapiens) CpG-island No: 38663
ggaatgggatagttttattttatagttttcgtttatttcgtttgcggtaggcggtttttgatagggaagagtaagttttttggatttttttattcgcggttttatcgggttcgtggcgcgtttacgttttttttcgggttttttatttttcgcgcgcggcgggcgtacgtattatttgattcgcgtttttattggttgttgtttgttgttaatttacgtgatcggagtcgcgcgtttcgttttcgcgggttttcgttcggtcggcgcgtttttgcgggcgttcgttggtcggcgtcgggtttcgagtcgcgggtcgttcgttcgtcggtttcgtttcgtcgcgtcgttgtcgtcgatgtttataaggtggtagtgtcgcgttgcgtgtttcgtcgttcgggttcgcgcgagtcgcgttaggcggtcggtgttagcgtagtttttcgtaaaagtttttttgtttcggaacggatcggggtatcgtatttttttggcgggttggtgatagttttttcgttttcgggttgtttcggggcgatttgtattttatagtttcgttg

SEQ ID NO: 38664 - DNA, 560 bp, Artificial Sequence
  chemically treated genomic DNA (Homo sapiens) CpG-island No: 38664
caacgaaactataaaatacaaatcgccccgaaacaacccgaaaacgaaaaaactatcaccaacccgccaaaaaaatacgataccccgatccgttccgaaacaaaaaaacttttacgaaaaactacgctaacaccgaccgcctaacgcgactcgcgcgaacccgaacgacgaaacacgcaacgcgacactaccaccttataaacatcgacgacaacgacgcgacgaaacgaaaccgacgaacgaacgacccgcgactcgaaacccgacgccgaccaacgaacgcccgcaaaaacgcgccgaccgaacgaaaacccgcgaaaacgaaacgcgcgactccgatcacgtaaattaacaacaaacaacaaccaataaaaacgcgaatcaaataatacgtacgcccgccgcgcgcgaaaaataaaaaacccgaaaaaaaacgtaaacgcgccacgaacccgataaaaccgcgaataaaaaaatccaaaaaacttactcttccctatcaaaaaccgcctaccgcaaacgaaataaacgaaaactataaaataaaactatcccattcc

SEQ ID NO: 38665 - DNA, 590 bp, Artificial Sequence
  chemically treated genomic DNA (Homo sapiens) CpG-island No: 38665
ttcgtttagatttattttgagtaggatggacggcggtagttggttgatgtttggggtttcggggggcggttttttgtgatagtcgtaggggttttcgggggattttcgatagttcgcgtcgttatatttatgttgttgttgggcggataagggggcggtgttttcggttcggatagcgttttcgttagtttcggtgggggtattttcggaggtgggagaagagggcggagggtagagcggttgcgggggttgtttcggggtttggtagtagtcggcgtcggggggtcggggcggcgaagcgttttttttcgtaggttatttatttcgttatcgtcgtcgtcgtcgttagttagtcgtagttttcgtcgtcgtagcggggttgtttgtagggggtgtaggcggggatttcggttttttttcgtttgtatattatttcggggggcgtagggagttcggtcggtgacggtgtcggttttcggaagagttgtacggcggcgggcggttttaggaagcgtatcggttttaagttggttaggaagagatttcggttttgttgtttttaggcggcggtcgtagttagttttaatttt

SEQ ID NO: 38666 - DNA, 590 bp, Artificial Sequence
  chemically treated genomic DNA (Homo sapiens) CpG-island No: 38666
aaaattaaaactaactacgaccgccgcctaaaaacaacaaaaccgaaatctcttcctaaccaacttaaaaccgatacgcttcctaaaaccgcccgccgccgtacaactcttccgaaaaccgacaccgtcaccgaccgaactccctacgccccccgaaataatatacaaacgaaaaaaaaccgaaatccccgcctacaccccctacaaacaaccccgctacgacgacgaaaactacgactaactaacgacgacgacgacgataacgaaataaataacctacgaaaaaaaacgcttcgccgccccgaccccccgacgccgactactaccaaaccccgaaacaacccccgcaaccgctctaccctccgccctcttctcccacctccgaaaatacccccaccgaaactaacgaaaacgctatccgaaccgaaaacaccgcccccttatccgcccaacaacaacataaatataacgacgcgaactatcgaaaatcccccgaaaacccctacgactatcacaaaaaaccgccccccgaaaccccaaacatcaaccaactaccgccgtccatcctactcaaaataaatctaaacgaa

SEQ ID NO: 38667 - DNA, 590 bp, Artificial Sequence
  chemically treated genomic DNA (Homo sapiens) CpG-island No: 38667
agagttggggttggttgcggtcgtcgtttgggagtagtagggtcgaagtttttttttggttagtttggggtcggtgcgttttttggggtcgttcgtcgtcgtgtagttttttcgggggtcgatatcgttatcggtcgagttttttacgtttttcgaaatggtgtgtaagcggaagggggtcggggttttcgtttgtattttttgtaagtagtttcgttgcggcggcgggggttgcggttggttggcggcggcggcggcggtggcggggtgagtggtttgcggggggaggcgtttcgtcgtttcggtttttcgacgtcggttgttgttaggtttcggagtagttttcgtagtcgttttgtttttcgttttttttttttattttcgaaggtgtttttatcgaagttggcggggacgttgttcgagtcgggggtatcgtttttttgttcgtttagtagtagtatgaatgtggcgacgcggattgtcgggagtttttcgaaaatttttgcgattgttatagggagtcgtttttcgaaattttagatattaattagttgtcgtcgtttattttgtttaaggtgggtttgggcgag

SEQ ID NO: 38668 - DNA, 590 bp, Artificial Sequence
  chemically treated genomic DNA (Homo sapiens) CpG-island No: 38668
ctcgcccaaacccaccttaaacaaaataaacgacgacaactaattaatatctaaaatttcgaaaaacgactccctataacaatcgcaaaaattttcgaaaaactcccgacaatccgcgtcgccacattcatactactactaaacgaacaaaaaaacgatacccccgactcgaacaacgtccccgccaacttcgataaaaacaccttcgaaaataaaaaaaaaaaacgaaaaacaaaacgactacgaaaactactccgaaacctaacaacaaccgacgtcgaaaaaccgaaacgacgaaacgcctccccccgcaaaccactcaccccgccaccgccgccgccgccgccaaccaaccgcaacccccgccgccgcaacgaaactacttacaaaaaatacaaacgaaaaccccgacccccttccgcttacacaccatttcgaaaaacgtaaaaaactcgaccgataacgatatcgacccccgaaaaaactacacgacgacgaacgaccccaaaaaacgcaccgaccccaaactaaccaaaaaaaaacttcgaccctactactcccaaacgacgaccgcaaccaaccccaactct

SEQ ID NO: 38669 - DNA, 1210 bp, Artificial Sequence
  chemically treated genomic DNA (Homo sapiens) CpG-island No: 38669
gggcgacgaagtcgaggcggtagcggcggcggcggcggcggtcgaggatagtaggaagcggcgggtagtagcggcgtagttttcggcggttagggtcgcgtagcgtcgcgttaggtgttgagaggaggaggcggtagcgtaggtttcgtttcgcggcggcggcgagagcggcggttttttttttgggtcggcgggggcgggcgcgtcgggattgtgtacgatgaagtagagtatgtagggttcgcggaagaagtagtttcggtttcggggcgtcgtcggttgagggggtattttggttggggttcggcggggtagtttgaggagagggcgtcggcggcggtattaattgtaatagcgaggttttttttggttcgggcggttacgcggttttttcgagagaaggtggtttatatagaaggtttcgaggagggggatcgggacgggagggagggagatttagagaggcgggttttcggtagcggggtaggtcgttcgttggttcggttttcggaggggtcgttttttttgcgtatatatacgtatatacgggtatatacgcgacggtggggggtgggcgttagttgcgggtcgtcggagtgttcgacgggggttatatgttttgtttagggaagtcgggagaacgatgggcgcgagttttggggacgcgagggagggagcgagcgagtttgtcggttaggcgattagttcgggttcggttagtcggtttagttagttagcggagcggtcggggaaaggtcgggtttcgttcggattattttaattgcggattcgtcgtcggcgcgcgtattcgcgattttgttcggagtcgtaggagcgcgcggttcgtttcggtagggggcggagttagttgcggtggcgcgttcgtggcggggacgtcggtattcggttgtttattcgggacggtcgttatatcggtattacgggaagaagtcggtcggttagggtacggagttttgggtttgcggggtgcggcgtacgttttttttttttatcgtttaaggttttttcgaagttgttgggcgtgcgtcgcgtttttgaggcgggaggagatattttcgagttagttgtgtgatattcgtttatatagtcgcgttgacgtttcgaggtgtaagtttaagagttgttattggtcgggagtcgttgggtttttttttttattttttatttttgttattatttttgattcgga

SEQ ID NO: 38670 - DNA, 1210 bp, Artificial Sequence
  chemically treated genomic DNA (Homo sapiens) CpG-island No: 38670
tccgaatcaaaaataataacaaaaataaaaaataaaaaaaaaaacccaacgactcccgaccaataacaactcttaaacttacacctcgaaacgtcaacgcgactatataaacgaatatcacacaactaactcgaaaatatctcctcccgcctcaaaaacgcgacgcacgcccaacaacttcgaaaaaaccttaaacgataaaaaaaaaaaacgtacgccgcaccccgcaaacccaaaactccgtaccctaaccgaccgacttcttcccgtaataccgatataacgaccgtcccgaataaacaaccgaataccgacgtccccgccacgaacgcgccaccgcaactaactccgccccctaccgaaacgaaccgcgcgctcctacgactccgaacaaaatcgcgaatacgcgcgccgacgacgaatccgcaattaaaataatccgaacgaaacccgacctttccccgaccgctccgctaactaactaaaccgactaaccgaacccgaactaatcgcctaaccgacaaactcgctcgctccctccctcgcgtccccaaaactcgcgcccatcgttctcccgacttccctaaacaaaacatataacccccgtcgaacactccgacgacccgcaactaacgcccaccccccaccgtcgcgtatatacccgtatatacgtatatatacgcaaaaaaaacgacccctccgaaaaccgaaccaacgaacgacctaccccgctaccgaaaacccgcctctctaaatctccctccctcccgtcccgatccccctcctcgaaaccttctatataaaccaccttctctcgaaaaaaccgcgtaaccgcccgaaccaaaaaaaacctcgctattacaattaataccgccgccgacgccctctcctcaaactaccccgccgaaccccaaccaaaataccccctcaaccgacgacgccccgaaaccgaaactacttcttccgcgaaccctacatactctacttcatcgtacacaatcccgacgcgcccgcccccgccgacccaaaaaaaaaaccgccgctctcgccgccgccgcgaaacgaaacctacgctaccgcctcctcctctcaacacctaacgcgacgctacgcgaccctaaccgccgaaaactacgccgctactacccgccgcttcctactatcctcgaccgccgccgccgccgccgctaccgcctcgacttcgtcgccc

SEQ ID NO: 38671 - DNA, 1210 bp, Artificial Sequence
  chemically treated genomic DNA (Homo sapiens) CpG-island No: 38671
ttcgagttaggggtggtgataggggtggaaggtgaggggaagagtttagcggttttcggttaatggtagtttttgaatttatatttcgagacgttagcgcggttgtgtaaacggatgttatatagttggttcggaagtgttttttttcgttttagaaacgcggcgtacgtttagtagtttcggaaaaattttaggcggtgggagggaggggcgtgcgtcgtatttcgtaagtttagagtttcgtgttttagtcggtcggttttttttcgtagtgtcggtgtgacggtcgtttcgggtgagtagtcgggtgtcggcgttttcgttacgagcgcgttatcgtaattggtttcgttttttgtcggaacgggtcgcgcgtttttgcggtttcgagtagagtcgcgggtgcgcgcgtcggcggcggattcgtagttaaaatggttcgagcgggattcggttttttttcggtcgtttcgttgattgattgagtcggttggtcgggttcggattggtcgtttagtcggtaggttcgttcgttttttttttcgcgtttttaaagttcgcgtttatcgttttttcggtttttttgggtaaagtatgtagttttcgtcgggtatttcggcggttcgtagttgacgtttattttttatcgtcgcgtgtgtgttcgtgtgtgcgtgtgtgtgcgtaggaagggcgattttttcgggggtcgagttagcgagcggtttgtttcgttgtcgggagttcgtttttttgggtttttttttttttcgtttcggttttttttttcggggttttttatatgggttattttttttcgaaggagtcgcgtaatcgttcgagttagaagaggtttcgttgttgtagttggtgtcgtcgtcggcgttttttttttaggttgtttcgtcggattttagttaaggtgtttttttagtcggcggcgtttcggagtcgggattgtttttttcgcgggttttgtatgttttgttttatcgtgtatagtttcggcgcgttcgttttcgtcggtttagaggaggagtcgtcgttttcgtcgtcgtcgcgggacggggtttacgttgtcgttttttttttttagtatttggcgcggcgttacgcggttttggtcgtcgaggattgcgtcgttgttgttcgtcgttttttgttattttcggtcgtcgtcgtcgtcgtcgttgtcgtttcggtttcgtcgttt

SEQ ID NO: 38672 - DNA, 1210 bp, Artificial Sequence
  chemically treated genomic DNA (Homo sapiens) CpG-island No: 38672
aaacgacgaaaccgaaacgacaacgacgacgacgacgacgaccgaaaataacaaaaaacgacgaacaacaacgacgcaatcctcgacgaccaaaaccgcgtaacgccgcgccaaatactaaaaaaaaaaaacgacaacgtaaaccccgtcccgcgacgacgacgaaaacgacgactcctcctctaaaccgacgaaaacgaacgcgccgaaactatacacgataaaacaaaacatacaaaacccgcgaaaaaaacaatcccgactccgaaacgccgccgactaaaaaaacaccttaactaaaatccgacgaaacaacctaaaaaaaaaacgccgacgacgacaccaactacaacaacgaaacctcttctaactcgaacgattacgcgactccttcgaaaaaaaataacccatataaaaaaccccgaaaaaaaaaaccgaaacgaaaaaaaaaaaaacccaaaaaaacgaactcccgacaacgaaacaaaccgctcgctaactcgacccccgaaaaaatcgcccttcctacgcacacacacgcacacacgaacacacacgcgacgataaaaaataaacgtcaactacgaaccgccgaaatacccgacgaaaactacatactttacccaaaaaaaccgaaaaaacgataaacgcgaactttaaaaacgcgaaaaaaaaaacgaacgaacctaccgactaaacgaccaatccgaacccgaccaaccgactcaatcaatcaacgaaacgaccgaaaaaaaaccgaatcccgctcgaaccattttaactacgaatccgccgccgacgcgcgcacccgcgactctactcgaaaccgcaaaaacgcgcgacccgttccgacaaaaaacgaaaccaattacgataacgcgctcgtaacgaaaacgccgacacccgactactcacccgaaacgaccgtcacaccgacactacgaaaaaaaaccgaccgactaaaacacgaaactctaaacttacgaaatacgacgcacgcccctccctcccaccgcctaaaatttttccgaaactactaaacgtacgccgcgtttctaaaacgaaaaaaaacacttccgaaccaactatataacatccgtttacacaaccgcgctaacgtctcgaaatataaattcaaaaactaccattaaccgaaaaccgctaaactcttcccctcaccttccacccctatcaccacccctaactcgaa

SEQ ID NO: 38673 - DNA, 683 bp, Artificial Sequence
  chemically treated genomic DNA (Homo sapiens) CpG-island No: 38673
gggaacgcgttgttatggtttcggtttggtttttttttttttggggatcggtttagttcgtttttcgggggtcggtttagagcggttttcgattcgggatttatgttttagcgggatttcggttttgtcgtaggttggggtatttcgggaaggtcgggttttaggggtttcgcggttagtttagcggacggagaatcgggattaggtgggagttttagggcgggtcgattttcggttttacggattcggacgtttagttattttcgatcgttcggaggtttttagggggattcggttggtcgtagttacgtcgacgttagattttcgttgtgcgtgttcggtttcgagggtagggggagacggttaggttttattcgtcgcgttcgttttgttcgggcgttcggttttttcgttgtatttagtttttatcggggcggtcgggattcggcggttaagttgttgcgcgttgcgggtatcggcgcggacgggggttcgggcgtttcgtcgtcgtatgtagacgattcgttgttcgtaagttgttgcgtcgttcgtttgtttcgtttttttgtaatggttcggtcgcgtatttcgggtttacgatttttttttttttttacgatttcgggtttttggttgatttggcgttggcgttgggtttagtgtaggcgtgggtttggtaatgg

SEQ ID NO: 38674 - DNA, 683 bp, Artificial Sequence
  chemically treated genomic DNA (Homo sapiens) CpG-island No: 38674
ccattaccaaacccacgcctacactaaacccaacgccaacgccaaatcaaccaaaaacccgaaatcgtaaaaaaaaaaaaaaatcgtaaacccgaaatacgcgaccgaaccattacaaaaaaacgaaacaaacgaacgacgcaacaacttacgaacaacgaatcgtctacatacgacgacgaaacgcccgaacccccgtccgcgccgatacccgcaacgcgcaacaacttaaccgccgaatcccgaccgccccgataaaaactaaatacaacgaaaaaaccgaacgcccgaacaaaacgaacgcgacgaataaaacctaaccgtctccccctaccctcgaaaccgaacacgcacaacgaaaatctaacgtcgacgtaactacgaccaaccgaatccccctaaaaacctccgaacgatcgaaaataactaaacgtccgaatccgtaaaaccgaaaatcgacccgccctaaaactcccacctaatcccgattctccgtccgctaaactaaccgcgaaacccctaaaacccgaccttcccgaaataccccaacctacgacaaaaccgaaatcccgctaaaacataaatcccgaatcgaaaaccgctctaaaccgacccccgaaaaacgaactaaaccgatccccaaaaaaaaaaaaaccaaaccgaaaccataacaacgcgttccc

SEQ ID NO: 38675 - DNA, 683 bp, Artificial Sequence
  chemically treated genomic DNA (Homo sapiens) CpG-island No: 38675
ttattgttaggtttacgtttgtattaagtttagcgttagcgttaggttagttaagaattcggggtcgtggaggaggaaggaagtcgtgggttcgggatgcgcggtcggattattgtaggagagcggggtaggcggacggcgtagtagtttgcgggtagcgagtcgtttgtatgcggcggcgaagcgttcgggttttcgttcgcgtcggtgttcgtagcgcgtagtaatttggtcgtcgggtttcggtcgtttcggtagaggttgggtatagcgagggggtcgggcgttcgggtaggacgggcgcggcgggtggggtttggtcgtttttttttgttttcggggtcgaatacgtatagcgagagtttagcgtcggcgtggttgcggttagtcgggtttttttggaggttttcggacgatcggaagtgattgagcgttcgggttcgtgaggtcgggggtcggttcgttttaagatttttatttggtttcggtttttcgttcgttaggttggtcgcggggtttttggggttcgattttttcggggtgttttaatttgcggtaaggtcgaggtttcgttgaggtatgagtttcgggtcggggatcgttttgggtcgattttcggaggacggattaggtcgatttttagagggaagggggttaggtcgaggttatggtagcgcgttttt

SEQ ID NO: 38676 - DNA, 683 bp, Artificial Sequence
  chemically treated genomic DNA (Homo sapiens) CpG-island No: 38676
aaaaacgcgctaccataacctcgacctaacccccttccctctaaaaatcgacctaatccgtcctccgaaaatcgacccaaaacgatccccgacccgaaactcatacctcaacgaaacctcgaccttaccgcaaattaaaacaccccgaaaaaatcgaaccccaaaaaccccgcgaccaacctaacgaacgaaaaaccgaaaccaaataaaaatcttaaaacgaaccgacccccgacctcacgaacccgaacgctcaatcacttccgatcgtccgaaaacctccaaaaaaacccgactaaccgcaaccacgccgacgctaaactctcgctatacgtattcgaccccgaaaacaaaaaaaaacgaccaaaccccacccgccgcgcccgtcctacccgaacgcccgaccccctcgctatacccaacctctaccgaaacgaccgaaacccgacgaccaaattactacgcgctacgaacaccgacgcgaacgaaaacccgaacgcttcgccgccgcatacaaacgactcgctacccgcaaactactacgccgtccgcctaccccgctctcctacaataatccgaccgcgcatcccgaacccacgacttccttcctcctccacgaccccgaattcttaactaacctaacgctaacgctaaacttaatacaaacgtaaacctaacaataa

SEQ ID NO: 38677 - DNA, 1428 bp, Artificial Sequence
  chemically treated genomic DNA (Homo sapiens) CpG-island No: 38677
gggagaagtggcgcgcgtgttttttgttaggggcgggcggcggggcgggggtaggggcggggtcggggttcgggtcgtttttttcgtttttgtagtggtgggcggagcggtttagtagcggcgcgattagcgtgttcgtggtcgtttttttgcgcgcgggtttcggttttttcgttttgttgttttttacgcgtatgatggttagcggttttttgaagggttgcggaagcgggttgttggtggggatttattttatttttttgcgcggtcgtttgattacgggcggttcggcggcgtcgtcgggttcggcggggttggcgttggggtttacggtttgtattttcgagtcgcgtatcgtgggggtggcgtcgtggttggattgcgttagcgtcgttagtagttgtcggattacgttgtcgtatatgaggtcgttttcgttggtgatgaagtttagtcggttgagcgatttgatgtggtcgcggttttcgttgtagaatatggttaggatgttgatgtcgtagaattgcgagcggcgttattgtcggcgcgttttgatgtttattttgtgtagtttgtcgaagatgaagttgtttttgcggaagatgaagaggtggatgaggttgacgaggatgatgaggtttatgacgtatagtagtacgatgtttacgttcgcgatgatgcgttgtagttgtacggacgggagtttgtagtttacgcgtatcgcgggtttcgtatttgtcgtttcgttcggggacgcgtttagcgcgtaggtgaattcgttttgtttttgcgtggcgtagtaggtgtataggtaggagatgggtacggcgtttagtagtaggattagtacgtgtcgcgttaggtatagtttggttaggaagttgttgcggtcgcggcgttttaggtatttttcgaataggttttgtttcgggttttttttttttttcgcgttttcgatgatttcgcgtttttcgcgtttcgtgatgttcgggtttttggattggatttgtttttcgattttgggcgcgcggttttcggtcgttcggtggtaatagttgtcgattttttgtagtaggaagttgagttcggaggtgaggcgcgtggaggttaggaatttttagtttagcgcgggtacgtatatgatggcggcgaaggttagtagcgcgtagggtaggaatttgtgtttaaatagcgacggttataggttggcgtttacgtcgggtagcgcgtttcgtagtttcgtttagtagtagtcgcgggcgtatagcgtttggtcgcgcgtgaagttgtgcggggtgtaatagtaaatgggtttttttgggggtaaagaggagatacgggttggggcggggaggcgtacgggttgggttgaagaaatcgggttggatttgatcgcgtttttgtcgaattttttttaggagttttttt

SEQ ID NO: 38678 - DNA, 1428 bp, Artificial Sequence
  chemically treated genomic DNA (Homo sapiens) CpG-island No: 38678
aaaaaaactcctaaaaaaaattcgacaaaaacgcgatcaaatccaacccgatttcttcaacccaacccgtacgcctccccgccccaacccgtatctcctctttacccccaaaaaaacccatttactattacaccccgcacaacttcacgcgcgaccaaacgctatacgcccgcgactactactaaacgaaactacgaaacgcgctacccgacgtaaacgccaacctataaccgtcgctatttaaacacaaattcctaccctacgcgctactaaccttcgccgccatcatatacgtacccgcgctaaactaaaaattcctaacctccacgcgcctcacctccgaactcaacttcctactacaaaaaatcgacaactattaccaccgaacgaccgaaaaccgcgcgcccaaaatcgaaaaacaaatccaatccaaaaacccgaacatcacgaaacgcgaaaaacgcgaaatcatcgaaaacgcgaaaaaaaaaaaaaacccgaaacaaaacctattcgaaaaatacctaaaacgccgcgaccgcaacaacttcctaaccaaactatacctaacgcgacacgtactaatcctactactaaacgccgtacccatctcctacctatacacctactacgccacgcaaaaacaaaacgaattcacctacgcgctaaacgcgtccccgaacgaaacgacaaatacgaaacccgcgatacgcgtaaactacaaactcccgtccgtacaactacaacgcatcatcgcgaacgtaaacatcgtactactatacgtcataaacctcatcatcctcgtcaacctcatccacctcttcatcttccgcaaaaacaacttcatcttcgacaaactacacaaaataaacatcaaaacgcgccgacaataacgccgctcgcaattctacgacatcaacatcctaaccatattctacaacgaaaaccgcgaccacatcaaatcgctcaaccgactaaacttcatcaccaacgaaaacgacctcatatacgacaacgtaatccgacaactactaacgacgctaacgcaatccaaccacgacgccacccccacgatacgcgactcgaaaatacaaaccgtaaaccccaacgccaaccccgccgaacccgacgacgccgccgaaccgcccgtaatcaaacgaccgcgcaaaaaaataaaataaatccccaccaacaacccgcttccgcaacccttcaaaaaaccgctaaccatcatacgcgtaaaaaacaacaaaacgaaaaaaccgaaacccgcgcgcaaaaaaacgaccacgaacacgctaatcgcgccgctactaaaccgctccgcccaccactacaaaaacgaaaaaaacgacccgaaccccgaccccgcccctacccccgccccgccgcccgcccctaacaaaaaacacgcgcgccacttctccc

SEQ ID NO: 38679 - DNA, 1428 bp, Artificial Sequence
  chemically treated genomic DNA (Homo sapiens) CpG-island No: 38679
ggagaggtttttgggaggggttcggtagggacgcggttaggtttagttcggtttttttagtttagttcgtgcgttttttcgttttagttcgtgttttttttttgtttttagaggaatttatttattgttatatttcgtataattttacgcgcgattaggcgttgtacgttcgcggttattgttggacggagttgcgggacgcgttgttcggcgtggacgttagtttgtggtcgtcgttgtttgagtataagtttttgttttacgcgttgttggttttcgtcgttattatgtacgtgttcgcgttgggttgggagtttttggtttttacgcgttttattttcgagtttaattttttgttgtaggagatcgataattgttattatcgggcggtcgagggtcgcgcgtttaagatcgagaagtagatttagtttaagggttcgggtattacggagcgcgagaagcgcgagattatcgagaacgcggagaaggagaagagttcggagtagaatttgttcgagaagtatttggagcgtcgcggtcgtagtaattttttggttaagttgtatttggcgcggtacgtgttgattttgttgttgagcgtcgtgtttattttttatttgtgtatttattacgttacgtagaagtagaacgagtttatttgcgcgttgggcgcgttttcggacggggcggtaggtgcggggttcgcggtgcgcgtgagttgtaagttttcgttcgtgtaattgtagcgtattatcgcgggcgtggatatcgtgttgttgtgcgttatgaattttattattttcgttaattttatttatttttttatttttcgtaagagtaattttattttcgataagttgtataaggtgggtattaagacgcgtcggtagtggcgtcgttcgtagttttgcgatattaatattttggttatgttttgtaacgagaatcgcgattatattaagtcgtttaatcggttggattttattattaacgagagcgattttatgtacgataacgtggttcggtagttgttggcggcgttggcgtagtttaattacgacgttatttttacggtgcgcgattcgggggtgtagatcgtggattttagcgttaatttcgtcgagttcgacggcgtcgtcgagtcgttcgtggttaagcggtcgcgtaagaagatgaagtggatttttattagtaattcgttttcgtagttttttaaggagtcgttggttattatgcgcgtggagaatagtaaggcggagaagtcgaagttcgcgcgtaggaagacggttacggatacgttgatcgcgtcgttgttggatcgtttcgtttattattataagggcggagggggcgattcgggtttcggtttcgtttttgttttcgtttcgtcgttcgtttttgataagaagtacgcgcgttatttttttt

SEQ ID NO: 38680 - DNA, 1428 bp, Artificial Sequence
  chemically treated genomic DNA (Homo sapiens) CpG-island No: 38680
aaaaaaaataacgcgcgtacttcttatcaaaaacgaacgacgaaacgaaaacaaaaacgaaaccgaaacccgaatcgccccctccgcccttataataataaacgaaacgatccaacaacgacgcgatcaacgtatccgtaaccgtcttcctacgcgcgaacttcgacttctccgccttactattctccacgcgcataataaccaacgactccttaaaaaactacgaaaacgaattactaataaaaatccacttcatcttcttacgcgaccgcttaaccacgaacgactcgacgacgccgtcgaactcgacgaaattaacgctaaaatccacgatctacacccccgaatcgcgcaccgtaaaaataacgtcgtaattaaactacgccaacgccgccaacaactaccgaaccacgttatcgtacataaaatcgctctcgttaataataaaatccaaccgattaaacgacttaatataatcgcgattctcgttacaaaacataaccaaaatattaatatcgcaaaactacgaacgacgccactaccgacgcgtcttaatacccaccttatacaacttatcgaaaataaaattactcttacgaaaaataaaaaaataaataaaattaacgaaaataataaaattcataacgcacaacaacacgatatccacgcccgcgataatacgctacaattacacgaacgaaaacttacaactcacgcgcaccgcgaaccccgcacctaccgccccgtccgaaaacgcgcccaacgcgcaaataaactcgttctacttctacgtaacgtaataaatacacaaataaaaaataaacacgacgctcaacaacaaaatcaacacgtaccgcgccaaatacaacttaaccaaaaaattactacgaccgcgacgctccaaatacttctcgaacaaattctactccgaactcttctccttctccgcgttctcgataatctcgcgcttctcgcgctccgtaatacccgaacccttaaactaaatctacttctcgatcttaaacgcgcgaccctcgaccgcccgataataacaattatcgatctcctacaacaaaaaattaaactcgaaaataaaacgcgtaaaaaccaaaaactcccaacccaacgcgaacacgtacataataacgacgaaaaccaacaacgcgtaaaacaaaaacttatactcaaacaacgacgaccacaaactaacgtccacgccgaacaacgcgtcccgcaactccgtccaacaataaccgcgaacgtacaacgcctaatcgcgcgtaaaattatacgaaatataacaataaataaattcctctaaaaacaaaaaaaaaacacgaactaaaacgaaaaaacgcacgaactaaactaaaaaaaccgaactaaacctaaccgcgtccctaccgaacccctcccaaaaacctctcc

SEQ ID NO: 38681 - DNA, 1155 bp, Artificial Sequence
  chemically treated genomic DNA (Homo sapiens) CpG-island No: 38681
tcgttagttaatggtcggggttttataaacgttacggttcgcgcgttttttggtaagaggtaagaggtagtaatcgcgagcgtgtcggtcgttagtcgcgggttttcgagtgagtacgttagggagtaggagattaaacgacgggggtcggagttagagtcgtagtgggagttttcggatcggagtacgagtttgagcgggagagcgtcgttcgtacgttcgtcgttattcgcgtattcggcgtagttagagttattagcgtagcgttgttatggagtttagtagtaaggtgagtcgcgcgttcgcgggttttttcgttaggaataaaggcgtagatttttgttcgttttacgtcggttagggtttttttcgtcgtttcgttgcgttgtgcgttcggggcgggtcgcgcgttttttcgagtttggttcggtgcgggtttcgagcgtagcgtttcgtcgggtcgttggtcgtagtggggatgggtttcggatttagcgggtcggagggcgtcgcgtgcgtagttggcgtcggtattgagtatatggttttttttcgggggcgtcgcgtcgtttacgcggttttgttggggttggggatatagggttcgggagcggtacgtcgtatacgatttcggtagcggtagtttagtttcggtttttttcggtgcgggggagggggttcgagcgcggcgtttattggttgagcgggtcgagttttcggttcggtttcggtttcggcgcgcggaggagttaggagtcgttttcgtttttcgtttgtttttttagttcggacgtttttgtaggtgggcggtttggtgcgaggtgttttatcggttttttttatttttttcgttagtttttcgcggtgacgaggtcgaggtcgaggggagggtatttttttttaggttcgggttcgaacgcgggggttgagatgaattttcggtttcggaggtttttttttgcgaggagtgtaggttttaaagttttggtttagtttcgcggagatgtgtttcgcggaggtaggtttattttcggggttaggcggggagcgtaatcggaggggcgggggatttgggggttaggaaagagttttaggttgaagtttagcgggaagcgcgtacgttacggggttggggaatgagggatggggattttg

SEQ ID NO: 38682 - DNA, 1155 bp, Artificial Sequence
  chemically treated genomic DNA (Homo sapiens) CpG-island No: 38682
caaaatccccatccctcattccccaaccccgtaacgtacgcgcttcccgctaaacttcaacctaaaactctttcctaacccccaaatcccccgcccctccgattacgctccccgcctaaccccgaaaataaacctacctccgcgaaacacatctccgcgaaactaaaccaaaactttaaaacctacactcctcgcaaaaaaaaacctccgaaaccgaaaattcatctcaacccccgcgttcgaacccgaacctaaaaaaaaataccctcccctcgacctcgacctcgtcaccgcgaaaaactaacgaaaaaaataaaaaaaaccgataaaacacctcgcaccaaaccgcccacctacaaaaacgtccgaactaaaaaaacaaacgaaaaacgaaaacgactcctaactcctccgcgcgccgaaaccgaaaccgaaccgaaaactcgacccgctcaaccaataaacgccgcgctcgaaccccctcccccgcaccgaaaaaaaccgaaactaaactaccgctaccgaaatcgtatacgacgtaccgctcccgaaccctatatccccaaccccaacaaaaccgcgtaaacgacgcgacgcccccgaaaaaaaaccatatactcaataccgacgccaactacgcacgcgacgccctccgacccgctaaatccgaaacccatccccactacgaccaacgacccgacgaaacgctacgctcgaaacccgcaccgaaccaaactcgaaaaaacgcgcgacccgccccgaacgcacaacgcaacgaaacgacgaaaaaaaccctaaccgacgtaaaacgaacaaaaatctacgcctttattcctaacgaaaaaacccgcgaacgcgcgactcaccttactactaaactccataacaacgctacgctaataactctaactacgccgaatacgcgaataacgacgaacgtacgaacgacgctctcccgctcaaactcgtactccgatccgaaaactcccactacgactctaactccgacccccgtcgtttaatctcctactccctaacgtactcactcgaaaacccgcgactaacgaccgacacgctcgcgattactacctcttacctcttaccaaaaaacgcgcgaaccgtaacgtttataaaaccccgaccattaactaacga

SEQ ID NO: 38683 - DNA, 1155 bp, Artificial Sequence
  chemically treated genomic DNA (Homo sapiens) CpG-island No: 38683
tagagtttttattttttattttttaatttcgtggcgtgcgcgtttttcgttagattttagtttggggtttttttttggtttttagatttttcgttttttcggttgcgtttttcgtttggtttcgagggtaaatttgttttcgcggaatatattttcgcgagattgggttaaagttttggggtttgtatttttcgtaaaggagagttttcgagatcggaggtttattttaattttcgcgttcgagttcgggtttggagaaaagtgtttttttttcggtttcggtttcgttatcgcgggggattggcgggaggagtaggggaggtcggtgggatatttcgtattaggtcgtttatttataggggcgttcgggttaggggagtagacggagagcgggggcggtttttgattttttcgcgcgtcggggtcggggtcgggtcgggggttcggttcgtttagttaatgggcgtcgcgttcgggttttttttttcgtatcgggaggggtcgaggttgggttgtcgttgtcgaggtcgtgtgcgacgtgtcgttttcgggttttgtgtttttagttttagtagggtcgcgtggacggcgcggcgttttcggaaggaggttatgtgtttagtgtcggcgttaattacgtacgcggcgtttttcggttcgttagattcgaagtttatttttattgcggttagcggttcggcggggcgttgcgttcgggattcgtatcgagttaggttcggagaggcgcgcggttcgtttcgggcgtatagcgtagcggggcggcgggggaggttttggtcggcgtaaggcgggtaggagtttgcgtttttgtttttggcgggagggttcgcgggcgcgcgatttattttgttgttgggttttatggtagcgttgcgttggtggttttggttgcgtcgggtacgcgggtggcgacgggcgtgcgagcggcgttttttcgtttaggttcgtgtttcggttcggggatttttattgcgattttgatttcgattttcgtcgtttggttttttgttttttggcgtgtttattcggggattcgcgattagcgatcggtacgttcgcggttgttattttttgttttttgttagagagcgcgcggatcgtagcgtttataggatttcggttattggttggcga

SEQ ID NO: 38684 - DNA, 1155 bp, Artificial Sequence
  chemically treated genomic DNA (Homo sapiens) CpG-island No: 38684
tcgccaaccaataaccgaaatcctataaacgctacgatccgcgcgctctctaacaaaaaacaaaaaataacaaccgcgaacgtaccgatcgctaatcgcgaatccccgaataaacacgccaaaaaacaaaaaaccaaacgacgaaaatcgaaatcaaaatcgcaataaaaatccccgaaccgaaacacgaacctaaacgaaaaaacgccgctcgcacgcccgtcgccacccgcgtacccgacgcaaccaaaaccaccaacgcaacgctaccataaaacccaacaacaaaataaatcgcgcgcccgcgaaccctcccgccaaaaacaaaaacgcaaactcctacccgccttacgccgaccaaaacctcccccgccgccccgctacgctatacgcccgaaacgaaccgcgcgcctctccgaacctaactcgatacgaatcccgaacgcaacgccccgccgaaccgctaaccgcaataaaaataaacttcgaatctaacgaaccgaaaaacgccgcgtacgtaattaacgccgacactaaacacataacctccttccgaaaacgccgcgccgtccacgcgaccctactaaaactaaaaacacaaaacccgaaaacgacacgtcgcacacgacctcgacaacgacaacccaacctcgacccctcccgatacgaaaaaaaaaacccgaacgcgacgcccattaactaaacgaaccgaacccccgacccgaccccgaccccgacgcgcgaaaaaatcaaaaaccgcccccgctctccgtctactcccctaacccgaacgcccctataaataaacgacctaatacgaaatatcccaccgacctcccctactcctcccgccaatcccccgcgataacgaaaccgaaaccgaaaaaaaaacacttttctccaaacccgaactcgaacgcgaaaattaaaataaacctccgatctcgaaaactctcctttacgaaaaatacaaaccccaaaactttaacccaatctcgcgaaaatatattccgcgaaaacaaatttaccctcgaaaccaaacgaaaaacgcaaccgaaaaaacgaaaaatctaaaaaccaaaaaaaaaccccaaactaaaatctaacgaaaaacgcgcacgccacgaaattaaaaaataaaaaataaaaactcta

SEQ ID NO: 38685 - DNA, 750 bp, Artificial Sequence
  chemically treated genomic DNA (Homo sapiens) CpG-island No: 38685
acgaggacgagggtaggttcgcgttagtttttcgtttttcgagttttagtcgatttttcgtattcgcgttttgtttagattttatcgtattttatttttttaggtcgcgtcgtttcgtagtattttattttagacggagattttgagggtttcgttggttagttgcggttgaggcggttttttttttcgtcgttcgtcgtttattttttcgtcgcgtcgttcgggtcgggtttggggcgcgcgggttgagttaaagggagtcggggtttagggtcgtaggttacggcgcggggcggttgtaggtttagcggttcggttttgcggcgcgttgcggttttttataatttggttaagttattcggtttcgtcggttttatagagtaggcgtcgcgaagggaggggcggtgtagtgtcgcgcgttttttcgtcgacgtgtttacgtagttaatcggcgatcgcgaagttattcgagtgaaatagcgatcggcgttttggcgtaagcgcgttattcgtggcggaaatgacgttagtattcgtcgggttcgcggtaaggtgtgaggggagggataattttggtagaacggtgatatgggcgttaggaggcgttgtggagatcgaggaggtaggggaaaatcgaggttggacgttagcgtcgtttagtcggttatagttgtttttcgagtagcgagtggggtaggagcggttttatttttttttgcgatttattcgtttgttgagtttagattttgt

SEQ ID NO: 38686 - DNA, 750 bp, Artificial Sequence
  chemically treated genomic DNA (Homo sapiens) CpG-island No: 38686
acaaaatctaaactcaacaaacgaataaatcgcaaaaaaaaataaaaccgctcctaccccactcgctactcgaaaaacaactataaccgactaaacgacgctaacgtccaacctcgattttcccctacctcctcgatctccacaacgcctcctaacgcccatatcaccgttctaccaaaattatccctcccctcacaccttaccgcgaacccgacgaatactaacgtcatttccgccacgaataacgcgcttacgccaaaacgccgatcgctatttcactcgaataacttcgcgatcgccgattaactacgtaaacacgtcgacgaaaaaacgcgcgacactacaccgcccctcccttcgcgacgcctactctataaaaccgacgaaaccgaataacttaaccaaattataaaaaaccgcaacgcgccgcaaaaccgaaccgctaaacctacaaccgccccgcgccgtaacctacgaccctaaaccccgactccctttaactcaacccgcgcgccccaaacccgacccgaacgacgcgacgaaaaaataaacgacgaacgacgaaaaaaaaaaccgcctcaaccgcaactaaccaacgaaaccctcaaaatctccgtctaaaataaaatactacgaaacgacgcgacctaaaaaaataaaatacgataaaatctaaacaaaacgcgaatacgaaaaatcgactaaaactcgaaaaacgaaaaactaacgcgaacctaccctcgtcctcgt

SEQ ID NO: 38687 - DNA, 750 bp, Artificial Sequence
  chemically treated genomic DNA (Homo sapiens) CpG-island No: 38687
gtaaggtttgggtttagtaggcgagtaggtcgtaaggaaaggtagagtcgtttttgttttattcgttgttcgaggggtagttgtggtcgattgggcgacgttgacgtttagtttcggtttttttttattttttcggtttttatagcgttttttggcgtttatgttatcgttttattaagattgtttttttttttatattttatcgcgagttcggcggatgttgacgttattttcgttacgagtagcgcgtttgcgttaaggcgtcggtcgttgttttattcggatggtttcgcggtcgtcgattggttgcgtgagtacgtcggcgggagggcgcgcgatattgtatcgttttttttttcgcggcgtttgttttgtagagtcggcggaatcgggtagtttggttaggttgtgaggaatcgtagcgcgtcgtaggatcgggtcgttgagtttgtagtcgtttcgcgtcgtgatttgcgattttagatttcgattttttttggtttagttcgcgcgttttaggttcggttcgggcggcgcgacgggaggatgagcggcgggcggcggaaggaggagtcgttttagtcgtagttggttaacggggtttttaaagttttcgtttggagtaaggtgttgcggagcgacgcggtttgggaggataaggtacggtggagtttgaatagggcgcgggtgcgaggagtcggttgggattcggggaacggaagattggcgcgggtttgttttcgttttcgt

SEQ ID NO: 38688 - DNA, 750 bp, Artificial Sequence
  chemically treated genomic DNA (Homo sapiens) CpG-island No: 38688
acgaaaacgaaaacaaacccgcgccaatcttccgttccccgaatcccaaccgactcctcgcacccgcgccctattcaaactccaccgtaccttatcctcccaaaccgcgtcgctccgcaacaccttactccaaacgaaaactttaaaaaccccgttaaccaactacgactaaaacgactcctccttccgccgcccgccgctcatcctcccgtcgcgccgcccgaaccgaacctaaaacgcgcgaactaaaccaaaaaaaatcgaaatctaaaatcgcaaatcacgacgcgaaacgactacaaactcaacgacccgatcctacgacgcgctacgattcctcacaacctaaccaaactacccgattccgccgactctacaaaacaaacgccgcgaaaaaaaaaacgatacaatatcgcgcgccctcccgccgacgtactcacgcaaccaatcgacgaccgcgaaaccatccgaataaaacaacgaccgacgccttaacgcaaacgcgctactcgtaacgaaaataacgtcaacatccgccgaactcgcgataaaatataaaaaaaaaaacaatcttaataaaacgataacataaacgccaaaaaacgctataaaaaccgaaaaaataaaaaaaaaccgaaactaaacgtcaacgtcgcccaatcgaccacaactacccctcgaacaacgaataaaacaaaaacgactctacctttccttacgacctactcgcctactaaacccaaaccttac

SEQ ID NO: 38689 - DNA, 588 bp, Artificial Sequence
  chemically treated genomic DNA (Homo sapiens) CpG-island No: 38689
tatttatacgttgtcgtcggcgggttgggcgcggggagcggtcgaggaaagtcgggttgatttgggttcggcgggcgggcggggcggggtagagggtttcgggggtacgggggaggtaagtagtacgggttattagggtttcgtcgtgtcgcggagatgatgcggggaaggagtagggtaaaggagcggcgttttcgaatgcggcgtcgcgcgtttttcgcgggtcgggcggaggcgtttatttatttgaggcgcgggtattcgtcgttagtgtagtagtagcggcggcggcggcggcggcggcggcggcggcggcggcgagaggggcgggggaggtgttgcggttcgcgtaggcgcgtcgaggacgttagggcggcgtatgagtgttgtgttcgtttatttcgggaattatcgagaagatggtggttgagttaggagaggtcggcggcgttatttttgatgtagttttttttgttgcggagtttttttagagaagaattttagattttggaggcgttgggcggtagggttattgagttttgcgtttggagcgttttttttagttttttgagtcgtatttttatgaag

SEQ ID NO: 38690 - DNA, 588 bp, Artificial Sequence
  chemically treated genomic DNA (Homo sapiens) CpG-island No: 38690
cttcataaaaatacgactcaaaaaactaaaaaaaacgctccaaacgcaaaactcaataaccctaccgcccaacgcctccaaaatctaaaattcttctctaaaaaaactccgcaacaaaaaaaactacatcaaaaataacgccgccgacctctcctaactcaaccaccatcttctcgataattcccgaaataaacgaacacaacactcatacgccgccctaacgtcctcgacgcgcctacgcgaaccgcaacacctcccccgcccctctcgccgccgccgccgccgccgccgccgccgccgccgccgctactactacactaacgacgaatacccgcgcctcaaataaataaacgcctccgcccgacccgcgaaaaacgcgcgacgccgcattcgaaaacgccgctcctttaccctactccttccccgcatcatctccgcgacacgacgaaaccctaataacccgtactacttacctcccccgtacccccgaaaccctctaccccgccccgcccgcccgccgaacccaaatcaacccgactttcctcgaccgctccccgcgcccaacccgccgacgacaacgtataaata

SEQ ID NO: 38691 - DNA, 588 bp, Artificial Sequence
  chemically treated genomic DNA (Homo sapiens) CpG-island No: 38691
ttttataaggatgcgatttagggaattgagggaagcgttttagacgtagagtttaatggttttgtcgtttagcgtttttaaaatttgagatttttttttgaggaaatttcgtagtaagaaaaattatattaaagatggcgtcgtcggttttttttggtttagttattattttttcggtagttttcgaggtggacgggtatagtatttatgcgtcgttttggcgttttcggcgcgtttgcgcggatcgtagtatttttttcgtttttttcgtcgtcgtcgtcgtcgtcgtcgtcgtcgtcgtcgtcgttgttgttgtattgacggcgggtgttcgcgttttaggtgagtgagcgttttcgttcggttcgcggggggcgcgcggcgtcgtattcgggggcgtcgtttttttgttttgtttttttttcgtattattttcgcggtacggcgaggttttggtggttcgtgttgtttgtttttttcgtgttttcggggttttttgtttcgtttcgttcgttcgtcggatttaggttagttcggtttttttcggtcgtttttcgcgtttagttcgtcggcgatagcgtgtgggta

SEQ ID NO: 38692 - DNA, 588 bp, Artificial Sequence
  chemically treated genomic DNA (Homo sapiens) CpG-island No: 38692
tacccacacgctatcgccgacgaactaaacgcgaaaaacgaccgaaaaaaaccgaactaacctaaatccgacgaacgaacgaaacgaaacaaaaaaccccgaaaacacgaaaaaaacaaacaacacgaaccaccaaaacctcgccgtaccgcgaaaataatacgaaaaaaaaacaaaacaaaaaaacgacgcccccgaatacgacgccgcgcgccccccgcgaaccgaacgaaaacgctcactcacctaaaacgcgaacacccgccgtcaatacaacaacaacgacgacgacgacgacgacgacgacgacgacgacgacgaaaaaaacgaaaaaaatactacgatccgcgcaaacgcgccgaaaacgccaaaacgacgcataaatactatacccgtccacctcgaaaactaccgaaaaaataataactaaaccaaaaaaaaccgacgacgccatctttaatataatttttcttactacgaaatttcctcaaaaaaaaatctcaaattttaaaaacgctaaacgacaaaaccattaaactctacgtctaaaacgcttccctcaattccctaaatcgcatccttataaaa

SEQ ID NO: 38693 - DNA, 502 bp, Artificial Sequence
  chemically treated genomic DNA (Homo sapiens) CpG-island No: 38693
gcgtcgggaaatggcggcggggggtaggatggaggacgtgagtgtacggaggcggcgggcggttggtttcggaattcgtttttttttgtgtcggggcgtacggggcggagatttagagagggaagttatttttggcgattgcggtcgcggtcgaaggggcgtcgtttgtgttcggggaggtttgggcgcggggttttgggagggttttaggcggttgtgggattcgcgatacgttggtttcgggttaatttttttagtggaggttggggtgggtttttgggcggtggcgcgcggttttcgggggttttacgtggcgtttagtttacgtgcggggtacgtttttgatttcggaattggtagttttacgtgatgcgcgtttgtttgatagtttttttttttcgcgagttttcgggagtcgggtcgatgggtttcgttcggacgttttaggggtatagggggcgaatttttttttttggtgaggttttttgttttggttttagag

SEQ ID NO: 38694 - DNA, 502 bp, Artificial Sequence
  chemically treated genomic DNA (Homo sapiens) CpG-island No: 38694
ctctaaaaccaaaacaaaaaacctcaccaaaaaaaaaaattcgccccctatacccctaaaacgtccgaacgaaacccatcgacccgactcccgaaaactcgcgaaaaaaaaaaactatcaaacaaacgcgcatcacgtaaaactaccaattccgaaatcaaaaacgtaccccgcacgtaaactaaacgccacgtaaaacccccgaaaaccgcgcgccaccgcccaaaaacccaccccaacctccactaaaaaaattaacccgaaaccaacgtatcgcgaatcccacaaccgcctaaaaccctcccaaaaccccgcgcccaaacctccccgaacacaaacgacgccccttcgaccgcgaccgcaatcgccaaaaataacttccctctctaaatctccgccccgtacgccccgacacaaaaaaaaacgaattccgaaaccaaccgcccgccgcctccgtacactcacgtcctccatcctaccccccgccgccatttcccgacgc

SEQ ID NO: 38695 - DNA, 502 bp, Artificial Sequence
  chemically treated genomic DNA (Homo sapiens) CpG-island No: 38695
ttttagagttaaggtaagggattttattaggaagggagattcgttttttgtgtttttgggacgttcgagcggaatttatcggttcggttttcggagattcgcggggaggaagggttgttaggtaggcgcgtattacgtgaagttgttagtttcgggattaaagacgtatttcgtacgtgggttgggcgttacgtgggattttcgggggtcgcgcgttatcgtttaggagtttattttagtttttattgggaaaattagttcggagttaacgtgtcgcggattttatagtcgtttggagtttttttaaagtttcgcgtttaggttttttcgggtataggcggcgttttttcggtcgcggtcgtagtcgttaagggtggtttttttttttgagttttcgtttcgtgcgtttcggtataagaaaaagcggatttcggggttaatcgttcgtcgttttcgtgtatttacgttttttattttgtttttcgtcgttatttttcgacgt

SEQ ID NO: 38696 - DNA, 502 bp, Artificial Sequence
  chemically treated genomic DNA (Homo sapiens) CpG-island No: 38696
acgtcgaaaaataacgacgaaaaacaaaataaaaaacgtaaatacacgaaaacgacgaacgattaaccccgaaatccgctttttcttataccgaaacgcacgaaacgaaaactcaaaaaaaaaaaccacccttaacgactacgaccgcgaccgaaaaaacgccgcctatacccgaaaaaacctaaacgcgaaactttaaaaaaactccaaacgactataaaatccgcgacacgttaactccgaactaattttcccaataaaaactaaaataaactcctaaacgataacgcgcgacccccgaaaatcccacgtaacgcccaacccacgtacgaaatacgtctttaatcccgaaactaacaacttcacgtaatacgcgcctacctaacaacccttcctccccgcgaatctccgaaaaccgaaccgataaattccgctcgaacgtcccaaaaacacaaaaaacgaatctcccttcctaataaaatcccttaccttaactctaaaa

SEQ ID NO: 38697 - DNA, 670 bp, Artificial Sequence
  chemically treated genomic DNA (Homo sapiens) CpG-island No: 38697
agttttcgttcgcgttcgtttaggattgcgggtatagcgtttcgttacgtttcgtattttttatttttcgtcggtttcggttttgtttttagagttgcgttcgcggtcggcgatacgcgcgtagcgtcgttattcgtagcggcgtagtcgttcgttcgtttatttacgcgggaggtagcggcggcgtttttattgtggtttttttcgggttttagaacgtaggtatcgattaatatagttagtattattttagtcgcggacgtcggtattgttcgttcgtcgagtcgcgttttattcgtttcggaggggggtcgcgttttttttatcgcgcgttattatttgcggcggcggttttcgcggttatgtgtcgttcggtcgggcgcgtttcgtttattgcgcggttttcgttcgttcgagtgcggggcggcggcgacgggatcggcgggcgcgcgggttcggttattttcgggttcggtttcgtcggcgtcgacgttgtgacgggattgcgatgcggtttttcgcggcggtcgagtatttttttttcggcgtttttttttttttttgttgttgttgttgtcgttgtcgttgtcgtttttgtttttggaggcgggcgggcgggcgttagtcgggtgcggggcgggcgtgtttagacgttggttcgtaggtcggg

SEQ ID NO: 38698 - DNA, 670 bp, Artificial Sequence
  chemically treated genomic DNA (Homo sapiens) CpG-island No: 38698
cccgacctacgaaccaacgtctaaacacgcccgccccgcacccgactaacgcccgcccgcccgcctccaaaaacaaaaacgacaacgacaacgacaacaacaacaacaaaaaaaaaaaaaaacgccgaaaaaaaaatactcgaccgccgcgaaaaaccgcatcgcaatcccgtcacaacgtcgacgccgacgaaaccgaacccgaaaataaccgaacccgcgcgcccgccgatcccgtcgccgccgccccgcactcgaacgaacgaaaaccgcgcaataaacgaaacgcgcccgaccgaacgacacataaccgcgaaaaccgccgccgcaaataataacgcgcgataaaaaaaacgcgacccccctccgaaacgaataaaacgcgactcgacgaacgaacaataccgacgtccgcgactaaaataatactaactatattaatcgatacctacgttctaaaacccgaaaaaaaccacaataaaaacgccgccgctacctcccgcgtaaataaacgaacgaacgactacgccgctacgaataacgacgctacgcgcgtatcgccgaccgcgaacgcaactctaaaaacaaaaccgaaaccgacgaaaaataaaaaatacgaaacgtaacgaaacgctatacccgcaatcctaaacgaacgcgaacgaaaact

SEQ ID NO: 38699 - DNA, 670 bp, Artificial Sequence
  chemically treated genomic DNA (Homo sapiens) CpG-island No: 38699
ttcggtttgcgggttagcgtttgggtacgttcgtttcgtattcggttggcgttcgttcgttcgtttttagaagtagaagcggtagcggtagcggtagtagtagtagtaggaggaaggggaggcgtcgagggaggggtattcggtcgtcgcgggaggtcgtatcgtagtttcgttatagcgtcggcgtcggcggggtcgaattcggaagtggtcgagttcgcgcgttcgtcggtttcgtcgtcgtcgtttcgtattcgggcgaacgggagtcgcgtagtagacggagcgcgttcggtcgagcggtatatggtcgcgggggtcgtcgtcgtaggtggtggcgcgcggtgaggagagcgcggttttttttcggggcggatggaacgcggttcggcgggcgggtagtgtcggcgttcgcggttggaatggtgttggttgtgttggtcggtgtttgcgttttgaagttcgagaggagttataatggagacgtcgtcgttgtttttcgcgtgagtgagcgggcgggcggttgcgtcgttgcggataacggcgttgcgcgcgtgtcgtcggtcgcgggcgtagttttggggataaggtcggggtcggcgggaggtgggagatgcggggcgtgacgaggcgttgtgttcgtagttttgagcggacgcggacggaaatt

SEQ ID NO: 38700 - DNA, 670 bp, Artificial Sequence
  chemically treated genomic DNA (Homo sapiens) CpG-island No: 38700
aatttccgtccgcgtccgctcaaaactacgaacacaacgcctcgtcacgccccgcatctcccacctcccgccgaccccgaccttatccccaaaactacgcccgcgaccgacgacacgcgcgcaacgccgttatccgcaacgacgcaaccgcccgcccgctcactcacgcgaaaaacaacgacgacgtctccattataactcctctcgaacttcaaaacgcaaacaccgaccaacacaaccaacaccattccaaccgcgaacgccgacactacccgcccgccgaaccgcgttccatccgccccgaaaaaaaaccgcgctctcctcaccgcgcgccaccacctacgacgacgacccccgcgaccatataccgctcgaccgaacgcgctccgtctactacgcgactcccgttcgcccgaatacgaaacgacgacgacgaaaccgacgaacgcgcgaactcgaccacttccgaattcgaccccgccgacgccgacgctataacgaaactacgatacgacctcccgcgacgaccgaatacccctccctcgacgcctccccttcctcctactactactactaccgctaccgctaccgcttctacttctaaaaacgaacgaacgaacgccaaccgaatacgaaacgaacgtacccaaacgctaacccgcaaaccgaa

SEQ ID NO: 38701 - DNA, 615 bp, Artificial Sequence
  chemically treated genomic DNA (Homo sapiens) CpG-island No: 38701
tacgcgcgacggttcgggagtacggatttttgtttttcgtagtatcgtttttcgggtggagtcggcggtttcgtttcgtagagttggggttgtatttggggtaacggggtcgggtttggacgttaggtcggaggagtagtatttgttaggagtacgtttcgtcggtaggtcgtaggagttttgggagtcgtcgttatgggtacgttcggcgggtggggggtcggtcgggttaaagattcggagttacgcggggcgggggtcggtatcgagggtcgggaggcgcgaagggtacgcggcggcgggaagcggggcgattcgaaggtttacgggggtcgggaggttgcggggcgttcgggattttttttcgggtggttatcgtgcggtcggggcgcggaagttagaggtgtttagaggcgtcgatttcgtcgaggttgcgattttggttcgttcgttcgtggggtattgtaattttcgtatttttattttgcgggtcgggagtgcgtttggagcgggacgggatttagcgggtgacggtaggggcggtagaaatatcgtttaattggcggaagttttgtggttgtttttgtatttgttttgtttttggttggcgaggtg

SEQ ID NO: 38702 - DNA, 615 bp, Artificial Sequence
  chemically treated genomic DNA (Homo sapiens) CpG-island No: 38702
cacctcgccaaccaaaaacaaaacaaatacaaaaacaaccacaaaacttccgccaattaaacgatatttctaccgcccctaccgtcacccgctaaatcccgtcccgctccaaacgcactcccgacccgcaaaataaaaatacgaaaattacaataccccacgaacgaacgaaccaaaatcgcaacctcgacgaaatcgacgcctctaaacacctctaacttccgcgccccgaccgcacgataaccacccgaaaaaaaatcccgaacgccccgcaacctcccgacccccgtaaaccttcgaatcgccccgcttcccgccgccgcgtacccttcgcgcctcccgaccctcgataccgacccccgccccgcgtaactccgaatctttaacccgaccgaccccccacccgccgaacgtacccataacgacgactcccaaaactcctacgacctaccgacgaaacgtactcctaacaaatactactcctccgacctaacgtccaaacccgaccccgttaccccaaatacaaccccaactctacgaaacgaaaccgccgactccacccgaaaaacgatactacgaaaaacaaaaatccgtactcccgaaccgtcgcgcgta

SEQ ID NO: 38703 - DNA, 615 bp, Artificial Sequence
  chemically treated genomic DNA (Homo sapiens) CpG-island No: 38703
tatttcgttagttagaggtaagataagtgtaaaggtagttataaggttttcgttagttagacggtgtttttgtcgtttttgtcgttattcgttgggtttcgtttcgttttaagcgtattttcggttcgtagggtgggaatacgaggattatagtgttttacgggcgggcgggttaggatcgtaatttcggcggagtcggcgtttttgggtatttttggttttcgcgtttcggtcgtacggtgattattcgggaggggatttcgggcgtttcgtaatttttcggttttcgtgggttttcgggtcgtttcgtttttcgtcgtcgcgtatttttcgcgtttttcggttttcggtgtcggttttcgtttcgcgtagtttcgagtttttagttcggtcggttttttattcgtcgagcgtatttatggcggcggtttttagggtttttgcgatttgtcggcgggacgtgtttttggtaggtgttattttttcgatttgacgtttaggttcggtttcgttgttttaggtatagttttagttttgcgaggcggggtcgtcggttttattcggggggcggtgttgcggggagtagaggttcgtgttttcgagtcgtcgcgcgtg

SEQ ID NO: 38704 - DNA, 615 bp, Artificial Sequence
  chemically treated genomic DNA (Homo sapiens) CpG-island No: 38704
cacgcgcgacgactcgaaaacacgaacctctactccccgcaacaccgccccccgaataaaaccgacgaccccgcctcgcaaaactaaaactatacctaaaacaacgaaaccgaacctaaacgtcaaatcgaaaaaataacacctaccaaaaacacgtcccgccgacaaatcgcaaaaaccctaaaaaccgccgccataaatacgctcgacgaataaaaaaccgaccgaactaaaaactcgaaactacgcgaaacgaaaaccgacaccgaaaaccgaaaaacgcgaaaaatacgcgacgacgaaaaacgaaacgacccgaaaacccacgaaaaccgaaaaattacgaaacgcccgaaatcccctcccgaataatcaccgtacgaccgaaacgcgaaaaccaaaaatacccaaaaacgccgactccgccgaaattacgatcctaacccgcccgcccgtaaaacactataatcctcgtattcccaccctacgaaccgaaaatacgcttaaaacgaaacgaaacccaacgaataacgacaaaaacgacaaaaacaccgtctaactaacgaaaaccttataactacctttacacttatcttacctctaactaacgaaata

SEQ ID NO: 38705 - DNA, 666 bp, Artificial Sequence
  chemically treated genomic DNA (Homo sapiens) CpG-island No: 38705
  unsure (174)
ggggatttacgggtcgatttgtaatttaatataagttttttaagttttgcggttttaaaataacgtttattcggcggtgcgtcgttttcgttatttttacgtttgtttggattcggattcgagattttggcggcgggtcgggtttttttcgtttgagtagggacgcggcgagtnattttacgattttcggtagtcgttgtaggtttggcggatttatattttatatttttacggtcgcgttttcgtcgcggggtagggcgaggatacggcgttttgcgtatttagtgatcgggtcgttttggttttcgtgcgtacgtagtattacgtgatttattgttagtatttaagatggacgtcgcgagtttggtcggtttttcgcgttagttttattttattgtgtgttttttaagcgcgaattaggttcgtagatagtcgggtcgtgatcgttaggtagttatgcgggttatcgagtgcgattagagaacgtcggggttcgtgttatacgtattattgttttcgttttcgtttttttaatcggaagtatttacgtcggttttggagcgttttttgtacgttttattttttagaattgtagttttagtagttaatgaggtttaggacgcgtgcggggaggcggataggggtaagtttttttgtcgtttatag

SEQ ID NO: 38706 - DNA, 666 bp, Artificial Sequence
  chemically treated genomic DNA (Homo sapiens) CpG-island No: 38706
  unsure (493)
ctataaacgacaaaaaaacttacccctatccgcctccccgcacgcgtcctaaacctcattaactactaaaactacaattctaaaaaataaaacgtacaaaaaacgctccaaaaccgacgtaaatacttccgattaaaaaaacgaaaacgaaaacaataatacgtataacacgaaccccgacgttctctaatcgcactcgataacccgcataactacctaacgatcacgacccgactatctacgaacctaattcgcgcttaaaaaacacacaataaaataaaactaacgcgaaaaaccgaccaaactcgcgacgtccatcttaaatactaacaataaatcacgtaatactacgtacgcacgaaaaccaaaacgacccgatcactaaatacgcaaaacgccgtatcctcgccctaccccgcgacgaaaacgcgaccgtaaaaatataaaatataaatccgccaaacctacaacgactaccgaaaatcgtaaaatnactcgccgcgtccctactcaaacgaaaaaaacccgacccgccgccaaaatctcgaatccgaatccaaacaaacgtaaaaataacgaaaacgacgcaccgccgaataaacgttattttaaaaccgcaaaacttaaaaaacttatattaaattacaaatcgacccgtaaatcccc

SEQ ID NO: 38707 - DNA, 666 bp, Artificial Sequence
  chemically treated genomic DNA (Homo sapiens) CpG-island No: 38707
  unsure (493)
ttatgagcggtagagaggtttatttttgttcgttttttcgtacgcgttttggattttattggttgttggagttgtaattttagagggtggggcgtataaaagacgttttagggtcgacgtgggtgttttcggttgaggaggcgaggacgggggtagtagtgcgtataatacgggtttcggcgttttttggtcgtattcggtagttcgtatggttgtttagcggttacgattcgattgtttgcgagtttaattcgcgtttagagggtatataatggggtgaggttaacgcggggagtcggttaggttcgcggcgtttattttggatattggtagtgggttacgtggtgttgcgtgcgtacggaggttagggcggttcggttattgagtgcgtaaggcgtcgtgttttcgttttgtttcgcggcgggaacgcggtcgtgagggtgtggggtgtaggttcgttaggtttgtaacggttgtcgagggtcgtgggatngttcgtcgcgtttttgtttaggcggagggagttcggttcgtcgttagggtttcgagttcgggtttaggtaggcgtggaggtggcgggaacggcgtatcgtcgggtgggcgttgttttaaggtcgtagggtttgggaggtttgtgttgagttataggtcggttcgtagattttt

SEQ ID NO: 38708 - DNA, 666 bp, Artificial Sequence
  chemically treated genomic DNA (Homo sapiens) CpG-island No: 38708
  unsure (174)
aaaaatctacgaaccgacctataactcaacacaaacctcccaaaccctacgaccttaaaacaacgcccacccgacgatacgccgttcccgccacctccacgcctacctaaacccgaactcgaaaccctaacgacgaaccgaactccctccgcctaaacaaaaacgcgacgaacnatcccacgaccctcgacaaccgttacaaacctaacgaacctacaccccacaccctcacgaccgcgttcccgccgcgaaacaaaacgaaaacacgacgccttacgcactcaataaccgaaccgccctaacctccgtacgcacgcaacaccacgtaacccactaccaatatccaaaataaacgccgcgaacctaaccgactccccgcgttaacctcaccccattatataccctctaaacgcgaattaaactcgcaaacaatcgaatcgtaaccgctaaacaaccatacgaactaccgaatacgaccaaaaaacgccgaaacccgtattatacgcactactacccccgtcctcgcctcctcaaccgaaaacacccacgtcgaccctaaaacgtcttttatacgccccaccctctaaaattacaactccaacaaccaataaaatccaaaacgcgtacgaaaaaacgaacaaaaataaacctctctaccgctcataa

SEQ ID NO: 38709 - DNA, 738 bp, Artificial Sequence
  chemically treated genomic DNA (Homo sapiens) CpG-island No: 38709
gtttcgtagtggcgttttattttttcggtttttttcggttgtaggaattttacggaacggttcggttcggttgagacgtcggtttaggttgtttttcgttttttaggttcgaatttttttttttcgttcgttaggtttcgtttcgggatttcgtgtttttgttagtcggttgcgttcgtatttgtcggattcggtgtagggtatttacgaagttttcggtttttatttttataggagcgttttgtttttgtattagtttcgttattatcgttttcgtcgtcgtcgtcgtcgtcgtcgacgtcgtcgacgtcgtcgttcggtttttcggttcggtttttcgtttcgtttggggattcgtagtcggaaaaggaaagtcgttttattttcggcggaagggaaagtcgggacgttcgtagttggaggagtcgcgtttgcggggcggggttagggtacgtgattttcgatcgatcggaagtgggggcgggacggtagcgtcggggtgggtttagatcgttaggtagtcgtgggtttttagggttcggtcgcgattttttttttttcgggcgggatttggtttaggatcgtcgatggcgttttgataggttttcgaggtttggatgtggtttcgaggtgttcgttgtcggtcgtttggaattttagagggattgacgtggtttttttaagacggtatttcgaatagtcgtggtttattaaaagtttggttttgggtagtttttt

SEQ ID NO: 38710 - DNA, 738 bp, Artificial Sequence
  chemically treated genomic DNA (Homo sapiens) CpG-island No: 38710
aaaaaactacccaaaaccaaacttttaataaaccacgactattcgaaataccgtcttaaaaaaaccacgtcaatccctctaaaattccaaacgaccgacaacgaacacctcgaaaccacatccaaacctcgaaaacctatcaaaacgccatcgacgatcctaaaccaaatcccgcccgaaaaaaaaaaaatcgcgaccgaaccctaaaaacccacgactacctaacgatctaaacccaccccgacgctaccgtcccgcccccacttccgatcgatcgaaaatcacgtaccctaaccccgccccgcaaacgcgactcctccaactacgaacgtcccgactttcccttccgccgaaaataaaacgactttccttttccgactacgaatccccaaacgaaacgaaaaaccgaaccgaaaaaccgaacgacgacgtcgacgacgtcgacgacgacgacgacgacgacgaaaacgataataacgaaactaatacaaaaacaaaacgctcctataaaaataaaaaccgaaaacttcgtaaataccctacaccgaatccgacaaatacgaacgcaaccgactaacaaaaacacgaaatcccgaaacgaaacctaacgaacgaaaaaaaaaaattcgaacctaaaaaacgaaaaacaacctaaaccgacgtctcaaccgaaccgaaccgttccgtaaaattcctacaaccgaaaaaaaccgaaaaaataaaacgccactacgaaac

SEQ ID NO: 38711 - DNA, 738 bp, Artificial Sequence
  chemically treated genomic DNA (Homo sapiens) CpG-island No: 38711
gaggggttatttaggattaggtttttgatgaattacgattgttcggggtgtcgttttgggagagttacgttagtttttttgagattttaaacggtcgatagcggatatttcgggattatatttaagtttcggggatttgttaagacgttatcgacggttttggattaaatttcgttcgggaagggaagggtcgcgatcggattttggagatttacggttgtttggcgatttgagtttatttcggcgttgtcgtttcgtttttattttcgatcggtcgaaggttacgtgttttgatttcgtttcgtagacgcgatttttttagttgcgagcgtttcggttttttttttcgtcggaagtagggcgatttttttttttcggttacgggtttttaagcggagcgggaggtcggatcggggagtcgagcggcggcgtcggcggcgtcggcggcggcggcgacggcggcgggggcggtaatggcggagttggtgtaggggtagagcgtttttgtggggatgaaggtcgagggtttcgtggatgttttgtatcgggttcggtaggtacgggcgtagtcggttggtaggagtacgagatttcgaggcggggtttggcgggcggggaagaggggttcgggtttggggggcgggaggtagtttgaatcgacgttttagtcgggtcgggtcgtttcgtggagtttttatagtcgggaggagtcggggggataaggcgttattgcgaggt

SEQ ID NO: 38712 - DNA, 738 bp, Artificial Sequence
  chemically treated genomic DNA (Homo sapiens) CpG-island No: 38712
acctcgcaataacgccttatccccccgactcctcccgactataaaaactccacgaaacgacccgacccgactaaaacgtcgattcaaactacctcccgccccccaaacccgaacccctcttccccgcccgccaaaccccgcctcgaaatctcgtactcctaccaaccgactacgcccgtacctaccgaacccgatacaaaacatccacgaaaccctcgaccttcatccccacaaaaacgctctacccctacaccaactccgccattaccgcccccgccgccgtcgccgccgccgccgacgccgccgacgccgccgctcgactccccgatccgacctcccgctccgcttaaaaacccgtaaccgaaaaaaaaaaatcgccctacttccgacgaaaaaaaaaaccgaaacgctcgcaactaaaaaaatcgcgtctacgaaacgaaatcaaaacacgtaaccttcgaccgatcgaaaataaaaacgaaacgacaacgccgaaataaactcaaatcgccaaacaaccgtaaatctccaaaatccgatcgcgacccttcccttcccgaacgaaatttaatccaaaaccgtcgataacgtcttaacaaatccccgaaacttaaatataatcccgaaatatccgctatcgaccgtttaaaatctcaaaaaaactaacgtaactctcccaaaacgacaccccgaacaatcgtaattcatcaaaaacctaatcctaaataacccctc

SEQ ID NO: 38713 - DNA, 804 bp, Artificial Sequence
  chemically treated genomic DNA (Homo sapiens) CpG-island No: 38713
tttggggtcgcgacgtcgtaagagttgggacgataggattagtagaagtaggaggaataatataggaagcgcgttcggagaggcggttagtcgttgggtttcgttcgcggtgttttagggtttttttggttttttttttatttatttttttcgattttgtggtcggggagcgtttgtagttagtttcgtcgtcgttttttttggttcgcgtcgttttttagtcgtttttacgtcgtttttttatttagggtttttttttcgtattcgcgttatttttttagcgttttttacggtttttttatcgttcgcgttcgttcgaaaatgtttagagttatcgttttcgttacggttcgttttaggtttttattggttagtatacgttacgtgcggcgtgtggcggttgatattggcgggcgggcgcgttgagggtagcgtcggggacgcggttttagtaggggcgtttcgttacggggagtagtttaggcgttcgttttaggacgttgttcggcgggttgggttgggatttttttgtttttagggcgcgtcgggagtagtagggatcggtgtcgcgtcgtgagggtgcgtagaggttgttttcgggttcgttatttatagatttttcgcggggtagcgttttcgggtcggtcgcgttttggttcgtcgatcgtagacgatttgtgatacggacggcgcgttttgttgattttagtcggcgtcgagggtttggaatttcgagcgggaaaaggttcggaattcgtagttagtttagtcgtatatttagtatggtttttttagatttgtttt

SEQ ID NO: 38714 - DNA, 804 bp, Artificial Sequence
  chemically treated genomic DNA (Homo sapiens) CpG-island No: 38714
aaaacaaatctaaaaaaaccatactaaatatacgactaaactaactacgaattccgaaccttttcccgctcgaaattccaaaccctcgacgccgactaaaatcaacaaaacgcgccgtccgtatcacaaatcgtctacgatcgacgaaccaaaacgcgaccgacccgaaaacgctaccccgcgaaaaatctataaataacgaacccgaaaacaacctctacgcaccctcacgacgcgacaccgatccctactactcccgacgcgccctaaaaacaaaaaaatcccaacccaacccgccgaacaacgtcctaaaacgaacgcctaaactactccccgtaacgaaacgcccctactaaaaccgcgtccccgacgctaccctcaacgcgcccgcccgccaatatcaaccgccacacgccgcacgtaacgtatactaaccaataaaaacctaaaacgaaccgtaacgaaaacgataactctaaacattttcgaacgaacgcgaacgataaaaaaaccgtaaaaaacgctaaaaaaataacgcgaatacgaaaaaaaaaccctaaataaaaaaacgacgtaaaaacgactaaaaaacgacgcgaaccaaaaaaaacgacgacgaaactaactacaaacgctccccgaccacaaaatcgaaaaaaataaataaaaaaaaaaccaaaaaaaccctaaaacaccgcgaacgaaacccaacgactaaccgcctctccgaacgcgcttcctatattattcctcctacttctactaatcctatcgtcccaactcttacgacgtcgcgaccccaaa

SEQ ID NO: 38715 - DNA, 804 bp, Artificial Sequence
  chemically treated genomic DNA (Homo sapiens) CpG-island No: 38715
aaaataaatttgaaagaattatattgagtgtgcggttaaattagttgcgaatttcgaattttttttcgttcgagattttaagttttcggcgtcggttggggttagtaggacgcgtcgttcgtgttataagtcgtttgcggtcggcggattagggcgcggtcggttcggagacgttgtttcgcggagggtttgtgggtagcgggttcgagggtagtttttgcgtatttttacggcgcggtatcgatttttgttgttttcgacgcgttttggaggtagaggggttttagtttagttcgtcggataacgttttggggcgagcgtttgggttgtttttcgtggcggggcgtttttgttgaggtcgcgttttcggcgttgtttttagcgcgttcgttcgttaatgttagtcgttatacgtcgtacgtgacgtgtgttggttaatggaggtttgaagcggatcgtgacgagagcggtggttttgggtattttcgaacgggcgcgggcggtgagggaatcgtgagggacgttgaggggatggcgcgggtgcggaaaggggattttaagtaaggggacggcgtgaggacggttaggggacggcgcgagttaagaaggacggcggcggagttggttgtaagcgtttttcggttatagggtcgagaagagtgaatggaggaagagttaggagagttttggagtatcgcggacggaatttagcgattggtcgttttttcgggcgcgttttttgtgttgttttttttgtttttattggttttatcgttttaatttttacggcgtcgcggttttagg

SEQ ID NO: 38716 - DNA, 804 bp, Artificial Sequence
  chemically treated genomic DNA (Homo sapiens) CpG-island No: 38716
cctaaaaccgcgacgccgtaaaaattaaaacgataaaaccaataaaaacaaaaaaaacaacacaaaaaacgcgcccgaaaaaacgaccaatcgctaaattccgtccgcgatactccaaaactctcctaactcttcctccattcactcttctcgaccctataaccgaaaaacgcttacaaccaactccgccgccgtccttcttaactcgcgccgtcccctaaccgtcctcacgccgtccccttacttaaaatcccctttccgcacccgcgccatcccctcaacgtccctcacgattccctcaccgcccgcgcccgttcgaaaatacccaaaaccaccgctctcgtcacgatccgcttcaaacctccattaaccaacacacgtcacgtacgacgtataacgactaacattaacgaacgaacgcgctaaaaacaacgccgaaaacgcgacctcaacaaaaacgccccgccacgaaaaacaacccaaacgctcgccccaaaacgttatccgacgaactaaactaaaacccctctacctccaaaacgcgtcgaaaacaacaaaaatcgataccgcgccgtaaaaatacgcaaaaactaccctcgaacccgctacccacaaaccctccgcgaaacaacgtctccgaaccgaccgcgccctaatccgccgaccgcaaacgacttataacacgaacgacgcgtcctactaaccccaaccgacgccgaaaacttaaaatctcgaacgaaaaaaaattcgaaattcgcaactaatttaaccgcacactcaatataattctttcaaatttatttt

SEQ ID NO: 38717 - DNA, 593 bp, Artificial Sequence
  chemically treated genomic DNA (Homo sapiens) CpG-island No: 38717
  unsure (465, 467)
ggacgcgttttttttttgggattattattcgcgggttagtatagacggttcgttttcgttcggcgtttaattgtacggttcgaggattttgtttttgcgcgttttattttcggtattcggaattttacggttatttattttgcgcgtaggattcggaagggttaggcgggggcgcggcggtgtagtttttttcgagcgcgttgggtcgtttttgttcggtttggggtttgttaggcgcgattttttcggtgtagtcgagttttttcgtagattttgcgtaggaaagcgaaattattcggtaggagaaaaggtagcgttggcgttcggttttttttcgtttttattaattatcgggcggtttcgcgtttagttaattagacgcggttgtttcgtgggcgttatcgtttttttttgcgggtcgttgtttcgtttacgcgttggggtattttcgtcggttttcggagngntcgtcgggttgggtgagttgtagtttagtttcgtgttgttacgttgggaattggcgttttgtttatatattttagagaacgattagaaggacgtgttgtgtttgtagaagtttaaatttggaggtt

SEQ ID NO: 38718 - DNA, 593 bp, Artificial Sequence
  chemically treated genomic DNA (Homo sapiens) CpG-island No: 38718
  unsure (127, 129)
aacctccaaatttaaacttctacaaacacaacacgtccttctaatcgttctctaaaatatataaacaaaacgccaattcccaacgtaacaacacgaaactaaactacaactcacccaacccgacgancnctccgaaaaccgacgaaaataccccaacgcgtaaacgaaacaacgacccgcaaaaaaaaacgataacgcccacgaaacaaccgcgtctaattaactaaacgcgaaaccgcccgataattaataaaaacgaaaaaaaaccgaacgccaacgctaccttttctcctaccgaataatttcgctttcctacgcaaaatctacgaaaaaactcgactacaccgaaaaaatcgcgcctaacaaaccccaaaccgaacaaaaacgacccaacgcgctcgaaaaaaactacaccgccgcgcccccgcctaacccttccgaatcctacgcgcaaaataaataaccgtaaaattccgaataccgaaaataaaacgcgcaaaaacaaaatcctcgaaccgtacaattaaacgccgaacgaaaacgaaccgtctatactaacccgcgaataataatcccaaaaaaaaaacgcgtcc

SEQ ID NO: 38719 - DNA, 593 bp, Artificial Sequence
  chemically treated genomic DNA (Homo sapiens) CpG-island No: 38719
  unsure (127, 129)
gatttttaagtttgggtttttgtaaatatagtacgtttttttgatcgttttttaagatatgtaaatagaacgttagtttttagcgtggtaatacgggattgggttgtagtttatttagttcggcggntntttcggaagtcggcggaaatattttagcgcgtgggcggagtagcggttcgtagagggaggcggtggcgtttacggaatagtcgcgtttaattggttgagcgcggagtcgttcggtgattggtgggggcggaagggggtcgggcgttagcgttgtttttttttttgtcgggtagtttcgtttttttgcgtagagtttgcggaggggttcggttgtatcggggggatcgcgtttggtagattttagatcgagtagaggcgatttagcgcgttcgggagaggttgtatcgtcgcgttttcgtttagttttttcggattttgcgcgtagagtgagtggtcgtgaggtttcgggtgtcgggggtgggacgcgtagggatagagttttcgggtcgtgtagttggacgtcgggcgaggacgggtcgtttgtgttgattcgcgaatagtgattttagaggaagaacgcgttt

SEQ ID NO: 38720 - DNA, 593 bp, Artificial Sequence
  chemically treated genomic DNA (Homo sapiens) CpG-island No: 38720
  unsure (465, 467)
aaacgcgttcttcctctaaaatcactattcgcgaatcaacacaaacgacccgtcctcgcccgacgtccaactacacgacccgaaaactctatccctacgcgtcccacccccgacacccgaaacctcacgaccactcactctacgcgcaaaatccgaaaaaactaaacgaaaacgcgacgatacaacctctcccgaacgcgctaaatcgcctctactcgatctaaaatctaccaaacgcgatccccccgatacaaccgaacccctccgcaaactctacgcaaaaaaacgaaactacccgacaaaaaaaaaaacaacgctaacgcccgacccccttccgcccccaccaatcaccgaacgactccgcgctcaaccaattaaacgcgactattccgtaaacgccaccgcctccctctacgaaccgctactccgcccacgcgctaaaatatttccgccgacttccgaaananccgccgaactaaataaactacaacccaatcccgtattaccacgctaaaaactaacgttctatttacatatcttaaaaaacgatcaaaaaaacgtactatatttacaaaaacccaaacttaaaaatc

SEQ ID NO: 38721 - DNA, 577 bp, Artificial Sequence
  chemically treated genomic DNA (Homo sapiens) CpG-island No: 38721
tgcgtgtgttaggtggtgtcggttttttggagtgttcgtttcgtttattagggttgacggtcggcgtcgagttttttacggtttgtttagttcgaatcgatacgacgtgggtgacgttcgttttatttttttatttatatcggatcgtttaagttttcgttcggggattcgagttcgttcgacgcgaatttggatttttcgttttcgtgtcgacggggcgagtgttacgacggacggtcggtcgggagttcggggatcgatttatttttgataggttacgacgacgtcgtttcgtgaattcgtgggatcggttacgtcggggaggcgatcgattcgtgattaggtcgacggtcgaatcggttaaggttgcggggcgacgagggttaattattatcgtgattatagcgagggggtcgtagagtagagggattgagattaaagcgggaaatatttattattcgatcgaggacgagattagttcgatcgacgtggaggttttaggggattatataatgagttttttaaggacgtttttggttaatgtatttttttgttttagatgtttatatgtacgtaa

SEQ ID NO: 38722 - DNA, 577 bp, Artificial Sequence
  chemically treated genomic DNA (Homo sapiens) CpG-island No: 38722
ttacgtacatataaacatctaaaacaaaaaaatacattaaccaaaaacgtccttaaaaaactcattatataatcccctaaaacctccacgtcgatcgaactaatctcgtcctcgatcgaataataaatatttcccgctttaatctcaatccctctactctacgaccccctcgctataatcacgataataattaaccctcgtcgccccgcaaccttaaccgattcgaccgtcgacctaatcacgaatcgatcgcctccccgacgtaaccgatcccacgaattcacgaaacgacgtcgtcgtaacctatcaaaaataaatcgatccccgaactcccgaccgaccgtccgtcgtaacactcgccccgtcgacacgaaaacgaaaaatccaaattcgcgtcgaacgaactcgaatccccgaacgaaaacttaaacgatccgatataaataaaaaaataaaacgaacgtcacccacgtcgtatcgattcgaactaaacaaaccgtaaaaaactcgacgccgaccgtcaaccctaataaacgaaacgaacactccaaaaaaccgacaccacctaacacacgca

SEQ ID NO: 38723 - DNA, 577 bp, Artificial Sequence
  chemically treated genomic DNA (Homo sapiens) CpG-island No: 38723
ttacgtatatataaatatttggaataggggagtatattgattagggacgtttttgagggatttattgtatagttttttgagatttttacgtcggtcggattggtttcgttttcggtcgagtggtgagtgtttttcgttttaattttagtttttttgttttacgattttttcgttgtagttacgatggtagttgattttcgtcgtttcgtaattttgatcgattcgatcgtcgatttggttacgggtcggtcgttttttcgacgtaatcggttttacgaatttacgagacgacgtcgtcgtgatttgttaggggtgagtcggttttcggattttcggtcggtcgttcgtcgtggtattcgtttcgtcgatacgggagcgggaggtttaagttcgcgtcgagcgaattcggattttcggacggggatttgggcggttcggtgtgggtggagaggtggggcgaacgttatttacgtcgtgtcggttcggattggataaatcgtgggagattcgacgtcgatcgttaattttggtgaacgagacggatattttaaggaatcggtattatttggtatacgta

SEQ ID NO: 38724 - DNA, 577 bp, Artificial Sequence
  chemically treated genomic DNA (Homo sapiens) CpG-island No: 38724
tacgtataccaaataataccgattccttaaaatatccgtctcgttcaccaaaattaacgatcgacgtcgaatctcccacgatttatccaatccgaaccgacacgacgtaaataacgttcgccccacctctccacccacaccgaaccgcccaaatccccgtccgaaaatccgaattcgctcgacgcgaacttaaacctcccgctcccgtatcgacgaaacgaataccacgacgaacgaccgaccgaaaatccgaaaaccgactcacccctaacaaatcacgacgacgtcgtctcgtaaattcgtaaaaccgattacgtcgaaaaaacgaccgacccgtaaccaaatcgacgatcgaatcgatcaaaattacgaaacgacgaaaatcaactaccatcgtaactacaacgaaaaaatcgtaaaacaaaaaaactaaaattaaaacgaaaaacactcaccactcgaccgaaaacgaaaccaatccgaccgacgtaaaaatctcaaaaaactatacaataaatccctcaaaaacgtccctaatcaatatactcccctattccaaatatttatatatacgtaa

SEQ ID NO: 38725 - DNA, 583 bp, Artificial Sequence
  chemically treated genomic DNA (Homo sapiens) CpG-island No: 38725
  unsure (326)
atatcgcgtggggagatgtgatagtatttcgtcggttcgatatagcgtggtgagttggtatattttattcgtcgatttaatatttcgtggtgagttggtattttttattcgtcggttcgatatagcgttgtgagtttggatagtttcgacggatcgatatttcgtggtgagatgggatagtatatcgtcggatcgatatagcgtggtgagttgggatagtttttttaggatcgaatcgtgaatgtgtcgagttttttatcgaatcgatcgtcgttttatttttattttttacgtacgatatatgagcggagtcgagtggacggttntcgagatttacgagttatttaagtatagtggttgtcgaatgggtcgaggtgtttatcggtatcgttcgttatgagttcgttttatttcgtttataggtcggttcggaagagacgtaaaggggttgtggaggaaaaggattgatcgattcgtcgcgaagttcgaatgcgacgagtttcgatcgttattgattataatgatcgatttattttcgatttacgttatattcgacgattagattcgacgttgtcgtgaagat

SEQ ID NO: 38726 - DNA, 583 bp, Artificial Sequence
  chemically treated genomic DNA (Homo sapiens) CpG-island No: 38726
  unsure (258)
atcttcacgacaacgtcgaatctaatcgtcgaatataacgtaaatcgaaaataaatcgatcattataatcaataacgatcgaaactcgtcgcattcgaacttcgcgacgaatcgatcaatccttttcctccacaacccctttacgtctcttccgaaccgacctataaacgaaataaaacgaactcataacgaacgataccgataaacacctcgacccattcgacaaccactatacttaaataactcgtaaatctcganaaccgtccactcgactccgctcatatatcgtacgtaaaaaataaaaataaaacgacgatcgattcgataaaaaactcgacacattcacgattcgatcctaaaaaaactatcccaactcaccacgctatatcgatccgacgatatactatcccatctcaccacgaaatatcgatccgtcgaaactatccaaactcacaacgctatatcgaaccgacgaataaaaaataccaactcaccacgaaatattaaatcgacgaataaaatataccaactcaccacgctatatcgaaccgacgaaatactatcacatctccccacgcgatat

SEQ ID NO: 38727 - DNA, 583 bp, Artificial Sequence
  chemically treated genomic DNA (Homo sapiens) CpG-island No: 38727
  unsure (258)
atttttacggtaacgtcgagtttagtcgtcggatgtggcgtgagtcgaaggtgggtcggttattgtggttagtgacggtcgggattcgtcgtattcggatttcgcggcggatcggttagttttttttttttatagtttttttgcgtttttttcggatcggtttgtggacggggtaaggcgaatttatggcggacggtgtcggtgggtatttcggtttattcgatagttattgtgtttgagtgattcgtgaatttcggngatcgtttattcgatttcgtttatgtgtcgtgcgtagaaggtggaggtgggacggcggtcggttcggtgggaaattcggtatatttacggttcggttttggaggggttgttttaatttattacgttgtgtcggttcggcggtatgttgttttattttattacggggtgtcggttcgtcgggattgtttaagtttataacgttgtgtcgggtcggcggatgggaggtattaatttattacgaggtgttgggtcggcggatgagatgtattaatttattacgttgtgtcgggtcggcgggatgttgttatatttttttacgcggtgt

SEQ ID NO: 38728 - DNA, 583 bp, Artificial Sequence
  chemically treated genomic DNA (Homo sapiens) CpG-island No: 38728
  unsure (326)
acaccgcgtaaaaaaatataacaacatcccgccgacccgacacaacgtaataaattaatacatctcatccgccgacccaacacctcgtaataaattaatacctcccatccgccgacccgacacaacgttataaacttaaacaatcccgacgaaccgacaccccgtaataaaataaaacaacataccgccgaaccgacacaacgtaataaattaaaacaacccctccaaaaccgaaccgtaaatataccgaatttcccaccgaaccgaccgccgtcccacctccaccttctacgcacgacacataaacgaaatcgaataaacgatcnccgaaattcacgaatcactcaaacacaataactatcgaataaaccgaaatacccaccgacaccgtccgccataaattcgccttaccccgtccacaaaccgatccgaaaaaaacgcaaaaaaactataaaaaaaaaaaactaaccgatccgccgcgaaatccgaatacgacgaatcccgaccgtcactaaccacaataaccgacccaccttcgactcacgccacatccgacgactaaactcgacgttaccgtaaaaat

SEQ ID NO: 38729 - DNA, 2355 bp, Artificial Sequence
  chemically treated genomic DNA (Homo sapiens) CpG-island No: 38729
  unsure (1731)
cgcggcgcgttcgtcggttcggcgtacgtttcgtgttttgtggcgtttggtataggttcggttttatatgatatttttttttttttcgagagttagttcgttttcgagttggaacgtcgggtaacgttttttgaaggtgtttaggtttttttatgtggcggacgtagtcgatttttttttttagtggattagaatttgacgaacgtttcgagttagtcgagaacgggtgacgcgttttggttcgggattaatggtatcgtggtggatagtaggtagtgtcggaggcgatggtggcgtagtttttacgaattttttgagtaggtttacgtggaatacgtcgtggagttttgcgcgaggcgggagttcgaggcggacggcgacggggttgattatttcgacgacgcggtagggttcgaagtagcggggtttgagtttgtttttggatatttggggtagcgatgtcggggcgcggtgacggaggcgtaggagaacgaggtcgtttatttcgtaggatatcgtacggtggtttttgtcgtagtattttttgtgcgtcgtttgggtttgttttagtcggtagcgtacgtcggttaagaattcgttacggttcgttatggagcgagcgacggtcgttacgcgcgtttcgtcgggttcgtaggatttgatgatcggcgggtcgcgttcgtatattattcggaacggcgtgtcgcggagagatgtttgataggcggtattgtagatgtatttcgtttacgggagttatcgaatttattgtcgaggtcggtcgtcggtgaagtatcgtaggtatatgacgatgattttgttggcggttttcgtttggttattagattgtgggtggatggtcgtcgttatgtgtatttttgtatcggttagtcgtattaattcgcgttaaaaggatgacgtgaatatcggatttcggttcgatattatggattggggtatgtcgtggaggcgtataatgttcgcgtagaacgtttgagttattgatttagttgtgtaggggtgagttaaagggatgaaatgatagtatttgttgaatcggtcgacgacggtgaggattattgtttttttatttatacggggtagagtttttacgaagtcgaggttaatgtcggtttatatcgtagttggaatcggtaggggaagaagtaggtcgttcgggtgtaaatgtttagatttgttgcgttggtatgtgtcgtacgttcggacgaatttttgaattattcggcgtatggcgggagagtggaaatcgcggcgtagtttgtgtagggtacgttgtacgtttttatgttcgtcggtgtggattgtcgttaagatttcgtggagtagtggtgacgatggcggaatgtatagtcgggagtcgaatattattatttcgtcgcgaagcgtttacggcgcgttgcgggtgtcggtttggatggcgtcgcggatggttacgagagtaggtttcgtggtttgggttgttcgtaatcgttcgatgtagtcgaatcgtggcgtcgatagtgttaagacggtattttcgttcgtgtcgcggcgcgagagggtatcggttattacgttggaggcgttcgatttgtattttatcgtgaagtcgaagtcgaggagtttgtttattaatggtgttggggatggtcgttaggcgttgatcgagtaggtatttgaggttgtagtggttcgttcgtattacgaacgtacgtttttatagatacgttngtttagtggcggatggcgaggacgaggtcgattaattttcgttcgtaggtagcgagcgtacggtggcgcggcgcgacggggcggttgaagaacgttagcgggtgtttgttttgtaggagtatcgcgtcgaatttatgcgtagaggcgttatattcgacgacgaatggtttgacgaagtcgggtagcgttagaatcggggtcgtggtgacggcgtgtttgagggcgtggaacgtagtcgttatttcgtcggattatcggaattttttttttttggttagcgcggtgaggggggcggcgatggtttcgtagtcgtggacgaatttgcggtagtagttcgcgagttttaggaagtttcggacggtgcgggtcgagcgcggttgcggttagtttacgatagtttgtattttggtcgggtttatggatacgttcgtcgcgtcgatgatgtggtttaggtaggagatggagttgacgtcgaaagcgtattttgaacgtttgacgaataggcgatgttgacgtagtaggaggagtatcgttcggatgtgttttagatggtttgtttaggtgttgttgtagatgagaatatcgttaaaaaatataaggataaaacggcgaagatatatgcgg

SEQ ID NO: 38730 - DNA, 2355 bp, Artificial Sequence
  chemically treated genomic DNA (Homo sapiens) CpG-island No: 38730
  unsure (625)
ccgcatatatcttcgccgttttatccttatattttttaacgatattctcatctacaacaacacctaaacaaaccatctaaaacacatccgaacgatactcctcctactacgtcaacatcgcctattcgtcaaacgttcaaaatacgctttcgacgtcaactccatctcctacctaaaccacatcatcgacgcgacgaacgtatccataaacccgaccaaaatacaaactatcgtaaactaaccgcaaccgcgctcgacccgcaccgtccgaaacttcctaaaactcgcgaactactaccgcaaattcgtccacgactacgaaaccatcgccgcccccctcaccgcgctaaccaaaaaaaaaaaattccgataatccgacgaaataacgactacgttccacgccctcaaacacgccgtcaccacgaccccgattctaacgctacccgacttcgtcaaaccattcgtcgtcgaatataacgcctctacgcataaattcgacgcgatactcctacaaaacaaacacccgctaacgttcttcaaccgccccgtcgcgccgcgccaccgtacgctcgctacctacgaacgaaaattaatcgacctcgtcctcgccatccgccactaaacnaacgtatctataaaaacgtacgttcgtaatacgaacgaaccactacaacctcaaatacctactcgatcaacgcctaacgaccatccccaacaccattaataaacaaactcctcgacttcgacttcacgataaaatacaaatcgaacgcctccaacgtaataaccgataccctctcgcgccgcgacacgaacgaaaataccgtcttaacactatcgacgccacgattcgactacatcgaacgattacgaacaacccaaaccacgaaacctactctcgtaaccatccgcgacgccatccaaaccgacacccgcaacgcgccgtaaacgcttcgcgacgaaataataatattcgactcccgactatacattccgccatcgtcaccactactccacgaaatcttaacgacaatccacaccgacgaacataaaaacgtacaacgtaccctacacaaactacgccgcgatttccactctcccgccatacgccgaataattcaaaaattcgtccgaacgtacgacacataccaacgcaacaaatctaaacatttacacccgaacgacctacttcttcccctaccgattccaactacgatataaaccgacattaacctcgacttcgtaaaaactctaccccgtataaataaaaaaacaataatcctcaccgtcgtcgaccgattcaacaaatactatcatttcatccctttaactcacccctacacaactaaatcaataactcaaacgttctacgcgaacattatacgcctccacgacataccccaatccataatatcgaaccgaaatccgatattcacgtcatccttttaacgcgaattaatacgactaaccgatacaaaaatacacataacgacgaccatccacccacaatctaataaccaaacgaaaaccgccaacaaaatcatcgtcatatacctacgatacttcaccgacgaccgacctcgacaataaattcgataactcccgtaaacgaaatacatctacaataccgcctatcaaacatctctccgcgacacgccgttccgaataatatacgaacgcgacccgccgatcatcaaatcctacgaacccgacgaaacgcgcgtaacgaccgtcgctcgctccataacgaaccgtaacgaattcttaaccgacgtacgctaccgactaaaacaaacccaaacgacgcacaaaaaatactacgacaaaaaccaccgtacgatatcctacgaaataaacgacctcgttctcctacgcctccgtcaccgcgccccgacatcgctaccccaaatatccaaaaacaaactcaaaccccgctacttcgaaccctaccgcgtcgtcgaaataatcaaccccgtcgccgtccgcctcgaactcccgcctcgcgcaaaactccacgacgtattccacgtaaacctactcaaaaaattcgtaaaaactacgccaccatcgcctccgacactacctactatccaccacgataccattaatcccgaaccaaaacgcgtcacccgttctcgactaactcgaaacgttcgtcaaattctaatccactaaaaaaaaaaatcgactacgtccgccacataaaaaaacctaaacaccttcaaaaaacgttacccgacgttccaactcgaaaacgaactaactctcgaaaaaaaaaaaaatatcatataaaaccgaacctataccaaacgccacaaaacacgaaacgtacgccgaaccgacgaacgcgccgcg

SEQ ID NO: 38731 - DNA, 2355 bp, Artificial Sequence
  chemically treated genomic DNA (Homo sapiens) CpG-island No: 38731
  unsure (625)
tcgtatatattttcgtcgttttgtttttgtgttttttgacgatatttttatttatagtaatatttgggtagattatttgaggtatattcgggcggtgttttttttgttgcgttagtatcgtttgttcgttaagcgtttaaagtgcgttttcggcgttagttttattttttatttgggttatattatcggcgcgacgggcgtgtttatggattcggttaaggtgtaggttgtcgtggattggtcgtaatcgcgttcggttcgtatcgttcggggttttttggggttcgcgggttattatcgtaagttcgtttacgattacgggattatcgtcgttttttttatcgcgttgattaagaaggaggggtttcggtggttcgacgaggtggcgattgcgttttacgtttttaagtacgtcgttattacggtttcggttttggcgttattcgatttcgttaagttattcgtcgtcgagtgtgacgtttttacgtatgggttcggcgcggtatttttgtaggataagtattcgttggcgttttttagtcgtttcgtcgcgtcgcgttatcgtgcgttcgttgtttacgagcgggagttgatcggtttcgttttcgttattcgttattgggtnggcgtatttgtgggggcgtgcgttcgtggtgcggacggattattatagttttaagtatttgttcgattaacgtttggcgattatttttaatattattggtgggtaagtttttcggtttcgattttacggtggagtataagtcgggcgtttttaacgtggtggtcgatgttttttcgcgtcgcgatacggacgagggtgtcgttttggtattgtcggcgttacggttcgattatatcgagcggttgcgggtagtttagattacggagtttgttttcgtggttattcgcgacgttatttaggtcggtattcgtagcgcgtcgtgggcgtttcgcgacgggatggtgatgttcgattttcggttgtatatttcgttatcgttattattgttttacgagattttggcggtaatttatatcgacggatatgaaggcgtgtagcgtattttgtataggttgcgtcgcgatttttattttttcgttatgcgtcgggtggtttaggagttcgttcgggcgtgcgatatatgttagcgtaataagtttgagtatttgtattcgggcggtttgtttttttttttgtcggttttaattacggtgtgggtcgatattggtttcgatttcgtggaagttttgtttcgtgtgggtgggaagatagtgatttttatcgtcgtcgatcggtttagtaagtattgttattttatttttttggtttatttttatatagttgaattagtagtttaggcgttttacgcggatattgtgcgtttttacggtatattttagtttatggtgtcggatcgggattcggtgtttacgttatttttttggcgcgagttgatgcggttgatcggtataaagatgtatatgacgacggttatttatttataatttgatggttagacggaggtcgttaataaggttatcgttatgtatttgcggtgttttatcggcgatcgatttcggtagtgggttcggtggttttcgtgggcggaatatatttataatatcgtttattagatattttttcgcgatacgtcgtttcgggtggtatacgggcgcgattcgtcgattattaggttttacgagttcggcgagacgcgcgtggcggtcgtcgttcgttttatggcggatcgtgacgagtttttggtcgacgtgcgttatcggttagagtaggtttaggcgacgtataagaagtattacgataaaggttatcgtgcggtgttttacgaggtgggcgatttcgtttttttgcgttttcgttatcgcgtttcggtatcgttgttttaagtgtttaagggtaagtttaagtttcgttatttcgggttttatcgcgtcgtcgaggtgattaatttcgtcgtcgttcgtttcgagttttcgtttcgcgtaaagttttacgacgtgttttacgtgggtttatttaagaagttcgtgggagttgcgttattatcgttttcggtattgtttgttgtttattacggtgttattgatttcgagttagagcgcgttattcgttttcggttagttcggggcgttcgttaagttttggtttattggaagggggaatcggttgcgttcgttatatgggaagatttggatatttttaaggagcgttattcggcgttttagttcgaggacgagttggttttcgaggaggggagagatgttatgtggggtcgaatttatgttaggcgttatagggtacgggacgtgcgtcgagtcggcgaacgcgtcgcg

SEQ ID NO: 38732 - DNA, 2355 bp, Artificial Sequence
  chemically treated genomic DNA (Homo sapiens) CpG-island No: 38732
  unsure (1731)
cgcgacgcgttcgccgactcgacgcacgtcccgtaccctataacgcctaacataaattcgaccccacataacatctctcccctcctcgaaaaccaactcgtcctcgaactaaaacgccgaataacgctccttaaaaatatccaaatcttcccatataacgaacgcaaccgattcccccttccaataaaccaaaacttaacgaacgccccgaactaaccgaaaacgaataacgcgctctaactcgaaatcaataacaccgtaataaacaacaaacaataccgaaaacgataataacgcaactcccacgaacttcttaaataaacccacgtaaaacacgtcgtaaaactttacgcgaaacgaaaactcgaaacgaacgacgacgaaattaatcacctcgacgacgcgataaaacccgaaataacgaaacttaaacttacccttaaacacttaaaacaacgataccgaaacgcgataacgaaaacgcaaaaaaacgaaatcgcccacctcgtaaaacaccgcacgataacctttatcgtaatacttcttatacgtcgcctaaacctactctaaccgataacgcacgtcgaccaaaaactcgtcacgatccgccataaaacgaacgacgaccgccacgcgcgtctcgccgaactcgtaaaacctaataatcgacgaatcgcgcccgtataccacccgaaacgacgtatcgcgaaaaaatatctaataaacgatattataaatatattccgcccacgaaaaccaccgaacccactaccgaaatcgatcgccgataaaacaccgcaaatacataacgataaccttattaacgacctccgtctaaccatcaaattataaataaataaccgtcgtcatatacatctttataccgatcaaccgcatcaactcgcgccaaaaaaataacgtaaacaccgaatcccgatccgacaccataaactaaaatataccgtaaaaacgcacaatatccgcgtaaaacgcctaaactactaattcaactatataaaaataaaccaaaaaaataaaataacaatacttactaaaccgatcgacgacgataaaaatcactatcttcccacccacacgaaacaaaacttccacgaaatcgaaaccaatatcgacccacaccgtaattaaaaccgacaaaaaaaaaaacaaaccgcccgaatacaaatactcaaacttattacgctaacatatatcgcacgcccgaacgaactcctaaaccacccgacgcataacgaaaaaataaaaatcgcgacgcaacctatacaaaatacgctacacgccttcatatccgtcgatataaattaccgccaaaatctcgtaaaacaataataacgataacgaaatatacaaccgaaaatcgaacatcaccatcccgtcgcgaaacgcccacgacgcgctacgaataccgacctaaataacgtcgcgaataaccacgaaaacaaactccgtaatctaaactacccgcaaccgctcgatataatcgaaccgtaacgccgacaataccaaaacgacaccctcgtccgtatcgcgacgcgaaaaaacatcgaccaccacgttaaaaacgcccgacttatactccaccgtaaaatcgaaaccgaaaaacttacccaccaataatattaaaaataatcgccaaacgttaatcgaacaaatacttaaaactataataatccgtccgcaccacgaacgcacgcccccacaaatacgccnacccaataacgaataacgaaaacgaaaccgatcaactcccgctcgtaaacaacgaacgcacgataacgcgacgcgacgaaacgactaaaaaacgccaacgaatacttatcctacaaaaataccgcgccgaacccatacgtaaaaacgtcacactcgacgacgaataacttaacgaaatcgaataacgccaaaaccgaaaccgtaataacgacgtacttaaaaacgtaaaacgcaatcgccacctcgtcgaaccaccgaaacccctccttcttaatcaacgcgataaaaaaaacgacgataatcccgtaatcgtaaacgaacttacgataataacccgcgaaccccaaaaaaccccgaacgatacgaaccgaacgcgattacgaccaatccacgacaacctacaccttaaccgaatccataaacacgcccgtcgcgccgataatataacccaaataaaaaataaaactaacgccgaaaacgcactttaaacgcttaacgaacaaacgatactaacgcaacaaaaaaaacaccgcccgaatatacctcaaataatctacccaaatattactataaataaaaatatcgtcaaaaaacacaaaaacaaaacgacgaaaatatatacga

SEQ ID NO: 38733 - DNA, 702 bp, Artificial Sequence
  chemically treated genomic DNA (Homo sapiens) CpG-island No: 38733
tcgaatggtatgattaagaattcgtagaggttatcgtgcgttcggaacgtcgttttggcgacgtttttagttcgtattcggatttgatgatagttcgagcgtagatcgagtttggtgaagaatttggcgtcgtgtagttcgtttagtagttcgtttattatcgggatcgggtaggcgtttttgatggtgatggcgttgagggttttgtagtcgacgtagaaacgttacgagtcgtcggtttttttgattaataggacgggggacgagaacgtcgacgtgtttcggcgaatgaggttttgttttattatgacggtatattgtcgtttaagtttatttttgtgcgttatcgggtagcggtagggacgtacggcgacgggcggggcgtttggtaggaggtggatggcgtggtcgcggtttcgtggtggtggtaggtttcgtggttcggcgaagacgtcgtcgaaggagtttaggaggtcgtcgaggagggtaggtttcgtcgtgggcgtcggggtgttggaggaggatttcgtggtcgttaacgaggtttcgttttcggtgttgacggcgtggatatcggcgcgttggtgcgggggtaggttttgttacgagacggtgcgtttttgatgttggaaggatacggttttcgtggttacgttttaggcgatggtggtgtttaggtgggttatttattgagtgtttagt

SEQ ID NO: 38734 - DNA, 702 bp, Artificial Sequence
  chemically treated genomic DNA (Homo sapiens) CpG-island No: 38734
actaaacactcaataaataacccacctaaacaccaccatcgcctaaaacgtaaccacgaaaaccgtatccttccaacatcaaaaacgcaccgtctcgtaacaaaacctacccccgcaccaacgcgccgatatccacgccgtcaacaccgaaaacgaaacctcgttaacgaccacgaaatcctcctccaacaccccgacgcccacgacgaaacctaccctcctcgacgacctcctaaactccttcgacgacgtcttcgccgaaccacgaaacctaccaccaccacgaaaccgcgaccacgccatccacctcctaccaaacgccccgcccgtcgccgtacgtccctaccgctacccgataacgcacaaaaataaacttaaacgacaatataccgtcataataaaacaaaacctcattcgccgaaacacgtcgacgttctcgtcccccgtcctattaatcaaaaaaaccgacgactcgtaacgtttctacgtcgactacaaaaccctcaacgccatcaccatcaaaaacgcctacccgatcccgataataaacgaactactaaacgaactacacgacgccaaattcttcaccaaactcgatctacgctcgaactatcatcaaatccgaatacgaactaaaaacgtcgccaaaacgacgttccgaacgcacgataacctctacgaattcttaatcataccattcga

SEQ ID NO: 38735 - DNA, 702 bp, Artificial Sequence
  chemically treated genomic DNA (Homo sapiens) CpG-island No: 38735
gttgggtatttagtggatggtttatttgggtattattatcgtttgggacgtgattacggggatcgtgtttttttaatattaagggcgtatcgtttcgtggtagagtttattttcgtattagcgcgtcgatgtttacgtcgttagtatcggggacgaagtttcgttggcggttacggggtttttttttagtatttcggcgtttacgacggagtttgtttttttcgacggttttttgggttttttcgacgacgttttcgtcgagttacggggtttgttattattacggggtcgcgattacgttatttattttttgttaggcgtttcgttcgtcgtcgtgcgtttttatcgttattcggtggcgtataaggatgaatttgagcggtagtgtgtcgttatgatggagtagggttttattcgtcggagtacgtcggcgttttcgtttttcgttttgttggttaagaaagtcgacggttcgtggcgtttttgcgtcgattatagggtttttaacgttattattattaaggacgtttattcgatttcggtggtggacgagttgttggacgagttgtacggcgttaagttttttattaagttcgatttgcgttcgggttattattaagttcggatgcgggttgaagacgtcgttaagacggcgtttcggacgtacgatggtttttacgagtttttggttatgttattcgg

SEQ ID NO: 38736 - DNA, 702 bp, Artificial Sequence
  chemically treated genomic DNA (Homo sapiens) CpG-island No: 38736
ccgaataacataaccaaaaactcgtaaaaaccatcgtacgtccgaaacgccgtcttaacgacgtcttcaacccgcatccgaacttaataataacccgaacgcaaatcgaacttaataaaaaacttaacgccgtacaactcgtccaacaactcgtccaccaccgaaatcgaataaacgtccttaataataataacgttaaaaaccctataatcgacgcaaaaacgccacgaaccgtcgactttcttaaccaacaaaacgaaaaacgaaaacgccgacgtactccgacgaataaaaccctactccatcataacgacacactaccgctcaaattcatccttatacgccaccgaataacgataaaaacgcacgacgacgaacgaaacgcctaacaaaaaataaataacgtaatcgcgaccccgtaataataacaaaccccgtaactcgacgaaaacgtcgtcgaaaaaacccaaaaaaccgtcgaaaaaaacaaactccgtcgtaaacgccgaaatactaaaaaaaaaccccgtaaccgccaacgaaacttcgtccccgatactaacgacgtaaacatcgacgcgctaatacgaaaataaactctaccacgaaacgatacgcccttaatattaaaaaaacacgatccccgtaatcacgtcccaaacgataataatacccaaataaaccatccactaaatacccaac

SEQ ID NO: 38737 - DNA, 672 bp, Artificial Sequence
  chemically treated genomic DNA (Homo sapiens) CpG-island No: 38737
gtcggcgaggggtatgacgtaaaggtcgacgtcgaacgttatgttttggatggtgatcggtgttcgtcgtagtatattcggataggaaatttttttttcgttcgttatcgtcgtagtgagtcgtggacgcggttggacgggtaggtcggtgcggagcgcggcgtttttatcgatgaagttgtgggtggagttcgtgtttattagggtaacgagggaggcggtatcgagcgttatttggagtaggatcggtttgtttaacgggatgttagttatcgcgtgtaaggagaatacgggcgtttcgatagtcgttttttcggtgttattttttatcgtgtcgtcgtttttttcgattgtattattttttataaaaaataatcgtttgtatattttgttgtgggagcggttgtatttttcgttatagttgtagtatagttcgaggcgacggcgttttttttgttgggtttgggagagtcgtttgatcgggcgattttcgacggtgacggtgggcggtgtcggtttgacgacggggtcggtcgatggtcggggggtcggcgtcgggagtacgtcgcgcgcggatgtcgtggtcgggaataggtagggttttatgagttcgaattgtcgggcgagatttatggttttttttagggatgtcggtttttgttgttggatttg

SEQ ID NO: 38738 - DNA, 672 bp, Artificial Sequence
  chemically treated genomic DNA (Homo sapiens) CpG-island No: 38738
caaatccaacaacaaaaaccgacatccctaaaaaaaaccataaatctcgcccgacaattcgaactcataaaaccctacctattcccgaccacgacatccgcgcgcgacgtactcccgacgccgaccccccgaccatcgaccgaccccgtcgtcaaaccgacaccgcccaccgtcaccgtcgaaaatcgcccgatcaaacgactctcccaaacccaacaaaaaaaacgccgtcgcctcgaactatactacaactataacgaaaaatacaaccgctcccacaacaaaatatacaaacgattattttttataaaaaataatacaatcgaaaaaaacgacgacacgataaaaaataacaccgaaaaaacgactatcgaaacgcccgtattctccttacacgcgataactaacatcccgttaaacaaaccgatcctactccaaataacgctcgataccgcctccctcgttaccctaataaacacgaactccacccacaacttcatcgataaaaacgccgcgctccgcaccgacctacccgtccaaccgcgtccacgactcactacgacgataacgaacgaaaaaaaaatttcctatccgaatatactacgacgaacaccgatcaccatccaaaacataacgttcgacgtcgacctttacgtcatacccctcgccgac

SEQ ID NO: 38739 - DNA, 672 bp, Artificial Sequence
  chemically treated genomic DNA (Homo sapiens) CpG-island No: 38739
taggtttagtagtagaagtcggtatttttggaagaggttatgagtttcgttcgatagttcgagtttatggagttttatttgttttcggttacgatattcgcgcgcggcgtattttcgacgtcggtttttcggttatcgatcggtttcgtcgttaagtcggtatcgtttatcgttatcgtcgagggtcgttcggttaagcggtttttttaagtttagtaggaggagcgtcgtcgtttcgggttgtgttataattgtgacgagaaatatagtcgtttttataataaggtatgtaaacggttgttttttgtggagggtggtgtaatcgaagaaggcgacgatacggtggaggatgatatcgaagaggcgattgtcgaggcgttcgtgttttttttgtacgcggtggttggtatttcgttgggtaaatcgattttgttttaagtgacgttcggtgtcgtttttttcgttgttttggtggatacgggttttatttataattttatcggtgaggacgtcgcgtttcgtatcggtttgttcgtttagtcgcgtttacggtttattgcgacggtggcgaacggggagaaggttttttgttcgggtgtgttgcggcgggtatcgattattatttagggtatggcgttcgacgtcgatttttacgttatgtttttcgtcggt

SEQ ID NO: 38740 - DNA, 672 bp, Artificial Sequence
  chemically treated genomic DNA (Homo sapiens) CpG-island No: 38740
accgacgaaaaacataacgtaaaaatcgacgtcgaacgccataccctaaataataatcgatacccgccgcaacacacccgaacaaaaaaccttctccccgttcgccaccgtcgcaataaaccgtaaacgcgactaaacgaacaaaccgatacgaaacgcgacgtcctcaccgataaaattataaataaaacccgtatccaccaaaacaacgaaaaaaacgacaccgaacgtcacttaaaacaaaatcgatttacccaacgaaataccaaccaccgcgtacaaaaaaaacacgaacgcctcgacaatcgcctcttcgatatcatcctccaccgtatcgtcgccttcttcgattacaccaccctccacaaaaaacaaccgtttacataccttattataaaaacgactatatttctcgtcacaattataacacaacccgaaacgacgacgctcctcctactaaacttaaaaaaaccgcttaaccgaacgaccctcgacgataacgataaacgataccgacttaacgacgaaaccgatcgataaccgaaaaaccgacgtcgaaaatacgccgcgcgcgaatatcgtaaccgaaaacaaataaaactccataaactcgaactatcgaacgaaactcataacctcttccaaaaataccgacttctactactaaaccta

SEQ ID NO: 38741 - DNA, 536 bp, Artificial Sequence
  chemically treated genomic DNA (Homo sapiens) CpG-island No: 38741
gatcggcgcggggaagtagggtttggaatcgattttggtagttttttacggtgttcgtgcggcggtacgtcgagagttcgaatagcggtacggagcggagcgggggttcgtagcggaggttgaggagttttttgaaacgtttttacgtcggcgtattttcgttgttttggacgtgtatgtattatagttgcgcgtcgttttgtagattgtacgaagttatttacgtgcgtttcgtcgggatgacgtgttgttggatgaagaatgattcgtatcgattgatgaaggcgagcggatcggttttgttatcgtatttggggaatttcggacgttaatgtttcggcggtcgatttggtgtaggtgttttcgatgatttcgtggaagttttttcggtagttcgagtaacggatagggtcgcgatggtttgtgtgttgttttcgatcgttttggtcgtggtttcggatgaagattgtagggaggttagggttttggcgagggtttttagggtggatttgagatcgttttttatggtagcggtt

SEQ ID NO: 38742 - DNA, 536 bp, Artificial Sequence
  chemically treated genomic DNA (Homo sapiens) CpG-island No: 38742
aaccgctaccataaaaaacgatctcaaatccaccctaaaaaccctcgccaaaaccctaacctccctacaatcttcatccgaaaccacgaccaaaacgatcgaaaacaacacacaaaccatcgcgaccctatccgttactcgaactaccgaaaaaacttccacgaaatcatcgaaaacacctacaccaaatcgaccgccgaaacattaacgtccgaaattccccaaatacgataacaaaaccgatccgctcgccttcatcaatcgatacgaatcattcttcatccaacaacacgtcatcccgacgaaacgcacgtaaataacttcgtacaatctacaaaacgacgcgcaactataatacatacacgtccaaaacaacgaaaatacgccgacgtaaaaacgtttcaaaaaactcctcaacctccgctacgaacccccgctccgctccgtaccgctattcgaactctcgacgtaccgccgcacgaacaccgtaaaaaactaccaaaatcgattccaaaccctacttccccgcgccgatc

SEQ ID NO: 38743 - DNA, 536 bp, Artificial Sequence
  chemically treated genomic DNA (Homo sapiens) CpG-island No: 38743
agtcgttgttatgggggacgattttaagtttattttggagattttcgttaagattttggtttttttgtaatttttattcgaagttacgattaaggcgatcgaggataatatataggttatcgcggttttgttcgttgttcggattatcgagaaggtttttacggaattatcggggatatttgtattagatcggtcgtcgaagtattggcgttcggagttttttaagtacgatggtaagatcgattcgttcgtttttattaatcgatgcgagttattttttatttagtaatacgttatttcggcggaacgtacgtggatggtttcgtataatttgtaggacggcgcgtaattgtggtatatgtacgtttaggataacgagggtacgtcgacgtgggagcgttttaaggaattttttaattttcgttacgggttttcgtttcgtttcgtgtcgttattcgagttttcggcgtgtcgtcgtacgagtatcgtggaagattattaagatcggttttaggttttgttttttcgcgtcggtt

SEQ ID NO: 38744 - DNA, 536 bp, Artificial Sequence
  chemically treated genomic DNA (Homo sapiens) CpG-island No: 38744
aaccgacgcgaaaaaacaaaacctaaaaccgatcttaataatcttccacgatactcgtacgacgacacgccgaaaactcgaataacgacacgaaacgaaacgaaaacccgtaacgaaaattaaaaaattccttaaaacgctcccacgtcgacgtaccctcgttatcctaaacgtacatataccacaattacgcgccgtcctacaaattatacgaaaccatccacgtacgttccgccgaaataacgtattactaaataaaaaataactcgcatcgattaataaaaacgaacgaatcgatcttaccatcgtacttaaaaaactccgaacgccaatacttcgacgaccgatctaatacaaatatccccgataattccgtaaaaaccttctcgataatccgaacaacgaacaaaaccgcgataacctatatattatcctcgatcgccttaatcgtaacttcgaataaaaattacaaaaaaaccaaaatcttaacgaaaatctccaaaataaacttaaaatcgtcccccataacaacgact

SEQ ID NO: 38745 - DNA, 555 bp, Artificial Sequence
  chemically treated genomic DNA (Homo sapiens) CpG-island No: 38745
ggagcggcggcgtggcggcgcggtgtcggcgtggcgcggcggcggcgtggtggcgcggcggtagtatagcgtggcggtggcgtgtcgcggtggtggcgtggcgttacggcggcgtggcgcggttcggcggcgtgtcgaggcgggggcggcggcgtggttgtggcgttagcgtacgtcgtcggtagtgtcggcgttacgtcgtcggcggtggcggtcgtatcgaggtcggggtcggtatcggcgggaggcggagtcggggtcggtcgcgtcgacgtcggcggcggcgtcggtaacgaggcgggggcggtttggagagagagagagatcgaggtttagagagagagaggcggcggcggtttttattttagagatgtggcggcggcggaggcggcgacgacgacgttcgcgagacgatggtaagatacgacggcggcgtcggcgcggggatgttttaggtagtggcggcgaaggagaagtcgagatcgatcggggaaaaaatttttaagtgttggtagagaggacgagggtacgtatcggggatatatatatttttag

SEQ ID NO: 38746 - DNA, 555 bp, Artificial Sequence
  chemically treated genomic DNA (Homo sapiens) CpG-island No: 38746
ctaaaaatatatatatccccgatacgtaccctcgtcctctctaccaacacttaaaaattttttccccgatcgatctcgacttctccttcgccgccactacctaaaacatccccgcgccgacgccgccgtcgtatcttaccatcgtctcgcgaacgtcgtcgtcgccgcctccgccgccgccacatctctaaaataaaaaccgccgccgcctctctctctctaaacctcgatctctctctctctccaaaccgcccccgcctcgttaccgacgccgccgccgacgtcgacgcgaccgaccccgactccgcctcccgccgataccgaccccgacctcgatacgaccgccaccgccgacgacgtaacgccgacactaccgacgacgtacgctaacgccacaaccacgccgccgcccccgcctcgacacgccgccgaaccgcgccacgccgccgtaacgccacgccaccaccgcgacacgccaccgccacgctatactaccgccgcgccaccacgccgccgccgcgccacgccgacaccgcgccgccacgccgccgctcc

SEQ ID NO: 38747 - DNA, 555 bp, Artificial Sequence
  chemically treated genomic DNA (Homo sapiens) CpG-island No: 38747
ttagaggtatatatattttcgatgcgtgttttcgttttttttattaatatttagaaatttttttttcgatcgatttcggtttttttttcgtcgttattgtttagggtattttcgcgtcgacgtcgtcgtcgtattttgttatcgtttcgcgggcgtcgtcgtcgtcgttttcgtcgtcgttatatttttggggtgagagtcgtcgtcgtttttttttttttgaatttcgatttttttttttttttaaatcgttttcgtttcgttgtcgacgtcgtcgtcgacgtcgacgcggtcgatttcgatttcgtttttcgtcgatgtcgatttcgatttcgatgcggtcgttatcgtcgacgacgtagcgtcggtattgtcgacgacgtacgttgacgttatagttacgtcgtcgttttcgtttcggtacgtcgtcgggtcgcgttacgtcgtcgtgacgttacgttattatcgcggtacgttatcgttacgttatgttgtcgtcgcgttattacgtcgtcgtcgcgttacgtcgatatcgcgtcgttacgtcgtcgtttt

SEQ ID NO: 38748 - DNA, 555 bp, Artificial Sequence
  chemically treated genomic DNA (Homo sapiens) CpG-island No: 38748
aaaacgacgacgtaacgacgcgatatcgacgtaacgcgacgacgacgtaataacgcgacgacaacataacgtaacgataacgtaccgcgataataacgtaacgtcacgacgacgtaacgcgacccgacgacgtaccgaaacgaaaacgacgacgtaactataacgtcaacgtacgtcgtcgacaataccgacgctacgtcgtcgacgataacgaccgcatcgaaatcgaaatcgacatcgacgaaaaacgaaatcgaaatcgaccgcgtcgacgtcgacgacgacgtcgacaacgaaacgaaaacgatttaaaaaaaaaaaaaaatcgaaattcaaaaaaaaaaaaacgacgacgactctcaccccaaaaatataacgacgacgaaaacgacgacgacgacgcccgcgaaacgataacaaaatacgacgacgacgtcgacgcgaaaataccctaaacaataacgacgaaaaaaaaaccgaaatcgatcgaaaaaaaaatttctaaatattaataaaaaaaacgaaaacacgcatcgaaaatatatatacctctaa

SEQ ID NO: 38749 - DNA, 1185 bp, Artificial Sequence
  chemically treated genomic DNA (Homo sapiens) CpG-island No: 38749
taggtcgaggtttagttcggtagtttaggtcgtttcgttgttttttttttcggggtcgtcgataggtggggtttatttgtcggtttcgttttttttttttcgtttttttcgttcgcgtcgtcgtattcgtaatcgtcgtcgcgtttacgttttcgtttttttcgggttacgtcgattacgtttacgcgtgcgtcgcgtttttcgcgtttttttttttttttttttcgttcgcgttcgcgttcgagatggtcgggattcgaaaatcgaatttcgttttttttttttttttattttttcgcgtcggtcggcgattttcgtttttttcggttacgttcggttttttttttttttatttaagtatcgtcggtatttttttttattttttttttattgcgtcgatttttttcgagttttttatcgttttcgcgtcgtgtaattattcgtcgtcgtcgtttttgttatttcggtcgtcgttagtcgtcgttaggttcgtcgtcgttttgcgtcgtcgtcgtcgttagattcgcgcggtcgaggtttatttcgtttatttttttttcgttgaggttcgtcgtcggagatttattttcgtcgtgcgtcggtgagtgacgttatggtcgtcgttttcggtcggcgttttcgcgttttcgcgtttttttttttttttttaatttttttttttttgttcgttaggaggtttcggagttcgtttcgtcgtcgttatcgtttttcgtcgttcgtcgtcgtcgatcgttgtcggtgaggttttttttttcgttttttttttttcgtatcgtttagtcgtcgcgtcgtcgtttagttgcgtagtcgtcgttttttttttagtcgtcgtttttcgtcgttcgcgttcgtcgtcggtcgtcgttttgcgtcgttgtcgtatgcgcgtcgtcgtcgcgtgagcgttgcgtcgtcggcgttatggtcgtcggttcggtttgcgtcgtgttcgcgtgtttcggtcgcgagtttttatcgtcgttcgatttatttttgggtagatcggggtcgtcggttcggttgttacgtggcgtcgtcgtttttttttttttttttcgtgtcgttgatcggtgggtttcgtatgtcggcgtcgtatttttcgtgttgacgttagttttggaatttattgcgtaataaattgtttaaggttttttttttatagta

SEQ ID NO: 38750 - DNA, 1185 bp, Artificial Sequence
  chemically treated genomic DNA (Homo sapiens) CpG-island No: 38750
tactataaaaaaaaaaccttaaacaatttattacgcaataaattccaaaactaacgtcaacacgaaaaatacgacgccgacatacgaaacccaccgatcaacgacacgaaaaaaaaaaaaaaaaacgacgacgccacgtaacaaccgaaccgacgaccccgatctacccaaaaataaatcgaacgacgataaaaactcgcgaccgaaacacgcgaacacgacgcaaaccgaaccgacgaccataacgccgacgacgcaacgctcacgcgacgacgacgcgcatacgacaacgacgcaaaacgacgaccgacgacgaacgcgaacgacgaaaaacgacgactaaaaaaaaaacgacgactacgcaactaaacgacgacgcgacgactaaacgatacgaaaaaaaaaaaacgaaaaaaaaaacctcaccgacaacgatcgacgacgacgaacgacgaaaaacgataacgacgacgaaacgaactccgaaacctcctaacgaacaaaaaaaaaaaaattaaaaaaaaaaaaaaaaacgcgaaaacgcgaaaacgccgaccgaaaacgacgaccataacgtcactcaccgacgcacgacgaaaataaatctccgacgacgaacctcaacgaaaaaaaaataaacgaaataaacctcgaccgcgcgaatctaacgacgacgacgacgcaaaacgacgacgaacctaacgacgactaacgacgaccgaaataacaaaaacgacgacgacgaataattacacgacgcgaaaacgataaaaaactcgaaaaaaatcgacgcaataaaaaaaaaataaaaaaaaataccgacgatacttaaataaaaaaaaaaaaaaccgaacgtaaccgaaaaaaacgaaaatcgccgaccgacgcgaaaaaataaaaaaaaaaaaaaaacgaaattcgattttcgaatcccgaccatctcgaacgcgaacgcgaacgaaaaaaaaaaaaaaaaaaacgcgaaaaacgcgacgcacgcgtaaacgtaatcgacgtaacccgaaaaaaacgaaaacgtaaacgcgacgacgattacgaatacgacgacgcgaacgaaaaaaacgaaaaaaaaaaaacgaaaccgacaaataaaccccacctatcgacgaccccgaaaaaaaaaacaacgaaacgacctaaactaccgaactaaacctcgaccta

SEQ ID NO: 38751 - DNA, 1185 bp, Artificial Sequence
  chemically treated genomic DNA (Homo sapiens) CpG-island No: 38751
tattataaaagaaaaattttaaataatttattgcgtaataaattttagggttgacgttagtacggggggtgcggcgtcgatatgcggggtttatcggttagcggtacgggagagagagaaaggggcggcggcgttacgtggtagtcggatcgacggtttcgatttatttaagggtagatcggacggcggtgggagttcgcggtcggggtacgcgggtacggcgtaagtcgaatcggcgattatggcgtcggcggcgtagcgtttacgcggcggcggcgcgtatgcggtagcggcgtaaggcgacggtcgacggcgagcgcgggcggcggagagcggcggttagaggaggagcggcggttacgtagttaggcggcgacgcggcggttaaacggtgcgggagagagaaaacgaggaggagggttttatcgataacggtcgacgacggcgggcgacgaaggacgatggcgacggcggaacgagtttcggagttttttaacgaataaaaggagaggggttagagagagagggaagggcgcgaaagcgcgagggcgtcggtcgaaggcggcggttatggcgttatttatcggcgtacggcggggatgggttttcggcggcgaattttaacggaggaggggtggacgaggtggatttcggtcgcgcgaatttaacggcggcgacggcgtaagacggcggcgagtttagcggcggttagcggcggtcggagtagtaaaaacggcggcggcgggtggttgtacggcgcgggagcgatggggagttcgggagaggtcggcgtaatggggaaaaagtgagaaggagtgtcggcgatgtttaaatagggggagagggaatcggacgtggtcgggagaggcgggaatcgtcggtcgacgcgggagagtggggaggagagagaggcgggattcggttttcgaatttcggttatttcgggcgcgggcgcgagcgggagagagaggggaaaaggcgcggagagcgcggcgtacgcgtgggcgtggtcgacgtggttcggggaaggcggaggcgtgggcgcggcgacggttacgggtgcggcggcgcgagcgggagaggcgggaggagggagacgggatcgataggtgggttttatttgtcggcgatttcgagagaggaggtagcggggcggtttgggttgtcggattgggtttcggtttg

SEQ ID NO: 38752 - DNA, 1185 bp, Artificial Sequence
  chemically treated genomic DNA (Homo sapiens) CpG-island No: 38752
caaaccgaaacccaatccgacaacccaaaccgccccgctacctcctctctcgaaatcgccgacaaataaaacccacctatcgatcccgtctccctcctcccgcctctcccgctcgcgccgccgcacccgtaaccgtcgccgcgcccacgcctccgccttccccgaaccacgtcgaccacgcccacgcgtacgccgcgctctccgcgccttttcccctctctctcccgctcgcgcccgcgcccgaaataaccgaaattcgaaaaccgaatcccgcctctctctcctccccactctcccgcgtcgaccgacgattcccgcctctcccgaccacgtccgattccctctccccctatttaaacatcgccgacactccttctcactttttccccattacgccgacctctcccgaactccccatcgctcccgcgccgtacaaccacccgccgccgccgtttttactactccgaccgccgctaaccgccgctaaactcgccgccgtcttacgccgtcgccgccgttaaattcgcgcgaccgaaatccacctcgtccacccctcctccgttaaaattcgccgccgaaaacccatccccgccgtacgccgataaataacgccataaccgccgccttcgaccgacgccctcgcgctttcgcgcccttccctctctctctaacccctctccttttattcgttaaaaaactccgaaactcgttccgccgtcgccatcgtccttcgtcgcccgccgtcgtcgaccgttatcgataaaaccctcctcctcgttttctctctcccgcaccgtttaaccgccgcgtcgccgcctaactacgtaaccgccgctcctcctctaaccgccgctctccgccgcccgcgctcgccgtcgaccgtcgccttacgccgctaccgcatacgcgccgccgccgcgtaaacgctacgccgccgacgccataatcgccgattcgacttacgccgtacccgcgtaccccgaccgcgaactcccaccgccgtccgatctacccttaaataaatcgaaaccgtcgatccgactaccacgtaacgccgccgcccctttctctctctcccgtaccgctaaccgataaaccccgcatatcgacgccgcaccccccgtactaacgtcaaccctaaaatttattacgcaataaattatttaaaatttttcttttataata

SEQ ID NO: 38753 - DNA, 1142 bp, Artificial Sequence
  chemically treated genomic DNA (Homo sapiens) CpG-island No: 38753
aagaaattcgttatgattttgtcgttattttcggcggtttcgattttagtcgtgtagatttggagaaattcggcggggttgacgttttcgtcgtatttttcggtgatggtgggtcggaattttgggggttaacggacgtttcgaaggttcgttataaaggttcgatagtcggtatagttaatcggggatacggggggtcggttttcgtgttcggatcgaagtggcgtttcggacgaggaagcgtttttcgttgcgtgggtagtacgacgattattgcgttagcgttcgatattgagacgggtattcggttttttacgtatatttttttgggtcggaggcgttgacgagggaatggcggacgaacggcgggtaacggtcgtcgttcgtcgcgtttttcgtttcgacgatacggagtcggcggtagtagcgttagaggttttggtggcggaggatcgttcgtcggcgtttaggcgttgttgcgtcgttatgattaagtcggttacgttatttagttaacgtcgggttggagtttttggatcggggacgacgggcgggtgacgtaggagcgcgttcgtagtttggagcgcgttttggggcgtgttgttatcgtcgtagacgaggaggcgatatttttcgtttcgtcgtttttttttatcgttcgcgggcggcgaagtcgtggatttttcgattttttcgagcgttttttttcgtttaagatttcggcgagagggggacggtggagtacgagttcgacggcgcgggttttgtttttcgttattatcgttagttttcggagagaggttgtgcgttattgttcgttcggttattgggttgagtaggagaagtttggcgtatacgaaagaggacgagggtttagaaagatatacgcgttttttatttggcgcgttagatgacggagcgtggggttttttatcgggagatcgcgtaggtttttttttgtcggttcggtcgggggcgttgagtgaggttttttattttcgatttgtggaatgttcgcgagagagtaaatgtataagatacggacgatgtagataggttcgggtcgttgagaagcgtaatattttatttttgtgttttggtggatttgtgtgtgaaggaattatagagagttggagagttag

SEQ ID NO: 38754 - DNA, 1142 bp, Artificial Sequence
  chemically treated genomic DNA (Homo sapiens) CpG-island No: 38754
ctaactctccaactctctataattccttcacacacaaatccaccaaaacacaaaaataaaatattacgcttctcaacgacccgaacctatctacatcgtccgtatcttatacatttactctctcgcgaacattccacaaatcgaaaataaaaaacctcactcaacgcccccgaccgaaccgacaaaaaaaaacctacgcgatctcccgataaaaaaccccacgctccgtcatctaacgcgccaaataaaaaacgcgtatatctttctaaaccctcgtcctctttcgtatacgccaaacttctcctactcaacccaataaccgaacgaacaataacgcacaacctctctccgaaaactaacgataataacgaaaaacaaaacccgcgccgtcgaactcgtactccaccgtccccctctcgccgaaatcttaaacgaaaaaaaacgctcgaaaaaatcgaaaaatccacgacttcgccgcccgcgaacgataaaaaaaaacgacgaaacgaaaaatatcgcctcctcgtctacgacgataacaacacgccccaaaacgcgctccaaactacgaacgcgctcctacgtcacccgcccgtcgtccccgatccaaaaactccaacccgacgttaactaaataacgtaaccgacttaatcataacgacgcaacaacgcctaaacgccgacgaacgatcctccgccaccaaaacctctaacgctactaccgccgactccgtatcgtcgaaacgaaaaacgcgacgaacgacgaccgttacccgccgttcgtccgccattccctcgtcaacgcctccgacccaaaaaaatatacgtaaaaaaccgaatacccgtctcaatatcgaacgctaacgcaataatcgtcgtactacccacgcaacgaaaaacgcttcctcgtccgaaacgccacttcgatccgaacacgaaaaccgaccccccgtatccccgattaactataccgactatcgaacctttataacgaaccttcgaaacgtccgttaacccccaaaattccgacccaccatcaccgaaaaatacgacgaaaacgtcaaccccgccgaatttctccaaatctacacgactaaaatcgaaaccgccgaaaataacgacaaaatcataacgaatttctt

SEQ ID NO: 38755 - DNA, 1142 bp, Artificial Sequence
  chemically treated genomic DNA (Homo sapiens) CpG-island No: 38755
ttagttttttaattttttgtaatttttttatatatagatttattagaatataggagtagggtattacgttttttagcggttcgaatttgtttatatcgttcgtgttttgtgtatttgttttttcgcgaatattttatagatcgagggtgaagaattttatttagcgttttcgatcgaatcggtaaaggggggtttgcgcggtttttcggtgaggagttttacgtttcgttatttggcgcgttaggtagggggcgcgtgtgtttttttaagttttcgttttttttcgtgtgcgttaagttttttttgtttagtttaatggtcgaacgggtagtggcgtataattttttttcgagggttagcggtgatgacggggagtagaattcgcgtcgtcgagttcgtattttatcgtttttttttcgtcgaggttttgggcgggaggaggcgttcgagggggtcgaaagatttacgatttcgtcgttcgcgggcgatggagaaggacggcgagacggggagtgtcgttttttcgtttacggcgatggtagtacgttttagggcgcgttttaggttgcgggcgcgtttttgcgttattcgttcgtcgttttcgatttagagattttagttcgacgttggttggatgacgtggtcgatttggttatgacggcgtagtagcgtttaggcgtcggcgggcggtttttcgttattaagatttttggcgttgttatcgtcggtttcgtgtcgtcgaggcggagggcgcggcgagcggcggtcgttattcgtcgttcgttcgttattttttcgttaacgttttcgatttaagaagatgtgcgtggggggtcggatgttcgttttaatatcgagcgttggcgtaatggtcgtcgtgttgtttacgtaacggagggcgttttttcgttcggagcgttatttcggttcgggtacgggggtcggtttttcgtgttttcggttggttgtgtcggttgtcgagtttttgtggcgagttttcggaacgttcgttggtttttaaggtttcggtttattattatcgaaaaatacgacggaagcgttaatttcgtcgagtttttttagatttatacgattgggatcgaggtcgtcgggggtgacgatagggttatggcgaatttttt

SEQ ID NO: 38756 - DNA, 1142 bp, Artificial Sequence
  chemically treated genomic DNA (Homo sapiens) CpG-island No: 38756
aaaaaattcgccataaccctatcgtcacccccgacgacctcgatcccaatcgtataaatctaaaaaaactcgacgaaattaacgcttccgtcgtatttttcgataataataaaccgaaaccttaaaaaccaacgaacgttccgaaaactcgccacaaaaactcgacaaccgacacaaccaaccgaaaacacgaaaaaccgacccccgtacccgaaccgaaataacgctccgaacgaaaaaacgccctccgttacgtaaacaacacgacgaccattacgccaacgctcgatattaaaacgaacatccgaccccccacgcacatcttcttaaatcgaaaacgttaacgaaaaaataacgaacgaacgacgaataacgaccgccgctcgccgcgccctccgcctcgacgacacgaaaccgacgataacaacgccaaaaatcttaataacgaaaaaccgcccgccgacgcctaaacgctactacgccgtcataaccaaatcgaccacgtcatccaaccaacgtcgaactaaaatctctaaatcgaaaacgacgaacgaataacgcaaaaacgcgcccgcaacctaaaacgcgccctaaaacgtactaccatcgccgtaaacgaaaaaacgacactccccgtctcgccgtccttctccatcgcccgcgaacgacgaaatcgtaaatctttcgaccccctcgaacgcctcctcccgcccaaaacctcgacgaaaaaaaaacgataaaatacgaactcgacgacgcgaattctactccccgtcatcaccgctaaccctcgaaaaaaaattatacgccactacccgttcgaccattaaactaaacaaaaaaaacttaacgcacacgaaaaaaaacgaaaacttaaaaaaacacacgcgccccctacctaacgcgccaaataacgaaacgtaaaactcctcaccgaaaaaccgcgcaaacccccctttaccgattcgatcgaaaacgctaaataaaattcttcaccctcgatctataaaatattcgcgaaaaaacaaatacacaaaacacgaacgatataaacaaattcgaaccgctaaaaaacgtaataccctactcctatattctaataaatctatatataaaaaaattacaaaaaattaaaaaactaa

SEQ ID NO: 38757 - DNA, 1289 bp, Artificial Sequence
  chemically treated genomic DNA (Homo sapiens) CpG-island No: 38757
gtcggtttcggttagagacgagtgtttggaggtttttattatttcgacgggacggggcgaggcgtgtgataggtcgtttgttgttatttaattcgcgatttgatcggtttgtgatcggttatatattgcgatcggttacggatcggataagcgtgcgttgcgttgtattaaacgcggcgtggcgcgttcgttcgaatcgtaataaatgcggttaggtgagcgtcgttgtgtttatttaatttatatacgtggcgttaatattatagggggtcggggcgttttagttttcggggtcgaaacgggagcggttcgatttttcggggggatagagggaggggcggttacgttattttcgggttcgacgttttttgagggtgttaggttacgtgggcgattgtgtttgttttaaatttttagttatgatattttcgattttatgttatcgatagtagttttcggcgttatgttagggcgatcgtttttttcgagggaagcgttcgggcgtgacgttattttttaggtttggtgataggtggggtcggtttttataggcgggtagaaatttagcgatcgtaaatcgtgcgtatcggtaagggaaaatcgattgataataatgagcggttttttcgcgatcgttatattattcgagtagcggcgaatcgggacgagttgattcgtttcgtttggagatatgatgatggcgtttcggtcggcgagcgtagttaacgcgcgtacgatatgttttatttcgattgttacggtcgtatattcgtttcgtgcgtcgtaaacgggcgagcgggattagtggaggtgtgggtgcgagaaacgagggggcgagatagtgggtgtaggaagcgaggagtcgggtatagcgttggtaagggtataaagacgtcgaggaagagattcgttttttttttttcgttattattttttttgttttcgttatttgtattttaatttttcgttttttgtgttttatttacgtcgtatttattcgtttttaagtttttttttcgtcggcgttatggtacggggtttcgtatcgttcgatggtagcgtgttgtcgttttttcgtatcgtgagcgagaggtaggtcgggatgtcgcgtcgatttatgtcggaatttgttatcggtcgggaggtggtcgagttgggcgagggacgttcggcgttagattattcggggcggttcgtttttttttttttttttgtaatggtagggttggtttcgttatttttttttttttttatggatgttttggagttttacgatttttagatggcgt

SEQ ID NO: 38758 - DNA, 1289 bp, Artificial Sequence
  chemically treated genomic DNA (Homo sapiens) CpG-island No: 38758
acgccatctaaaaatcgtaaaactccaaaacatccataaaaaaaaaaaaaaataacgaaaccaaccctaccattacaaaaaaaaaaaaaaaaacgaaccgccccgaataatctaacgccgaacgtccctcgcccaactcgaccacctcccgaccgataacaaattccgacataaatcgacgcgacatcccgacctacctctcgctcacgatacgaaaaaacgacaacacgctaccatcgaacgatacgaaaccccgtaccataacgccgacgaaaaaaaaacttaaaaacgaataaatacgacgtaaataaaacacaaaaaacgaaaaattaaaatacaaataacgaaaacaaaaaaaataataacgaaaaaaaaaaaacgaatctcttcctcgacgtctttatacccttaccaacgctatacccgactcctcgcttcctacacccactatctcgccccctcgtttctcgcacccacacctccactaatcccgctcgcccgtttacgacgcacgaaacgaatatacgaccgtaacaatcgaaataaaacatatcgtacgcgcgttaactacgctcgccgaccgaaacgccatcatcatatctccaaacgaaacgaatcaactcgtcccgattcgccgctactcgaataatataacgatcgcgaaaaaaccgctcattattatcaatcgattttcccttaccgatacgcacgatttacgatcgctaaatttctacccgcctataaaaaccgaccccacctatcaccaaacctaaaaaataacgtcacgcccgaacgcttccctcgaaaaaaacgatcgccctaacataacgccgaaaactactatcgataacataaaatcgaaaatatcataactaaaaatttaaaacaaacacaatcgcccacgtaacctaacaccctcaaaaaacgtcgaacccgaaaataacgtaaccgcccctccctctatccccccgaaaaatcgaaccgctcccgtttcgaccccgaaaactaaaacgccccgaccccctataatattaacgccacgtatataaattaaataaacacaacgacgctcacctaaccgcatttattacgattcgaacgaacgcgccacgccgcgtttaatacaacgcaacgcacgcttatccgatccgtaaccgatcgcaatatataaccgatcacaaaccgatcaaatcgcgaattaaataacaacaaacgacctatcacacgcctcgccccgtcccgtcgaaataataaaaacctccaaacactcgtctctaaccgaaaccgac

SEQ ID NO: 38759 - DNA, 1289 bp, Artificial Sequence
  chemically treated genomic DNA (Homo sapiens) CpG-island No: 38759
gcgttatttggagatcgtagaattttagaatatttatgaagaaagaagaaaatggcggaattagttttgttattgtaaaggggagaaagaagacggatcgtttcgggtagtttggcgtcgggcgtttttcgtttagttcgattatttttcggtcggtggtagatttcggtatgaatcggcgcggtatttcggtttgtttttcgtttacgatgcgggaaggcggtagtacgttattatcgagcggtgcggagtttcgtgttatgacgtcggcggaggaggggtttgagagcgagtgagtgcggcgtgggtagggtataggaaacgaagagttagagtgtaagtggcgaaggtaaggggagtaatggcgagaggaaggaaacgaatttttttttcggcgtttttatatttttgttaacgttatgttcggtttttcgttttttgtatttattatttcgttttttcgtttttcgtatttatatttttattaatttcgttcgttcgtttgcggcgtacgaggcggatgtgcggtcgtggtagtcgagatgggatatatcgtgcgcgcgttaattacgttcgtcgatcgaagcgttattattatgtttttaggcgaaacgaattagttcgtttcgattcgtcgttgttcgagtaatgtagcgatcgcgaagaggtcgtttattattgttagtcggtttttttttatcgatgcgtacgatttgcgatcgttgggtttttgttcgtttgtagagatcggttttatttgttattaggtttaaggagtggcgttacgttcgagcgtttttttcgaggagagcgatcgttttggtataacgtcgggggttattgtcggtgatatgggatcgggagtattatgattagaggtttgaggtagatataatcgtttacgtggtttggtatttttaggggacgtcgggttcgagggtgacgtagtcgtttttttttttgttttttcgaggggtcgggtcgttttcgtttcggtttcgagggttggggcgtttcgattttttgtggtgttggcgttacgtgtgtgggttaggtgagtatagcggcgtttatttaatcgtatttattgcggttcggacgagcgcgttacgtcgcgtttaatgtagcgtagcgtacgtttattcggttcgtgatcggtcgtagtgtgtgatcgattatagatcggttagatcgcgggttaggtggtaataggcggtttgttatacgtttcgtttcgtttcgtcggaatgatgagagtttttaggtattcgtttttagtcggagtcggt

SEQ ID NO: 38760 - DNA, 1289 bp, Artificial Sequence
  chemically treated genomic DNA (Homo sapiens) CpG-island No: 38760
accgactccgactaaaaacgaatacctaaaaactctcatcattccgacgaaacgaaacgaaacgtataacaaaccgcctattaccacctaacccgcgatctaaccgatctataatcgatcacacactacgaccgatcacgaaccgaataaacgtacgctacgctacattaaacgcgacgtaacgcgctcgtccgaaccgcaataaatacgattaaataaacgccgctatactcacctaacccacacacgtaacgccaacaccacaaaaaatcgaaacgccccaaccctcgaaaccgaaacgaaaacgacccgacccctcgaaaaaacaaaaaaaaaaacgactacgtcaccctcgaacccgacgtcccctaaaaataccaaaccacgtaaacgattatatctacctcaaacctctaatcataatactcccgatcccatatcaccgacaataacccccgacgttataccaaaacgatcgctctcctcgaaaaaaacgctcgaacgtaacgccactccttaaacctaataacaaataaaaccgatctctacaaacgaacaaaaacccaacgatcgcaaatcgtacgcatcgataaaaaaaaaccgactaacaataataaacgacctcttcgcgatcgctacattactcgaacaacgacgaatcgaaacgaactaattcgtttcgcctaaaaacataataataacgcttcgatcgacgaacgtaattaacgcgcgcacgatatatcccatctcgactaccacgaccgcacatccgcctcgtacgccgcaaacgaacgaacgaaattaataaaaatataaatacgaaaaacgaaaaaacgaaataataaatacaaaaaacgaaaaaccgaacataacgttaacaaaaatataaaaacgccgaaaaaaaaattcgtttccttcctctcgccattactccccttaccttcgccacttacactctaactcttcgtttcctataccctacccacgccgcactcactcgctctcaaacccctcctccgccgacgtcataacacgaaactccgcaccgctcgataataacgtactaccgccttcccgcatcgtaaacgaaaaacaaaccgaaataccgcgccgattcataccgaaatctaccaccgaccgaaaaataatcgaactaaacgaaaaacgcccgacgccaaactacccgaaacgatccgtcttctttctcccctttacaataacaaaactaattccgccattttcttctttcttcataaatattctaaaattctacgatctccaaataacgc

SEQ ID NO: 38761 - DNA, 516 bp, Artificial Sequence
  chemically treated genomic DNA (Homo sapiens) CpG-island No: 38761
aacgcggtgatgatattggttattttcgcgtatttgtgcgagatgtttattggggtgcgtttattttttcggttgtttcggtggttttttatcgtgtagttagtgtcgtcgttatcggtagttggtggttgttatttttagttacgggggtcggtgtcgaatcgttatattttttgcgtttttcgtaagaagtgggacgattggaagagcgattggttttatattttttttgtcgacgaagcgcgttttcgattttcgagttagttttcggtttaggtttttagttggcgggcgtcggtagatttgggggatggttatgacgtcgttttcgatcgtttggcgggtttgcgattttaggggtttataggggttatggtgtacggcgattattttcgtcgtcggattgcgtcgttttagcggcgcgttcggggcgtttgggagtatatcgggttcgaagattttatgaggatttattagggagtgagatgggattgggtttttgaggattttaagata

SEQ ID NO: 38762 - DNA, 516 bp, Artificial Sequence
  chemically treated genomic DNA (Homo sapiens) CpG-island No: 38762
tatcttaaaatcctcaaaaacccaatcccatctcactccctaataaatcctcataaaatcttcgaacccgatatactcccaaacgccccgaacgcgccgctaaaacgacgcaatccgacgacgaaaataatcgccgtacaccataacccctataaacccctaaaatcgcaaacccgccaaacgatcgaaaacgacgtcataaccatcccccaaatctaccgacgcccgccaactaaaaacctaaaccgaaaactaactcgaaaatcgaaaacgcgcttcgtcgacaaaaaaaatataaaaccaatcgctcttccaatcgtcccacttcttacgaaaaacgcaaaaaatataacgattcgacaccgacccccgtaactaaaaataacaaccaccaactaccgataacgacgacactaactacacgataaaaaaccaccgaaacaaccgaaaaaataaacgcaccccaataaacatctcgcacaaatacgcgaaaataaccaatatcatcaccgcgtt

SEQ ID NO: 38763 - DNA, 516 bp, Artificial Sequence
  chemically treated genomic DNA (Homo sapiens) CpG-island No: 38763
tattttgaagtttttaggggtttagttttattttattttttggtgagtttttatgaagttttcggattcggtgtatttttaggcgtttcgagcgcgtcgttggagcggcgtaattcgacgacggaggtagtcgtcgtatattatggtttttgtgagtttttgggatcgtaggttcgttaggcggtcgaggacggcgttatagttattttttagatttatcggcgttcgttagttggaggtttgagtcgggggttggttcggaagtcggaggcgcgtttcgtcggtaaggggggtgtagaattagtcgtttttttagtcgttttattttttgcggagggcgtaggggatgtagcggttcggtatcggttttcgtggttggaagtagtagttattaattatcgatggcggcgatattgattgtacggtgaagaattatcggaatagtcggagagatgggcgtattttaatgaatatttcgtatagatgcgcgaagatggttaatgttattatcgcgtt

SEQ ID NO: 38764 - DNA, 516 bp, Artificial Sequence
  chemically treated genomic DNA (Homo sapiens) CpG-island No: 38764
aacgcgataataacattaaccatcttcgcgcatctatacgaaatattcattaaaatacgcccatctctccgactattccgataattcttcaccgtacaatcaatatcgccgccatcgataattaataactactacttccaaccacgaaaaccgataccgaaccgctacatcccctacgccctccgcaaaaaataaaacgactaaaaaaacgactaattctacaccccccttaccgacgaaacgcgcctccgacttccgaaccaacccccgactcaaacctccaactaacgaacgccgataaatctaaaaaataactataacgccgtcctcgaccgcctaacgaacctacgatcccaaaaactcacaaaaaccataatatacgacgactacctccgtcgtcgaattacgccgctccaacgacgcgctcgaaacgcctaaaaatacaccgaatccgaaaacttcataaaaactcaccaaaaaataaaataaaactaaacccctaaaaacttcaaaata

SEQ ID NO: 38765 - DNA, 691 bp, Artificial Sequence
  chemically treated genomic DNA (Homo sapiens) CpG-island No: 38765
tcgttattttaagttcggtcggtttgaggtcgaggattcggcggtcgtagaggttcggaggcgggaatttgattagcgagaggtcgcggatcgtttacgggaagtcgaggaagttgtttaggaggtcgttcgggttttttaggtcgaggaaatcgttcgggagggagtcgttcgggttcgttaggtcgaggaagttgttcgggaggaggtcgttcgagtttattaggtcgaggaagtcgttcgggaggaggttgttcgagtttataaggtcgaggaagtcgttcgggaggaggttgttcgagtttataaggtcgaggaagtcgttcggtaggaagtcggatttcgttaggacgaggcgatggcgattttcgaggtagttcgcgacgaggtcgcgggcgcgtcgttcgggtttattttttcgtacgacgtttaggcgataattttcggggtagttggcgacgaggttgcgggcgcgtcgtttgggtttatttttttaggcgacgtttaggtttaattaggttcggaggatattttcgcgtttggtacgtttatcggtgggtcgagtcgcgtggtatttttttcgaggcggtttttttttacgttttttattgttttattgagcgtagagttttttttgtaagttttggtcgtcgtaaatattacggtgttggacgggttaagtgtttaggtg

SEQ ID NO: 38766 - DNA, 691 bp, Artificial Sequence
  chemically treated genomic DNA (Homo sapiens) CpG-island No: 38766
cacctaaacacttaacccgtccaacaccgtaatatttacgacgaccaaaacttacaaaaaaaactctacgctcaataaaacaataaaaaacgtaaaaaaaaaccgcctcgaaaaaaataccacgcgactcgacccaccgataaacgtaccaaacgcgaaaatatcctccgaacctaattaaacctaaacgtcgcctaaaaaaataaacccaaacgacgcgcccgcaacctcgtcgccaactaccccgaaaattatcgcctaaacgtcgtacgaaaaaataaacccgaacgacgcgcccgcgacctcgtcgcgaactacctcgaaaatcgccatcgcctcgtcctaacgaaatccgacttcctaccgaacgacttcctcgaccttataaactcgaacaacctcctcccgaacgacttcctcgaccttataaactcgaacaacctcctcccgaacgacttcctcgacctaataaactcgaacgacctcctcccgaacaacttcctcgacctaacgaacccgaacgactccctcccgaacgatttcctcgacctaaaaaacccgaacgacctcctaaacaacttcctcgacttcccgtaaacgatccgcgacctctcgctaatcaaattcccgcctccgaacctctacgaccgccgaatcctcgacctcaaaccgaccgaacttaaaataacga

SEQ ID NO: 38767 - DNA, 691 bp, Artificial Sequence
  chemically treated genomic DNA (Homo sapiens) CpG-island No: 38767
tatttgggtatttaattcgtttaatatcgtggtgtttgcggcggttaaggtttgtagaaggggttttgcgtttagtagggtagtagaaggcgtggggaaaagtcgtttcggagaagatgttacgcggttcggtttatcgatggacgtgttagacgcggggatgtttttcggatttggttgggtttgagcgtcgtttgagggagtgggtttaagcgacgcgttcgtagtttcgtcgttagttatttcggaagttgtcgtttgagcgtcgtgcgagggagtgggttcgagcgacgcgttcgcggtttcgtcgcgagttgtttcggaagtcgttatcgtttcgttttggcgaaattcggttttttatcgagcggttttttcggttttgtgggttcggatagttttttttcgagcggttttttcggttttgtgggttcggatagttttttttcgagcggttttttcggtttggtgggttcgggcggttttttttcgagtagttttttcggtttggcgggttcgggcggttttttttcgagcggttttttcggtttggagaattcggacggttttttgggtagttttttcggtttttcgtaggcgattcgcggtttttcgttggttagattttcgttttcgggtttttgcggtcgtcggattttcggttttagatcggtcggatttggaatggcgg

SEQ ID NO: 38768 - DNA, 691 bp, Artificial Sequence
  chemically treated genomic DNA (Homo sapiens) CpG-island No: 38768
ccgccattccaaatccgaccgatctaaaaccgaaaatccgacgaccgcaaaaacccgaaaacgaaaatctaaccaacgaaaaaccgcgaatcgcctacgaaaaaccgaaaaaactacccaaaaaaccgtccgaattctccaaaccgaaaaaaccgctcgaaaaaaaaccgcccgaacccgccaaaccgaaaaaactactcgaaaaaaaaccgcccgaacccaccaaaccgaaaaaaccgctcgaaaaaaaactatccgaacccacaaaaccgaaaaaaccgctcgaaaaaaaactatccgaacccacaaaaccgaaaaaaccgctcgataaaaaaccgaatttcgccaaaacgaaacgataacgacttccgaaacaactcgcgacgaaaccgcgaacgcgtcgctcgaacccactccctcgcacgacgctcaaacgacaacttccgaaataactaacgacgaaactacgaacgcgtcgcttaaacccactccctcaaacgacgctcaaacccaaccaaatccgaaaaacatccccgcgtctaacacgtccatcgataaaccgaaccgcgtaacatcttctccgaaacgacttttccccacgccttctactaccctactaaacgcaaaaccccttctacaaaccttaaccgccgcaaacaccacgatattaaacgaattaaatacccaaata

SEQ ID NO: 38769 - DNA, 1113 bp, Artificial Sequence
  chemically treated genomic DNA (Homo sapiens) CpG-island No: 38769
ggcggagttcgacgtcgcgtgggcgcgtgtcgaagaggggcgacgttcggtggaggttatggtggaggtgggtcgtaaggtttatcgtcggtacgtttcggagtttgaaattcgtaagaaggtgttggcggagatcgttaaggaagtggaagaggagcggggggttgtttttattgttattatcgtgatgaacgaggcgtaggatatttttcgtttttaatacgggagttgggaggcggagttaaggaagaagttcgacgtcgtttagggagtgtttgacgttgtcgttgttcgagaatagcgggcggcggagatcgaagcggcgtttcggtagttgaagaggtttttgaggcgcgcgttatggtattggaagagcgcgtttgcgtcgtggagagggatttggcggatcgcgaggtcgtcgttattattcgggaagtaacgttggcggcgtacgaggttgtttgcgtcgaagaagagttcgcgttttcgttttcgcgaggacgcgtttatcgagcgggagcgagttttcgagggggtcgagtcgcggtttaatagttggcggatagtttgttttttcgcgaggtagcgtaggaggagtaagcgcgtcgtaatttggaaggtgttcgcgtcgagagggtcgtattgaattaacgggtcgttgagttcgaggcgcgggcgaaggagttggacgcgagggtgcgtagcggcggggcggtcgcgggcgaaagcgatttagtcgttcgtttcgtagttgtcgaatatattatcgtcgatttgtagggcgcgttggattcgttcgtcggggaggtcgaagtttttcgtttggtaggcgaggttgggttcggtatgttttgggacgtcgtttttcgtttagattgcgtcggtcggtaagtgggtttttggagagggcggatcgtaaagtacgtcgttaattagggaggtttcgtttagcgtttttcgaagatggtcggggttttttaacggtttttcgaggagttcgagaagataattaagttattttcgagggatttcgtttaaggagcggtggagttcgttttggcgagttattaggttagggattttaatttttttttatggatggcgttggaagag

SEQ ID NO: 38770 - DNA, 1113 bp, Artificial Sequence
  chemically treated genomic DNA (Homo sapiens) CpG-island No: 38770
ctcttccaacgccatccataaaaaaaaattaaaatccctaacctaataactcgccaaaacgaactccaccgctccttaaacgaaatccctcgaaaataacttaattatcttctcgaactcctcgaaaaaccgttaaaaaaccccgaccatcttcgaaaaacgctaaacgaaacctccctaattaacgacgtactttacgatccgccctctccaaaaacccacttaccgaccgacgcaatctaaacgaaaaacgacgtcccaaaacataccgaacccaacctcgcctaccaaacgaaaaacttcgacctccccgacgaacgaatccaacgcgccctacaaatcgacgataatatattcgacaactacgaaacgaacgactaaatcgctttcgcccgcgaccgccccgccgctacgcaccctcgcgtccaactccttcgcccgcgcctcgaactcaacgacccgttaattcaatacgaccctctcgacgcgaacaccttccaaattacgacgcgcttactcctcctacgctacctcgcgaaaaaacaaactatccgccaactattaaaccgcgactcgaccccctcgaaaactcgctcccgctcgataaacgcgtcctcgcgaaaacgaaaacgcgaactcttcttcgacgcaaacaacctcgtacgccgccaacgttacttcccgaataataacgacgacctcgcgatccgccaaatccctctccacgacgcaaacgcgctcttccaataccataacgcgcgcctcaaaaacctcttcaactaccgaaacgccgcttcgatctccgccgcccgctattctcgaacaacgacaacgtcaaacactccctaaacgacgtcgaacttcttccttaactccgcctcccaactcccgtattaaaaacgaaaaatatcctacgcctcgttcatcacgataataacaataaaaacaaccccccgctcctcttccacttccttaacgatctccgccaacaccttcttacgaatttcaaactccgaaacgtaccgacgataaaccttacgacccacctccaccataacctccaccgaacgtcgcccctcttcgacacgcgcccacgcgacgtcgaactccgcc

SEQ ID NO: 38771 - DNA, 1113 bp, Artificial Sequence
  chemically treated genomic DNA (Homo sapiens) CpG-island No: 38771
tttttttagcgttatttatggagagaaattggggtttttggtttggtaattcgttaggacgagttttatcgttttttgggcgaggtttttcgaggatgatttaattgttttttcgagtttttcggggagtcgttggagagtttcggttattttcgagaggcgttgggcgagatttttttggttggcggcgtattttacggttcgttttttttagaggtttatttgtcgatcggcgtaatttaggcgggagacggcgttttaaagtatgtcgggtttaatttcgtttgttaagcggagggtttcgattttttcggcggacgagtttagcgcgttttgtagatcggcgatggtgtgttcggtagttgcgaggcgggcggttaggtcgttttcgttcgcggtcgtttcgtcgttgcgtattttcgcgtttagttttttcgttcgcgtttcgagtttagcggttcgttggtttagtgcggttttttcgacgcgggtattttttagattacggcgcgtttgttttttttgcgttgtttcgcggagggataggttgttcgttagttgttgggtcgcggttcggttttttcgagagttcgttttcgttcggtgagcgcgttttcgcggaggcgggagcgcgagttttttttcggcgtaggtagtttcgtgcgtcgttagcgttgtttttcggatggtgacggcggtttcgcggttcgttagatttttttttacgacgtaggcgcgtttttttagtgttatggcgcgcgttttaagggtttttttagttgtcgggacgtcgtttcggttttcgtcgttcgttgttttcgggtagcggtagcgttaagtattttttgggcggcgtcgagttttttttttagtttcgttttttagttttcgtattgaaggcggagggtgttttacgtttcgtttattacggtggtggtaatgagggtagtttttcgttttttttttatttttttggcgattttcgttagtatttttttacgggttttaagtttcgagacgtgtcggcggtgagttttacggtttatttttattatggtttttatcgagcgtcgttttttttcgatacgcgtttacgcggcgtcgagtttcgtt

SEQ ID NO: 38772 - DNA, 1113 bp, Artificial Sequence
  chemically treated genomic DNA (Homo sapiens) CpG-island No: 38772
aacgaaactcgacgccgcgtaaacgcgtatcgaaaaaaaacgacgctcgataaaaaccataataaaaataaaccgtaaaactcaccgccgacacgtctcgaaacttaaaacccgtaaaaaaatactaacgaaaatcgccaaaaaaataaaaaaaaaacgaaaaactaccctcattaccaccaccgtaataaacgaaacgtaaaacaccctccgccttcaatacgaaaactaaaaaacgaaactaaaaaaaaaactcgacgccgcccaaaaaatacttaacgctaccgctacccgaaaacaacgaacgacgaaaaccgaaacgacgtcccgacaactaaaaaaacccttaaaacgcgcgccataacactaaaaaaacgcgcctacgtcgtaaaaaaaaatctaacgaaccgcgaaaccgccgtcaccatccgaaaaacaacgctaacgacgcacgaaactacctacgccgaaaaaaaactcgcgctcccgcctccgcgaaaacgcgctcaccgaacgaaaacgaactctcgaaaaaaccgaaccgcgacccaacaactaacgaacaacctatccctccgcgaaacaacgcaaaaaaaacaaacgcgccgtaatctaaaaaatacccgcgtcgaaaaaaccgcactaaaccaacgaaccgctaaactcgaaacgcgaacgaaaaaactaaacgcgaaaatacgcaacgacgaaacgaccgcgaacgaaaacgacctaaccgcccgcctcgcaactaccgaacacaccatcgccgatctacaaaacgcgctaaactcgtccgccgaaaaaatcgaaaccctccgcttaacaaacgaaattaaacccgacatactttaaaacgccgtctcccgcctaaattacgccgatcgacaaataaacctctaaaaaaaacgaaccgtaaaatacgccgccaaccaaaaaaatctcgcccaacgcctctcgaaaataaccgaaactctccaacgactccccgaaaaactcgaaaaaacaattaaatcatcctcgaaaaacctcgcccaaaaaacgataaaactcgtcctaacgaattaccaaaccaaaaaccccaatttctctccataaataacgctaaaaaaa

SEQ ID NO: 38773 - DNA, 589 bp, Artificial Sequence
  chemically treated genomic DNA (Homo sapiens) CpG-island No: 38773
cgacgaaggtgttcgatgttttacgggttaggtagttttgtgtcgtcgttcgtggttagtcgaacggagttcggttgggggacgttgattattcgatacggatttttttatattggtgagagtttgtttagtttagtacgcgtttggacgcggcgtaggacgaggtcgtcgacgtagagtgatcgggttcggacgtggcgttgatggtagcgtcgtaggttttgttggtagcgcgcggttcggagggtcgcgcgtcgcgttcgtttttttaagtagtcgaggtcgtttttgcgaagttgattttgattagtttcgtaatatatggtggttcgaggggattttagggtgagtttagatgggaggatcgttttcgcgtcgtagacgaagaagaaaggcgttttttcggttgttcggtttggcgtggttcggttcgtttagagtatcgttggtagtttttcgatttacgagtcgtcgtgttttttgaggatgttgaaggttttggttttgaggtttttgaggatttttgcgttggcgcgttttatttggttattgtttttggggtgggcgggggaggcgaagtagagtttga

SEQ ID NO: 38774 - DNA, 589 bp, Artificial Sequence
  chemically treated genomic DNA (Homo sapiens) CpG-island No: 38774
tcaaactctacttcgcctcccccgcccaccccaaaaacaataaccaaataaaacgcgccaacgcaaaaatcctcaaaaacctcaaaaccaaaaccttcaacatcctcaaaaaacacgacgactcgtaaatcgaaaaactaccaacgatactctaaacgaaccgaaccacgccaaaccgaacaaccgaaaaaacgcctttcttcttcgtctacgacgcgaaaacgatcctcccatctaaactcaccctaaaatcccctcgaaccaccatatattacgaaactaatcaaaatcaacttcgcaaaaacgacctcgactacttaaaaaaacgaacgcgacgcgcgaccctccgaaccgcgcgctaccaacaaaacctacgacgctaccatcaacgccacgtccgaacccgatcactctacgtcgacgacctcgtcctacgccgcgtccaaacgcgtactaaactaaacaaactctcaccaatataaaaaaatccgtatcgaataatcaacgtcccccaaccgaactccgttcgactaaccacgaacgacgacacaaaactacctaacccgtaaaacatcgaacaccttcgtcg

SEQ ID NO: 38775 - DNA, 589 bp, Artificial Sequence
  chemically treated genomic DNA (Homo sapiens) CpG-island No: 38775
ttaagttttgtttcgtttttttcgtttattttagaagtaatggttaagtggagcgcgttaacgtagaaatttttaagggttttaaaattaagatttttaatatttttaagaagtacggcgattcgtggatcgagaagttgttagcggtgttttgggcgaatcggattacgttaagtcgagtaatcggggaaacgtttttttttttcgtttacggcgcggaggcggtttttttatttgagtttattttggggttttttcgggttattatgtattgcgagattgattaagattagtttcgtagagacgatttcgattatttggaagagcgaacgcggcgcgcggtttttcgagtcgcgcgttattagtagagtttgcggcgttattattagcgttacgttcgggttcgattattttacgtcgacgatttcgttttacgtcgcgtttaaacgcgtgttggattgagtaagtttttattaatgtgggagggttcgtatcgagtgattagcgttttttagtcgggtttcgttcggttggttacgggcgacggtatagagttgtttaattcgtggaatatcgaatattttcgtcg

SEQ ID NO: 38776 - DNA, 589 bp, Artificial Sequence
  chemically treated genomic DNA (Homo sapiens) CpG-island No: 38776
cgacgaaaatattcgatattccacgaattaaacaactctataccgtcgcccgtaaccaaccgaacgaaacccgactaaaaaacgctaatcactcgatacgaaccctcccacattaataaaaacttactcaatccaacacgcgtttaaacgcgacgtaaaacgaaatcgtcgacgtaaaataatcgaacccgaacgtaacgctaataataacgccgcaaactctactaataacgcgcgactcgaaaaaccgcgcgccgcgttcgctcttccaaataatcgaaatcgtctctacgaaactaatcttaatcaatctcgcaatacataataacccgaaaaaaccccaaaataaactcaaataaaaaaaccgcctccgcgccgtaaacgaaaaaaaaaaacgtttccccgattactcgacttaacgtaatccgattcgcccaaaacaccgctaacaacttctcgatccacgaatcgccgtacttcttaaaaatattaaaaatcttaattttaaaacccttaaaaatttctacgttaacgcgctccacttaaccattacttctaaaataaacgaaaaaaacgaaacaaaacttaa

SEQ ID NO: 38777 - DNA, 678 bp, Artificial Sequence
  chemically treated genomic DNA (Homo sapiens) CpG-island No: 38777
atcgtcggattaggttaatcgtatcgttgagagtcgttggttaatagaaattttggcgaaaggttttgttaattaaggtgcgtgaggcggagtgggtttcgtatttttttttatggatatcggtaagaagttcgacgttttgttttcgaggaatgtattttaggaggatttcgttagtcgcgcgtcgatagagggttttttttattagtacgtagcgtttggagatgcgttggacgcgtttatttttttcgcggttttcgggtagagttttatttgcgaggtacgtttggattttagcgatttaagtaattaatttaagggagttgggagcgtttttttcgggtttcgaggtttggatttcgacgggtttcgggggtcgtttaggcgcgttcgttttttttagggggtcgggtcgcgtcgacggttgggtaagtttttttttaaaggcgttcggtggggtttgggttcgcgaggaagcgagttttgagagttcgtcggcgatcgcgttatttcgtttgggtacgtgtcgaagttttatttcgtcgaaatgacgttttatacgtcgtatttggcgtacgtaagcgtttatttgcgggttagagtatttgtattttttatagatttggttaacgattagttgggagtcgtttaatattaggaggcggcggatttttagtt

SEQ ID NO: 38778 - DNA, 678 bp, Artificial Sequence
  chemically treated genomic DNA (Homo sapiens) CpG-island No: 38778
aactaaaaatccgccgcctcctaatattaaacgactcccaactaatcgttaaccaaatctataaaaaatacaaatactctaacccgcaaataaacgcttacgtacgccaaatacgacgtataaaacgtcatttcgacgaaataaaacttcgacacgtacccaaacgaaataacgcgatcgccgacgaactctcaaaactcgcttcctcgcgaacccaaaccccaccgaacgcctttaaaaaaaaacttacccaaccgtcgacgcgacccgaccccctaaaaaaaacgaacgcgcctaaacgacccccgaaacccgtcgaaatccaaacctcgaaacccgaaaaaaacgctcccaactcccttaaattaattacttaaatcgctaaaatccaaacgtacctcgcaaataaaactctacccgaaaaccgcgaaaaaaataaacgcgtccaacgcatctccaaacgctacgtactaataaaaaaaaccctctatcgacgcgcgactaacgaaatcctcctaaaatacattcctcgaaaacaaaacgtcgaacttcttaccgatatccataaaaaaaaatacgaaacccactccgcctcacgcaccttaattaacaaaacctttcgccaaaatttctattaaccaacgactctcaacgatacgattaacctaatccgacgat

SEQ ID NO: 38779 - DNA, 678 bp, Artificial Sequence
  chemically treated genomic DNA (Homo sapiens) CpG-island No: 38779
gattggggattcgtcgttttttggtgttaggcgatttttagttggtcgttaattaggtttgtaaggagtataggtgttttgattcgtagatggacgtttacgtgcgttaagtgcggcgtatggagcgttatttcgacgggatagagtttcggtacgtgtttagacgggataacgcggtcgtcgacgagtttttaaggttcgttttttcgcgagtttagattttatcgggcgtttttgaagaaaggtttgtttagtcgtcggcgcgattcgattttttaggggagacggacgcgtttgaacggttttcgaggttcgtcggagtttaggtttcgggattcgaggggagcgtttttagtttttttagattgattgtttggatcgttgagatttaggcgtatttcgtagataagattttattcgaggatcgcgaagggagtgaacgcgtttagcgtatttttaagcgttacgtgttagtggaagggattttttatcggcgcgcggttaacggagtttttttgaagtgtatttttcgggaataaggcgtcgagttttttgtcgatatttatgaaggagagtgcggagtttatttcgttttacgtattttggttggtaaggtttttcgttagggtttttattggttaacggtttttaacgatgcggttgatttggttcggcggt

SEQ ID NO: 38780 - DNA, 678 bp, Artificial Sequence
  chemically treated genomic DNA (Homo sapiens) CpG-island No: 38780
accgccgaaccaaatcaaccgcatcgttaaaaaccgttaaccaataaaaaccctaacgaaaaaccttaccaaccaaaatacgtaaaacgaaataaactccgcactctccttcataaatatcgacaaaaaactcgacgccttattcccgaaaaatacacttcaaaaaaactccgttaaccgcgcgccgataaaaaatcccttccactaacacgtaacgcttaaaaatacgctaaacgcgttcactcccttcgcgatcctcgaataaaatcttatctacgaaatacgcctaaatctcaacgatccaaacaatcaatctaaaaaaactaaaaacgctcccctcgaatcccgaaacctaaactccgacgaacctcgaaaaccgttcaaacgcgtccgtctcccctaaaaaatcgaatcgcgccgacgactaaacaaacctttcttcaaaaacgcccgataaaatctaaactcgcgaaaaaacgaaccttaaaaactcgtcgacgaccgcgttatcccgtctaaacacgtaccgaaactctatcccgtcgaaataacgctccatacgccgcacttaacgcacgtaaacgtccatctacgaatcaaaacacctatactccttacaaacctaattaacgaccaactaaaaatcgcctaacaccaaaaaacgacgaatccccaatc

SEQ ID NO: 38781 - DNA, 565 bp, Artificial Sequence
  chemically treated genomic DNA (Homo sapiens) CpG-island No: 38781
attcgatgcgtttggaaataatggcgtaattttttcgaggttattagaatagcgtaaagtattttttgggtttgagggtatcgggttttggcgtttcggagggtttcgttaacgaagtagacgggtcgttgtatttttcggcggggtcgatttttttcgttaggggtcgtatttttagggcgtttttcgttcgagaggttgcgcggggtgtattcggtttttgtgttatcgatttcggggttcgagggcgataaacgcggttttttcgtagtggtttcggggttattttgggggtcgggggcgtttggtatcgtcggataagcgggcggagggttattttcggtcgtcgggggttttggatcgtcgttcggttcgggggttttttttttttgttttttttcgggtcgagtcggtatagggtggggacgcgtggagtgggggttgttttcgtcgcgttttacgattaacgtcgcgttgattatttgcggggttgttattaggtagagtagtaacggtttatttggtttcggggcgattatgattgggggagaattgaggtatgttt

SEQ ID NO: 38782 - DNA, 565 bp, Artificial Sequence
  chemically treated genomic DNA (Homo sapiens) CpG-island No: 38782
aaacatacctcaattctcccccaatcataatcgccccgaaaccaaataaaccgttactactctacctaataacaaccccgcaaataatcaacgcgacgttaatcgtaaaacgcgacgaaaacaacccccactccacgcgtccccaccctataccgactcgacccgaaaaaaaacaaaaaaaaaaaacccccgaaccgaacgacgatccaaaacccccgacgaccgaaaataaccctccgcccgcttatccgacgataccaaacgcccccgacccccaaaataaccccgaaaccactacgaaaaaaccgcgtttatcgccctcgaaccccgaaatcgataacacaaaaaccgaatacaccccgcgcaacctctcgaacgaaaaacgccctaaaaatacgacccctaacgaaaaaaatcgaccccgccgaaaaatacaacgacccgtctacttcgttaacgaaaccctccgaaacgccaaaacccgataccctcaaacccaaaaaatactttacgctattctaataacctcgaaaaaattacgccattatttccaaacgcatcgaat

SEQ ID NO: 38783 - DNA, 565 bp, Artificial Sequence
  chemically treated genomic DNA (Homo sapiens) CpG-island No: 38783
aggtatattttagtttttttttagttatggtcgtttcggagttagatgagtcgttgttattttatttggtggtaatttcgtaggtggttagcgcggcgttggtcgtggagcgcgacgaggataatttttattttacgcgtttttattttgtgtcgattcgattcgggagagagtagggaggagaggttttcgagtcgaacggcggtttaaggttttcgacggtcggagatggtttttcgttcgtttgttcgacggtgttaggcgttttcgatttttaggatggtttcggggttattgcgggaaggtcgcgtttgtcgttttcggatttcgaggtcggtgatatagaagtcgagtgtatttcgcgtagtttttcggacgaagagcgttttggagatgcggtttttagcgaagaggatcggtttcgtcgaaaggtgtagcggttcgtttatttcgttagcgaggtttttcgggacgttaaaattcgatatttttaggtttagaagatgttttacgttattttgatggtttcgaggaagttgcgttattatttttaggcgtatcgggt

SEQ ID NO: 38784 - DNA, 565 bp, Artificial Sequence
  chemically treated genomic DNA (Homo sapiens) CpG-island No: 38784
acccgatacgcctaaaaataataacgcaacttcctcgaaaccatcaaaataacgtaaaacatcttctaaacctaaaaatatcgaattttaacgtcccgaaaaacctcgctaacgaaataaacgaaccgctacacctttcgacgaaaccgatcctcttcgctaaaaaccgcatctccaaaacgctcttcgtccgaaaaactacgcgaaatacactcgacttctatatcaccgacctcgaaatccgaaaacgacaaacgcgaccttcccgcaataaccccgaaaccatcctaaaaatcgaaaacgcctaacaccgtcgaacaaacgaacgaaaaaccatctccgaccgtcgaaaaccttaaaccgccgttcgactcgaaaacctctcctccctactctctcccgaatcgaatcgacacaaaataaaaacgcgtaaaataaaaattatcctcgtcgcgctccacgaccaacgccgcgctaaccacctacgaaattaccaccaaataaaataacaacgactcatctaactccgaaacgaccataactaaaaaaaaactaaaatatacct

SEQ ID NO: 38785 - DNA, 908 bp, Artificial Sequence
  chemically treated genomic DNA (Homo sapiens) CpG-island No: 38785
ttatgcgtggtagggggtaagggtttttaggatatgttttgttaaggtcggtgtagtcgatgtatattcgaagtttgtcgttcgttttgggaacgatgatcgggttcgttagttatttcggatggatgattttacggatgaatttagtttttagaagtcgcgttattttttcgcggatgaaggtttgacgtttcggggtttgtcgtcgtattttttgtcggatcggttttgcgttcggtcgtacggcgagacggtgtttaattatttttttggggatttcgggtatgttcgtcggtttttaggcgaagacgtcggtttttgttcgtaggaaggagacgagcgcgtttttttatttgtcgtttagaagattatcgattcgtgtggttttggacgggtcgtcgtttagggtaatttttttgatcgggatttcgtcgtaagtgattattcgttgtttcggggcggttgggacgggggggttgagtttttcgtcgttattcgcggttttggacgtcgcggcgaggtggttcgcgcgttgttttatataagtaagtgcgattttaaggtcgttatggacggtgatgtggttatcggggttcggtatttttatttggagataggcgtagtggatcgtcgttatgaattttattaacgcgggtttttttaggatcgcgttgtagggtagattgaggttcgttatatcgaagtttattagtttcgtgcggaagttggcggaattatcgaaggtgatcgggaggtcgatatgatttagcggttaagtgtgttttagcgttatatcgatgatcggttgggacggtcggagtattattttcggggttttgatggcgttaaaggttgcgggggaaaggatgttgagggttgtattttcgtttatgaggatacgttttaat

SEQ ID NO: 38786 - DNA, 908 bp, Artificial Sequence
  chemically treated genomic DNA (Homo sapiens) CpG-island No: 38786
attaaaacgtatcctcataaacgaaaatacaaccctcaacatcctttcccccgcaacctttaacgccatcaaaaccccgaaaataatactccgaccgtcccaaccgatcatcgatataacgctaaaacacacttaaccgctaaatcatatcgacctcccgatcaccttcgataattccgccaacttccgcacgaaactaataaacttcgatataacgaacctcaatctaccctacaacgcgatcctaaaaaaacccgcgttaataaaattcataacgacgatccactacgcctatctccaaataaaaataccgaaccccgataaccacatcaccgtccataacgaccttaaaatcgcacttacttatataaaacaacgcgcgaaccacctcgccgcgacgtccaaaaccgcgaataacgacgaaaaactcaacccccccgtcccaaccgccccgaaacaacgaataatcacttacgacgaaatcccgatcaaaaaaattaccctaaacgacgacccgtccaaaaccacacgaatcgataatcttctaaacgacaaataaaaaaacgcgctcgtctccttcctacgaacaaaaaccgacgtcttcgcctaaaaaccgacgaacatacccgaaatccccaaaaaaataattaaacaccgtctcgccgtacgaccgaacgcaaaaccgatccgacaaaaaatacgacgacaaaccccgaaacgtcaaaccttcatccgcgaaaaaataacgcgacttctaaaaactaaattcatccgtaaaatcatccatccgaaataactaacgaacccgatcatcgttcccaaaacgaacgacaaacttcgaatatacatcgactacaccgaccttaacaaaacatatcctaaaaacccttaccccctaccacgcataa

SEQ ID NO: 38787 - DNA, 908 bp, Artificial Sequence
  chemically treated genomic DNA (Homo sapiens) CpG-island No: 38787
gttggggcgtgtttttatagacgggggtgtagtttttaatattttttttttcgtagtttttgacgttattaaggtttcggggatggtgtttcggtcgttttagtcgattatcggtgtgacgttggggtatatttggtcgttaggttatatcgatttttcggttattttcggtggtttcgttaattttcgtacggagttggtgaatttcgatgtggcgggttttagtttgttttataacgcggttttggggaggttcgcgttggtgaagtttatggcggcggtttattacgtttatttttagatgaagatgtcgggtttcggtggttatattatcgtttatggcgattttaaagtcgtatttgtttgtatggagtagcgcgcggattatttcgtcgcggcgtttaaggtcgcgggtggcgacgagaggtttagttttttcgttttagtcgtttcgaggtagcggatgattatttgcgacgaggtttcggttaaggaggttgttttgggcgacggttcgtttaagattatacgaatcggtggttttttggacgataaataggaagacgcgttcgttttttttttgcgggtaaaagtcgacgttttcgtttggagatcggcggatatgttcggggtttttagggagatgattgagtatcgtttcgtcgtgcggtcgggcgtaaggtcggttcggtagaaagtgcggcggtaagtttcggaacgttaagtttttattcgcgaggaggtggcgcgatttttggaggttggatttattcgtgaggttatttattcggagtggttggcgaattcggttatcgtttttaaggcgaacggtaagtttcggatgtgtatcgattatatcgattttaataaggtatgttttaaggatttttattttttgttacgtatag

SEQ ID NO: 38788 - DNA, 908 bp, Artificial Sequence
  chemically treated genomic DNA (Homo sapiens) CpG-island No: 38788
ctatacgtaacaaaaaataaaaatccttaaaacataccttattaaaatcgatataatcgatacacatccgaaacttaccgttcgccttaaaaacgataaccgaattcgccaaccactccgaataaataacctcacgaataaatccaacctccaaaaatcgcgccacctcctcgcgaataaaaacttaacgttccgaaacttaccgccgcactttctaccgaaccgaccttacgcccgaccgcacgacgaaacgatactcaatcatctccctaaaaaccccgaacatatccgccgatctccaaacgaaaacgtcgacttttacccgcaaaaaaaaaacgaacgcgtcttcctatttatcgtccaaaaaaccaccgattcgtataatcttaaacgaaccgtcgcccaaaacaacctccttaaccgaaacctcgtcgcaaataatcatccgctacctcgaaacgactaaaacgaaaaaactaaacctctcgtcgccacccgcgaccttaaacgccgcgacgaaataatccgcgcgctactccatacaaacaaatacgactttaaaatcgccataaacgataatataaccaccgaaacccgacatcttcatctaaaaataaacgtaataaaccgccgccataaacttcaccaacgcgaacctccccaaaaccgcgttataaaacaaactaaaacccgccacatcgaaattcaccaactccgtacgaaaattaacgaaaccaccgaaaataaccgaaaaatcgatataacctaacgaccaaatataccccaacgtcacaccgataatcgactaaaacgaccgaaacaccatccccgaaaccttaataacgtcaaaaactacgaaaaaaaaaatattaaaaactacacccccgtctataaaaacacgccccaac

SEQ ID NO: 38789 - DNA, 637 bp, Artificial Sequence
  chemically treated genomic DNA (Homo sapiens) CpG-island No: 38789
ttattatcgcgatttgtttttttcgggtaacgtacggcgggtggtcggtttggtcgaaggtgagggtaattttcgattatcgcgttcgtcgcgtcgttttatgggtaggggttacggttagaagttttcgttttatggttttgaggtttcggcgagaaacgtgagcgtacgtttttttatcgatagtggcgacggtggtttcgggtttttggaattttaggttatcgtcgttatcgtcgacgttttcggcggtggttttttgtttggttttatttcgtcggttgtcggcgggagtcgtcggggttttgtttttacggcgtttttgtttttttttttttttttattttttcgttcgtttagttaaatttttgatcgcgcggtagttcgcgaggtcgtggagggaggtgttgtgtacggaatattatttgtcggtcgggcgttttttgttgggagcgcgggtttttttttttttgtcgttcgtaggttttttttttcgggtggttcgtgaagcgttttcgacggggaggacgtgattttcgtcgtcggaatgggtcgattttttttttttttttttgtttcgtcgttttgatcgagcggcggattcgggggcggtcgaagttgttatatcggaatcgga

SEQ ID NO: 38790 - DNA, 637 bp, Artificial Sequence
  chemically treated genomic DNA (Homo sapiens) CpG-island No: 38790
tccgattccgatataacaacttcgaccgcccccgaatccgccgctcgatcaaaacgacgaaacaaaaaaaaaaaaaaaaaatcgacccattccgacgacgaaaatcacgtcctccccgtcgaaaacgcttcacgaaccacccgaaaaaaaaaacctacgaacgacaaaaaaaaaaaaacccgcgctcccaacaaaaaacgcccgaccgacaaataatattccgtacacaacacctccctccacgacctcgcgaactaccgcgcgatcaaaaatttaactaaacgaacgaaaaaataaaaaaaaaaaaaaaaacaaaaacgccgtaaaaacaaaaccccgacgactcccgccgacaaccgacgaaataaaaccaaacaaaaaaccaccgccgaaaacgtcgacgataacgacgataacctaaaattccaaaaacccgaaaccaccgtcgccactatcgataaaaaaacgtacgctcacgtttctcgccgaaacctcaaaaccataaaacgaaaacttctaaccgtaacccctacccataaaacgacgcgacgaacgcgataatcgaaaattaccctcaccttcgaccaaaccgaccacccgccgtacgttacccgaaaaaaacaaatcgcgataataa

SEQ ID NO: 38791 - DNA, 637 bp, Artificial Sequence
  chemically treated genomic DNA (Homo sapiens) CpG-island No: 38791
ttcggtttcggtgtggtagtttcggtcgttttcgggttcgtcgttcggttagggcggcgggataggaggaggaagaagaggtcggtttatttcgacgacgagggttacgtttttttcgtcgagggcgttttacgggttattcgaaaggggaggtttgcgagcgataaaaagaaggaggttcgcgtttttagtagggagcgttcggtcggtaagtggtgtttcgtgtataatatttttttttacgatttcgcggattgtcgcgcggttaaaagtttggttgagcggacgaggaagtgggaggaggagaggaggtaggagcgtcgtgagggtaaggtttcggcggttttcgtcggtaatcggcgaggtgaggttaagtagaaggttatcgtcgaggacgtcgacgatggcgacgatgatttggggttttaggagttcggggttatcgtcgttattgtcgatgggggagcgtgcgtttacgtttttcgtcggagttttaaggttatgaagcgagagtttttggtcgtggtttttatttatgaggcgacgcggcgggcgcggtggtcggaggttgtttttattttcgattagatcgattattcgtcgtgcgttgttcggggaggatagatcgcgatggtgg

SEQ ID NO: 38792 - DNA, 637 bp, Artificial Sequence
  chemically treated genomic DNA (Homo sapiens) CpG-island No: 38792
ccaccatcgcgatctatcctccccgaacaacgcacgacgaataatcgatctaatcgaaaataaaaacaacctccgaccaccgcgcccgccgcgtcgcctcataaataaaaaccacgaccaaaaactctcgcttcataaccttaaaactccgacgaaaaacgtaaacgcacgctcccccatcgacaataacgacgataaccccgaactcctaaaaccccaaatcatcgtcgccatcgtcgacgtcctcgacgataaccttctacttaacctcacctcgccgattaccgacgaaaaccgccgaaaccttaccctcacgacgctcctacctcctctcctcctcccacttcctcgtccgctcaaccaaacttttaaccgcgcgacaatccgcgaaatcgtaaaaaaaaatattatacacgaaacaccacttaccgaccgaacgctccctactaaaaacgcgaacctccttctttttatcgctcgcaaacctcccctttcgaataacccgtaaaacgccctcgacgaaaaaaacgtaaccctcgtcgtcgaaataaaccgacctcttcttcctcctcctatcccgccgccctaaccgaacgacgaacccgaaaacgaccgaaactaccacaccgaaaccgaa

SEQ ID NO: 38793 - DNA, 1034 bp, Artificial Sequence
  chemically treated genomic DNA (Homo sapiens) CpG-island No: 38793
gtttacgtggtagttttacggtttacggtggatcgggtgtacgcgggtttatatcggtcggtgtcgtgggttttacgcgttagtcgtattcgaggacgcgggcggttgacggtcgggttttacgcggtagtcgttcggtgcgttcgaaggcggttacggcggtacggtcggcgggaggcggtgcgttcgtatttttatggtcgtcggcggcggttataggtacggcggagcggcggttaagagaagggagggaaagggggaaacgaaatgggtggtttacggtttattttaggtcgacggcgacgacgaaaacggcggtcggagcggaggaaggcggcggcgcggttcgggtcgacggggacggcggcgtttcggcgatcgacgagcgaaacggagtggtggacgaggtcggcgaggatgcggcgaagtcgaagtaggcggcgtcgaggtgggaggtggttcggggcgacgacgacggcggattagagttcggcggcgacggcggagagagagagcgacggcgcgagttcgatttcggcgaggaggaagggcggcgagaggcggaaacggacggaggaggtgcggggagggtttatatagggttggaagggggagagagcggtcggcggggaaggaataggtacgggaggttcggtcgttataatggcgtcggcgagatttgcggggtaaatttattcgtttgaacgcgagggagagagggaaaaatggggggaaagggagagggaattacggggaataatttttttttattgattgtacgcggggaggacggggacggtgggattcgcggcggcggcggcgttagggtacgggcgaggcggcgggtgcggcgcgaggtaggggatgacgggtgggttttattcgttagcgagggtggcgggcgggttcgttcgttagcggcgcgcgcgtgggggaaggcggatgggttgcgggggagaggagagagagggagggagttgggtcgagtcggtttaagagggagagggagggaaaggggattttttagagttttt

SEQ ID NO: 38794 - DNA, 1034 bp, Artificial Sequence
  chemically treated genomic DNA (Homo sapiens) CpG-island No: 38794
aaaaactctaaaaaatcccctttccctccctctccctcttaaaccgactcgacccaactccctccctctctctcctctcccccgcaacccatccgccttcccccacgcgcgcgccgctaacgaacgaacccgcccgccaccctcgctaacgaataaaacccacccgtcatcccctacctcgcgccgcacccgccgcctcgcccgtaccctaacgccgccgccgccgcgaatcccaccgtccccgtcctccccgcgtacaatcaataaaaaaaaattattccccgtaattccctctccctttccccccatttttccctctctccctcgcgttcaaacgaataaatttaccccgcaaatctcgccgacgccattataacgaccgaacctcccgtacctattccttccccgccgaccgctctctcccccttccaaccctatataaaccctccccgcacctcctccgtccgtttccgcctctcgccgcccttcctcctcgccgaaatcgaactcgcgccgtcgctctctctctccgccgtcgccgccgaactctaatccgccgtcgtcgtcgccccgaaccacctcccacctcgacgccgcctacttcgacttcgccgcatcctcgccgacctcgtccaccactccgtttcgctcgtcgatcgccgaaacgccgccgtccccgtcgacccgaaccgcgccgccgccttcctccgctccgaccgccgttttcgtcgtcgccgtcgacctaaaataaaccgtaaaccacccatttcgtttccccctttccctcccttctcttaaccgccgctccgccgtacctataaccgccgccgacgaccataaaaatacgaacgcaccgcctcccgccgaccgtaccgccgtaaccgccttcgaacgcaccgaacgactaccgcgtaaaacccgaccgtcaaccgcccgcgtcctcgaatacgactaacgcgtaaaacccacgacaccgaccgatataaacccgcgtacacccgatccaccgtaaaccgtaaaactaccacgtaaac

SEQ ID NO: 38795 - DNA, 1034 bp, Artificial Sequence
  chemically treated genomic DNA (Homo sapiens) CpG-island No: 38795
aaaaattttaaaaagtttttttttttttttttttttttttgggtcggttcggtttagtttttttttttttttttttttttttcgtagtttattcgtttttttttacgcgcgcgtcgttgacgggcgggttcgttcgttattttcgttgacgggtggggtttattcgttattttttatttcgcgtcgtattcgtcgtttcgttcgtgttttagcgtcgtcgtcgtcgcgaattttatcgttttcgtttttttcgcgtgtaattaataggggagaattatttttcgtgattttttttttttttttttttatttttttttttttttttcgcgtttaaacgggtggatttgtttcgtaaatttcgtcggcgttattatggcggtcggatttttcgtgtttatttttttttcgtcggtcgtttttttttttttttaattttatataaatttttttcgtatttttttcgttcgttttcgtttttcgtcgtttttttttttcgtcggaatcgagttcgcgtcgtcgtttttttttttcgtcgtcgtcgtcgagttttggttcgtcgtcgtcgtcgtttcggattattttttatttcggcgtcgtttgtttcggtttcgtcgtattttcgtcgatttcgtttattatttcgtttcgttcgtcgatcgtcggagcgtcgtcgttttcgtcgattcgaatcgcgtcgtcgttttttttcgtttcggtcgtcgttttcgtcgtcgtcgtcgatttagggtgagtcgtggattatttatttcgtttttttttttttttttttttttttggtcgtcgtttcgtcgtgtttatggtcgtcgtcggcgattataggggtgcgggcgtatcgtttttcgtcggtcgtgtcgtcgtggtcgttttcgggcgtatcgagcggttgtcgcgtggggttcggtcgttagtcgttcgcgttttcgggtgcggttgacgcgtggggtttacggtatcggtcggtgtgagttcgcgtgtattcggtttatcgtggatcgtgaggttgttacgtgggt

SEQ ID NO: 38796 - DNA, 1034 bp, Artificial Sequence
  chemically treated genomic DNA (Homo sapiens) CpG-island No: 38796
acccacgtaacaacctcacgatccacgataaaccgaatacacgcgaactcacaccgaccgataccgtaaaccccacgcgtcaaccgcacccgaaaacgcgaacgactaacgaccgaaccccacgcgacaaccgctcgatacgcccgaaaacgaccacgacgacacgaccgacgaaaaacgatacgcccgcacccctataatcgccgacgacgaccataaacacgacgaaacgacgaccaaaaaaaaaaaaaaaaaaaaaaaaacgaaataaataatccacgactcaccctaaatcgacgacgacgacgaaaacgacgaccgaaacgaaaaaaaacgacgacgcgattcgaatcgacgaaaacgacgacgctccgacgatcgacgaacgaaacgaaataataaacgaaatcgacgaaaatacgacgaaaccgaaacaaacgacgccgaaataaaaaataatccgaaacgacgacgacgacgaaccaaaactcgacgacgacgacgaaaaaaaaaaacgacgacgcgaactcgattccgacgaaaaaaaaaaacgacgaaaaacgaaaacgaacgaaaaaaatacgaaaaaaatttatataaaattaaaaaaaaaaaaaaacgaccgacgaaaaaaaaataaacacgaaaaatccgaccgccataataacgccgacgaaatttacgaaacaaatccacccgtttaaacgcgaaaaaaaaaaaaaaaaataaaaaaaaaaaaaaaaaaaatcacgaaaaataattctcccctattaattacacgcgaaaaaaacgaaaacgataaaattcgcgacgacgacgacgctaaaacacgaacgaaacgacgaatacgacgcgaaataaaaaataacgaataaaccccacccgtcaacgaaaataacgaacgaacccgcccgtcaacgacgcgcgcgtaaaaaaaaacgaataaactacgaaaaaaaaaaaaaaaaaaaaaaaaactaaaccgaaccgacccaaaaaaaaaaaaaaaaaaaaaaaaactttttaaaattttt

SEQ ID NO: 38797 - DNA, 1485 bp, Artificial Sequence
  chemically treated genomic DNA (Homo sapiens) CpG-island No: 38797
cgagatcgtagacggtgagttaagatttagggttggtggtatcgttatatttttcgattttagtcggtttaaagtcggttagttaatttattcgacgtaggtcgtttgtgaaggtagtaattttatttatgtcgtcgtcgtagcgatttggtgaatgatggggagtatggttttttgtcgtacggcgttggttgatggtatcgcgaagatcgacggggcgtttgcgatgtggggagtgcggtcgtttaattcgacgttttttgtgtcgtttagtaggcgaacggatagattattcgtcgtgatttttgtttttgcgattggatttcgcgtcggcgacgttgaggtttggttggtgatagttttgagatcgaagaagaggaattcggttgttagtcggcgtgcgggtgttcgttgagttaatcgggatcgaggcggcgattatggttttcgtttggtttaagatgttgacgacgtgattagtttgattgagagcgttttttttgaggagggtgtcgaggagggtgatcgttgtaatcgcgttttgttggggggtgcggaaaatcgttgtttcgtcgacgttttgttgtttaatgaggttttttgttcgtcgttcggattttaaggcgcgttgtcgtcgatttttagttttttttgtagttttttcgcgattttgttgtttacgttgtagtcgttttcgtttttgtcgttgttattttttttttaggtggcgacgtttagttttttgtcgcgtcgtttttttttcgtttttcgggttcggcgttgttttgtcgtttcgttgtcggttatgaatacgtcgaaaaagaaaggcgtgtagttattttcgtagttgttgtcgaagtcgtcgaagttgttatagtcgtagcgatagtcgaagttgtcgtattcgaggattttcgttggtcgagaattgatgtcgggggatttgaggtgttatttaattttttcgtcgagattgtttcgagaggttggagtataacgtcgatttttttggagttagattggatcggggttaaagtcggatttcgtttaggttttcgggtgggagacgttttggtcgtgaagatagtagttaaattatcgggaagttttattaggatttaatattttggtttggtcgtgtcgatgtagattggatttcgtttaagtggtttggagtcgattcgatcgagatgagtttggggtagattttagtcgagttcggaatatcgaacggggtaaggatttggttttttttcgattggtttgaattcgagttaaggagagaaattttgtcgaagtcgttggtgatgaagtcgagattgtcgaatcggaacgtttgtttaggagggaaggtgaagtcgtcgatgtcggagacgaaatttatcgtattagtcggcgaaaaatttgacgttatttttgtttggtgcgttaattgtcgaaataagatttcggtaatattaaaagggggtggttattaagttagaa

SEQ ID NO: 38798 - DNA, 1485 bp, Artificial Sequence
  chemically treated genomic DNA (Homo sapiens) CpG-island No: 38798
ttctaacttaataaccacccccttttaatattaccgaaatcttatttcgacaattaacgcaccaaacaaaaataacgtcaaatttttcgccgactaatacgataaatttcgtctccgacatcgacgacttcaccttccctcctaaacaaacgttccgattcgacaatctcgacttcatcaccaacgacttcgacaaaatttctctccttaactcgaattcaaaccaatcgaaaaaaaaccaaatccttaccccgttcgatattccgaactcgactaaaatctaccccaaactcatctcgatcgaatcgactccaaaccacttaaacgaaatccaatctacatcgacacgaccaaaccaaaatattaaatcctaataaaacttcccgataatttaactactatcttcacgaccaaaacgtctcccacccgaaaacctaaacgaaatccgactttaaccccgatccaatctaactccaaaaaaatcgacgttatactccaacctctcgaaacaatctcgacgaaaaaattaaataacacctcaaatcccccgacatcaattctcgaccaacgaaaatcctcgaatacgacaacttcgactatcgctacgactataacaacttcgacgacttcgacaacaactacgaaaataactacacgcctttctttttcgacgtattcataaccgacaacgaaacgacaaaacaacgccgaacccgaaaaacgaaaaaaaaacgacgcgacaaaaaactaaacgtcgccacctaaaaaaaaaataacaacgacaaaaacgaaaacgactacaacgtaaacaacaaaatcgcgaaaaaactacaaaaaaaactaaaaatcgacgacaacgcgccttaaaatccgaacgacgaacaaaaaacctcattaaacaacaaaacgtcgacgaaacaacgattttccgcaccccccaacaaaacgcgattacaacgatcaccctcctcgacaccctcctcaaaaaaaacgctctcaatcaaactaatcacgtcgtcaacatcttaaaccaaacgaaaaccataatcgccgcctcgatcccgattaactcaacgaacacccgcacgccgactaacaaccgaattcctcttcttcgatctcaaaactatcaccaaccaaacctcaacgtcgccgacgcgaaatccaatcgcaaaaacaaaaatcacgacgaataatctatccgttcgcctactaaacgacacaaaaaacgtcgaattaaacgaccgcactccccacatcgcaaacgccccgtcgatcttcgcgataccatcaaccaacgccgtacgacaaaaaaccatactccccatcattcaccaaatcgctacgacgacgacataaataaaattactaccttcacaaacgacctacgtcgaataaattaactaaccgactttaaaccgactaaaatcgaaaaatataacgataccaccaaccctaaatcttaactcaccgtctacgatctcg

SEQ ID NO: 38799 - DNA, 1485 bp, Artificial Sequence
  chemically treated genomic DNA (Homo sapiens) CpG-island No: 38799
ttttagtttgatagttatttttttttagtattgtcgaaattttgtttcgatagttggcgtattaggtaggggtagcgttaagtttttcgtcgattagtgcgatgggtttcgttttcggtatcgacgattttatttttttttttgggtaggcgtttcggttcggtaatttcgattttattattaacgatttcggtaagatttttttttttgattcggatttaaattagtcggggagagattaggtttttgtttcgttcggtatttcgaattcggttgagatttattttaagtttatttcgatcgagtcggttttaaattatttggacgagatttaatttatatcgatacgattagattaagatgttgggttttgatgagatttttcgatgatttggttgttgtttttacgattaaggcgttttttattcgaagatttagacgagattcggttttggtttcgatttaatttagttttagggaggtcggcgttatattttaatttttcgggatagtttcgacggaagaattggatggtattttaagtttttcggtattagttttcgattaacggagattttcgagtacgataatttcggttatcgttacgattatggtaatttcgacgatttcgataatagttacgaggatgattatacgtttttttttttcggcgtgtttatggtcgataacgaaacggtagaatagcgtcgaattcgagaagcggaagaagaacgacgcgataagaagttaaacgtcgttatttggagggagaatgataacgataagagcgagaacgattatagcgtgaataataagatcgcgaaagggttgtaaaagaggttgaggatcgacggtaacgcgttttggaattcgggcgacgagtaagagattttattgggtaataagacgtcgacgggatagcggtttttcgtattttttaatagaacgcggttgtagcgattatttttttcgatattttttttaaggaagacgtttttaattaggttgattacgtcgttaatattttgaattagacgaagattatgatcgtcgtttcggtttcggttaatttagcgagtattcgtacgtcgattggtagtcgagtttttttttttcgattttaagattattattaattaagttttagcgtcgtcggcgcgggatttagtcgtaggagtaggggttacgacgagtgatttgttcgttcgtttattgaacgatatagggagcgtcgagttgaacgatcgtattttttatatcgtaggcgtttcgtcgattttcgcgatattattaattagcgtcgtgcggtaagaggttatgttttttattatttattagatcgttacgacgacgatatggatggagttgttgtttttataaacgatttgcgtcgagtggattggttagtcggttttaagtcgattggaatcgagaagtatgacggtattattaattttgagttttggtttatcgtttacggtttcg

SEQ ID NO: 38800 - DNA, 1485 bp, Artificial Sequence
  chemically treated genomic DNA (Homo sapiens) CpG-island No: 38800
cgaaaccgtaaacgataaaccaaaactcaaaattaataataccgtcatacttctcgattccaatcgacttaaaaccgactaaccaatccactcgacgcaaatcgtttataaaaacaacaactccatccatatcgtcgtcgtaacgatctaataaataataaaaaacataacctcttaccgcacgacgctaattaataatatcgcgaaaatcgacgaaacgcctacgatataaaaaatacgatcgttcaactcgacgctccctatatcgttcaataaacgaacgaacaaatcactcgtcgtaacccctactcctacgactaaatcccgcgccgacgacgctaaaacttaattaataataatcttaaaatcgaaaaaaaaaaactcgactaccaatcgacgtacgaatactcgctaaattaaccgaaaccgaaacgacgatcataatcttcgtctaattcaaaatattaacgacgtaatcaacctaattaaaaacgtcttccttaaaaaaaatatcgaaaaaaataatcgctacaaccgcgttctattaaaaaatacgaaaaaccgctatcccgtcgacgtcttattacccaataaaatctcttactcgtcgcccgaattccaaaacgcgttaccgtcgatcctcaacctcttttacaaccctttcgcgatcttattattcacgctataatcgttctcgctcttatcgttatcattctccctccaaataacgacgtttaacttcttatcgcgtcgttcttcttccgcttctcgaattcgacgctattctaccgtttcgttatcgaccataaacacgccgaaaaaaaaaaacgtataatcatcctcgtaactattatcgaaatcgtcgaaattaccataatcgtaacgataaccgaaattatcgtactcgaaaatctccgttaatcgaaaactaataccgaaaaacttaaaataccatccaattcttccgtcgaaactatcccgaaaaattaaaatataacgccgacctccctaaaactaaattaaatcgaaaccaaaaccgaatctcgtctaaatcttcgaataaaaaacgccttaatcgtaaaaacaacaaccaaatcatcgaaaaatctcatcaaaacccaacatcttaatctaatcgtatcgatataaattaaatctcgtccaaataatttaaaaccgactcgatcgaaataaacttaaaataaatctcaaccgaattcgaaataccgaacgaaacaaaaacctaatctctccccgactaatttaaatccgaatcaaaaaaaaaaatcttaccgaaatcgttaataataaaatcgaaattaccgaaccgaaacgcctacccaaaaaaaaaaataaaatcgtcgataccgaaaacgaaacccatcgcactaatcgacgaaaaacttaacgctacccctacctaatacgccaactatcgaaacaaaatttcgacaatactaaaaaaaaataactatcaaactaaaa

SEQ ID NO: 38801 - DNA, 503 bp, Artificial Sequence
  chemically treated genomic DNA (Homo sapiens) CpG-island No: 38801
ttgtttagggtattttcgcgtcgacgtcgtcgtcgtttttcgtcgtcgtgtcgtagttttcgtcgttttcgtcgtcgacgtcgtcgtcgtatttttggggtgagagtcgtcgttgtttttttttttcgatttttttttttttttttttttttttaaatcgtcgttagttagttcgttgtcgacgtcgtcgtcgacgttaacgcgcgcggtcgattttgatttcgtttttcgtcgatgtcgatttcgatttcgacgcggtcgttatcgtcgataacgtaacgtttaagcggtcgttacggcgacgacgtcgacgttttcgtttcgagttcgtatgttatcgcgttacgtcgttgttgcgtcgttacgtcgtcgtcgtattacgtcgttgtttcgttgtcgttattatcgtttcgttattgttaaacgtgaacgaacgtgattgaaatgtgaacgaacgggaacgaacgtgaacgaaacgtgaacgaacgggaacgaatgcgaat

SEQ ID NO: 38802 - DNA, 503 bp, Artificial Sequence
  chemically treated genomic DNA (Homo sapiens) CpG-island No: 38802
attcgcattcgttcccgttcgttcacgtttcgttcacgttcgttcccgttcgttcacatttcaatcacgttcgttcacgtttaacaataacgaaacgataataacgacaacgaaacaacgacgtaatacgacgacgacgtaacgacgcaacaacgacgtaacgcgataacatacgaactcgaaacgaaaacgtcgacgtcgtcgccgtaacgaccgcttaaacgttacgttatcgacgataacgaccgcgtcgaaatcgaaatcgacatcgacgaaaaacgaaatcaaaatcgaccgcgcgcgttaacgtcgacgacgacgtcgacaacgaactaactaacgacgatttaaaaaaaaaaaaaaaaaaaaaaaaatcgaaaaaaaaaaacaacgacgactctcaccccaaaaatacgacgacgacgtcgacgacgaaaacgacgaaaactacgacacgacgacgaaaaacgacgacgacgtcgacgcgaaaataccctaaacaa

SEQ ID NO: 38803 - DNA, 503 bp, Artificial Sequence
  chemically treated genomic DNA (Homo sapiens) CpG-island No: 38803
gttcgtattcgttttcgttcgtttacgtttcgtttacgttcgttttcgttcgtttatattttaattacgttcgtttacgtttggtaatgacggggcggtagtggcggtagcggagtagcggcgtggtacggcggcggcgtggcggcgtagtagcggcgtggcgcggtggtatgcgagttcgaggcgggggcgtcggcgtcgtcgtcgtggcggtcgtttggacgttacgttgtcggcggtggcggtcgcgtcgaagtcggggtcggtatcggcgggaggcggagttagggtcggtcgcgcgcgttgacgtcggcggcggcgtcggtaacgagttagttagcggcggtttggagagagagagagagagagagagatcgagagagagaggtagcggcggtttttattttagagatgcggcggcggcgtcggcggcggaggcggcgaggattgcgatacgacggcgagagacgacggcggcgtcggcgcggggatgttttaggtag

SEQ ID NO: 38804 - DNA, 503 bp, Artificial Sequence
  chemically treated genomic DNA (Homo sapiens) CpG-island No: 38804
ctacctaaaacatccccgcgccgacgccgccgtcgtctctcgccgtcgtatcgcaatcctcgccgcctccgccgccgacgccgccgccgcatctctaaaataaaaaccgccgctacctctctctctcgatctctctctctctctctctctctccaaaccgccgctaactaactcgttaccgacgccgccgccgacgtcaacgcgcgcgaccgaccctaactccgcctcccgccgataccgaccccgacttcgacgcgaccgccaccgccgacaacgtaacgtccaaacgaccgccacgacgacgacgccgacgcccccgcctcgaactcgcataccaccgcgccacgccgctactacgccgccacgccgccgccgtaccacgccgctactccgctaccgccactaccgccccgtcattaccaaacgtaaacgaacgtaattaaaatataaacgaacgaaaacgaacgtaaacgaaacgtaaacgaacgaaaacgaatacgaac

SEQ ID NO: 38805 - DNA, 625 bp, Artificial Sequence
  chemically treated genomic DNA (Homo sapiens) CpG-island No: 38805
  unsure (572)
gtcgcgtttttttcggttattaattatggtcgtcggtcgtgtttttcgtcgtcgtttcgtttttttcgtgttcggtttttttttttatttaataaaatggaattatttcggtacgttttttagttttagttttttttcgcgttttttcgtggtcgtttcgttttttttcgtcgtcgttttttttttttcgtgttatcggtcgtttttagtcgttttttttttttcgtcggagcgtcgttcggtcgcgtcgtcgtcgttagtagcgtcgtagttgttttttttttatcggcgtcgttttcgttttacgcggagattatcggagacgcgttttcgtcggtaattagtggtattggtgttattgtattttttttagtcggttgttgtttttcgtcggagcgtcggtcgacgtcgtcgtttttttcgtcgacgtcgtggtatcgttttttttttcggttatatttcggtttcgtcggaatatcgtcgtgtcgttattaatttttttattcgtttcgtcggagtttttcggtcgttcgttttttttcgtttgtttatcggttagtcgcggtattatntatttcggtatcgtagcggtaaggttttttcggtttcgtttttttttcgatcg

SEQ ID NO: 38806 - DNA, 625 bp, Artificial Sequence
  chemically treated genomic DNA (Homo sapiens) CpG-island No: 38806
  unsure (54)
cgatcgaaaaaaaaacgaaaccgaaaaaaccttaccgctacgataccgaaatanataataccgcgactaaccgataaacaaacgaaaaaaaacgaacgaccgaaaaactccgacgaaacgaataaaaaaattaataacgacacgacgatattccgacgaaaccgaaatataaccgaaaaaaaaaacgataccacgacgtcgacgaaaaaaacgacgacgtcgaccgacgctccgacgaaaaacaacaaccgactaaaaaaaatacaataacaccaataccactaattaccgacgaaaacgcgtctccgataatctccgcgtaaaacgaaaacgacgccgataaaaaaaaaacaactacgacgctactaacgacgacgacgcgaccgaacgacgctccgacgaaaaaaaaaaaacgactaaaaacgaccgataacacgaaaaaaaaaaaacgacgacgaaaaaaaacgaaacgaccacgaaaaaacgcgaaaaaaaactaaaactaaaaaacgtaccgaaataattccattttattaaataaaaaaaaaaaccgaacacgaaaaaaacgaaacgacgacgaaaaacacgaccgacgaccataattaataaccgaaaaaaacgcgac

SEQ ID NO: 38807 - DNA, 625 bp, Artificial Sequence
  chemically treated genomic DNA (Homo sapiens) CpG-island No: 38807
  unsure (54)
cggtcgaaggggaggcgaggtcgaggggattttgtcgttgcgatgtcggagtgngtggtgtcgcggttgatcggtaaataagcgaggaggaacgggcggtcggaggatttcggcgaggcgggtggaggggttggtggcgatacggcggtgtttcggcgaaatcgaggtgtggtcggggaaggagacgatgttacggcgtcgacgaaggagacggcgacgtcggtcgacgtttcgacgagggatagtagtcggttggagggagtatagtggtattaatgttattggttgtcggcggggacgcgttttcggtggttttcgcgtgaaacggaggcgacgtcggtggaggggaagtagttgcgacgttgttggcggcgacggcgcgatcggacgacgtttcggcgaggagggagaggcggttggaggcggtcggtggtacgggagagagaggacgacggcggggagaggcggggcggttacgagagggcgcgggagggggttaaaattggagaacgtatcgaggtggttttattttattggatgggagagggagtcgggtacggggagggcggaacggcgacgggaaatacggtcggcggttatggttggtggtcgggaaaggcgcggt

SEQ ID NO: 38808 - DNA, 625 bp, Artificial Sequence
  chemically treated genomic DNA (Homo sapiens) CpG-island No: 38808
  unsure (572)
accgcgcctttcccgaccaccaaccataaccgccgaccgtatttcccgtcgccgttccgccctccccgtacccgactccctctcccatccaataaaataaaaccacctcgatacgttctccaattttaaccccctcccgcgccctctcgtaaccgccccgcctctccccgccgtcgtcctctctctcccgtaccaccgaccgcctccaaccgcctctccctcctcgccgaaacgtcgtccgatcgcgccgtcgccgccaacaacgtcgcaactacttcccctccaccgacgtcgcctccgtttcacgcgaaaaccaccgaaaacgcgtccccgccgacaaccaataacattaataccactatactccctccaaccgactactatccctcgtcgaaacgtcgaccgacgtcgccgtctccttcgtcgacgccgtaacatcgtctccttccccgaccacacctcgatttcgccgaaacaccgccgtatcgccaccaacccctccacccgcctcgccgaaatcctccgaccgcccgttcctcctcgcttatttaccgatcaaccgcgacaccacncactccgacatcgcaacgacaaaatcccctcgacctcgcctccccttcgaccg

SEQ ID NO: 38809 - DNA, 582 bp, Artificial Sequence
  chemically treated genomic DNA (Homo sapiens) CpG-island No: 38809
aggcgggatttgcgtgtcgacgtatagcgagtacgttgacgttttggcgtatcgttttacggtatcgtttatcggtttgaatttcggcgttttagaggattatgaggcgggcgttaattgtttgggtcgtagggcgggaggtagcgcgggagtggggcgttgaggggtcggtttagtttggggttttggttttgcgtttttcgatcgaattatcgtttttgagttcggtgcggggttgtcgttatcgtttggtcgtgggtgtcggagcggtcgggttgcgatttagcgtttttgggtgggcgcgggcggcgttttcgcggcgggtatttttcgaggtcgttttcgggttatgatcgatttcgtgaagttgcgtcgcgatagcgcggcggatttttttttttattacgagtatttgtgcgcgttgtagaattcggtgtcgttgttcgtcgtgcgcgtttgttttcgggagggcgtgttggattttaacgtcgatcgttttcgcggggtggattgggcgtttttgttgagtatttttaagattaataaagatttgtttttggtttttattaagagtttttttta

SEQ ID NO: 38810 - DNA, 582 bp, Artificial Sequence
  chemically treated genomic DNA (Homo sapiens) CpG-island No: 38810
taaaaaaaactcttaataaaaaccaaaaacaaatctttattaatcttaaaaatactcaacaaaaacgcccaatccaccccgcgaaaacgatcgacgttaaaatccaacacgccctcccgaaaacaaacgcgcacgacgaacaacgacaccgaattctacaacgcgcacaaatactcgtaataaaaaaaaaaatccgccgcgctatcgcgacgcaacttcacgaaatcgatcataacccgaaaacgacctcgaaaaatacccgccgcgaaaacgccgcccgcgcccacccaaaaacgctaaatcgcaacccgaccgctccgacacccacgaccaaacgataacgacaaccccgcaccgaactcaaaaacgataattcgatcgaaaaacgcaaaaccaaaaccccaaactaaaccgacccctcaacgccccactcccgcgctacctcccgccctacgacccaaacaattaacgcccgcctcataatcctctaaaacgccgaaattcaaaccgataaacgataccgtaaaacgatacgccaaaacgtcaacgtactcgctatacgtcgacacgcaaatcccgcct

SEQ ID NO: 38811 - DNA, 582 bp, Artificial Sequence
  chemically treated genomic DNA (Homo sapiens) CpG-island No: 38811
tggaagaagtttttgatggagattaagggtaggtttttattgattttgagggtgtttagtagaggcgtttagtttatttcgcggaggcggtcggcgttgaaatttagtacgttttttcggagataggcgcgtacggcgggtagcggtatcgagttttgtagcgcgtataggtattcgtagtgggagaagaagttcgtcgcgttgtcgcggcgtagttttacggagtcgattatggttcgagggcggtttcgggggatgttcgtcgcggagacgtcgttcgcgtttatttaagaacgttgagtcgtaattcggtcgtttcggtatttacggttaggcgatagcggtagtttcgtatcgggtttaggagcggtgattcggtcggaagacgtaaggttagagttttaagttaggtcggttttttaacgttttattttcgcgttgtttttcgttttgcggtttaagtagttggcgttcgttttatagttttttgaggcgtcgggatttaagtcggtgggcggtgtcgtggaacggtgcgttaagacgttaacgtgttcgttgtgcgtcggtacgtaggtttcgttt

SEQ ID NO: 38812 - DNA, 582 bp, Artificial Sequence
  chemically treated genomic DNA (Homo sapiens) CpG-island No: 38812
aaacgaaacctacgtaccgacgcacaacgaacacgttaacgtcttaacgcaccgttccacgacaccgcccaccgacttaaatcccgacgcctcaaaaaactataaaacgaacgccaactacttaaaccgcaaaacgaaaaacaacgcgaaaataaaacgttaaaaaaccgacctaacttaaaactctaaccttacgtcttccgaccgaatcaccgctcctaaacccgatacgaaactaccgctatcgcctaaccgtaaataccgaaacgaccgaattacgactcaacgttcttaaataaacgcgaacgacgtctccgcgacgaacatcccccgaaaccgccctcgaaccataatcgactccgtaaaactacgccgcgacaacgcgacgaacttcttctcccactacgaatacctatacgcgctacaaaactcgataccgctacccgccgtacgcgcctatctccgaaaaaacgtactaaatttcaacgccgaccgcctccgcgaaataaactaaacgcctctactaaacaccctcaaaatcaataaaaacctacccttaatctccatcaaaaacttcttcca

SEQ ID NO: 38813 - DNA, 571 bp, Artificial Sequence
  chemically treated genomic DNA (Homo sapiens) CpG-island No: 38813
gtcgcgttcgggagagtcgagtaaggttcgtcggtcggttagttagggttagcggagtcgagtcgggtaatgagagacgagtcggttcggagcgtgcggagcgtagacgagtataagagagagtcgggtagaggaagggaagtcggcgtgataggcggcgtgcgggaagcgggggcggtgttgtagatcggtagtatagatatttcgtcggtttcgtttttttagcgggagcgagcgagcgttatttttatttttttttttttcgttttcgttttcgagtttcgtgcgttaaggttttagcgtcgtagggttaacgagatcgttttcggtcgtagttacggcggggcgttgcgaagtcggttagtttttttcggttgttcgtttttttttttgtcgtttttagttgtttcgttttcggcgcggcgttagcgttcggcggtcggggagcgacgttttaggttgttagttcggtggtttttagtttttttcgatcgtagggttggggcgattagaaaagttagattaattaggacgagttcgggcgtggaattgggtttgaagtttttatgtt

SEQ ID NO: 38814 - DNA, 571 bp, Artificial Sequence
  chemically treated genomic DNA (Homo sapiens) CpG-island No: 38814
aacataaaaacttcaaacccaattccacgcccgaactcgtcctaattaatctaacttttctaatcgccccaaccctacgatcgaaaaaaactaaaaaccaccgaactaacaacctaaaacgtcgctccccgaccgccgaacgctaacgccgcgccgaaaacgaaacaactaaaaacgacaaaaaaaaaaacgaacaaccgaaaaaaactaaccgacttcgcaacgccccgccgtaactacgaccgaaaacgatctcgttaaccctacgacgctaaaaccttaacgcacgaaactcgaaaacgaaaacgaaaaaaaaaaaaataaaaataacgctcgctcgctcccgctaaaaaaacgaaaccgacgaaatatctatactaccgatctacaacaccgcccccgcttcccgcacgccgcctatcacgccgacttcccttcctctacccgactctctcttatactcgtctacgctccgcacgctccgaaccgactcgtctctcattacccgactcgactccgctaaccctaactaaccgaccgacgaaccttactcgactctcccgaacgcgac

SEQ ID NO: 38815 - DNA, 571 bp, Artificial Sequence
  chemically treated genomic DNA (Homo sapiens) CpG-island No: 38815
ggtatgagggttttaggtttaattttacgttcgaattcgttttgattagtttggtttttttggtcgttttagttttgcggtcggggagagttggaaattatcgagttgatagtttagagcgtcgtttttcggtcgtcgagcgttgacgtcgcgtcgggggcggggtagttggaggcggtagggagaggagcgagtagtcgggaagggttggtcggtttcgtagcgtttcgtcgtggttgcggtcggaagcggtttcgttggttttgcggcgttggagttttgacgtacggagttcgagagcgagaacgggagagaaaggggtagaaatggcgttcgttcgttttcgttgaggaggcgaagtcggcggagtgtttgtgttgtcggtttgtagtatcgttttcgtttttcgtacgtcgtttgttacgtcgatttttttttttttgttcggtttttttttgtgttcgtttgcgtttcgtacgtttcgggtcggttcgttttttattgttcggttcggtttcgttggttttgattgatcggtcggcgggttttgttcggttttttcgggcgcggt

SEQ ID NO: 38816 - DNA, 571 bp, Artificial Sequence
  chemically treated genomic DNA (Homo sapiens) CpG-island No: 38816
accgcgcccgaaaaaaccgaacaaaacccgccgaccgatcaatcaaaaccaacgaaaccgaaccgaacaataaaaaacgaaccgacccgaaacgtacgaaacgcaaacgaacacaaaaaaaaaccgaacaaaaaaaaaaaaatcgacgtaacaaacgacgtacgaaaaacgaaaacgatactacaaaccgacaacacaaacactccgccgacttcgcctcctcaacgaaaacgaacgaacgccatttctacccctttctctcccgttctcgctctcgaactccgtacgtcaaaactccaacgccgcaaaaccaacgaaaccgcttccgaccgcaaccacgacgaaacgctacgaaaccgaccaacccttcccgactactcgctcctctccctaccgcctccaactaccccgcccccgacgcgacgtcaacgctcgacgaccgaaaaacgacgctctaaactatcaactcgataatttccaactctccccgaccgcaaaactaaaacgaccaaaaaaaccaaactaatcaaaacgaattcgaacgtaaaattaaacctaaaaccctcatacc

SEQ ID NO: 38817 - DNA, 645 bp, Artificial Sequence
  chemically treated genomic DNA (Homo sapiens) CpG-island No: 38817
gagtcgtcgttaaacgtttagggaaagttattaggtgggtcggcgaacgttttcgggttagtaggtaggttttttcgtatagtagttttcgtattcggttcgtaagttcgttgttttttttgcgtcgggtatggttttaggttaggaggttttatattatgatagttaacgcgtttattttgcgttttttcgtaggttttgtttttcgttcggtttttttcggtcgcggcgttgtcggaagtgcgtgtcggcgcgggggcggatttcggtggcggcgaggggcggatttcgcggataaggttaggtttagttttgagtttcgtcgggtagggtcgtcgggattggtgttcggtagagcgtgagtttagcgggttggagtcggcgagcgggagtgaaagaagaaaagttagagagcgaaggtaaagttcgaggagagagggtcgcggtcggcggaggaatttgattgtacggttgcgtgcgtttattttcggagggtttttttaggcgggcggtttcgttagtggttaaaggtaaagtatttcggggcgcggcgtatgaagttgagtttcgtttttgttagtcgtcgttttttttttaaaaatatattttagttttaatgtttatgtttttattgttttagttttt

SEQ ID NO: 38818 - DNA, 645 bp, Artificial Sequence
  chemically treated genomic DNA (Homo sapiens) CpG-island No: 38818
aaaaactaaaacaataaaaacataaacattaaaactaaaatatatttttaaaaaaaaaacgacgactaacaaaaacgaaactcaacttcatacgccgcgccccgaaatactttacctttaaccactaacgaaaccgcccgcctaaaaaaaccctccgaaaataaacgcacgcaaccgtacaatcaaattcctccgccgaccgcgaccctctctcctcgaactttaccttcgctctctaacttttcttctttcactcccgctcgccgactccaacccgctaaactcacgctctaccgaacaccaatcccgacgaccctacccgacgaaactcaaaactaaacctaaccttatccgcgaaatccgcccctcgccgccaccgaaatccgcccccgcgccgacacgcacttccgacaacgccgcgaccgaaaaaaaccgaacgaaaaacaaaacctacgaaaaaacgcaaaataaacgcgttaactatcataatataaaacctcctaacctaaaaccatacccgacgcaaaaaaaacaacgaacttacgaaccgaatacgaaaactactatacgaaaaaacctacctactaacccgaaaacgttcgccgacccacctaataactttccctaaacgtttaacgacgactc

SEQ ID NO: 38819 - DNA, 645 bp, Artificial Sequence
  chemically treated genomic DNA (Homo sapiens) CpG-island No: 38819
aagaattggggtaatggaggtataaatattaaggttaggatgtatttttggggagaaagcggcggttagtagggacgaagtttaattttatgcgtcgcgtttcggaatgttttgtttttagttattagcggagtcgttcgtttgagggagtttttcggaagtgagcgtacgtaatcgtgtagttagattttttcgtcgatcgcggtttttttttttcgggttttgttttcgttttttagtttttttttttttattttcgttcgtcgattttagttcgttgggtttacgttttgtcggatattaatttcggcggttttgttcgacggagtttaaggttaggtttggttttgttcgcggagttcgtttttcgtcgttatcgggattcgttttcgcgtcgatacgtattttcggtagcgtcgcggtcgggagggatcgagcggggagtaaggtttgcggggaggcgtaggatggacgcgttggttgttatgatgtaggattttttgatttagaattatgttcggcgtagggagaataacgagtttacggatcgggtgcgggggttgttgtgcgagaaagtttatttgttggttcgggagcgttcgtcggtttatttggtggttttttttggacgtttaacggcgattt

SEQ ID NO: 38820 - DNA, 645 bp, Artificial Sequence
  chemically treated genomic DNA (Homo sapiens) CpG-island No: 38820
aaatcgccgttaaacgtccaaaaaaaaccaccaaataaaccgacgaacgctcccgaaccaacaaataaactttctcgcacaacaacccccgcacccgatccgtaaactcgttattctccctacgccgaacataattctaaatcaaaaaatcctacatcataacaaccaacgcgtccatcctacgcctccccgcaaaccttactccccgctcgatccctcccgaccgcgacgctaccgaaaatacgtatcgacgcgaaaacgaatcccgataacgacgaaaaacgaactccgcgaacaaaaccaaacctaaccttaaactccgtcgaacaaaaccgccgaaattaatatccgacaaaacgtaaacccaacgaactaaaatcgacgaacgaaaataaaaaaaaaaaaactaaaaaacgaaaacaaaacccgaaaaaaaaaaaccgcgatcgacgaaaaaatctaactacacgattacgtacgctcacttccgaaaaactccctcaaacgaacgactccgctaataactaaaaacaaaacattccgaaacgcgacgcataaaattaaacttcgtccctactaaccgccgctttctccccaaaaatacatcctaaccttaatatttatacctccattaccccaattctt

SEQ ID NO: 38821 - DNA, 1026 bp, Artificial Sequence
  chemically treated genomic DNA (Homo sapiens) CpG-island No: 38821
gttgcgttttttcgcgtttcgtcggtttagtttataggcgatggtagttgtcgtgggtttattgatgattcgtaatacgttgagtttcgcgatggttttcgcgtttttggtggtttggcgttgcgagttattgaaataggcgggtacggtgattattgcgtgttttacgggttggtttaggtacgtttcggtcgttttttttattttgtttagtattatggacgagattttttcggggtagaacgttttgtttttttcgcggtagtatacgcgtattttgggtttgtcgttttcgtttattattcggaagggttagtgttttatgttcgattgtatcgtggtgttcgcgaatttgcgttcgattagtcgtttggtatcgaatacggtgttgtgggggtttagggtcgtttggtttttggtcgcgttttcgattagtcgttcggtgtcggtgaaggttacgtagttgggcgtggtgcggttgttttggtcgttggttaggatttttacgcggttttgttgaaatacgtttacgtacgagtaggtggtgtttaggtcgatgtttatcgcgagttttcgtggggtttgtatggttgaagttttttgtcggatgttggaggttacggaggttgttgtcgtttcgtcgtcgaggggcgtttagtagtgaggttttttttgcggtttttttgtagttagttcggttcggatttgtttagtttcgtttttatcggttttttatttttttgcgttttattcgattttcgtcgtcgcgaattttcgcgaattttttcgtattttttcgtattttttcgtttagttgagagtttttcgttcgttcgggttgatttagtcgggtggcgcggcgcggcgttgatttcgggagaaggttcgggtagatcggggtatgagtcgcgaggttgggcggttacgttaggttagttcgtttttgatttaggttgttgaaagaaatgcggggaaggttttagttttttcgggttggttttgaggacgcgcggttgtggtagaggt

SEQ ID NO: 38822 - DNA, 1026 bp, Artificial Sequence
  chemically treated genomic DNA (Homo sapiens) CpG-island No: 38822
acctctaccacaaccgcgcgtcctcaaaaccaacccgaaaaaactaaaaccttccccgcatttctttcaacaacctaaatcaaaaacgaactaacctaacgtaaccgcccaacctcgcgactcataccccgatctacccgaaccttctcccgaaatcaacgccgcgccgcgccacccgactaaatcaacccgaacgaacgaaaaactctcaactaaacgaaaaaatacgaaaaaatacgaaaaaattcgcgaaaattcgcgacgacgaaaatcgaataaaacgcaaaaaaataaaaaaccgataaaaacgaaactaaacaaatccgaaccgaactaactacaaaaaaaccgcaaaaaaaacctcactactaaacgcccctcgacgacgaaacgacaacaacctccgtaacctccaacatccgacaaaaaacttcaaccatacaaaccccacgaaaactcgcgataaacatcgacctaaacaccacctactcgtacgtaaacgtatttcaacaaaaccgcgtaaaaatcctaaccaacgaccaaaacaaccgcaccacgcccaactacgtaaccttcaccgacaccgaacgactaatcgaaaacgcgaccaaaaaccaaacgaccctaaacccccacaacaccgtattcgataccaaacgactaatcgaacgcaaattcgcgaacaccacgatacaatcgaacataaaacactaacccttccgaataataaacgaaaacgacaaacccaaaatacgcgtatactaccgcgaaaaaaacaaaacgttctaccccgaaaaaatctcgtccataatactaaacaaaataaaaaaaacgaccgaaacgtacctaaaccaacccgtaaaacacgcaataatcaccgtacccgcctatttcaataactcgcaacgccaaaccaccaaaaacgcgaaaaccatcgcgaaactcaacgtattacgaatcatcaataaacccacgacaactaccatcgcctataaactaaaccgacgaaacgcgaaaaaacgcaac

SEQ ID NO: 38823 - DNA, 1026 bp, Artificial Sequence
  chemically treated genomic DNA (Homo sapiens) CpG-island No: 38823
gtttttgttataatcgcgcgtttttagagttagttcggaggagttagaatttttttcgtattttttttagtagtttgagttagaggcgggttggtttggcgtagtcgtttagtttcgcggtttatgtttcgatttgttcgaattttttttcggggttagcgtcgcgtcgcgttattcggttgagttagttcgggcgggcgagaggtttttaattgggcgggaaggtgcgggaaggtgcggaaaggttcgcgaaagttcgcggcggcgggggtcgggtgaggcgtaaaaggataaaaagtcggtggaagcggagttgagtagattcgagtcgggttggttgtagagaaatcgtagggagagttttattgttgagcgtttttcgacggcggagcggtagtagttttcgtggtttttagtattcgataagaagttttagttatgtaggttttacgggagttcgcggtgggtatcgatttgggtattatttattcgtgcgtgggcgtgttttagtagggtcgcgtggagattttggttaacgattagggtaatcgtattacgtttagttacgtggtttttatcgatatcgagcggttggtcggggacgcggttaagagttaggcggttttgaatttttataatatcgtgttcgatgttaagcggttgatcgggcgtaagttcgcggatattacggtgtagtcggatatgaagtattggttttttcgggtggtgagcgagggcggtaagtttaaggtgcgcgtatgttatcgcggggaggataagacgttttatttcgaggagatttcgtttatggtgttgagtaagatgaaggagacggtcgaggcgtatttgggttagttcgtgaagtacgtagtgattatcgtgttcgtttattttaatgattcgtagcgttaggttattaaggacgcgggggttatcgcggggtttaacgtgttgcggattattaatgagtttacggtagttgttatcgtttatgggttggatcggcggggcgcgggagagcgtaat

SEQ ID NO: 38824 - DNA, 1026 bp, Artificial Sequence
  chemically treated genomic DNA (Homo sapiens) CpG-island No: 38824
attacgctctcccgcgccccgccgatccaacccataaacgataacaactaccgtaaactcattaataatccgcaacacgttaaaccccgcgataacccccgcgtccttaataacctaacgctacgaatcattaaaataaacgaacacgataatcactacgtacttcacgaactaacccaaatacgcctcgaccgtctccttcatcttactcaacaccataaacgaaatctcctcgaaataaaacgtcttatcctccccgcgataacatacgcgcaccttaaacttaccgccctcgctcaccacccgaaaaaaccaatacttcatatccgactacaccgtaatatccgcgaacttacgcccgatcaaccgcttaacatcgaacacgatattataaaaattcaaaaccgcctaactcttaaccgcgtccccgaccaaccgctcgatatcgataaaaaccacgtaactaaacgtaatacgattaccctaatcgttaaccaaaatctccacgcgaccctactaaaacacgcccacgcacgaataaataatacccaaatcgatacccaccgcgaactcccgtaaaacctacataactaaaacttcttatcgaatactaaaaaccacgaaaactactaccgctccgccgtcgaaaaacgctcaacaataaaactctccctacgatttctctacaaccaacccgactcgaatctactcaactccgcttccaccgactttttatccttttacgcctcacccgacccccgccgccgcgaactttcgcgaacctttccgcaccttcccgcaccttcccgcccaattaaaaacctctcgcccgcccgaactaactcaaccgaataacgcgacgcgacgctaaccccgaaaaaaaattcgaacaaatcgaaacataaaccgcgaaactaaacgactacgccaaaccaacccgcctctaactcaaactactaaaaaaaatacgaaaaaaattctaactcctccgaactaactctaaaaacgcgcgattataacaaaaac

SEQ ID NO: 38825 - DNA, 623 bp, Artificial Sequence
  chemically treated genomic DNA (Homo sapiens) CpG-island No: 38825
gaggtgggatcggcgatttggttagggtgtcggtagaatggaatgcgcggtcggggttcgaggggtcggaggaaaggataggatgttggatggcgtgtttttggtgggagacgtgtgtgcggttttacgagcgagtcgttcgttgttgtttagcggttagaagttggagggtgaaatcgggcgggttgtttaggttagtacgtttttgggtagcgtagcggcgatttaaggcggtgggcggtgggcgtacgtcggtgggaggaaggagggaaaaggaggaataggggaagaatttgggttgtgtttgtttgggcgagtgaggagaaggcgggcggaggagataggtaggaaagagcgtggaaggtggtcgcggtcgttcgttgtgtgtggggttaggaaagagggcgtgtgaggtggtggagagggcgtttgtttaaagggtaattgagtagagggtcgcgggcgttggcgtatggttttgggttgtttttgcgatagtcggcgggtgggtagaaagaacgtacgtgtttgaaaagcggcggcgttttggaggtttgttttaagggggttggagtttggagagcgggtaagggtttaaggtagaaagcggttaaaggtgtttt

SEQ ID NO: 38826 - DNA, 623 bp, Artificial Sequence
  chemically treated genomic DNA (Homo sapiens) CpG-island No: 38826
aaaacacctttaaccgctttctaccttaaacccttacccgctctccaaactccaacccccttaaaacaaacctccaaaacgccgccgcttttcaaacacgtacgttctttctacccacccgccgactatcgcaaaaacaacccaaaaccatacgccaacgcccgcgaccctctactcaattaccctttaaacaaacgccctctccaccacctcacacgccctctttcctaaccccacacacaacgaacgaccgcgaccaccttccacgctctttcctacctatctcctccgcccgccttctcctcactcgcccaaacaaacacaacccaaattcttcccctattcctccttttccctccttcctcccaccgacgtacgcccaccgcccaccgccttaaatcgccgctacgctacccaaaaacgtactaacctaaacaacccgcccgatttcaccctccaacttctaaccgctaaacaacaacgaacgactcgctcgtaaaaccgcacacacgtctcccaccaaaaacacgccatccaacatcctatcctttcctccgacccctcgaaccccgaccgcgcattccattctaccgacaccctaaccaaatcgccgatcccacctc

SEQ ID NO: 38827 - DNA, 623 bp, Artificial Sequence
  chemically treated genomic DNA (Homo sapiens) CpG-island No: 38827
ggagtatttttggtcgttttttgttttgagtttttgttcgttttttagattttagtttttttgaagtaagtttttaaaacgtcgtcgttttttaggtacgtgcgttttttttgtttattcgtcggttgtcgtagaaatagtttaggattatgcgttagcgttcgcgattttttatttaattgttttttggatagacgttttttttattattttatacgtttttttttttggttttatatatagcgagcgatcgcgattattttttacgtttttttttgtttatttttttcgttcgttttttttttattcgtttaaatagatatagtttagattttttttttatttttttttttttttttttttttttatcggcgtgcgtttatcgtttatcgttttgaatcgtcgttgcgttgtttagaggcgtgttggtttgaatagttcgttcggttttattttttaatttttgatcgttgagtagtagcgagcgattcgttcgtggagtcgtatatacgttttttattagaggtacgttatttaatattttgttttttttttcgatttttcggatttcggtcgcgtattttattttgtcgatattttagttaggtcgtcgattttatttt

SEQ ID NO: 38828 - DNA, 623 bp, Artificial Sequence
  chemically treated genomic DNA (Homo sapiens) CpG-island No: 38828
aaaataaaatcgacgacctaactaaaatatcgacaaaataaaatacgcgaccgaaatccgaaaaatcgaaaaaaaaaacaaaatattaaataacgtacctctaataaaaaacgtatatacgactccacgaacgaatcgctcgctactactcaacgatcaaaaattaaaaaataaaaccgaacgaactattcaaaccaacacgcctctaaacaacgcaacgacgattcaaaacgataaacgataaacgcacgccgataaaaaaaaaaaaaaaaaaaaaaaaataaaaaaaaaatctaaactatatctatttaaacgaataaaaaaaaaacgaacgaaaaaaataaacaaaaaaaaacgtaaaaaataatcgcgatcgctcgctatatataaaaccaaaaaaaaaaacgtataaaataataaaaaaaacgtctatccaaaaaacaattaaataaaaaatcgcgaacgctaacgcataatcctaaactatttctacgacaaccgacgaataaacaaaaaaaacgcacgtacctaaaaaacgacgacgttttaaaaacttacttcaaaaaaactaaaatctaaaaaacgaacaaaaactcaaaacaaaaaacgaccaaaaatactcc

SEQ ID NO: 38829 - DNA, 608 bp, Artificial Sequence
  chemically treated genomic DNA (Homo sapiens) CpG-island No: 38829
ttttggtcggcgtttgtttgggttcggtgcgtaatcgacggatcgcgcgggcggagcgggcgttaagtgaacggagtcggttggcgttggcgtggacgttttcgcgtttttatttcggatttaaagggttcgcgtcgggtcggtcgtcgtcggcgtacgttttagttttcgcgttttcgttcgtcgaatttcgtagggcgtgcgtttatcgcgttttaggagtagcggtttgattgtttcgttcgcgtttttttttgtttcggcgcgattttcgcgttggagatagtaggtagggcgcgcggggaggttttacgtcgtttcggtatttgtcggggttcggtttcggtttcgggttttagcgggatcgtagggtgttttgttgggtgtcggggtaggtcgtgttaacggtggcggggggcgggtggtaggtgacgggtggcgtgtggcgggtggcgggcggcgggcggcgggtggaaggcgagtacgcgttcggtttttgtcgtcgggggaggggattaaggtagggttaggcgttcgcggtcggagtggggtttggcgtttcggcgatcgtcgtcgtcgttttcgttagtatagtggtgagtattttt

SEQ ID NO: 38830 - DNA, 608 bp, Artificial Sequence
  chemically treated genomic DNA (Homo sapiens) CpG-island No: 38830
aaaaatactcaccactatactaacgaaaacgacgacgacgatcgccgaaacgccaaaccccactccgaccgcgaacgcctaaccctaccttaatcccctcccccgacgacaaaaaccgaacgcgtactcgccttccacccgccgcccgccgcccgccacccgccacacgccacccgtcacctaccacccgccccccgccaccgttaacacgacctaccccgacacccaacaaaacaccctacgatcccgctaaaacccgaaaccgaaaccgaaccccgacaaataccgaaacgacgtaaaacctccccgcgcgccctacctactatctccaacgcgaaaatcgcgccgaaacaaaaaaaaacgcgaacgaaacaatcaaaccgctactcctaaaacgcgataaacgcacgccctacgaaattcgacgaacgaaaacgcgaaaactaaaacgtacgccgacgacgaccgacccgacgcgaaccctttaaatccgaaataaaaacgcgaaaacgtccacgccaacgccaaccgactccgttcacttaacgcccgctccgcccgcgcgatccgtcgattacgcaccgaacccaaacaaacgccgaccaaaa

SEQ ID NO: 38831 - DNA, 608 bp, Artificial Sequence
  chemically treated genomic DNA (Homo sapiens) CpG-island No: 38831
ggggatatttattattatattaacgaggacgacggcgacggtcgtcgggacgttagattttatttcgatcgcggacgtttagttttgttttgattttttttttcgacggtaggggtcgggcgcgtgttcgttttttattcgtcgttcgtcgttcgttattcgttatacgttattcgttatttgttattcgtttttcgttatcgttggtacgatttatttcgatatttaataaagtattttgcgatttcgttgggattcggagtcggagtcggatttcgataggtatcggagcggcgtggaattttttcgcgcgttttgtttgttgtttttaacgcggggatcgcgtcggggtaggaggaggcgcgggcgaaatagttaggtcgttgtttttaggacgcggtgggcgtacgttttgcggggttcggcgagcggaggcgcgggggttggggcgtgcgtcggcggcggtcggttcgacgcggattttttgggttcggggtggggacgcgggggcgtttacgttaacgttagtcggtttcgtttatttggcgttcgtttcgttcgcgcggttcgtcggttgcgtatcgaatttagataggcgtcggttaagg

SEQ ID NO: 38832 - DNA, 608 bp, Artificial Sequence
  chemically treated genomic DNA (Homo sapiens) CpG-island No: 38832
ccttaaccgacgcctatctaaattcgatacgcaaccgacgaaccgcgcgaacgaaacgaacgccaaataaacgaaaccgactaacgttaacgtaaacgcccccgcgtccccaccccgaacccaaaaaatccgcgtcgaaccgaccgccgccgacgcacgccccaacccccgcgcctccgctcgccgaaccccgcaaaacgtacgcccaccgcgtcctaaaaacaacgacctaactatttcgcccgcgcctcctcctaccccgacgcgatccccgcgttaaaaacaacaaacaaaacgcgcgaaaaaattccacgccgctccgatacctatcgaaatccgactccgactccgaatcccaacgaaatcgcaaaatactttattaaatatcgaaataaatcgtaccaacgataacgaaaaacgaataacaaataacgaataacgtataacgaataacgaacgacgaacgacgaataaaaaacgaacacgcgcccgacccctaccgtcgaaaaaaaaaatcaaaacaaaactaaacgtccgcgatcgaaataaaatctaacgtcccgacgaccgtcgccgtcgtcctcgttaatataataataaatatcccc

SEQ ID NO: 38833 - DNA, 627 bp, Artificial Sequence
  chemically treated genomic DNA (Homo sapiens) CpG-island No: 38833
aggtacgttcgttttttttgtttattcgtcggttgtcgtagaaatagtttaggattatgcgttagcgttcgcgattttttattaattgtttttcggatagacgttttttttattattttatacgtttttttttttggttttatatatagcgagcgatcgcgattattttttacgtttttttttgtttatttttttcgttcgttttttttttattcgtttaaatagatatagtttagattttttttttatttttttttttttttttttttttttatcggtttgcgtttatcgtttatcgttttgaatcgtcgttgcgttgtttagaggcgttttggtttgaatagttcgttcggttttattttttaatttttgatcgttgagtagtagcgagcgattcgttcgtggagtcgtatatacgttttttattagaggtacgttatttagtattttgttttttttttcgatttttcggatttcggtcgcgtattttattttgtcgatattttagttaggtcgtcgattttatttcgttatttgtgtttttttttcgttaatatttgtttgtcggtttatttgtagttcggacgtttgtcggttagaggtagcgggaattttgtatatagtcgg

SEQ ID NO: 38834 - DNA, 627 bp, Artificial Sequence
  chemically treated genomic DNA (Homo sapiens) CpG-island No: 38834
ccgactatatacaaaattcccgctacctctaaccgacaaacgtccgaactacaaataaaccgacaaacaaatattaacgaaaaaaaaacacaaataacgaaataaaatcgacgacctaactaaaatatcgacaaaataaaatacgcgaccgaaatccgaaaaatcgaaaaaaaaaacaaaatactaaataacgtacctctaataaaaaacgtatatacgactccacgaacgaatcgctcgctactactcaacgatcaaaaattaaaaaataaaaccgaacgaactattcaaaccaaaacgcctctaaacaacgcaacgacgattcaaaacgataaacgataaacgcaaaccgataaaaaaaaaaaaaaaaaaaaaaaaataaaaaaaaaatctaaactatatctatttaaacgaataaaaaaaaaacgaacgaaaaaaataaacaaaaaaaaacgtaaaaaataatcgcgatcgctcgctatatataaaaccaaaaaaaaaaacgtataaaataataaaaaaaacgtctatccgaaaaacaattaataaaaaatcgcgaacgctaacgcataatcctaaactatttctacgacaaccgacgaataaacaaaaaaaacgaacgtacct

SEQ ID NO: 38835 - DNA, 627 bp, Artificial Sequence
  chemically treated genomic DNA (Homo sapiens) CpG-island No: 38835
tcggttgtgtgtagggttttcgttgtttttggtcggtaggcgttcgggttgtaggtgggtcggtaggtaggtgttagcgggaagggagtataggtagcgaggtgggatcggcgatttggttagggtgtcggtagaatggaatgcgcggtcggggttcgaggggtcggaggaaaggataggatgttggatggcgtgtttttggtgggagacgtgtgtgcggttttacgagcgagtcgttcgttgttgtttagcggttagaagttggagggtgaaatcgggcgggttgtttaggttaggacgtttttgggtagcgtagcggcgatttaaggcggtgggcggtgggcgtaggtcggtgggaggaaggagggaaaaggaggaataggggaagaatttgggttgtgtttgtttgggcgagtgaggagaaggcgggcggaggagataggtagggaagagcgtggaaggtggtcgcggtcgttcgttgtgtgtggggttagggaagagggcgtgtgaggtggtggggagggcgtttgttcgaagggtaattggtagagggtcgcgggcgttggcgtatggttttgggttgtttttgcgatagtcggcgggtgggtaggaagaacggacgtgttt

SEQ ID NO: 38836 - DNA, 627 bp, Artificial Sequence
  chemically treated genomic DNA (Homo sapiens) CpG-island No: 38836
aaacacgtccgttcttcctacccacccgccgactatcgcaaaaacaacccaaaaccatacgccaacgcccgcgaccctctaccaattacccttcgaacaaacgccctccccaccacctcacacgccctcttccctaaccccacacacaacgaacgaccgcgaccaccttccacgctcttccctacctatctcctccgcccgccttctcctcactcgcccaaacaaacacaacccaaattcttcccctattcctccttttccctccttcctcccaccgacctacgcccaccgcccaccgccttaaatcgccgctacgctacccaaaaacgtcctaacctaaacaacccgcccgatttcaccctccaacttctaaccgctaaacaacaacgaacgactcgctcgtaaaaccgcacacacgtctcccaccaaaaacacgccatccaacatcctatcctttcctccgacccctcgaaccccgaccgcgcattccattctaccgacaccctaaccaaatcgccgatcccacctcgctacctatactcccttcccgctaacacctacctaccgacccacctacaacccgaacgcctaccgaccaaaaacaacgaaaaccctacacacaaccga

SEQ ID NO: 38837 - DNA, 551 bp, Artificial Sequence
  chemically treated genomic DNA (Homo sapiens) CpG-island No: 38837
gtcggggttttttttttcggtcgtggtggtcgggtttcgtggcggcgtggcgcgtgggggtcgttttttcgcggtcggtcgtttttcgttggcgttttttcgtttcgcgtggcgttttcgcggggggtcgtttttcgtttttttcggtttcgcgttcgcgtcggggggtcgtttttttcgtttcggcgggttttggggtgggcgtggggttttttttcgtgggttcgtcgttgggttcgttttttttcgttcggggcgtttcggtttgggcggttttttcgggggtgttgtcgttcggggtcgttttttttcgtttggggcgcgttgcggcgttcgttgtgttcgcggggcgggtttgtcggtgtgtcggttgcgtcgcgtcggggttcgttttcgtttttttcggtgttttcgtttgttcggtcgtgcgcggcgttggggtcgtgtcgtcgcggcgggggcgtttcgggggcgcgcgcggacggtcgtttcgtttttagtttaggtcgtgttcgatcgcgcgggggttaatacggtaggcgcgttatcgg

SEQ ID NO: 38838 - DNA, 551 bp, Artificial Sequence
  chemically treated genomic DNA (Homo sapiens) CpG-island No: 38838
ccgataacgcgcctaccgtattaacccccgcgcgatcgaacacgacctaaactaaaaacgaaacgaccgtccgcgcgcgcccccgaaacgcccccgccgcgacgacacgaccccaacgccgcgcacgaccgaacaaacgaaaacaccgaaaaaaacgaaaacgaaccccgacgcgacgcaaccgacacaccgacaaacccgccccgcgaacacaacgaacgccgcaacgcgccccaaacgaaaaaaaacgaccccgaacgacaacacccccgaaaaaaccgcccaaaccgaaacgccccgaacgaaaaaaaacgaacccaacgacgaacccacgaaaaaaaaccccacgcccaccccaaaacccgccgaaacgaaaaaaacgaccccccgacgcgaacgcgaaaccgaaaaaaacgaaaaacgaccccccgcgaaaacgccacgcgaaacgaaaaaacgccaacgaaaaacgaccgaccgcgaaaaaacgacccccacgcgccacgccgccacgaaacccgaccaccacgaccgaaaaaaaaaaccccgac

SEQ ID NO: 38839 - DNA, 551 bp, Artificial Sequence
  chemically treated genomic DNA (Homo sapiens) CpG-island No: 38839
tcggtggcgcgtttgtcgtgttggttttcgcgcggtcggatacgatttggattagggacggggcggtcgttcgcgcgcgttttcggggcgttttcgtcgcggcggtacggttttagcgtcgcgtacggtcggatagacgggggtatcggggggggcgggggcgggtttcgacgcggcgtagtcgatatatcggtaggttcgtttcgcggatataacgaacgtcgtagcgcgttttaggcgggggggggcggtttcgggcgatagtattttcgagggagtcgtttaggtcgaggcgtttcgggcggaggggggcggatttagcgacgggtttacggaggagagttttacgtttattttaggattcgtcggaacggagggggcggtttttcggcgcgggcgcgaaatcgaggagagcgagagacggtttttcgcgagggcgttacgcggagcgaagaagcgttagcggagggcgatcggtcgcggagagacgatttttacgcgttacgtcgttacgaggttcggttattacggtcgggaggagaggtttcgat

SEQ ID NO: 38840 - DNA, 551 bp, Artificial Sequence
  chemically treated genomic DNA (Homo sapiens) CpG-island No: 38840
atcgaaacctctcctcccgaccgtaataaccgaacctcgtaacgacgtaacgcgtaaaaatcgtctctccgcgaccgatcgccctccgctaacgcttcttcgctccgcgtaacgccctcgcgaaaaaccgtctctcgctctcctcgatttcgcgcccgcgccgaaaaaccgccccctccgttccgacgaatcctaaaataaacgtaaaactctcctccgtaaacccgtcgctaaatccgcccccctccgcccgaaacgcctcgacctaaacgactccctcgaaaatactatcgcccgaaaccgcccccccccgcctaaaacgcgctacgacgttcgttatatccgcgaaacgaacctaccgatatatcgactacgccgcgtcgaaacccgcccccgccccccccgatacccccgtctatccgaccgtacgcgacgctaaaaccgtaccgccgcgacgaaaacgccccgaaaacgcgcgcgaacgaccgccccgtccctaatccaaatcgtatccgaccgcgcgaaaaccaacacgacaaacgcgccaccga

SEQ ID NO: 38841 - DNA, 664 bp, Artificial Sequence
  chemically treated genomic DNA (Homo sapiens) CpG-island No: 38841
ggtcggtcgttgtggttggggtcggttaagtcgaatatcggttatacgtaagcggcggcgggtgtggttggtgtgattaagatggtgatggcgatgcggtacgggtagttgttacgtacgttgtacgtggaatcgtcgtcgtcggaggtggattggtcggcggggacggtttaattttttacggagaatacgttttggtttaggagtggtcgtgttcgtcgggtgggggtgtcgtcgttcgggattagtggtattaacgcgtacgttattttcgaatagttttcgggagtgtcgagttagtttgcggggtcgggttcgggttttgtcgtggatgtttcggtggtgtcgtggatggtgtcgggtaaaatattcgaagcgttattcgcgtaggtaacggcgttgatgatttatttggacgagcgatttgatgttttttcgttggatgttgggtattcgttggcgttgatacggtcggcgttggatgagcgagcggtgttgttggggtcgaatcgtgaaacgttgttgtgcggtgtgaaagcgttgtttgttcggtatgaggttttttggtttggtgatcggatttgtgggggtttggcggttgtatcgttttttggttcgtttttcgttcgtttacgtttttttattggttattttgtttatttgt

SEQ ID NO: 38842 - DNA, 664 bp, Artificial Sequence
  chemically treated genomic DNA (Homo sapiens) CpG-island No: 38842
acaaataaacaaaataaccaataaaaaaacgtaaacgaacgaaaaacgaaccaaaaaacgatacaaccgccaaacccccacaaatccgatcaccaaaccaaaaaacctcataccgaacaaacaacgctttcacaccgcacaacaacgtttcacgattcgaccccaacaacaccgctcgctcatccaacgccgaccgtatcaacgccaacgaatacccaacatccaacgaaaaaacatcaaatcgctcgtccaaataaatcatcaacgccgttacctacgcgaataacgcttcgaatattttacccgacaccatccacgacaccaccgaaacatccacgacaaaacccgaacccgaccccgcaaactaactcgacactcccgaaaactattcgaaaataacgtacgcgttaataccactaatcccgaacgacgacacccccacccgacgaacacgaccactcctaaaccaaaacgtattctccgtaaaaaattaaaccgtccccgccgaccaatccacctccgacgacgacgattccacgtacaacgtacgtaacaactacccgtaccgcatcgccatcaccatcttaatcacaccaaccacacccgccgccgcttacgtataaccgatattcgacttaaccgaccccaaccacaacgaccgacc

SEQ ID NO: 38843 - DNA, 664 bp, Artificial Sequence
  chemically treated genomic DNA (Homo sapiens) CpG-island No: 38843
atagataagtaaagtgattaatgaaggaacgtgagcgagcggagagcggattagagaacgatatagtcgttaggtttttatagattcggttattaaattaagaagttttatgtcgggtagatagcgtttttatatcgtataataacgttttacggttcgattttagtaatatcgttcgtttatttagcgtcgatcgtgttaacgttagcgagtatttaatatttagcgaggagatattaggtcgttcgtttagataggttattaacgtcgttgtttgcgcggatagcgtttcgggtgttttgttcgatattatttacggtattatcggaatatttacgatagaattcgaattcggtttcgtagattgattcggtattttcgggggttgttcgaggatgacgtgcgcgttagtattattgatttcgaacgacgatatttttattcgacgaatacgattatttttgggttagggcgtgtttttcgtaaggagttgaatcgttttcgtcgattaatttattttcggcgacggcgattttacgtgtaacgtgcgtggtagttgttcgtgtcgtatcgttattattattttgattatattagttatattcgtcgtcgtttgcgtatgatcgatgttcgatttgatcgattttaattataacggtcggtt

SEQ ID NO: 38844 - DNA, 664 bp, Artificial Sequence
  chemically treated genomic DNA (Homo sapiens) CpG-island No: 38844
aaccgaccgttataattaaaatcgatcaaatcgaacatcgatcatacgcaaacgacgacgaatataactaatataatcaaaataataataacgatacgacacgaacaactaccacgcacgttacacgtaaaatcgccgtcgccgaaaataaattaatcgacgaaaacgattcaactccttacgaaaaacacgccctaacccaaaaataatcgtattcgtcgaataaaaatatcgtcgttcgaaatcaataatactaacgcgcacgtcatcctcgaacaacccccgaaaataccgaatcaatctacgaaaccgaattcgaattctatcgtaaatattccgataataccgtaaataatatcgaacaaaacacccgaaacgctatccgcgcaaacaacgacgttaataacctatctaaacgaacgacctaatatctcctcgctaaatattaaatactcgctaacgttaacacgatcgacgctaaataaacgaacgatattactaaaatcgaaccgtaaaacgttattatacgatataaaaacgctatctacccgacataaaacttcttaatttaataaccgaatctataaaaacctaacgactatatcgttctctaatccgctctccgctcgctcacgttccttcattaatcactttacttatctat

SEQ ID NO: 38845 - DNA, 726 bp, Artificial Sequence
  chemically treated genomic DNA (Homo sapiens) CpG-island No: 38845
tttatgtcgtcgttttttttttttttttcggttttttttgtttttttgtggttttttttatttgtgcgggattatttatcgttcgttttttttttagtacgtttatttagtatgtttagtattgtatgcgatgttaatagtgttaacggtatagtatttattttttgcgttttggtttcgttttcgtcgttatttattattttttttttgcgcggtttcgtatttttcggcgttcgttcgcgttgttttcgtttcggtcggttttcgttgtttcgttcgcgttttttttcgtcgtcggttagtcgttttgtatttgtcgtttcgttttcggtcgcgttcgcgtgtcgttttcgcgttcgttcgtttcgggtgcggtttttcgttcgcgggttgttcggcggggtcgtcggttcgtttgtcgttgtcgatggtcgcgttttgttttgttcgcgggtttttttcgcgggtcgcgtttcggtgtgttcgtgttttggcgttttgtgcggcgtttttttgtcgcgtttgttttatcgttacgtcgttattttcgttgtttttgtttggtcgcgtttgtttgcgtatcgtgcgcgcgatgtcggtttcgtttcgtggtttttgcgcgttttatgtcgtcgagtcgttttcgttttttgtcgttattatcgtttttcgatcgtttgtttgttcgtttcgttgtttttgtttttgtttgcgtcggtttttttt

SEQ ID NO: 38846 - DNA, 726 bp, Artificial Sequence
  chemically treated genomic DNA (Homo sapiens) CpG-island No: 38846
aaaaaaaaccgacgcaaacaaaaacaaaaacaacgaaacgaacaaacaaacgatcgaaaaacgataataacgacaaaaaacgaaaacgactcgacgacataaaacgcgcaaaaaccacgaaacgaaaccgacatcgcgcgcacgatacgcaaacaaacgcgaccaaacaaaaacaacgaaaataacgacgtaacgataaaacaaacgcgacaaaaaaacgccgcacaaaacgccaaaacacgaacacaccgaaacgcgacccgcgaaaaaaacccgcgaacaaaacaaaacgcgaccatcgacaacgacaaacgaaccgacgaccccgccgaacaacccgcgaacgaaaaaccgcacccgaaacgaacgaacgcgaaaacgacacgcgaacgcgaccgaaaacgaaacgacaaatacaaaacgactaaccgacgacgaaaaaaaacgcgaacgaaacaacgaaaaccgaccgaaacgaaaacaacgcgaacgaacgccgaaaaatacgaaaccgcgcaaaaaaaaaataataaataacgacgaaaacgaaaccaaaacgcaaaaaataaatactataccgttaacactattaacatcgcatacaatactaaacatactaaataaacgtactaaaaaaaaaacgaacgataaataatcccgcacaaataaaaaaaaccacaaaaaaacaaaaaaaaccgaaaaaaaaaaaaaaaacgacgacataaa

SEQ ID NO: 38847 - DNA, 726 bp, Artificial Sequence
  chemically treated genomic DNA (Homo sapiens) CpG-island No: 38847
aagggggatcgacgtagataagagtaggaatagcggagcgagtaggtaggcggtcgggaggcgatgatggcgatagggagcggaggcggttcgacggtatggggcgcgtagaagttacgagacgaggtcggtatcgcgcgtacggtgcgtaggtaagcgcgattaggtaggagtaacggaagtagcggcgtggcggtggagtaggcgcgataaggaggcgtcgtatagaacgttaggatacggatatatcgaagcgcggttcgcggggggggttcgcgggtagggtaggacgcgattatcgatagcgataagcgagtcggcggtttcgtcggatagttcgcgagcggagagtcgtattcgagacgggcgggcgcgagagcggtacgcgggcgcggtcgggggcgaggcggtaggtgtagggcggttgatcgacggcggagaggaacgcgagcgagatagcgagagtcggtcggggcgggggtagcgcgagcgggcgtcgggaagtacgagatcgcgtagagaggaggtggtgagtggcgacgaggacgggattagagcgtaagaagtaggtgttatgtcgttggtattgttagtatcgtatgtagtattgaatatattgagtaaacgtgttgagggagaggcggacggtgagtggtttcgtatagatggagagagttataggagggtaggaggagtcgagagagaaaggaggaacgacgatataga

SEQ ID NO: 38848 - DNA, 726 bp, Artificial Sequence
  chemically treated genomic DNA (Homo sapiens) CpG-island No: 38848
tctatatcgtcgttcctcctttctctctcgactcctcctaccctcctataactctctccatctatacgaaaccactcaccgtccgcctctccctcaacacgtttactcaatatattcaatactacatacgatactaacaataccaacgacataacacctacttcttacgctctaatcccgtcctcgtcgccactcaccacctcctctctacgcgatctcgtacttcccgacgcccgctcgcgctacccccgccccgaccgactctcgctatctcgctcgcgttcctctccgccgtcgatcaaccgccctacacctaccgcctcgcccccgaccgcgcccgcgtaccgctctcgcgcccgcccgtctcgaatacgactctccgctcgcgaactatccgacgaaaccgccgactcgcttatcgctatcgataatcgcgtcctaccctacccgcgaaccccccccgcgaaccgcgcttcgatatatccgtatcctaacgttctatacgacgcctccttatcgcgcctactccaccgccacgccgctacttccgttactcctacctaatcgcgcttacctacgcaccgtacgcgcgataccgacctcgtctcgtaacttctacgcgccccataccgtcgaaccgcctccgctccctatcgccatcatcgcctcccgaccgcctacctactcgctccgctattcctactcttatctacgtcgatccccctt

SEQ ID NO: 38849 - DNA, 904 bp, Artificial Sequence
  chemically treated genomic DNA (Homo sapiens) CpG-island No: 38849
cgttagcgtttttcgcgcggcgtcgggggcggtttcgggattgggggtggtgttttgggagttgtgtggtcgcgtgcgcgtttcgtcggggttttggaggtttttgggcgcgtgcgcgggcggtcgttatttgcggtcgagttagggagttagagggcgtagagggtagcgggtttgagtagtatgaggttcggaggggagcggttcgtggaagggggcgcgtgtaatggtcgtttcgagttggagttattgaagttgcgttcggcggagtgtatcgacgaggcggtcgagcggttgggggttttgagtcgcgcgatttggagttagttcgagttggtttacgaggagtattatgtttatcgcgtgttgacgtattttttcgagcgggagtcgttcgcggttttttgggtagtgtagtcgtattattagttgtttacggtttttcgcgtcgagtgggagtcgtcggaggttcgggtatcgagcgttacgttacgttcgttgtatttgggttttttttgcgagtacgacgcgttgttcggtatcggttacgtttgcggttataattttatcgttgaggtcggggcggcggtcgcgttgggcgtgaggggggttttagagggtttttttaggtcgttttcgttcgtgaaggtgaggtggggttcgggtgcgggattttattcgattgttcgggtcgggggcgattcgggaagggcgggattttcgtgcgtttcgcgcgtttcggtgttttttcgttcggggtaggtgtgtgtgggatcgcgttaaatttgcggttttcgtttcggcgtaggagtagagttgaatttttagttaaagttagttcgcgttgtcgatttggcgatattttgtagattattgtttttttttttttagttataaatagttt

SEQ ID NO: 38850 - DNA, 904 bp, Artificial Sequence
  chemically treated genomic DNA (Homo sapiens) CpG-island No: 38850
aaactatttataactaaaaaaaaaaaaacaataatctacaaaatatcgccaaatcgacaacgcgaactaactttaactaaaaattcaactctactcctacgccgaaacgaaaaccgcaaatttaacgcgatcccacacacacctaccccgaacgaaaaaacaccgaaacgcgcgaaacgcacgaaaatcccgcccttcccgaatcgcccccgacccgaacaatcgaataaaatcccgcacccgaaccccacctcaccttcacgaacgaaaacgacctaaaaaaaccctctaaaacccccctcacgcccaacgcgaccgccgccccgacctcaacgataaaattataaccgcaaacgtaaccgataccgaacaacgcgtcgtactcgcaaaaaaaacccaaatacaacgaacgtaacgtaacgctcgatacccgaacctccgacgactcccactcgacgcgaaaaaccgtaaacaactaataatacgactacactacccaaaaaaccgcgaacgactcccgctcgaaaaaatacgtcaacacgcgataaacataatactcctcgtaaaccaactcgaactaactccaaatcgcgcgactcaaaacccccaaccgctcgaccgcctcgtcgatacactccgccgaacgcaacttcaataactccaactcgaaacgaccattacacgcgcccccttccacgaaccgctcccctccgaacctcatactactcaaacccgctaccctctacgccctctaactccctaactcgaccgcaaataacgaccgcccgcgcacgcgcccaaaaacctccaaaaccccgacgaaacgcgcacgcgaccacacaactcccaaaacaccacccccaatcccgaaaccgcccccgacgccgcgcgaaaaacgctaacg

SEQ ID NO: 38851 - DNA, 904 bp, Artificial Sequence
  chemically treated genomic DNA (Homo sapiens) CpG-island No: 38851
gagttgtttataattagagaggaggaaataataatttgtaagatgtcgttaggtcggtaacgcgaattgattttgattgggggtttagttttgtttttgcgtcgaggcgaggatcgtaggtttagcgcggttttatatatatttgtttcgggcgggagggtatcgaggcgcgcgggacgtacgagagtttcgtttttttcgggtcgttttcgattcgggtagtcggatagggtttcgtattcgggttttattttatttttacgggcggaggcggtttggggaggttttttaaggttttttttacgtttagcgcggtcgtcgtttcgattttagcgatgaggttgtggtcgtaggcgtggtcgatgtcgggtagcgcgtcgtattcgtagaggaagtttaggtgtagcgggcgtggcgtggcgttcggtgttcgggttttcggcggtttttattcggcgcggaaggtcgtgggtagttggtagtgcggttgtattgtttaggaggtcgcgggcggttttcgttcgaagaagtgcgttagtacgcggtgggtatggtgtttttcgtaggttagttcgggttggttttagatcgcgcggtttagggtttttagtcgttcggtcgtttcgtcgatgtatttcgtcgagcgtagttttagtagttttagttcggagcggttattgtacgcgtttttttttacgggtcgttttttttcgggttttatgttgtttaagttcgttgttttttgcgttttttggttttttggttcggtcgtaggtagcgatcgttcgcgtacgcgtttagaggtttttaggatttcggcggagcgcgtacgcggttatatagtttttagggtattatttttagtttcggggtcgttttcggcgtcgcgcgggaaacgttggcg

SEQ ID NO: 38852 - DNA, 904 bp, Artificial Sequence
  chemically treated genomic DNA (Homo sapiens) CpG-island No: 38852
cgccaacgtttcccgcgcgacgccgaaaacgaccccgaaactaaaaataataccctaaaaactatataaccgcgtacgcgctccgccgaaatcctaaaaacctctaaacgcgtacgcgaacgatcgctacctacgaccgaaccaaaaaaccaaaaaacgcaaaaaacaacgaacttaaacaacataaaacccgaaaaaaaacgacccgtaaaaaaaaacgcgtacaataaccgctccgaactaaaactactaaaactacgctcgacgaaatacatcgacgaaacgaccgaacgactaaaaaccctaaaccgcgcgatctaaaaccaacccgaactaacctacgaaaaacaccatacccaccgcgtactaacgcacttcttcgaacgaaaaccgcccgcgacctcctaaacaatacaaccgcactaccaactacccacgaccttccgcgccgaataaaaaccgccgaaaacccgaacaccgaacgccacgccacgcccgctacacctaaacttcctctacgaatacgacgcgctacccgacatcgaccacgcctacgaccacaacctcatcgctaaaatcgaaacgacgaccgcgctaaacgtaaaaaaaaccttaaaaaacctccccaaaccgcctccgcccgtaaaaataaaataaaacccgaatacgaaaccctatccgactacccgaatcgaaaacgacccgaaaaaaacgaaactctcgtacgtcccgcgcgcctcgataccctcccgcccgaaacaaatatatataaaaccgcgctaaacctacgatcctcgcctcgacgcaaaaacaaaactaaacccccaatcaaaatcaattcgcgttaccgacctaacgacatcttacaaattattatttcctcctctctaattataaacaactc

SEQ ID NO: 38853 - DNA, 1061 bp, Artificial Sequence
  chemically treated genomic DNA (Homo sapiens) CpG-island No: 38853
ggtcgcggaggttgagcgggggcgcggttgaaagcggtttttattgattttattttcgtttagtcgtagtttcgttattatttttgggttttttaattttcggcgttttcgtcgcggttttaagtttttttttggttttcgtttttttgatatatattggttttcgtcgttttttttttaaatttcgtcgtattttaggattttttatattcggattttatagggtttgggaacggtcgcgtttttgttttcggaattttcgcggtttttgggtcgggtcggcgtcgttttcgttttcggttcgtgcgtttaggttggcgtcgcgttgcgttttttttgcgtcggtttttgcggttgcgcgttggcggggttgaggtcgaggggtgggggtcgcgtcgggggtcggcggagtttttgtggtggtagtagcggtagcgggagacggagcgagtttagcggtcgcgggtagattcggagggaacggaggaagcggttatgtttcgttatacgaggttttttaatatttttttgtttattaggaacgtcgcggacgttattaggtgaacggtcgcggttgtaggttgggggcgcggaggaggggcggggtaatagtcgcgtcgcggagtacggtcgaggttcggcggaggttcgggggagttgcgcggagttttttcgcgggtttaggttgcgttatttggggaggtgtgagttttcggattatttcgcggtttagggcggaattcgcgttttcgttttttcggttagtttttagtttcggcgtcgcgtatatcgtgtttcgggttcgcgtcgtttttcgcggtttagtatcgtagtcggcgggtcgtgggatacggggcgtttttttttcgagtttaggtcgtttttcgtcgggagtcgggagggtttgcgttttagcgagtgttcgcgttttagtttttttgtcgtcgtgtttcgataaaatcgcgcgtatttaatttttttagatggagaggaattggggttggtgagaacgttttgtattataatgcgtattcgggttttatagttttttttttttagtt

SEQ ID NO: 38854 - DNA, 1061 bp, Artificial Sequence
  chemically treated genomic DNA (Homo sapiens) CpG-island No: 38854
aactaaaaaaaaaaaactataaaacccgaatacgcattataatacaaaacgttctcaccaaccccaattcctctccatctaaaaaaattaaatacgcgcgattttatcgaaacacgacgacaaaaaaactaaaacgcgaacactcgctaaaacgcaaaccctcccgactcccgacgaaaaacgacctaaactcgaaaaaaaaacgccccgtatcccacgacccgccgactacgatactaaaccgcgaaaaacgacgcgaacccgaaacacgatatacgcgacgccgaaactaaaaactaaccgaaaaaacgaaaacgcgaattccgccctaaaccgcgaaataatccgaaaactcacacctccccaaataacgcaacctaaacccgcgaaaaaactccgcgcaactcccccgaacctccgccgaacctcgaccgtactccgcgacgcgactattaccccgcccctcctccgcgcccccaacctacaaccgcgaccgttcacctaataacgtccgcgacgttcctaataaacaaaaaaatattaaaaaacctcgtataacgaaacataaccgcttcctccgttccctccgaatctacccgcgaccgctaaactcgctccgtctcccgctaccgctactaccaccacaaaaactccgccgacccccgacgcgacccccacccctcgacctcaaccccgccaacgcgcaaccgcaaaaaccgacgcaaaaaaaacgcaacgcgacgccaacctaaacgcacgaaccgaaaacgaaaacgacgccgacccgacccaaaaaccgcgaaaattccgaaaacaaaaacgcgaccgttcccaaaccctataaaatccgaatataaaaaatcctaaaatacgacgaaatttaaaaaaaaaacgacgaaaaccaatatatatcaaaaaaacgaaaaccaaaaaaaaacttaaaaccgcgacgaaaacgccgaaaattaaaaaacccaaaaataataacgaaactacgactaaacgaaaataaaatcaataaaaaccgctttcaaccgcgcccccgctcaacctccgcgacc

SEQ ID NO: 38855 - DNA, 1061 bp, Artificial Sequence
  chemically treated genomic DNA (Homo sapiens) CpG-island No: 38855
aattgggggaaagaaattgtaaggttcgagtacgtattatggtataaaacgtttttattagttttaatttttttttatttaggagggttggatgcgcgcgattttatcggggtacggcgataaaggagttgaaacgcgggtattcgttggagcgtaaattttttcgattttcggcggggagcgatttgagttcgggagaggggcgtttcgtgttttacggttcgtcggttgcggtgttgaatcgcggaaagcgacgcgggttcgggatacgatgtgcgcggcgtcggggttgaaagttggtcgggagggcggaggcgcgagtttcgttttgggtcgcggagtagttcgagggtttatatttttttaagtggcgtagtttgggttcgcggggaggtttcgcgtagttttttcgagttttcgtcgggtttcggtcgtgtttcgcggcgcggttgttatttcgtttttttttcgcgtttttaatttgtagtcgcggtcgtttatttggtggcgttcgcgacgtttttgatgaatagggaggtgttggggggtttcgtgtagcgagatatgatcgtttttttcgtttttttcgggtttgttcgcggtcgttggattcgtttcgtttttcgttatcgttgttattattataggagtttcgtcggttttcggcgcgatttttatttttcggttttagtttcgttagcgcgtagtcgtagaggtcggcgtagagggggcgtagcgcggcgttagtttggacgtacgggtcgggggcgggggcggcgtcggttcgatttaggggtcgcgggaatttcgaagataggagcgcggtcgtttttaggttttatgggattcgggtatggggggttttggagtgcgacgggatttggggagggggcggcgagggttagtgtatgttaggagggcggaggttaagagggggtttgaggtcgcggcggggacgtcgggggttagaggatttagaggtggtggcggggttgcggttgggcggaggtggggttagtgagagtcgtttttaatcgcgttttcgtttagttttcgcggtt

SEQ ID NO: 38856 - DNA, 1061 bp, Artificial Sequence
  chemically treated genomic DNA (Homo sapiens) CpG-island No: 38856
aaccgcgaaaactaaacgaaaacgcgattaaaaacgactctcactaaccccacctccgcccaaccgcaaccccgccaccacctctaaatcctctaacccccgacgtccccgccgcgacctcaaaccccctcttaacctccgccctcctaacatacactaaccctcgccgccccctccccaaatcccgtcgcactccaaaaccccccatacccgaatcccataaaacctaaaaacgaccgcgctcctatcttcgaaattcccgcgacccctaaatcgaaccgacgccgcccccgcccccgacccgtacgtccaaactaacgccgcgctacgccccctctacgccgacctctacgactacgcgctaacgaaactaaaaccgaaaaataaaaatcgcgccgaaaaccgacgaaactcctataataataacaacgataacgaaaaacgaaacgaatccaacgaccgcgaacaaacccgaaaaaaacgaaaaaaacgatcatatctcgctacacgaaaccccccaacacctccctattcatcaaaaacgtcgcgaacgccaccaaataaacgaccgcgactacaaattaaaaacgcgaaaaaaaaacgaaataacaaccgcgccgcgaaacacgaccgaaacccgacgaaaactcgaaaaaactacgcgaaacctccccgcgaacccaaactacgccacttaaaaaaatataaaccctcgaactactccgcgacccaaaacgaaactcgcgcctccgccctcccgaccaactttcaaccccgacgccgcgcacatcgtatcccgaacccgcgtcgctttccgcgattcaacaccgcaaccgacgaaccgtaaaacacgaaacgcccctctcccgaactcaaatcgctccccgccgaaaatcgaaaaaatttacgctccaacgaatacccgcgtttcaactcctttatcgccgtaccccgataaaatcgcgcgcatccaaccctcctaaataaaaaaaaattaaaactaataaaaacgttttataccataatacgtactcgaaccttacaatttctttcccccaatt

SEQ ID NO: 38857 - DNA, 1413 bp, Artificial Sequence
  chemically treated genomic DNA (Homo sapiens) CpG-island No: 38857
ttcggtcgcgtagttgtttttggcggtcgaggaggcggcgggcgcgttttcgttcggtgggttttcgtcgttggcggcggtttcgttttcgtttttgaggttttgaaagatttgcgtgaagaagtgggggtcggcgttgagtcgtagtatttgcgggttgagtcgttggatgaggcgtaggtagcgttgttagaagcgttttttgtcgggttttacgaggaagggtttgagtgggtaggagatttcgttgtttatgtaggagtaggcgaggtagaggtaggtgaggaaggcggtttgtagttcggcggtcgacgttagttcgtttttacgtagcgattcgcggtatagtaggtatacgaatattaggtttgtaggcgtaatgaaggtttggttttgttagttttgtagtagtagcgagcggtttatatcgcggaattagtttattagttcgttcgggtttagttttttgaggcgatagtagcgtcggtatacgaagtcgtttagatagcgtagtagttcgtcggtggacgtttgtacgatgattcgtcgcggcgagtcgttaggtatcggcggcgttatttgcggggttgggggaggcggcggcggaggttttttttcgttcgagttcggcggttgagcggtcgcgttgtttttcgacggtggttcgtaggtggcggtagtcgcgggtacggtgggtattggtatcgttaggggtttggcggtgtcgtcgtcgtcggggggatttcggtttttgcggagaaggttttcgcggttgcgttgttggattagggggtcggggttcgtggatgtcggtttgggtgttatttttttgttgttttttttttttttggcggacgcggttattaggcgtttttaggtgagcgtcgagatgagtacggacggtcgtttgagtcggttttcgtttttgtcgtttttgtttattggcggcgtttcgtagttttttagcgtttcgtttttcgcgggcggcgtttttttttttttttcgggtagttcgtcgggttttcggtttttggtcgaggaggtaggcgaaagagatagtattgtgtttattttgtagagcggggtcggcgtttaggttttagcgggagtcgcgggcggcgtcgttgttattgtagtttcgggggattcggcggtggggggtttagtttcggttcgggcgcgcggattggcgggggaaggtggttgttaggcggtttcgttgttttaattttgagttgcgttagttgtagcgttagttttattttttgggttttttttttcgtcgcgtcgtgtttcgttttacgcggttaattcgttttcgagttgtatttttgatgggtagttttaatgattaatagattttcgtattttaattttaagtttcgttttaatttttatttttcgttttgagtt

SEQ ID NO: 38858 - DNA, 1413 bp, Artificial Sequence
  chemically treated genomic DNA (Homo sapiens) CpG-island No: 38858
aactcaaaacgaaaaataaaaattaaaacgaaacttaaaattaaaatacgaaaatctattaatcattaaaactacccatcaaaaatacaactcgaaaacgaattaaccgcgtaaaacgaaacacgacgcgacgaaaaaaaaaacccaaaaaataaaactaacgctacaactaacgcaactcaaaattaaaacaacgaaaccgcctaacaaccaccttcccccgccaatccgcgcgcccgaaccgaaactaaaccccccaccgccgaatcccccgaaactacaataacaacgacgccgcccgcgactcccgctaaaacctaaacgccgaccccgctctacaaaataaacacaatactatctctttcgcctacctcctcgaccaaaaaccgaaaacccgacgaactacccgaaaaaaaaaaaaaaacgccgcccgcgaaaaacgaaacgctaaaaaactacgaaacgccgccaataaacaaaaacgacaaaaacgaaaaccgactcaaacgaccgtccgtactcatctcgacgctcacctaaaaacgcctaataaccgcgtccgccaaaaaaaaaaaaaacaacaaaaaaataacacccaaaccgacatccacgaaccccgaccccctaatccaacaacgcaaccgcgaaaaccttctccgcaaaaaccgaaatccccccgacgacgacgacaccgccaaacccctaacgataccaatacccaccgtacccgcgactaccgccacctacgaaccaccgtcgaaaaacaacgcgaccgctcaaccgccgaactcgaacgaaaaaaaacctccgccgccgcctcccccaaccccgcaaataacgccgccgatacctaacgactcgccgcgacgaatcatcgtacaaacgtccaccgacgaactactacgctatctaaacgacttcgtataccgacgctactatcgcctcaaaaaactaaacccgaacgaactaataaactaattccgcgatataaaccgctcgctactactacaaaactaacaaaaccaaaccttcattacgcctacaaacctaatattcgtatacctactataccgcgaatcgctacgtaaaaacgaactaacgtcgaccgccgaactacaaaccgccttcctcacctacctctacctcgcctactcctacataaacaacgaaatctcctacccactcaaacccttcctcgtaaaacccgacaaaaaacgcttctaacaacgctacctacgcctcatccaacgactcaacccgcaaatactacgactcaacgccgacccccacttcttcacgcaaatctttcaaaacctcaaaaacgaaaacgaaaccgccgccaacgacgaaaacccaccgaacgaaaacgcgcccgccgcctcctcgaccgccaaaaacaactacgcgaccgaa

SEQ ID NO: 38859 - DNA, 1413 bp, Artificial Sequence
  chemically treated genomic DNA (Homo sapiens) CpG-island No: 38859
gatttagggcggagggtggggattggggcgggatttgaaattgaagtgcgagagtttattggttattggagttgtttattaggagtgtaattcgggagcggattggtcgcgtgaggcggggtacggcgcgacgaaaaaaggggtttaaggggtggggttgacgttgtagttggcgtagtttaggattagagtagcggagtcgtttagtagttattttttttcgttagttcgcgcgttcgggtcggggttaggttttttatcgtcgggtttttcggggttgtagtagtagcggcgtcgttcgcggttttcgttggggtttgggcgtcggtttcgttttgtaggatgggtatagtgttgtttttttcgtttgttttttcggttaagggtcggaggttcggcgggttgttcgaggagaagaagaaggcgtcgttcgcgggggacgaggcgttggggggttacggggcgtcgttagtgggtaagggcggtaaaggcgagagtcgatttaagcggtcgttcgtgtttatttcggcgtttatttggaagcgtttggtggtcgcgttcgttaagaagaagaaaggtagtaagaaggtgatatttaagtcggtatttacgggtttcgattttttggtttagtaacgtaatcgcgagaatttttttcgtaagggtcgggattttttcgacggcggcggtatcgttaagtttttggcggtgttagtgtttatcgtgttcgcggttgtcgttatttgcgagttatcgtcggggggtagcgcggtcgtttagtcgtcgggttcgggcgggggaaagttttcgtcgtcgttttttttagtttcgtaggtggcgtcgtcggtgtttggcggttcgtcgcggcgggttatcgtgtaggcgtttatcggcgagttgttgcgttgtttgggcgatttcgtgtgtcgacgttgttatcgttttaaggagttgagttcgggcgagttggtgggttggtttcgcggtgtggatcgttcgttgttgttgtagggttggtaagattaggtttttattacgtttgtaaatttggtgttcgtgtatttgttgtgtcgcgagtcgttgcgtggggacgagttggcgtcggtcgtcgagttgtaggtcgttttttttatttgtttttatttcgtttatttttatatgggtaacgagattttttatttatttaagttttttttcgtggagttcgataaggagcgtttttggtagcgttgtttgcgttttatttagcggtttagttcgtagatgttgcggtttaacgtcgatttttatttttttacgtaggttttttaagattttaagaacgagggcgaggtcgtcgttagcggcgggggtttatcgagcgggggcgcgttcgtcgttttttcggtcgttagggatagttgcgcggtcgga

SEQ ID NO: 38860 - DNA, 1413 bp, Artificial Sequence
  chemically treated genomic DNA (Homo sapiens) CpG-island No: 38860
tccgaccgcgcaactatccctaacgaccgaaaaaacgacgaacgcgcccccgctcgataaacccccgccgctaacgacgacctcgccctcgttcttaaaatcttaaaaaacctacgtaaaaaaataaaaatcgacgttaaaccgcaacatctacgaactaaaccgctaaataaaacgcaaacaacgctaccaaaaacgctccttatcgaactccacgaaaaaaaacttaaataaataaaaaatctcgttacccatataaaaataaacgaaataaaaacaaataaaaaaaacgacctacaactcgacgaccgacgccaactcgtccccacgcaacgactcgcgacacaacaaatacacgaacaccaaatttacaaacgtaataaaaacctaatcttaccaaccctacaacaacaacgaacgatccacaccgcgaaaccaacccaccaactcgcccgaactcaactccttaaaacgataacaacgtcgacacacgaaatcgcccaaacaacgcaacaactcgccgataaacgcctacacgataacccgccgcgacgaaccgccaaacaccgacgacgccacctacgaaactaaaaaaaacgacgacgaaaactttcccccgcccgaacccgacgactaaacgaccgcgctaccccccgacgataactcgcaaataacgacaaccgcgaacacgataaacactaacaccgccaaaaacttaacgataccgccgccgtcgaaaaaatcccgacccttacgaaaaaaattctcgcgattacgttactaaaccaaaaaatcgaaacccgtaaataccgacttaaatatcaccttcttactacctttcttcttcttaacgaacgcgaccaccaaacgcttccaaataaacgccgaaataaacacgaacgaccgcttaaatcgactctcgcctttaccgcccttacccactaacgacgccccgtaaccccccaacgcctcgtcccccgcgaacgacgccttcttcttctcctcgaacaacccgccgaacctccgacccttaaccgaaaaaacaaacgaaaaaaacaacactatacccatcctacaaaacgaaaccgacgcccaaaccccaacgaaaaccgcgaacgacgccgctactactacaaccccgaaaaacccgacgataaaaaacctaaccccgacccgaacgcgcgaactaacgaaaaaaaataactactaaacgactccgctactctaatcctaaactacgccaactacaacgtcaaccccaccccttaaaccccttttttcgtcgcgccgtaccccgcctcacgcgaccaatccgctcccgaattacactcctaataaacaactccaataaccaataaactctcgcacttcaatttcaaatcccgccccaatccccaccctccgccctaaatc

SEQ ID NO: 38861 - DNA, 585 bp, Artificial Sequence
  chemically treated genomic DNA (Homo sapiens) CpG-island No: 38861
cgggggagcggcgggcgaggttttttggtgggttgatgggtaggcgcgtcgacgggagcgttgcgggggtttaggcgttcgggtggtttcggggggttttaggcgggggcgttatgggcggcgtggtgcggttagggtcggcgggatttaagtgcggggcgggggtttagggttcgagttggtggcggcgcgttgtttttttcggcgtttcgattttgagttgtcgggttcgtcggtcgttaataaataggtcggttcgtttgttttggtaacgcggcggcggcggggggcggcgggcggcggggttgcgggtcgtcgggttgggttgggttggtcgggtcggcgggttgtagggtttcgcggttagtatttcggttcggcggttaggcggttcgggcggagcgggagttgttgtcgtttgcggcgtagttcggggtcgagtgagaggggaaatggaagagattcgggttcgggtttcgcgtagatcgtattttatttatgtttttgttttttgtgcgttcgatagcgaatttgtagtaagggtagtatagttttttttttttcgggcgggcggtttcggtatta

SEQ ID NO: 38862 - DNA, 585 bp, Artificial Sequence
  chemically treated genomic DNA (Homo sapiens) CpG-island No: 38862
taataccgaaaccgcccgcccgaaaaaaaaaaaactatactacccttactacaaattcgctatcgaacgcacaaaaaacaaaaacataaataaaatacgatctacgcgaaacccgaacccgaatctcttccatttcccctctcactcgaccccgaactacgccgcaaacgacaacaactcccgctccgcccgaaccgcctaaccgccgaaccgaaatactaaccgcgaaaccctacaacccgccgacccgaccaacccaacccaacccgacgacccgcaaccccgccgcccgccgccccccgccgccgccgcgttaccaaaacaaacgaaccgacctatttattaacgaccgacgaacccgacaactcaaaatcgaaacgccgaaaaaaacaacgcgccgccaccaactcgaaccctaaacccccgccccgcacttaaatcccgccgaccctaaccgcaccacgccgcccataacgcccccgcctaaaaccccccgaaaccacccgaacgcctaaacccccgcaacgctcccgtcgacgcgcctacccatcaacccaccaaaaaacctcgcccgccgctcccccg

SEQ ID NO: 38863 - DNA, 585 bp, Artificial Sequence
  chemically treated genomic DNA (Homo sapiens) CpG-island No: 38863
tagtgtcggggtcgttcgttcgagggggaggaggttgtgttgtttttgttgtaggttcgttgtcgagcgtataggaggtagggatatgggtagggtgcggtttgcgcggggttcgagttcggattttttttatttttttttttattcggtttcgggttgcgtcgtagacggtagtagttttcgtttcgttcgagtcgtttgatcgtcgggtcggggtgttaatcgcggggttttgtagttcgtcggttcggttagtttagtttagttcggcggttcgtagtttcgtcgttcgtcgtttttcgtcgtcgtcgcgttgttaaaataaacgggtcggtttatttattggcggtcggcgagttcggtagtttagagtcgaggcgtcgagggggatagcgcgtcgttattagttcgggttttgggttttcgtttcgtatttgagtttcgtcggttttggtcgtattacgtcgtttatggcgttttcgtttggagtttttcggagttattcggacgtttgagttttcgtagcgttttcgtcgacgcgtttgtttattagtttattaggagatttcgttcgtcgttttttcg

SEQ ID NO: 38864 - DNA, 585 bp, Artificial Sequence
  chemically treated genomic DNA (Homo sapiens) CpG-island No: 38864
cgaaaaaacgacgaacgaaatctcctaataaactaataaacaaacgcgtcgacgaaaacgctacgaaaactcaaacgtccgaataactccgaaaaactccaaacgaaaacgccataaacgacgtaatacgaccaaaaccgacgaaactcaaatacgaaacgaaaacccaaaacccgaactaataacgacgcgctatccccctcgacgcctcgactctaaactaccgaactcgccgaccgccaataaataaaccgacccgtttattttaacaacgcgacgacgacgaaaaacgacgaacgacgaaactacgaaccgccgaactaaactaaactaaccgaaccgacgaactacaaaaccccgcgattaacaccccgacccgacgatcaaacgactcgaacgaaacgaaaactactaccgtctacgacgcaacccgaaaccgaataaaaaaaaaaataaaaaaaatccgaactcgaaccccgcgcaaaccgcaccctacccatatccctacctcctatacgctcgacaacgaacctacaacaaaaacaacacaacctcctccccctcgaacgaacgaccccgacacta

SEQ ID NO: 38865 - DNA, 723 bp, Artificial Sequence
  chemically treated genomic DNA (Homo sapiens) CpG-island No: 38865
gttgacggaggttttcgggtttttttcgggatgtcgatgggatcgggcgagattttaggcgtgcgggcgaggtcgtaggtattcgatcgtttcgtttagtggtaatggttttttaagtgcgaggttgcggttacggtttcgaagggttcgggcgggggttgtaagttgggattggggtagagcgcggcggtggcggcggtagcggtggcggcggggttcgggttcggttagtaggagaagtcggcgggcgcgatttcggtcgaggcggttatgaggttgagtttggagaggtcggggaagggtagcggggcgaggtcggcgggtagtttgtagagcgcgtcgttttgggcggtcgcggcggcggtagtagttgcggcggcggtatgagcgtgcgcgggcggcggttggtaggtttgcgttaggttttggaagtcgaagcggtaggcgtagcgtttgttatgtattttgtttatgatgtttttgtcgtagtagtagcgtagggcgcggtttagtttgtcgtagtttatgttgggtttgtttttgcgttcgttttatcgtcgcgttatttcgttcgggttcgtgagtttgaattcgtcgtgatcgtttttttacgcgatgtagtcggcgttcgcgcggttagttagtagttttagtagaaattgttatagttggatttgttcgttgtttgtggggaggggggcggttagttataggcgggagcgg

SEQ ID NO: 38866 - DNA, 723 bp, Artificial Sequence
  chemically treated genomic DNA (Homo sapiens) CpG-island No: 38866
ccgctcccgcctataactaaccgcccccctccccacaaacaacgaacaaatccaactataacaatttctactaaaactactaactaaccgcgcgaacgccgactacatcgcgtaaaaaaacgatcacgacgaattcaaactcacgaacccgaacgaaataacgcgacgataaaacgaacgcaaaaacaaacccaacataaactacgacaaactaaaccgcgccctacgctactactacgacaaaaacatcataaacaaaatacataacaaacgctacgcctaccgcttcgacttccaaaacctaacgcaaacctaccaaccgccgcccgcgcacgctcataccgccgccgcaactactaccgccgccgcgaccgcccaaaacgacgcgctctacaaactacccgccgacctcgccccgctacccttccccgacctctccaaactcaacctcataaccgcctcgaccgaaatcgcgcccgccgacttctcctactaaccgaacccgaaccccgccgccaccgctaccgccgccaccgccgcgctctaccccaatcccaacttacaacccccgcccgaacccttcgaaaccgtaaccgcaacctcgcacttaaaaaaccattaccactaaacgaaacgatcgaatacctacgacctcgcccgcacgcctaaaatctcgcccgatcccatcgacatcccgaaaaaaacccgaaaacctccgtcaac

SEQ ID NO: 38867 - DNA, 723 bp, Artificial Sequence
  chemically treated genomic DNA (Homo sapiens) CpG-island No: 38867
tcgttttcgtttgtggttgatcgtttttttttttataggtagcggatagatttagttgtggtagtttttgttggagttgttggttgatcgcgcgaacgtcggttgtatcgcgtgggagggcggttacggcgagtttaagtttacggattcggacgaggtggcgcggcggtggggcgagcgtaagagtaagtttaatatgaattacgataagttgagtcgcgttttgcgttattattacgataagaatattatgagtaaggtgtatggtaagcgttacgtttatcgtttcgatttttagggtttggcgtaggtttgttagtcgtcgttcgcgtacgtttatgtcgtcgtcgtagttgttgtcgtcgtcgcggtcgtttaggacggcgcgttttataagttgttcgtcggtttcgtttcgttgttttttttcggtttttttaaatttaattttatggtcgtttcggtcggggtcgcgttcgtcggttttttttattggtcgggttcgggtttcgtcgttatcgttgtcgtcgttatcgtcgcgttttattttagttttagtttgtagttttcgttcgggtttttcggggtcgtggtcgtagtttcgtatttggggggttattattattagacggggcggtcgggtgtttgcggtttcgttcgtacgtttagagtttcgttcgattttatcggtatttcggggagggttcgggagttttcgttaat

SEQ ID NO: 38868 - DNA, 723 bp, Artificial Sequence
  chemically treated genomic DNA (Homo sapiens) CpG-island No: 38868
attaacgaaaactcccgaaccctccccgaaataccgataaaatcgaacgaaactctaaacgtacgaacgaaaccgcaaacacccgaccgccccgtctaataataataaccccccaaatacgaaactacgaccacgaccccgaaaaacccgaacgaaaactacaaactaaaactaaaataaaacgcgacgataacgacgacaacgataacgacgaaacccgaacccgaccaataaaaaaaaccgacgaacgcgaccccgaccgaaacgaccataaaattaaatttaaaaaaaccgaaaaaaaacaacgaaacgaaaccgacgaacaacttataaaacgcgccgtcctaaacgaccgcgacgacgacaacaactacgacgacgacataaacgtacgcgaacgacgactaacaaacctacgccaaaccctaaaaatcgaaacgataaacgtaacgcttaccatacaccttactcataatattcttatcgtaataataacgcaaaacgcgactcaacttatcgtaattcatattaaacttactcttacgctcgccccaccgccgcgccacctcgtccgaatccgtaaacttaaactcgccgtaaccgccctcccacgcgatacaaccgacgttcgcgcgatcaaccaacaactccaacaaaaactaccacaactaaatctatccgctacctataaaaaaaaaaacgatcaaccacaaacgaaaacga

SEQ ID NO: 38869 - DNA, 557 bp, Artificial Sequence
  chemically treated genomic DNA (Homo sapiens) CpG-island No: 38869
gttttcgagtcgtaattttcgcgtacgtttcgtgatttttatttttttataagcgtagttgttgttatatgagtttcgtaggtatgtcggttgcgttggttgttcgttgttaagcgcgcgggaaatggatttttgttgttgttagttgagtggttattttcgagtttcgtcgtacgtattttaattatttaggtttatatagtttaacgtattcgggatgagcgagttttaaggtattttgtagtattacgtttttagaggtcgtatgtattattggtgagcgattgggggaggttttgtgttgattgcgttgcgtattcggcgtaacgagtgcgagagtgcgttacgacgttttttagagcgggcgaggatagaagttggaataggtttgtagggtgtgtagttatgttttagcgtaagggtagatgtagaagtcgcgaagtgtaagagatgaggcgtcgatcgtcgttacggcgtatgaagagacggattgttcgttagttatttgtggtgcgagcgtttcgtatcgattgagcgtacgttgagcggttgtatgt

SEQ ID NO: 38870 - DNA, 557 bp, Artificial Sequence
  chemically treated genomic DNA (Homo sapiens) CpG-island No: 38870
acatacaaccgctcaacgtacgctcaatcgatacgaaacgctcgcaccacaaataactaacgaacaatccgtctcttcatacgccgtaacgacgatcgacgcctcatctcttacacttcgcgacttctacatctacccttacgctaaaacataactacacaccctacaaacctattccaacttctatcctcgcccgctctaaaaaacgtcgtaacgcactctcgcactcgttacgccgaatacgcaacgcaatcaacacaaaacctcccccaatcgctcaccaataatacatacgacctctaaaaacgtaatactacaaaataccttaaaactcgctcatcccgaatacgttaaactatataaacctaaataattaaaatacgtacgacgaaactcgaaaataaccactcaactaacaacaacaaaaatccatttcccgcgcgcttaacaacgaacaaccaacgcaaccgacatacctacgaaactcatataacaacaactacgcttataaaaaaataaaaatcacgaaacgtacgcgaaaattacgactcgaaaac

SEQ ID NO: 38871 - DNA, 557 bp, Artificial Sequence
  chemically treated genomic DNA (Homo sapiens) CpG-island No: 38871
gtatatagtcgtttagcgtgcgtttagtcggtgcgggacgttcgtattataggtggttagcgggtaattcgtttttttatacgtcgtaacggcgatcgacgttttattttttgtatttcgcgatttttatatttatttttgcgttgaagtatagttatatattttgtaaatttgttttagtttttgttttcgttcgttttggggggcgtcgtggcgtattttcgtattcgttgcgtcgggtgcgtagcgtagttagtataaggttttttttagtcgtttattaatagtatatacggtttttgaaagcgtgatattgtagagtattttagagttcgtttatttcgagtacgttggattgtatgggtttggataattggggtgcgtgcggcggggttcgggggtaattatttagttgataataatagggatttatttttcgcgcgtttaataacggataattaacgtagtcgatatatttacggaatttatatggtaataattacgtttgtggaggagtaggaattacgggacgtgcgcgggagttgcggttcgggggt

SEQ ID NO: 38872 - DNA, 557 bp, Artificial Sequence
  chemically treated genomic DNA (Homo sapiens) CpG-island No: 38872
acccccgaaccgcaactcccgcgcacgtcccgtaattcctactcctccacaaacgtaattattaccatataaattccgtaaatatatcgactacgttaattatccgttattaaacgcgcgaaaaataaatccctattattatcaactaaataattacccccgaaccccgccgcacgcaccccaattatccaaacccatacaatccaacgtactcgaaataaacgaactctaaaatactctacaatatcacgctttcaaaaaccgtatatactattaataaacgactaaaaaaaaccttatactaactacgctacgcacccgacgcaacgaatacgaaaatacgccacgacgccccccaaaacgaacgaaaacaaaaactaaaacaaatttacaaaatatataactatacttcaacgcaaaaataaatataaaaatcgcgaaatacaaaaaataaaacgtcgatcgccgttacgacgtataaaaaaacgaattacccgctaaccacctataatacgaacgtcccgcaccgactaaacgcacgctaaacgactatatac

SEQ ID NO: 38873 - DNA, 526 bp, Artificial Sequence
  chemically treated genomic DNA (Homo sapiens) CpG-island No: 38873
gaatttttacgttttatttttaagtaggttttgtagtttagttttcgcggttttttatagttagtcgatgttgcgtaagcgtcgtatttacgttttagtatatgcgtatttaggtgcgtcggtaggggacgcgtcggtatagtaaaaatggcggcggtattacgggtggcggcggtcggggtaaggtttagcgttttggcgagcggttttcgcgtcgcggttcgtagtttttgtagttaggttatttttgttaacgaacgtatcgaaaataagcgtcggatcgcgttgttgggagggggttaacgtcgtattgacgcgtagtataagcgagtgagttttgaggggtttaagtgagtttcgtttttggcgttcgcgatttattattgcgtgttcggtttgcggcgttcgaggtttttttgttaattcgtacggtgtttggaggggtcggagtaagggtgtttattttgaaaatttgtagcgtttttcgtggaggcgggtataattagtagaagtatttgtgtgtttt

SEQ ID NO: 38874 - DNA, 526 bp, Artificial Sequence
  chemically treated genomic DNA (Homo sapiens) CpG-island No: 38874
aaaacacacaaatacttctactaattatacccgcctccacgaaaaacgctacaaattttcaaaataaacacccttactccgacccctccaaacaccgtacgaattaacaaaaaaacctcgaacgccgcaaaccgaacacgcaataataaatcgcgaacgccaaaaacgaaactcacttaaacccctcaaaactcactcgcttatactacgcgtcaatacgacgttaaccccctcccaacaacgcgatccgacgcttattttcgatacgttcgttaacaaaaataacctaactacaaaaactacgaaccgcgacgcgaaaaccgctcgccaaaacgctaaaccttaccccgaccgccgccacccgtaataccgccgccatttttactataccgacgcgtcccctaccgacgcacctaaatacgcatatactaaaacgtaaatacgacgcttacgcaacatcgactaactataaaaaaccgcgaaaactaaactacaaaacctacttaaaaataaaacgtaaaaattc

SEQ ID NO: 38875 - DNA, 526 bp, Artificial Sequence
  chemically treated genomic DNA (Homo sapiens) CpG-island No: 38875
aaagtatataggtgtttttgttggttatattcgtttttacgagaaacgttataggtttttaaggtgaatatttttgtttcggtttttttaggtatcgtgcggattggtagggaggtttcggacgtcgtaagtcgggtacgtagtgataggtcgcggacgttaggggcgggatttatttaggttttttaggatttattcgtttgtgttgcgcgttaatacggcgttggtttttttttagtagcgcggttcggcgtttgttttcgatgcgttcgttaatagaggtggtttggttgtaaaggttgcggatcgcggcgcggagatcgttcgttagaacgttgagttttgtttcgatcgtcgttattcgtaatgtcgtcgttatttttgttgtgtcggcgcgttttttatcggcgtatttgagtacgtatgtgttaaagcgtgggtacggcgtttgcgtagtatcggttggttgtagggagtcgcgggggttggattatagaatttgtttgggagtaaggcgtgagagttt

SEQ ID NO: 38876 - DNA, 526 bp, Artificial Sequence
  chemically treated genomic DNA (Homo sapiens) CpG-island No: 38876
aaactctcacgccttactcccaaacaaattctataatccaacccccgcgactccctacaaccaaccgatactacgcaaacgccgtacccacgctttaacacatacgtactcaaatacgccgataaaaaacgcgccgacacaacaaaaataacgacgacattacgaataacgacgatcgaaacaaaactcaacgttctaacgaacgatctccgcgccgcgatccgcaacctttacaaccaaaccacctctattaacgaacgcatcgaaaacaaacgccgaaccgcgctactaaaaaaaaaccaacgccgtattaacgcgcaacacaaacgaataaatcctaaaaaacctaaataaatcccgcccctaacgtccgcgacctatcactacgtacccgacttacgacgtccgaaacctccctaccaatccgcacgatacctaaaaaaaccgaaacaaaaatattcaccttaaaaacctataacgtttctcgtaaaaacgaatataaccaacaaaaacacctatatacttt

SEQ ID NO: 38877 - DNA, 1062 bp, Artificial Sequence
  chemically treated genomic DNA (Homo sapiens) CpG-island No: 38877
gagttcgttcggagcgattatagagcgtagaacgcggcggtttgggcgttcggggcgggattcggagtttagtttagtttcgcggttcggtaggcggtttgtattcgagttttattttcggatacggaggcgtttttttaagtcgagttggtaggcgcgggagtaggtttcggtttcgtttgaggcgcggtacgtttttttcgggttgtagggttttttattttattttagtatagggcgcggaggcggcggcgacggtaaggacgacggtcgggtagcggtttttcggatttagtgtaagacgtcgcggcggcgacgaaggttgatgttgcggttggcggacgtcgtcgtcgcgttttttatatcggacgcggggtttagattgcgttttggtttttcgtttcgtgggttgtagttcgtagtttttcgaggtggcgaggcgggcgggagtttttaattcggaggggaaggtcggggaggaagtgcgcgggtcgtcgtcggcgggcgggagggggcggggggtaagttcggtcgggtcgcggcggcgtttttcgcgttttagtcgtatatttcggggttattagatttaagcgtcgtttttttattgttcggttattttttcggcgttatatatatagacgattttttcgtcgagtacgacggtcgtcgtcgtttttagtatttttcggtcgcggaaggtaagcgtttatatcgttaggtttcgtcgtcgtttagcgtatatagtaaggtttcgtcgtaggtttttttttcgtgtttcgtcgtttttatttcgattttacgcgttattttagttcggtagggttcgggttgttgcggttttaatggatttcgcgggttgtgtggcgttttaggtttttgttggcggcgacgacgatcgttattttaacgggtaaagttattgttattttcgagattttttcgtcgtcgtcgtcgttagcgttcgtacgtatgcgtagagtatatttttattttttttttttttttttttttttcgtttttttttttttttgttttttttttaataattttttttatagtttt

SEQ ID NO: 38878 - DNA, 1062 bp, Artificial Sequence
  chemically treated genomic DNA (Homo sapiens) CpG-island No: 38878
aaaactataaaaaaaattattaaaaaaaaaacaaaaaaaaaaaaaaacgaaaaaaaaaaaaaaaaaaaaaaaataaaaatatactctacgcatacgtacgaacgctaacgacgacgacgacgaaaaaatctcgaaaataacaataactttacccgttaaaataacgatcgtcgtcgccgccaacaaaaacctaaaacgccacacaacccgcgaaatccattaaaaccgcaacaacccgaaccctaccgaactaaaataacgcgtaaaatcgaaataaaaacgacgaaacacgaaaaaaaaacctacgacgaaaccttactatatacgctaaacgacgacgaaacctaacgatataaacgcttaccttccgcgaccgaaaaatactaaaaacgacgacgaccgtcgtactcgacgaaaaaatcgtctatatatataacgccgaaaaaataaccgaacaataaaaaaacgacgcttaaatctaataaccccgaaatatacgactaaaacgcgaaaaacgccgccgcgacccgaccgaacttaccccccgccccctcccgcccgccgacgacgacccgcgcacttcctccccgaccttcccctccgaattaaaaactcccgcccgcctcgccacctcgaaaaactacgaactacaacccacgaaacgaaaaaccaaaacgcaatctaaaccccgcgtccgatataaaaaacgcgacgacgacgtccgccaaccgcaacatcaaccttcgtcgccgccgcgacgtcttacactaaatccgaaaaaccgctacccgaccgtcgtccttaccgtcgccgccgcctccgcgccctatactaaaataaaataaaaaaccctacaacccgaaaaaaacgtaccgcgcctcaaacgaaaccgaaacctactcccgcgcctaccaactcgacttaaaaaaacgcctccgtatccgaaaataaaactcgaatacaaaccgcctaccgaaccgcgaaactaaactaaactccgaatcccgccccgaacgcccaaaccgccgcgttctacgctctataatcgctccgaacgaactc

SEQ ID NO: 38879 - DNA, 1062 bp, Artificial Sequence
  chemically treated genomic DNA (Homo sapiens) CpG-island No: 38879
gaggttgtggagggggttgttagaggagaagtaagggaaaagggaagcgaagggagaggaaaggggggaggggtgagagtgtgttttgcgtatgcgtgcgagcgttagcgacgacggcggcgggggagtttcggggatgatagtggttttgttcgttggggtaacggtcgtcgtcgtcgttagtagaggtttgaggcgttatatagttcgcgggatttattaaggtcgtagtagttcgggttttatcgagttggagtggcgcgtggagtcggggtgagggcggcgaggtacgggggaggggtttgcggcggggttttgttgtgtgcgttgggcggcggcggggtttggcggtgtgagcgtttgtttttcgcggtcggggagtgttgagggcggcggcggtcgtcgtgttcggcggaggagtcgtttgtgtgtgtggcgtcgaaaaaatggtcgggtagtgagggggcggcgtttgagtttggtgatttcggagtgtgcgattgaggcgcgaggggcgtcgtcgcggttcggtcgggtttgtttttcgttttttttcgttcgtcggcggcggttcgcgtatttttttttcggttttttttttcgggttgaggattttcgttcgtttcgttatttcggggaattgcgggttgtaatttacggggcggagagttagggcgtagtttgggtttcgcgttcgatatggagagcgcggcggcggcgttcgttagtcgtaatattaattttcgtcgtcgtcgcggcgttttgtattagattcgggaagtcgttgttcgatcgtcgtttttgtcgtcgtcgtcgttttcgcgttttgtattgggatggagtaagaggttttgtagttcgggagaagcgtgtcgcgttttagacggggtcggggtttgttttcgcgtttgttagttcgatttgaggaggcgttttcgtgttcggagatggagttcgagtgtaggtcgtttgtcgagtcgcggggttagattgagtttcgagtttcgtttcgagcgtttaagtcgtcgcgttttgcgttttgtggtcgtttcggacgaattt

SEQ ID NO: 38880 - DNA, 1062 bp, Artificial Sequence
  chemically treated genomic DNA (Homo sapiens) CpG-island No: 38880
aaattcgtccgaaacgaccacaaaacgcaaaacgcgacgacttaaacgctcgaaacgaaactcgaaactcaatctaaccccgcgactcgacaaacgacctacactcgaactccatctccgaacacgaaaacgcctcctcaaatcgaactaacaaacgcgaaaacaaaccccgaccccgtctaaaacgcgacacgcttctcccgaactacaaaacctcttactccatcccaatacaaaacgcgaaaacgacgacgacgacaaaaacgacgatcgaacaacgacttcccgaatctaatacaaaacgccgcgacgacgacgaaaattaatattacgactaacgaacgccgccgccgcgctctccatatcgaacgcgaaacccaaactacgccctaactctccgccccgtaaattacaacccgcaattccccgaaataacgaaacgaacgaaaatcctcaacccgaaaaaaaaaaccgaaaaaaaaatacgcgaaccgccgccgacgaacgaaaaaaaacgaaaaacaaacccgaccgaaccgcgacgacgcccctcgcgcctcaatcgcacactccgaaatcaccaaactcaaacgccgccccctcactacccgaccattttttcgacgccacacacacaaacgactcctccgccgaacacgacgaccgccgccgccctcaacactccccgaccgcgaaaaacaaacgctcacaccgccaaaccccgccgccgcccaacgcacacaacaaaaccccgccgcaaacccctcccccgtacctcgccgccctcaccccgactccacgcgccactccaactcgataaaacccgaactactacgaccttaataaatcccgcgaactatataacgcctcaaacctctactaacgacgacgacgaccgttaccccaacgaacaaaaccactatcatccccgaaactcccccgccgccgtcgtcgctaacgctcgcacgcatacgcaaaacacactctcacccctcccccctttcctctcccttcgcttcccttttcccttacttctcctctaacaaccccctccacaacctc

SEQ ID NO: 38881 - DNA, 548 bp, Artificial Sequence
  chemically treated genomic DNA (Homo sapiens) CpG-island No: 38881
  unsure (29, 59, 86, 102, 147, 290, 298, 381, 400, 427, 541)
gggtggtggtttttgtgggttggtggggnggggttttcggggcgtgttggggggcgcgnttggggtggtcgcggggttgcgttggngttttgtttggggggngggggggtggggggtttttgtggcggtcgcgcgtggtgcgtgggnggtggtgcggtgggtggcggggtcggggggttgggcggcgggggcgtcgtggttcgcgtcggtgtgggtcgttttgggggcggtcggcgtttgggttcgggttgttgttggtgggtgttgggtcggtcgcgtttcgcgttttngcgtttgncgtttttgttcgtcggtttgcgtgtgtttggggtcgttcggggcgcggcgtcgttcgcgggtcggtcgcgcgtcgttttgcgntggcgcgtgggcgtttcgnttttgggtcggcgcggtttgcgtcgtncgtgcgtgtcggggtcgttgcgtcgtggtcgttgtcgtttcggtcgggtcgttcggtggtggcggggttcgggtggcgtcgttggcgcgggttgtgttcgttttgtcggtgggntcgttcg

SEQ ID NO: 38882 - DNA, 548 bp, Artificial Sequence
  chemically treated genomic DNA (Homo sapiens) CpG-island No: 38882
  unsure (8, 122, 149, 168, 251, 259, 402, 447, 463, 490, 520)
cgaacgancccaccgacaaaacgaacacaacccgcgccaacgacgccacccgaaccccgccaccaccgaacgacccgaccgaaacgacaacgaccacgacgcaacgaccccgacacgcacgnacgacgcaaaccgcgccgacccaaaancgaaacgcccacgcgccancgcaaaacgacgcgcgaccgacccgcgaacgacgccgcgccccgaacgaccccaaacacacgcaaaccgacgaacaaaaacgncaaacgcnaaaacgcgaaacgcgaccgacccaacacccaccaacaacaacccgaacccaaacgccgaccgcccccaaaacgacccacaccgacgcgaaccacgacgcccccgccgcccaaccccccgaccccgccacccaccgcaccaccncccacgcaccacgcgcgaccgccacaaaaaccccccacccccccnccccccaaacaaaacnccaacgcaaccccgcgaccaccccaancgcgccccccaacacgccccgaaaaccccnccccaccaacccacaaaaaccaccaccc

SEQ ID NO: 38883 - DNA, 548 bp, Artificial Sequence
  chemically treated genomic DNA (Homo sapiens) CpG-island No: 38883
  unsure (8, 122, 149, 168, 251, 259, 402, 447, 463, 490, 520)
cgagcgantttatcgataaaacgggtatagttcgcgttaacggcgttattcgaatttcgttattatcgagcggttcggtcgaggcggtagcgattacggcgtaacggtttcgatacgtacgngcggcgtaggtcgcgtcggtttagagncggggcgtttacgcgttancgtagagcggcgcgcggtcgattcgcgggcgacgtcgcgtttcgggcgattttagatatacgtaagtcggcgagtaaagacgntaaacgtnagggcgcgaggcgcgatcgatttaatatttattaatagtaattcgagtttaggcgtcgatcgtttttaaaacgatttatatcggcgcgagttacggcgttttcgtcgtttagtttttcggtttcgttatttatcgtattattntttacgtattacgcgcggtcgttataggaattttttatttttttnttttttaggtaaagtnttagcgtagtttcgcggttattttaancgcgttttttaatacgtttcgggaattttnttttattagtttatagagattattattt

SEQ ID NO: 38884 - DNA, 548 bp, Artificial Sequence
  chemically treated genomic DNA (Homo sapiens) CpG-island No: 38884
  unsure (29, 59, 86, 102, 147, 290, 298, 381, 400, 427, 541)
aaataataatctctataaactaataaaanaaaattcccgaaacgtattaaaaaacgcgnttaaaataaccgcgaaactacgctaanactttacctaaaaaanaaaaaaataaaaaattcctataacgaccgcgcgtaatacgtaaanaataatacgataaataacgaaaccgaaaaactaaacgacgaaaacgccgtaactcgcgccgatataaatcgttttaaaaacgatcgacgcctaaactcgaattactattaataaatattaaatcgatcgcgcctcgcgccctnacgtttancgtctttactcgccgacttacgtatatctaaaatcgcccgaaacgcgacgtcgcccgcgaatcgaccgcgcgccgctctacgntaacgcgtaaacgccccgnctctaaaccgacgcgacctacgccgcncgtacgtatcgaaaccgttacgccgtaatcgctaccgcctcgaccgaaccgctcgataataacgaaattcgaataacgccgttaacgcgaactatacccgttttatcgataaantcgctcg

SEQ ID NO: 38885 - DNA, 530 bp, Artificial Sequence
  chemically treated genomic DNA (Homo sapiens) CpG-island No: 38885
ttcgtgtgtttttgtgttttcgttttttcgtttttcgttttcgtttgcgtttttcgttttttttcgttttttttttggtttttttgtttttcgcggcgtttcggttttttcggttcgcgcggttgttttttttttttttttcggtcgtttttttttcgtttttttttttttttttttttttttgtttttttttttttttcgtttttttttttttcgtttttttttttttttttttttttcgttttgttcgtcgtcgttttcgttgtttcgcgtttcgtcgtcgttttttttttttttttcgttgcgtttttttttcgtcgtcgttttcggcgtgcgttcggtgtgttttggtttttttcggttcgcgttttcgtcgttcggcgggttcgtcgtcgcgcgggttcgtcgttgtttttttttcgtttttcgttttttttttttttttttttttttttttcgttttttcgttttgttttcgttttttgtttttttttttttttttgtttttttttttcgtttttttcgttttt

SEQ ID NO: 38886 - DNA, 530 bp, Artificial Sequence
  chemically treated genomic DNA (Homo sapiens) CpG-island No: 38886
aaaaacgaaaaaaacgaaaaaaaaaaacaaaaaaaaaaaaaaaaacaaaaaacgaaaacaaaacgaaaaaacgaaaaaaaaaaaaaaaaaaaaaaaaaaaacgaaaaacgaaaaaaaaacaacgacgaacccgcgcgacgacgaacccgccgaacgacgaaaacgcgaaccgaaaaaaaccaaaacacaccgaacgcacgccgaaaacgacgacgaaaaaaaaacgcaacgaaaaaaaaaaaaaaaacgacgacgaaacgcgaaacaacgaaaacgacgacgaacaaaacgaaaaaaaaaaaaaaaaaaaaaaacgaaaaaaaaaaaaacgaaaaaaaaaaaaaaacaaaaaaaaaaaaaaaaaaaaaaaaacgaaaaaaaaacgaccgaaaaaaaaaaaaaaaacaaccgcgcgaaccgaaaaaaccgaaacgccgcgaaaaacaaaaaaaccaaaaaaaaaacgaaaaaaaacgaaaaacgcaaacgaaaacgaaaaacgaaaaaacgaaaacacaaaaacacacgaa

SEQ ID NO: 38887 - DNA, 530 bp, Artificial Sequence
  chemically treated genomic DNA (Homo sapiens) CpG-island No: 38887
ggaagcgggggggacgggggggggagatagggaggggggggggaataaagggcgagaataggacgggaggacggggaaaggggaaaaaaggaagagggaaacgggggacggggagggggtaacgacgggttcgcgcggcggcgaattcgtcgggcgacgagggcgcgaatcgggggggattaaaatatatcgaacgtacgtcgggagcgacgacgggagggagacgtaacggaggggagaggggaggcggcggcggggcgcggaatagcgggggcggcggcgagtaaagcgggaaagagggagggagagaaagacgaaaggggggaaagcgggggaaagggggaagtaaggggggggggagagaagaaggggcgggagaggggcggtcggggggaagaaaaaaaataatcgcgcgggtcggggggatcggggcgtcgcgaaagatagaaggattaggggggaaacgggggggaacggaaggcgtaaacggaaacggggggcgggggagcgggggtatagaggtatacgag

SEQ ID NO: 38888 - DNA, 530 bp, Artificial Sequence
  chemically treated genomic DNA (Homo sapiens) CpG-island No: 38888
ctcgtatacctctatacccccgctcccccgccccccgtttccgtttacgccttccgttcccccccgtttcccccctaatccttctatctttcgcgacgccccgatccccccgacccgcgcgattattttttttcttccccccgaccgcccctctcccgccccttcttctctccccccccccttacttccccctttcccccgctttcccccctttcgtctttctctccctccctctttcccgctttactcgccgccgcccccgctattccgcgccccgccgccgcctcccctctcccctccgttacgtctccctcccgtcgtcgctcccgacgtacgttcgatatattttaatcccccccgattcgcgccctcgtcgcccgacgaattcgccgccgcgcgaacccgtcgttaccccctccccgtcccccgtttccctcttccttttttcccctttccccgtcctcccgtcctattctcgccctttattcccccccccctccctatctcccccccccgtcccccccgcttcc

SEQ ID NO: 38889 - DNA, 651 bp, Artificial Sequence
  chemically treated genomic DNA (Homo sapiens) CpG-island No: 38889
agtcggggtttcggttttcgtcgttcgttcgtcgtagcgttatagtcggttttggtgtgttagcgtgtatatttatatatatttatttaaatttatacgttttacgcggggatagcgcggggatagttcgggattcgtagagttgcgcgtacgtatttttttcgggtgtagtatatttcgtattcgtttcgcgtagcgtttgatttcgcgtttgatcggtcgcgcggcgtcgtttatttttttagacggcgaagatgcggggttcgttttttaggtggttttgggcggaggcggcggtcgtttagagtagtagtagtagtcgtagtcgtagcggaagttttaatcgagtcggcgggttagggacgcgggcgcgcggtgcgttgggggcggtacgttcgggcggaggaggcgttatttcgtggtttcgggagcgatagcggtaattagtcgagattgagttagcgttcggtcgtaggtagatttaagcgttaggaggcggagttagcgttgattttatttcgttttttttttcgtttttcgtagttttttttcgttttattggtttttttgagcgagagcggaattgttgggggaattttcgttattttttttcgggtaattttacggggaaagtttagttgcggataagtt

SEQ ID NO: 38890 - DNA, 651 bp, Artificial Sequence
  chemically treated genomic DNA (Homo sapiens) CpG-island No: 38890
aacttatccgcaactaaactttccccgtaaaattacccgaaaaaaaataacgaaaattcccccaacaattccgctctcgctcaaaaaaaccaataaaacgaaaaaaaactacgaaaaacgaaaaaaaaaacgaaataaaatcaacgctaactccgcctcctaacgcttaaatctacctacgaccgaacgctaactcaatctcgactaattaccgctatcgctcccgaaaccacgaaataacgcctcctccgcccgaacgtaccgcccccaacgcaccgcgcgcccgcgtccctaacccgccgactcgattaaaacttccgctacgactacgactactactactactctaaacgaccgccgcctccgcccaaaaccacctaaaaaacgaaccccgcatcttcgccgtctaaaaaaataaacgacgccgcgcgaccgatcaaacgcgaaatcaaacgctacgcgaaacgaatacgaaatatactacacccgaaaaaaatacgtacgcgcaactctacgaatcccgaactatccccgcgctatccccgcgtaaaacgtataaatttaaataaatatatataaatatacacgctaacacaccaaaaccgactataacgctacgacgaacgaacgacgaaaaccgaaaccccgact

SEQ ID NO: 38891 - DNA, 651 bp, Artificial Sequence
  chemically treated genomic DNA (Homo sapiens) CpG-island No: 38891
ggtttgttcgtagttgggtttttttcgtagagttgttcgggagagggtggcgaaggtttttttagtagtttcgttttcgtttaggaaagttagtgaggcgagaaaaggttgcgaggggcggggggaggggcggggtggggttagcgttggtttcgttttttggcgtttgggtttgtttgcggtcgggcgttggtttagtttcggttgattgtcgttgtcgttttcggggttacgggatgacgtttttttcgttcggacgtgtcgtttttagcgtatcgcgcgttcgcgtttttggttcgtcggttcggttggggttttcgttgcggttgcggttgttgttgttgttttgggcggtcgtcgttttcgtttagggttatttaaggagcggatttcgtattttcgtcgtttggaaaggtaggcggcgtcgcgcggtcggttaggcgcgggattagacgttgcgcggggcgggtgcggagtgtgttgtattcggagggagtgcgtgcgcgtagttttgcgggtttcgggttgttttcgcgttgttttcgcgtggagcgtgtgggtttgggtgagtgtgtgtgagtgtatacgttggtatattagagtcggttgtaacgttgcggcgagcgagcggcgggggtcggagtttcggtt

SEQ ID NO: 38892 - DNA, 651 bp, Artificial Sequence
  chemically treated genomic DNA (Homo sapiens) CpG-island No: 38892
aaccgaaactccgacccccgccgctcgctcgccgcaacgttacaaccgactctaatataccaacgtatacactcacacacactcacccaaacccacacgctccacgcgaaaacaacgcgaaaacaacccgaaacccgcaaaactacgcgcacgcactccctccgaatacaacacactccgcacccgccccgcgcaacgtctaatcccgcgcctaaccgaccgcgcgacgccgcctacctttccaaacgacgaaaatacgaaatccgctccttaaataaccctaaacgaaaacgacgaccgcccaaaacaacaacaacaaccgcaaccgcaacgaaaaccccaaccgaaccgacgaaccaaaaacgcgaacgcgcgatacgctaaaaacgacacgtccgaacgaaaaaaacgtcatcccgtaaccccgaaaacgacaacgacaatcaaccgaaactaaaccaacgcccgaccgcaaacaaacccaaacgccaaaaaacgaaaccaacgctaaccccaccccgcccctccccccgcccctcgcaaccttttctcgcctcactaactttcctaaacgaaaacgaaactactaaaaaaaccttcgccaccctctcccgaacaactctacgaaaaaaacccaactacgaacaaacc

SEQ ID NO: 38893 - DNA, 506 bp, Artificial Sequence
  chemically treated genomic DNA (Homo sapiens) CpG-island No: 38893
tttcgtaatagaaaacgttcggagaatacgatttttcgtttagttttttttaatttttcgcggaagtgtttatatcggaatttttttgtgttcgtattttgttattggtcgaggttttcgttcgtttttattcgtttttttttataatttagtcgggttgcgcggttcgtaggagttattttcgtttcgttttatttcggtttttcggtttttttttagtagttttcggtttcggtttcgtttcgttttttgtggtttcgtttcgttttcgttttcgtttttggttggcggtttagtttcgcggcgtcgttttcggtgcgggtttcgtttcggttgtggttttcggttgcggaggagttcgagacgtagttgtcgcgtcggggtttgagttgtcgtttttttcgtcgttcgaaaattcggagtgtttcgtataggtaagtggttcgggttcgggtttttttaggtatggcgggagaggaggttgcgataggtggaggggtcgaggt

SEQ ID NO: 38894 - DNA, 506 bp, Artificial Sequence
  chemically treated genomic DNA (Homo sapiens) CpG-island No: 38894
acctcgacccctccacctatcgcaacctcctctcccgccatacctaaaaaaacccgaacccgaaccacttacctatacgaaacactccgaattttcgaacgacgaaaaaaacgacaactcaaaccccgacgcgacaactacgtctcgaactcctccgcaaccgaaaaccacaaccgaaacgaaacccgcaccgaaaacgacgccgcgaaactaaaccgccaaccaaaaacgaaaacgaaaacgaaacgaaaccacaaaaaacgaaacgaaaccgaaaccgaaaactactaaaaaaaaaccgaaaaaccgaaataaaacgaaacgaaaataactcctacgaaccgcgcaacccgactaaattataaaaaaaaacgaataaaaacgaacgaaaacctcgaccaataacaaaatacgaacacaaaaaaattccgatataaacacttccgcgaaaaattaaaaaaaactaaacgaaaaatcgtattctccgaacgttttctattacgaaa

SEQ ID NO: 38895 - DNA, 506 bp, Artificial Sequence
  chemically treated genomic DNA (Homo sapiens) CpG-island No: 38895
gtttcggtttttttatttgtcgtagttttttttttcgttatgtttgagggagttcggattcgggttatttatttgtgcggggtatttcgggttttcgggcggcggaggaggcggtagtttaggtttcggcgcggtagttgcgtttcggattttttcgtagtcgggggttatagtcggggcggggttcgtatcggaagcggcgtcgcggggttggatcgttagttaggggcgggggcgggggcggggcggggttatagggggcggggcgggatcgaagtcggaagttgttagaaagggatcggggggtcggggtgggacgaggcggaagtgatttttacggatcgcgtagttcgattgagttgtgggaggaagcgaatggaagcgggcggaagtttcggttaatggtaaagtgcggatatagaggggtttcggtgtgagtattttcgcggggagttgaaaagagttgggcgggagatcgtgtttttcgagcgttttttattgcggag

SEQ ID NO: 38896 - DNA, 506 bp, Artificial Sequence
  chemically treated genomic DNA (Homo sapiens) CpG-island No: 38896
ctccgcaataaaaaacgctcgaaaaacacgatctcccgcccaactcttttcaactccccgcgaaaatactcacaccgaaacccctctatatccgcactttaccattaaccgaaacttccgcccgcttccattcgcttcctcccacaactcaatcgaactacgcgatccgtaaaaatcacttccgcctcgtcccaccccgaccccccgatccctttctaacaacttccgacttcgatcccgccccgccccctataaccccgccccgcccccgcccccgcccctaactaacgatccaaccccgcgacgccgcttccgatacgaaccccgccccgactataacccccgactacgaaaaaatccgaaacgcaactaccgcgccgaaacctaaactaccgcctcctccgccgcccgaaaacccgaaataccccgcacaaataaataacccgaatccgaactccctcaaacataacgaaaaaaaaaactacgacaaataaaaaaaccgaaac

SEQ ID NO: 38897 - DNA, 796 bp, Artificial Sequence
  chemically treated genomic DNA (Homo sapiens) CpG-island No: 38897
cgagcggtgttttttggggttttaatgtagcgagttgtgttcgaggggttcggaaggcgtaagttgggtagcgatatggggaacgcggagcgggtttcggggtttcggagttttgggttcgtatttacgttgttgttgttcgtcgcggcgttattggtcgtgtcggacgtattcgggcgttttttcgaggaggacgaggagttagtggtgtcggagttggagcgcgtttcgggatacgggattacgcgttttcgtttgtacgtttttgattagtagttggatttggagttgcggttcgatagtagttttttggcgttcggttttacgttttagaacgtggggcgtaaattcgggttcgagacgtcgttttcggaaatcgatttggcgtattgtttttatttcggtatcgtgaatggcgattttagttcggttgtcgtttttagtttttgcgagggcgtgcgcggcgttttttatttgttgggggaggcgtattttatttagtcgttgttcgtcgttagcgagcgtttcgttatcgtcgttttaggggagaagtcgtcggtattattatagttttattttttgcggcggaatcggtagggcgacgtaggcggtacgtgcggggtggtggacgacgagtttcggtcgattgggaaagcggagatcgaagacgaggacgaagggattgagggcgaggacgaagggttttagtggtcgtcgtaggattcggtattgtaaggcgtaggatagtttataggtagaagaattgttttcgtttgtttgtttatttatttttttt

SEQ ID NO: 38898 - DNA, 796 bp, Artificial Sequence
  chemically treated genomic DNA (Homo sapiens) CpG-island No: 38898
aaaaaaaataaataaacaaacaaacgaaaacaattcttctacctataaactatcctacgccttacaataccgaatcctacgacgaccactaaaacccttcgtcctcgccctcaatcccttcgtcctcgtcttcgatctccgctttcccaatcgaccgaaactcgtcgtccaccaccccgcacgtaccgcctacgtcgccctaccgattccgccgcaaaaaataaaactataataataccgacgacttctcccctaaaacgacgataacgaaacgctcgctaacgacgaacaacgactaaataaaatacgcctcccccaacaaataaaaaacgccgcgcacgccctcgcaaaaactaaaaacgacaaccgaactaaaatcgccattcacgataccgaaataaaaacaatacgccaaatcgatttccgaaaacgacgtctcgaacccgaatttacgccccacgttctaaaacgtaaaaccgaacgccaaaaaactactatcgaaccgcaactccaaatccaactactaatcaaaaacgtacaaacgaaaacgcgtaatcccgtatcccgaaacgcgctccaactccgacaccactaactcctcgtcctcctcgaaaaaacgcccgaatacgtccgacacgaccaataacgccgcgacgaacaacaacaacgtaaatacgaacccaaaactccgaaaccccgaaacccgctccgcgttccccatatcgctacccaacttacgccttccgaacccctcgaacacaactcgctacattaaaaccccaaaaaacaccgctcg

SEQ ID NO: 38899 - DNA, 796 bp, Artificial Sequence
  chemically treated genomic DNA (Homo sapiens) CpG-island No: 38899
gaggaggatgaatggatagataaacgagagtaatttttttatttgtgggttgttttacgttttgtagtgtcgggttttgcggcgattattgaggtttttcgttttcgtttttagttttttcgttttcgttttcggttttcgtttttttagtcggtcggggttcgtcgtttattatttcgtacgtgtcgtttacgtcgttttgtcgatttcgtcgtaggaggtggaattgtagtggtgtcggcggttttttttttggggcggcggtggcgaggcgttcgttggcggcgggtagcggttggatgaaatacgttttttttagtaggtagaaggcgtcgcgtacgttttcgtagaggttgagggcggtagtcgagttgggatcgttatttacggtgtcggagtagaagtagtgcgttaggtcggttttcggaagcggcgtttcggattcggatttgcgttttacgttttggagcgtgaagtcgggcgttaaaaagttgttgtcgggtcgtagttttagatttagttgttggttaaaggcgtgtaggcggaggcgcgtggtttcgtgtttcggggcgcgttttagtttcggtattattagtttttcgtttttttcggaggggcgttcgagtgcgttcgatacggttagtagcgtcgcggcgagtagtagtagcgtgggtacgggtttaaagtttcgagatttcggagttcgtttcgcgttttttatgtcgttgtttagtttgcgtttttcgaatttttcgggtatagttcgttgtattggagttttaggagatatcgttcg

SEQ ID NO: 38900 - DNA, 796 bp, Artificial Sequence
  chemically treated genomic DNA (Homo sapiens) CpG-island No: 38900
cgaacgatatctcctaaaactccaatacaacgaactatacccgaaaaattcgaaaaacgcaaactaaacaacgacataaaaaacgcgaaacgaactccgaaatctcgaaactttaaacccgtacccacgctactactactcgccgcgacgctactaaccgtatcgaacgcactcgaacgcccctccgaaaaaaacgaaaaactaataataccgaaactaaaacgcgccccgaaacacgaaaccacgcgcctccgcctacacgcctttaaccaacaactaaatctaaaactacgacccgacaacaactttttaacgcccgacttcacgctccaaaacgtaaaacgcaaatccgaatccgaaacgccgcttccgaaaaccgacctaacgcactacttctactccgacaccgtaaataacgatcccaactcgactaccgccctcaacctctacgaaaacgtacgcgacgccttctacctactaaaaaaaacgtatttcatccaaccgctacccgccgccaacgaacgcctcgccaccgccgccccaaaaaaaaaaccgccgacaccactacaattccacctcctacgacgaaatcgacaaaacgacgtaaacgacacgtacgaaataataaacgacgaaccccgaccgactaaaaaaacgaaaaccgaaaacgaaaacgaaaaaactaaaaacgaaaacgaaaaacctcaataatcgccgcaaaacccgacactacaaaacgtaaaacaacccacaaataaaaaaattactctcgtttatctatccattcatcctcctc

SEQ ID NO: 38901 - DNA, 601 bp, Artificial Sequence
  chemically treated genomic DNA (Homo sapiens) CpG-island No: 38901
tgatcgcgtttttttttgtcgtagttttggttcggtttagatcgtatagcgacgattatagtattatgaagaagattttttttcgaaagtttaagcgtagttttaatattaagtttagcggtttttacgaggagatatcggggtttcggttcggggacgcgaggttcgcgggcgtttcgggggtagtagcgcgcgttttgattttcgggatttcgtagtgcgcgttgttttcggcggcgttttcgggtgacgaggacgatagcgagtttgtgtatatcgagatgttggggtacgcggttaggttcgatagttcggatttcggggagttcgtgtacgaggagatgaagtgttgtttgttcgacgacggcggttcgggcgcgggtttttttttgttttacggcgtatcgtcgtttttgttttatcgcgcgtcggaggacgaggcggcggggtttttaggggacgcgtgcgatatttcgtcgtttttttttaatttgttgtcgtatcggtcgtttttgttggtgtttttttcgattttcgttatttgttttttcgttttcgacgagtcgtttttgatatttttggaggtgaagaagttgttagt

SEQ ID NO: 38902 - DNA, 601 bp, Artificial Sequence
  chemically treated genomic DNA (Homo sapiens) CpG-island No: 38902
actaacaacttcttcacctccaaaaatatcaaaaacgactcgtcgaaaacgaaaaaacaaataacgaaaatcgaaaaaaacaccaacaaaaacgaccgatacgacaacaaattaaaaaaaaacgacgaaatatcgcacgcgtcccctaaaaaccccgccgcctcgtcctccgacgcgcgataaaacaaaaacgacgatacgccgtaaaacaaaaaaaaacccgcgcccgaaccgccgtcgtcgaacaaacaacacttcatctcctcgtacacgaactccccgaaatccgaactatcgaacctaaccgcgtaccccaacatctcgatatacacaaactcgctatcgtcctcgtcacccgaaaacgccgccgaaaacaacgcgcactacgaaatcccgaaaatcaaaacgcgcgctactacccccgaaacgcccgcgaacctcgcgtccccgaaccgaaaccccgatatctcctcgtaaaaaccgctaaacttaatattaaaactacgcttaaactttcgaaaaaaaatcttcttcataatactataatcgtcgctatacgatctaaaccgaaccaaaactacgacaaaaaaaaacgcgatca

SEQ ID NO: 38903 - DNA, 601 bp, Artificial Sequence
  chemically treated genomic DNA (Homo sapiens) CpG-island No: 38903
attggtagtttttttatttttaggggtgttaggggcgattcgtcggaggcgggggagtaggtgacgggggtcggggggaatattagtaggggcggtcggtgcggtagtaggttggggaagggcggcgggatgtcgtacgcgttttttgggggtttcgtcgtttcgtttttcggcgcgcggtggagtaggggcggcgatgcgtcgtggagtaggaaggagttcgcgttcgggtcgtcgtcgtcgggtaggtaatattttattttttcgtatacggatttttcggggttcgggttatcgggtttggtcgcgtgttttagtatttcgatgtatataggttcgttgtcgttttcgttattcggaggcgtcgtcgggggtagcgcgtattgcggagtttcgggggttagaacgcgcgttgttgttttcggggcgttcgcgggtttcgcgttttcgggtcgggatttcgatattttttcgtaggagtcgttgagtttggtgttggggttgcgtttgggttttcgaggaggaattttttttatggtgttgtagtcgtcgttgtgcggtttgggtcgggttagagttgcggtaggaaaggacgcggtta

SEQ ID NO: 38904 - DNA, 601 bp, Artificial Sequence
  chemically treated genomic DNA (Homo sapiens) CpG-island No: 38904
taaccgcgtcctttcctaccgcaactctaacccgacccaaaccgcacaacgacgactacaacaccataaaaaaaattcctcctcgaaaacccaaacgcaaccccaacaccaaactcaacgactcctacgaaaaaatatcgaaatcccgacccgaaaacgcgaaacccgcgaacgccccgaaaacaacaacgcgcgttctaacccccgaaactccgcaatacgcgctacccccgacgacgcctccgaataacgaaaacgacaacgaacctatatacatcgaaatactaaaacacgcgaccaaacccgataacccgaaccccgaaaaatccgtatacgaaaaaataaaatattacctacccgacgacgacgacccgaacgcgaactccttcctactccacgacgcatcgccgcccctactccaccgcgcgccgaaaaacgaaacgacgaaacccccaaaaaacgcgtacgacatcccgccgcccttccccaacctactaccgcaccgaccgcccctactaatattccccccgacccccgtcacctactcccccgcctccgacgaatcgcccctaacacccctaaaaataaaaaaactaccaat

SEQ ID NO: 38905 - DNA, 1546 bp, Artificial Sequence
  chemically treated genomic DNA (Homo sapiens) CpG-island No: 38905
cgacgttttatgtcgagtcgatcgttgagtcgtacgtttttttacggcgggggcgagatggtgcgtagatttagcggtgcgaggggcggcggcgattttgggcggtcgggagttcgggtttttagcgtagttttttgttaggcgggtcgtttttggcgttgcggggcggcgggcgggcgggcggcggcggtattttggagagcgggtagtatttgatggtgtgcgcgttgtcgtcgttggcgtcgtataggggatacgtgtagcggcgtagtacgggatatagtattcgttcgtcggggtttttgaggatatgggtggtgtagagcgttatcgtttttttgttgtttcggtagaatacgtatatttgtagttcgggttttagtagtcgggcggtcgtcgtttcggaggtcgcgtgtagtcggggttcggtcgtttacgtcggggttcgtttttcgcgcggcgtcgtttcgttggtggtggtggcggcggcggcggcggcgggcgcgtagtttagtagtacggcggcggtacgattcgcgaacgggtttagttcggcgaagcgtttttttagtagttcggtttcggcggggttcgcgtatagttttagcgcgcgtaattttagcgcgttttttaggtagcggtttcgggatttcggttcgtcgttgtcgtcgtcgtcgttttcgtcgtagtcgggcggttttagcgtcggttttagcgttttaggttcggttttcgtgtggggggagtagtaggacgacgaggaggaggagggcggggagtcgtcgtcgtcgtttttatcgcgggcgtagtcgaagcgcggttcgtcgtttatcgttttggtgatgagcgtggcgagttttaggtagtcgttttaggagttgaagggttgcgggtgcgtcgggttcggggcgtttacgtagcgggcgttgggtacgagcgttatgggcgggggggcgcggtcgcggcggggcgagcggggcgtttaggggaaagtttttatgggcgggttgcgggtcgcgcgtcgttttttcgtcgtcggcgcgggtcggacggaagggatacgtcgagtttgttcgtcggtttgtcgcggggtggggtcgtcgcgtcgttttttatcgggtttattttttttcgtttttcggtttcgtcgtcgcggttttgttttttgcgttttttcgtttcggttatttcgttcgcgtttcggacggaggcggagcggaggcgggttggttgtgtgcgcgtttcgttttagttcgcgcggttttcgcgtttcgcgcgttgcgttagtttcgttagttgtcgggcggtttttatttcgggagggggcgggcgaggcgtcgtttcgagtcgtggcgtttattggttgtagattagagtttttcggcgtttcgggcgtcgtttcggacgttgattggtgggaatacggggagggggcgtgtttttcgcgtagttgggaggtgaggagaaagtaggggagagaagggtcgggaagggagggtcgttggggttcgtattcgagcgtcgggtttgggtttggagtaggtga

SEQ ID NO: 38906 - DNA, 1546 bp, Artificial Sequence
  chemically treated genomic DNA (Homo sapiens) CpG-island No: 38906
tcacctactccaaacccaaacccgacgctcgaatacgaaccccaacgaccctcccttcccgacccttctctcccctactttctcctcacctcccaactacgcgaaaaacacgccccctccccgtattcccaccaatcaacgtccgaaacgacgcccgaaacgccgaaaaactctaatctacaaccaataaacgccacgactcgaaacgacgcctcgcccgccccctcccgaaataaaaaccgcccgacaactaacgaaactaacgcaacgcgcgaaacgcgaaaaccgcgcgaactaaaacgaaacgcgcacacaaccaacccgcctccgctccgcctccgtccgaaacgcgaacgaaataaccgaaacgaaaaaacgcaaaaaacaaaaccgcgacgacgaaaccgaaaaacgaaaaaaaataaacccgataaaaaacgacgcgacgaccccaccccgcgacaaaccgacgaacaaactcgacgtatcccttccgtccgacccgcgccgacgacgaaaaaacgacgcgcgacccgcaacccgcccataaaaactttcccctaaacgccccgctcgccccgccgcgaccgcgcccccccgcccataacgctcgtacccaacgcccgctacgtaaacgccccgaacccgacgcacccgcaacccttcaactcctaaaacgactacctaaaactcgccacgctcatcaccaaaacgataaacgacgaaccgcgcttcgactacgcccgcgataaaaacgacgacgacgactccccgccctcctcctcctcgtcgtcctactactccccccacacgaaaaccgaacctaaaacgctaaaaccgacgctaaaaccgcccgactacgacgaaaacgacgacgacgacaacgacgaaccgaaatcccgaaaccgctacctaaaaaacgcgctaaaattacgcgcgctaaaactatacgcgaaccccgccgaaaccgaactactaaaaaaacgcttcgccgaactaaacccgttcgcgaatcgtaccgccgccgtactactaaactacgcgcccgccgccgccgccgccgccaccaccaccaacgaaacgacgccgcgcgaaaaacgaaccccgacgtaaacgaccgaaccccgactacacgcgacctccgaaacgacgaccgcccgactactaaaacccgaactacaaatatacgtattctaccgaaacaacaaaaaaacgataacgctctacaccacccatatcctcaaaaaccccgacgaacgaatactatatcccgtactacgccgctacacgtatcccctatacgacgccaacgacgacaacgcgcacaccatcaaatactacccgctctccaaaataccgccgccgcccgcccgcccgccgccccgcaacgccaaaaacgacccgcctaacaaaaaactacgctaaaaacccgaactcccgaccgcccaaaatcgccgccgcccctcgcaccgctaaatctacgcaccatctcgcccccgccgtaaaaaaacgtacgactcaacgatcgactcgacataaaacgtcg

SEQ ID NO: 38907 - DNA, 1546 bp, Artificial Sequence
  chemically treated genomic DNA (Homo sapiens) CpG-island No: 38907
ttatttgttttaagtttaggttcggcgttcgaatgcgggttttagcggtttttttttttcggttttttttttttttattttttttttattttttagttgcgcggagaatacgtttttttttcgtgtttttattaattagcgttcggagcggcgttcgaggcgtcggggggttttggtttgtagttaatgagcgttacggttcgaggcggcgtttcgttcgttttttttcggaatgaaggtcgttcgatagttggcgaggttggcgtagcgcgcggggcgcgggagtcgcgcgggttggagcggagcgcgtatatagttagttcgttttcgtttcgttttcgttcggggcgcgggcgaggtggtcggggcgggggaacgtagggggtagggtcgcggcggcgaggtcggggggcggggaggagtgggttcgataaaaggcggcgcggcggttttatttcgcggtaggtcggcgggtaggttcggcgtgtttttttcgttcggttcgcgtcggcggcggggaggcggcgcgcggttcgtagttcgtttatggaggtttttttttgggcgtttcgttcgtttcgtcgcggtcgcgttttttcgtttatggcgttcgtgtttagcgttcgttacgtgagcgtttcgggttcggcgtattcgtagttttttagtttttggaacgattatttggggttcgttacgtttattattaaagcggtggacggcgagtcgcgtttcggttgcgttcgcggtgggaacggcggcggcggtttttcgtttttttttttttcgtcgttttgttgttttttttatacgggggtcgggtttggggcgttggggtcggcgttggggtcgttcgattacgacgaggacgacgacgacgatagcgacgagtcggggtttcggggtcgttatttggggagcgcgttggaattgcgcgcgttggagttgtgcgcgggtttcgtcgaggtcgggttgttggaggagcgtttcgtcgagttgagttcgttcgcgggtcgtgtcgtcgtcgtgttgttgggttgcgcgttcgtcgtcgtcgtcgtcgttattattattagcgaggcgacgtcgcgcgaggagcgggtttcggcgtgggcggtcgagtttcggttgtacgcggttttcggggcggcggtcgttcggttgttgaagttcgagttgtaggtgtgcgtgttttgtcggaataataaggaggcgatggcgttttatattatttatatttttaagggtttcgacgggcgagtgttgtgtttcgtgttgcgtcgttatacgtgttttttgtgcggcgttagcggcgataacgcgtatattattaagtattgttcgttttttaaagtgtcgtcgtcgttcgttcgttcgtcgtttcgtagcgttagggacggttcgtttggtaagaagttgcgttgaaggttcgggttttcggtcgtttagggtcgtcgtcgtttttcgtatcgttaggtttgcgtattatttcgttttcgtcgtggggaggcgtgcggtttagcggtcggttcgatatgggacgtcg

SEQ ID NO: 38908 - DNA, 1546 bp, Artificial Sequence
  chemically treated genomic DNA (Homo sapiens) CpG-island No: 38908
cgacgtcccatatcgaaccgaccgctaaaccgcacgcctccccacgacgaaaacgaaataatacgcaaacctaacgatacgaaaaacgacgacgaccctaaacgaccgaaaacccgaaccttcaacgcaacttcttaccaaacgaaccgtccctaacgctacgaaacgacgaacgaacgaacgacgacgacactttaaaaaacgaacaatacttaataatatacgcgttatcgccgctaacgccgcacaaaaaacacgtataacgacgcaacacgaaacacaacactcgcccgtcgaaacccttaaaaatataaataatataaaacgccatcgcctccttattattccgacaaaacacgcacacctacaactcgaacttcaacaaccgaacgaccgccgccccgaaaaccgcgtacaaccgaaactcgaccgcccacgccgaaacccgctcctcgcgcgacgtcgcctcgctaataataataacgacgacgacgacgacgaacgcgcaacccaacaacacgacgacgacacgacccgcgaacgaactcaactcgacgaaacgctcctccaacaacccgacctcgacgaaacccgcgcacaactccaacgcgcgcaattccaacgcgctccccaaataacgaccccgaaaccccgactcgtcgctatcgtcgtcgtcgtcctcgtcgtaatcgaacgaccccaacgccgaccccaacgccccaaacccgacccccgtataaaaaaaacaacaaaacgacgaaaaaaaaaaaaacgaaaaaccgccgccgccgttcccaccgcgaacgcaaccgaaacgcgactcgccgtccaccgctttaataataaacgtaacgaaccccaaataatcgttccaaaaactaaaaaactacgaatacgccgaacccgaaacgctcacgtaacgaacgctaaacacgaacgccataaacgaaaaaacgcgaccgcgacgaaacgaacgaaacgcccaaaaaaaaacctccataaacgaactacgaaccgcgcgccgcctccccgccgccgacgcgaaccgaacgaaaaaaacacgccgaacctacccgccgacctaccgcgaaataaaaccgccgcgccgccttttatcgaacccactcctccccgccccccgacctcgccgccgcgaccctaccccctacgttcccccgccccgaccacctcgcccgcgccccgaacgaaaacgaaacgaaaacgaactaactatatacgcgctccgctccaacccgcgcgactcccgcgccccgcgcgctacgccaacctcgccaactatcgaacgaccttcattccgaaaaaaaacgaacgaaacgccgcctcgaaccgtaacgctcattaactacaaaccaaaaccccccgacgcctcgaacgccgctccgaacgctaattaataaaaacacgaaaaaaaaacgtattctccgcgcaactaaaaaataaaaaaaaaataaaaaaaaaaaaaaccgaaaaaaaaaaaccgctaaaacccgcattcgaacgccgaacctaaacttaaaacaaataa

SEQ ID NO: 38909 - DNA, 672 bp, Artificial Sequence
  chemically treated genomic DNA (Homo sapiens) CpG-island No: 38909
attttgcgcgtttaggatttcggcgtcgttacgtttgtcggcgtgcgtgacgttagcgcgtttgcgcgtacggagattcgttttttatattcggggtttgggcggtagtagggtcgtcgcggggaggttacgtggttttttttttttcgtttttggtcggttgggcgcgggcgattgttggcgaggcgcgtgggattttacgttggttttttttcgttttttttttcggttcgggttattagagagttcgttgacgtcgggtgagttgagtttgtcgttaagatgtcggtttatttttagaggtcggaaaatgtttttaaacgcgttaacggtgagtagttgatcggggcgcgtcgggttggggcggttcgaggttttcgaggtcgagaggcgcggggtttgttttttattgtttcgtcgttcggttcgcgcggggagaggagatcgatgcggtttgttcgtcgttgttttagtcggtggttgggtatgggttttttttttattttatcgattggggtttgggaggcgcgtagttcggaatcgtcgttttaggggtttttttttttttttgtcgttttcgggtgcgtcgcggggatcgtagttcgggagatagtttttattcggattggagttttttttttgttgtttgcgttttttggttttttaggtttt

SEQ ID NO: 38910 - DNA, 672 bp, Artificial Sequence
  chemically treated genomic DNA (Homo sapiens) CpG-island No: 38910
aaaacctaaaaaaccaaaaaacgcaaacaacaaaaaaaaaactccaatccgaataaaaactatctcccgaactacgatccccgcgacgcacccgaaaacgacaaaaaaaaaaaaaaacccctaaaacgacgattccgaactacgcgcctcccaaaccccaatcgataaaataaaaaaaaaacccatacccaaccaccgactaaaacaacgacgaacaaaccgcatcgatctcctctccccgcgcgaaccgaacgacgaaacaataaaaaacaaaccccgcgcctctcgacctcgaaaacctcgaaccgccccaacccgacgcgccccgatcaactactcaccgttaacgcgtttaaaaacattttccgacctctaaaaataaaccgacatcttaacgacaaactcaactcacccgacgtcaacgaactctctaataacccgaaccgaaaaaaaaaacgaaaaaaaaccaacgtaaaatcccacgcgcctcgccaacaatcgcccgcgcccaaccgaccaaaaacgaaaaaaaaaaaaccacgtaacctccccgcgacgaccctactaccgcccaaaccccgaatataaaaaacgaatctccgtacgcgcaaacgcgctaacgtcacgcacgccgacaaacgtaacgacgccgaaatcctaaacgcgcaaaat

SEQ ID NO: 38911 - DNA, 672 bp, Artificial Sequence
  chemically treated genomic DNA (Homo sapiens) CpG-island No: 38911
gggatttggagagttagaggacgtaggtagtaaggagggagttttagttcgggtaggggttgtttttcgggttgcggttttcgcgacgtattcggaggcggtagggggaaggaaaggtttttggggcgacggtttcgggttacgcgttttttagattttagtcgatagagtgagaaggaaatttatgtttaattatcggttgggatagcggcgggtaggtcgtatcggtttttttttttcgcgcgggtcgggcggcggagtagtgggaagtaggtttcgcgtttttcgatttcggaggtttcgggtcgttttagttcggcgcgtttcgattagttatttatcgttggcgcgtttgagggtatttttcggtttttgaaaataggtcggtattttggcggtaggtttagtttattcggcgttagcgaattttttagtggttcgggtcgggagaggagacgaaggggaattagcgtaaggttttacgcgtttcgttagtagtcgttcgcgtttagtcggttagagacggaaaggaaggagttacgtgattttttcgcggcggttttgttgtcgtttaggtttcggatgtagggggcgggttttcgtgcgcgtaagcgcgttggcgttacgtacgtcgatagacgtggcggcgtcggagttttaggcgcgtaaggt

SEQ ID NO: 38912 - DNA, 672 bp, Artificial Sequence
  chemically treated genomic DNA (Homo sapiens) CpG-island No: 38912
accttacgcgcctaaaactccgacgccgccacgtctatcgacgtacgtaacgccaacgcgcttacgcgcacgaaaacccgccccctacatccgaaacctaaacgacaacaaaaccgccgcgaaaaaatcacgtaactccttcctttccgtctctaaccgactaaacgcgaacgactactaacgaaacgcgtaaaaccttacgctaattccccttcgtctcctctcccgacccgaaccactaaaaaattcgctaacgccgaataaactaaacctaccgccaaaataccgacctattttcaaaaaccgaaaaataccctcaaacgcgccaacgataaataactaatcgaaacgcgccgaactaaaacgacccgaaacctccgaaatcgaaaaacgcgaaacctacttcccactactccgccgcccgacccgcgcgaaaaaaaaaaaccgatacgacctacccgccgctatcccaaccgataattaaacataaatttccttctcactctatcgactaaaatctaaaaaacgcgtaacccgaaaccgtcgccccaaaaacctttccttccccctaccgcctccgaatacgtcgcgaaaaccgcaacccgaaaaacaacccctacccgaactaaaactccctccttactacctacgtcctctaactctccaaatccc

SEQ ID NO: 38913 - DNA, 800 bp, Artificial Sequence
  chemically treated genomic DNA (Homo sapiens) CpG-island No: 38913
gcgggagggaggcgggttttatagcgggaggcggggtttgtgatggttcggggagggaggcggggtttatgatgggtcggggagggaggcggggtttgtgatgggggcgggttttacggcgggcggggcggggttcgggtgcgaggtcggttttgtaggcggtagttagagttgcgcgtcgcggcggcggaagatggttgcggtcgaggtggcggatatttagttgatgtttggagtcgggttgatcggtgaggacgtaggcgttttgtttggaagttcgtattttggttttgtttttgttttatttcggttcggggtagttcgggttttcgcggttttcggcgtcgatcgtatgaggagggcgcggttttttttttgttgggtttggattggggattgcggagttcggtttttttggtgtaggggattcggttcgtcgttttcgttcgttcgttcgcggtcgtttgtggggtttgttcggttcgagggagttcggggatttttaagatttcggggtggagttttttttgtacgtttcgggttgttcggcggagtcgggacgtcgagcgtttttaggttgggtagttgcgaggggcgttgcgcgggcggggtcgggtcgggcgggagtagtcggttggcggcgcggcgcggcgcggcggggaggaggtagggttcggttttttcgagtcgggggcgggcggttgtttcggagttacgggtgattgttcgttcgggcggtttttatcgtgggatcgggtagttggagattgttgggtcgggtgttgcgcgttgtatatata

SEQ ID NO: 38914 - DNA, 800 bp, Artificial Sequence
  chemically treated genomic DNA (Homo sapiens) CpG-island No: 38914
tatatatacaacgcgcaacacccgacccaacaatctccaactacccgatcccacgataaaaaccgcccgaacgaacaatcacccgtaactccgaaacaaccgcccgcccccgactcgaaaaaaccgaaccctacctcctccccgccgcgccgcgccgcgccgccaaccgactactcccgcccgacccgaccccgcccgcgcaacgcccctcgcaactacccaacctaaaaacgctcgacgtcccgactccgccgaacaacccgaaacgtacaaaaaaaactccaccccgaaatcttaaaaatccccgaactccctcgaaccgaacaaaccccacaaacgaccgcgaacgaacgaacgaaaacgacgaaccgaatcccctacaccaaaaaaaccgaactccgcaatccccaatccaaacccaacaaaaaaaaaaccgcgccctcctcatacgatcgacgccgaaaaccgcgaaaacccgaactaccccgaaccgaaataaaacaaaaacaaaaccaaaatacgaacttccaaacaaaacgcctacgtcctcaccgatcaacccgactccaaacatcaactaaatatccgccacctcgaccgcaaccatcttccgccgccgcgacgcgcaactctaactaccgcctacaaaaccgacctcgcacccgaaccccgccccgcccgccgtaaaacccgcccccatcacaaaccccgcctccctccccgacccatcataaaccccgcctccctccccgaaccatcacaaaccccgcctcccgctataaaacccgcctccctcccgc

SEQ ID NO: 38915 - DNA, 800 bp, Artificial Sequence
  chemically treated genomic DNA (Homo sapiens) CpG-island No: 38915
tgtgtgtataacgcgtagtattcggtttagtagtttttagttgttcggttttacgatgggggtcgttcgggcgggtagttattcgtggtttcgaggtagtcgttcgttttcggttcgggggaatcggattttgtttttttttcgtcgcgtcgcgtcgcgtcgttagtcggttgttttcgttcggttcggtttcgttcgcgtagcgtttttcgtagttgtttagtttgggagcgttcgacgtttcggtttcgtcgggtaattcggggcgtgtagggggagttttatttcggaattttggaggttttcgggttttttcgggtcgggtaggttttataggcggtcgcgggcgggcgggcgagggcggcgggtcgggttttttgtattaaggaggtcgggtttcgtagtttttagtttaggtttaatagggagggggtcgcgttttttttatgcggtcggcgtcgggggtcgcgggagttcgggttgtttcgggtcgaggtggagtagaggtagaattagggtgcgggtttttaggtagggcgtttacgtttttatcgattagttcgattttaagtattagttgagtgttcgttatttcggtcgtagttatttttcgtcgtcgcggcgcgtagttttggttgtcgtttgtaggatcggtttcgtattcgaatttcgtttcgttcgtcgtagggttcgtttttattataggtttcgttttttttttcggtttattataagtttcgttttttttttcggattattataggtttcgtttttcgttgtaggattcgtttttttttcgt

SEQ ID NO: 38916 - DNA, 800 bp, Artificial Sequence
  chemically treated genomic DNA (Homo sapiens) CpG-island No: 38916
acgaaaaaaaaacgaatcctacaacgaaaaacgaaacctataataatccgaaaaaaaaaacgaaacttataataaaccgaaaaaaaaaacgaaacctataataaaaacgaaccctacgacgaacgaaacgaaattcgaatacgaaaccgatcctacaaacgacaaccaaaactacgcgccgcgacgacgaaaaataactacgaccgaaataacgaacactcaactaatacttaaaatcgaactaatcgataaaaacgtaaacgccctacctaaaaacccgcaccctaattctacctctactccacctcgacccgaaacaacccgaactcccgcgacccccgacgccgaccgcataaaaaaaacgcgaccccctccctattaaacctaaactaaaaactacgaaacccgacctccttaatacaaaaaacccgacccgccgccctcgcccgcccgcccgcgaccgcctataaaacctacccgacccgaaaaaacccgaaaacctccaaaattccgaaataaaactccccctacacgccccgaattacccgacgaaaccgaaacgtcgaacgctcccaaactaaacaactacgaaaaacgctacgcgaacgaaaccgaaccgaacgaaaacaaccgactaacgacgcgacgcgacgcgacgaaaaaaaaacaaaatccgattcccccgaaccgaaaacgaacgactacctcgaaaccacgaataactacccgcccgaacgacccccatcgtaaaaccgaacaactaaaaactactaaaccgaatactacgcgttatacacaca

SEQ ID NO: 38917 - DNA, 562 bp, Artificial Sequence
  chemically treated genomic DNA (Homo sapiens) CpG-island No: 38917
ttttttgcgttttttgtcgcgttttaaggggtgaaggtcggtggtgcgcgttttcggtataatttcgagaggaggaaacggagatagggggcgtttacgtggtttggttaaggttattcgggttagttcgattttacgcgggtcggttcgttttttttttgtttttagtcgcgtcgggttcgggtcgtatttggcgttcggtgatttagaagcgtacgttgggtttaatgaagtcggggacggcgtttttgcgttttaggagtcgtttaggttgcgttttttttttttgttttagggatattttgcgttggttagagtggtcgtcgtcgttaggtcgcgcgtggaggaggagtcgggcggcgagtttcgtttcgggtcgcgcgtattcgtagttttcgttttaggttcgcgcgttcgacgtttcgtgttatagcgtttcggggtttttgcgcgtttattgtttcggcgagcgtagtttttttacgggttacgtttttttaattttgtttgttttgtttcgtatttttggggagtcgggtcgtttttaggttttaaggggtta

SEQ ID NO: 38918 - DNA, 562 bp, Artificial Sequence
  chemically treated genomic DNA (Homo sapiens) CpG-island No: 38918
taaccccttaaaacctaaaaacgacccgactccccaaaaatacgaaacaaaacaaacaaaattaaaaaaacgtaacccgtaaaaaaactacgctcgccgaaacaataaacgcgcaaaaaccccgaaacgctataacacgaaacgtcgaacgcgcgaacctaaaacgaaaactacgaatacgcgcgacccgaaacgaaactcgccgcccgactcctcctccacgcgcgacctaacgacgacgaccactctaaccaacgcaaaatatccctaaaacaaaaaaaaaaaacgcaacctaaacgactcctaaaacgcaaaaacgccgtccccgacttcattaaacccaacgtacgcttctaaatcaccgaacgccaaatacgacccgaacccgacgcgactaaaaacaaaaaaaaaacgaaccgacccgcgtaaaatcgaactaacccgaataaccttaaccaaaccacgtaaacgccccctatctccgtttcctcctctcgaaattataccgaaaacgcgcaccaccgaccttcaccccttaaaacgcgacaaaaaacgcaaaaaa

SEQ ID NO: 38919 - DNA, 562 bp, Artificial Sequence
  chemically treated genomic DNA (Homo sapiens) CpG-island No: 38919
tgattttttggggtttggagacggttcggttttttaaaggtgcggagtagggtaagtagggttgggaggacgtggttcgtgggagagttgcgttcgtcggaatagtgggcgcgtaagggtttcgaggcgttgtgatacgggacgtcgggcgcgcgggtttggggcgggaattgcgggtgcgcgcggttcggggcggggttcgtcgttcggttttttttttacgcgcggtttggcggcggcggttattttaattagcgtaaaatgtttttggaataggaggaggaaacgtaatttgggcggtttttaggacgtagagacgtcgttttcggttttattgagtttaacgtgcgtttttggattatcgagcgttaagtacggttcgggttcggcgcgattaggggtagggagggggcgggtcggttcgcgtggagtcgggttgattcgggtgattttggttaggttacgtgggcgttttttgttttcgtttttttttttcggagttgtgtcgggaacgcgtattatcggtttttattttttagggcgcggtaggggacgtagggga

SEQ ID NO: 38920 - DNA, 562 bp, Artificial Sequence
  chemically treated genomic DNA (Homo sapiens) CpG-island No: 38920
tcccctacgtcccctaccgcgccctaaaaaataaaaaccgataatacgcgttcccgacacaactccgaaaaaaaaaaacgaaaacaaaaaacgcccacgtaacctaaccaaaatcacccgaatcaacccgactccacgcgaaccgacccgccccctccctacccctaatcgcgccgaacccgaaccgtacttaacgctcgataatccaaaaacgcacgttaaactcaataaaaccgaaaacgacgtctctacgtcctaaaaaccgcccaaattacgtttcctcctcctattccaaaaacattttacgctaattaaaataaccgccgccgccaaaccgcgcgtaaaaaaaaaaccgaacgacgaaccccgccccgaaccgcgcgcacccgcaattcccgccccaaacccgcgcgcccgacgtcccgtatcacaacgcctcgaaacccttacgcgcccactattccgacgaacgcaactctcccacgaaccacgtcctcccaaccctacttaccctactccgcacctttaaaaaaccgaaccgtctccaaaccccaaaaaatca

SEQ ID NO: 38921 - DNA, 703 bp, Artificial Sequence
  chemically treated genomic DNA (Homo sapiens) CpG-island No: 38921
  unsure (144..145, 213, 220..)
aagttcgggtagaggtcggagaagaaggcggtgttagggcgttttgcggaagggtcgggggcggggttcgtgacgttgtcgggatagttaattacgtttggttttattagtggtttcgtttttttatcgtatattttttttttnnnagtttatttcgtacgacgtagcggttgggaatatagatattttcggagttggagtcgttattgtcgncgtattnngtgtttgtggagaaagaagtttttgtggcggttggaagtggacggagattattcgcgagacggcggcgttttatattcgaggttttttttgtgtcgttttttatttttttttcgcggttagtatgtggtgaagtcggagtcgcgagagagtcggggggaggaagaggagtcggaagggaggcggggtatttagagcggttttagttttagttgtagcggatttcggaggggggtcgcggcgtaatgttagagtagacgtcggtcgaggtcggtgttgcgggggttcgggaggacgtttgtcgggattattagttatcgttcgaagatttgatttttaatagtaagtcgtatattaatatgttgattattttagtcgaggagaatttgtttttcgttaaggagatcgttttttttatcgaggtttaaatcgttaaggtttttatatatttcgtagttttttattatttttaatattttttgat

SEQ ID NO: 38922 - DNA, 703 bp, Artificial Sequence
  chemically treated genomic DNA (Homo sapiens) CpG-island No: 38922
  unsure (483..484, 491, 558..)
atcaaaaaatattaaaaataataaaaaactacgaaatatataaaaaccttaacgatttaaacctcgataaaaaaaacgatctccttaacgaaaaacaaattctcctcgactaaaataatcaacatattaatatacgacttactattaaaaatcaaatcttcgaacgataactaataatcccgacaaacgtcctcccgaacccccgcaacaccgacctcgaccgacgtctactctaacattacgccgcgacccccctccgaaatccgctacaactaaaactaaaaccgctctaaataccccgcctcccttccgactcctcttcctccccccgactctctcgcgactccgacttcaccacatactaaccgcgaaaaaaaaataaaaaacgacacaaaaaaaacctcgaatataaaacgccgccgtctcgcgaataatctccgtccacttccaaccgccacaaaaacttctttctccacaaacacnnaatacgncgacaataacgactccaactccgaaaatatctatattcccaaccgctacgtcgtacgaaataaactnnnaaaaaaaaaatatacgataaaaaaacgaaaccactaataaaaccaaacgtaattaactatcccgacaacgtcacgaaccccgcccccgacccttccgcaaaacgccctaacaccgccttcttctccgacctctacccgaactt

SEQ ID NO: 38923 - DNA, 703 bp, Artificial Sequence
  chemically treated genomic DNA (Homo sapiens) CpG-island No: 38923
  unsure (483..484, 491, 558..)
attagggagtattagaagtaataggaggttgcggggtgtataaaaattttggcggtttgggtttcgatgagagagacgatttttttggcgaagggtaggtttttttcggttagaatggttagtatattgatgtgcggtttgttattgaaggttaggttttcgagcgatgattgataatttcgataggcgttttttcgggttttcgtagtatcggtttcggtcggcgtttgttttgatattgcgtcgcggttttttttcgaggttcgttgtagttgaagttgaagtcgttttggatatttcgtttttttttcgattttttttttttttttcggttttttcgcggtttcggttttattatatgttgatcgcggaggggggatgggggacgatatagggggaatttcgggtatgaaacgtcgtcgtttcgcgggtgattttcgtttatttttagtcgttatagaagtttttttttttatagatatnnaatgcgncggtagtggcggttttagtttcgaaaatgtttgtgtttttaatcgttgcgtcgtgcgaaatgaattnnnggaggggaaatgtgcggtaaaagggcggggttattgataaaattaggcgtgattggttgtttcggtaacgttacgagtttcgttttcggttttttcgtaggacgttttggtatcgttttttttttcggtttttattcggattt

SEQ ID NO: 38924 - DNA, 703 bp, Artificial Sequence
  chemically treated genomic DNA (Homo sapiens) CpG-island No: 38924
  unsure (144..145, 213, 220..)
aaatccgaataaaaaccgaaaaaaaaaacgataccaaaacgtcctacgaaaaaaccgaaaacgaaactcgtaacgttaccgaaacaaccaatcacgcctaattttatcaataaccccgcccttttaccgcacatttcccctccnnnaattcatttcgcacgacgcaacgattaaaaacacaaacattttcgaaactaaaaccgccactaccgncgcattnnatatctataaaaaaaaaaacttctataacgactaaaaataaacgaaaatcacccgcgaaacgacgacgtttcatacccgaaattccccctatatcgtcccccatcccccctccgcgatcaacatataataaaaccgaaaccgcgaaaaaaccgaaaaaaaaaaaaaaaatcgaaaaaaaaacgaaatatccaaaacgacttcaacttcaactacaacgaacctcgaaaaaaaaccgcgacgcaatatcaaaacaaacgccgaccgaaaccgatactacgaaaacccgaaaaaacgcctatcgaaattatcaatcatcgctcgaaaacctaaccttcaataacaaaccgcacatcaatatactaaccattctaaccgaaaaaaacctacccttcgccaaaaaaatcgtctctctcatcgaaacccaaaccgccaaaatttttatacaccccgcaacctcctattacttctaatactccctaat

SEQ ID NO: 38925 - DNA, 662 bp, Artificial Sequence
  chemically treated genomic DNA (Homo sapiens) CpG-island No: 38925
gtttcgaacgttagtaagtataatgataggtggcgtttgcgggggagtcggtttataaatatttacgagtagattagattgtttcgtttttatcggaaataagttggtttcggggtttttattcgttttcgtcgtcgtcgtcgtcgtttattgagttcgtatattcgtacgcgttcgcgcggtcgatttatgtattgagttgcgattttttttcgtttttcgtcgtagttcggagagatgtttaagtttcgattgtatttttatttttaaaaagtggttggttttgcggttgagtatttcgtcgttttttcgtgtcgcgaggcgtttcgggttttcgtcgtttaggttttaggatagttagcgttcggtcggcggttattaaggtcgggttcgttcgtttcgtttcggttaatttacgcgcggagaggcgcggcggggcgaattcgtgggggcgttttttttcgttttaacggcgacggttgttaagggggtttgtgagggaaggaaggcggaaagcgtaggtttacgttagtgggagcgaagagaacgcgtagatacgtgagaagttgcgagtgtttatttgggcgtttttttttttaggttgttaatacgagggtcggtgttgttttttaggttgggaagtgggagcgcggtgttagtta

SEQ ID NO: 38926 - DNA, 662 bp, Artificial Sequence
  chemically treated genomic DNA (Homo sapiens) CpG-island No: 38926
taactaacaccgcgctcccacttcccaacctaaaaaacaacaccgaccctcgtattaacaacctaaaaaaaaaaacgcccaaataaacactcgcaacttctcacgtatctacgcgttctcttcgctcccactaacgtaaacctacgctttccgccttccttccctcacaaacccccttaacaaccgtcgccgttaaaacgaaaaaaaacgcccccacgaattcgccccgccgcgcctctccgcgcgtaaattaaccgaaacgaaacgaacgaacccgaccttaataaccgccgaccgaacgctaactatcctaaaacctaaacgacgaaaacccgaaacgcctcgcgacacgaaaaaacgacgaaatactcaaccgcaaaaccaaccactttttaaaaataaaaatacaatcgaaacttaaacatctctccgaactacgacgaaaaacgaaaaaaaatcgcaactcaatacataaatcgaccgcgcgaacgcgtacgaatatacgaactcaataaacgacgacgacgacgacgaaaacgaataaaaaccccgaaaccaacttatttccgataaaaacgaaacaatctaatctactcgtaaatatttataaaccgactcccccgcaaacgccacctatcattatacttactaacgttcgaaac

SEQ ID NO: 38927 - DNA, 662 bp, Artificial Sequence
  chemically treated genomic DNA (Homo sapiens) CpG-island No: 38927
taattgatatcgcgtttttattttttagtttggaggatagtatcggttttcgtattagtaatttggaagagagggcgtttaggtgggtattcgtaattttttacgtatttgcgcgtttttttcgtttttattggcgtgagtttgcgtttttcgtttttttttttttataagtttttttggtaatcgtcgtcgttgagacggagggagacgtttttacggattcgtttcgtcgcgttttttcgcgcgtagattggtcggagcgaggcgaacgggttcggttttggtagtcgtcgatcgagcgttggttgttttggaatttaggcggcgggagttcggggcgtttcgcggtacggaagagcggcgagatgtttaatcgtaagattagttattttttgggaatgagggtgtagtcggagtttgaatattttttcgagttgcggcgggaagcggggaaggatcgtagtttagtgtatgggtcggtcgcgcggacgcgtgcgagtgtgcggatttagtggacgacggcggcggcggcgaaagcggatgaagatttcggagttaatttgttttcggtgagggcgggatagtttggtttgttcgtgaatatttataaatcggttttttcgtaggcgttatttgttattatgtttattaacgttcgggat

SEQ ID NO: 38928 - DNA, 662 bp, Artificial Sequence
  chemically treated genomic DNA (Homo sapiens) CpG-island No: 38928
atcccgaacgttaataaacataataacaaataacgcctacgaaaaaaccgatttataaatattcacgaacaaaccaaactatcccgccctcaccgaaaacaaattaactccgaaatcttcatccgctttcgccgccgccgccgtcgtccactaaatccgcacactcgcacgcgtccgcgcgaccgacccatacactaaactacgatccttccccgcttcccgccgcaactcgaaaaaatattcaaactccgactacaccctcattcccaaaaaataactaatcttacgattaaacatctcgccgctcttccgtaccgcgaaacgccccgaactcccgccgcctaaattccaaaacaaccaacgctcgatcgacgactaccaaaaccgaacccgttcgcctcgctccgaccaatctacgcgcgaaaaaacgcgacgaaacgaatccgtaaaaacgtctccctccgtctcaacgacgacgattaccaaaaaaacttataaaaaaaaaaaaacgaaaaacgcaaactcacgccaataaaaacgaaaaaaacgcgcaaatacgtaaaaaattacgaatacccacctaaacgccctctcttccaaattactaatacgaaaaccgatactatcctccaaactaaaaaataaaaacgcgatatcaatta

SEQ ID NO: 38929 - DNA, 749 bp, Artificial Sequence
  chemically treated genomic DNA (Homo sapiens) CpG-island No: 38929
tggtatttatttaagagtttaggcgaaggttatttttggaaggggatcgcgtttacggaggtttggttgatttttattcgtgatcggtgcggcgtttttgagattggcgttttttaggggcgaaggtggtcgcgtttttatgatgtaatattttgcgttttttttattttcgtatcgttgttttaggttatcggtattttttttgcggttcgatgtttttttttgtcgcggttcgcgtttttattagcgtgttcgtcgtcgtcggttttacgttcgaggttatcgtggcggttcgcgtttttttttttagttcgttttggtttagtagcggcggtttcgtttaagtttcgggcgttaatagggttcgaaggcgttatcgttgagacgtacgcggtttttgtcgtggttatagtattgtcgttagcgtttgaattaatatcgtttcgtatcggttttggcgttagttttagttttgtttcggtgaaggattcgttcggggcgtttgtagcgcgttgagtttaggggcgtcgttcggtatacgtcgtatcgttttcgaggtcgattgtaacgagggaagttatttagttgaggtgtttcgatttgtgtattcgagtggtgtgggggtgaagtcgttgagaagcggttcgtaggatttagtttaggtcggtttttggttagcgtaatcgggaaattagtttttttttcgagaattttttaattatgtgcggattaggaattatattttttag

SEQ ID NO: 38930 - DNA, 749 bp, Artificial Sequence
  chemically treated genomic DNA (Homo sapiens) CpG-island No: 38930
ctaaaaaatataattcctaatccgcacataattaaaaaattctcgaaaaaaaaactaatttcccgattacgctaaccaaaaaccgacctaaactaaatcctacgaaccgcttctcaacgacttcacccccacaccactcgaatacacaaatcgaaacacctcaactaaataacttccctcgttacaatcgacctcgaaaacgatacgacgtataccgaacgacgcccctaaactcaacgcgctacaaacgccccgaacgaatccttcaccgaaacaaaactaaaactaacgccaaaaccgatacgaaacgatattaattcaaacgctaacgacaatactataaccacgacaaaaaccgcgtacgtctcaacgataacgccttcgaaccctattaacgcccgaaacttaaacgaaaccgccgctactaaaccaaaacgaactaaaaaaaaaaacgcgaaccgccacgataacctcgaacgtaaaaccgacgacgacgaacacgctaataaaaacgcgaaccgcgacaaaaaaaaacatcgaaccgcaaaaaaaataccgataacctaaaacaacgatacgaaaataaaaaaaacgcaaaatattacatcataaaaacgcgaccaccttcgcccctaaaaaacgccaatctcaaaaacgccgcaccgatcacgaataaaaatcaaccaaacctccgtaaacgcgatccccttccaaaaataaccttcgcctaaactcttaaataaatacca

SEQ ID NO: 38931 - DNA, 749 bp, Artificial Sequence
  chemically treated genomic DNA (Homo sapiens) CpG-island No: 38931
ttgggaagtgtagtttttggttcgtatatggttaggaggttttcggagagagagttagtttttcggttgcgttggttaaaggtcggtttgaattggattttgcggatcgttttttagcggttttatttttatattattcgaatgtatagatcgggatattttagttgggtgatttttttcgttgtaatcggtttcgggagcggtgcggcgtgtatcgagcggcgtttttgggtttagcgcgttgtaggcgtttcgggcggattttttatcgaggtaggattggggttggcgttagagtcggtgcggagcggtgttggtttaggcgttggcgatagtgttatggttacggtaggggtcgcgtgcgttttagcggtggcgttttcggattttattggcgttcgggatttaagcggggtcgtcgttgttggattaggacgaattggagaaggagacgcgggtcgttacggtgatttcgggcgtagggtcggcggcggcgggtacgttggtggaagcgcgggtcgcggtaggggaggatatcgggtcgtagagaaagtgtcgatggtttggggtagcggtgcgagggtgggaaaaacgtaggatattgtattatagagacgcggttattttcgtttttggagagcgttagttttaggagcgtcgtatcggttacgggtggaggttagttaggttttcgtaagcgcggtttttttttaggagtagttttcgtttgggtttttgagtagatgtta

SEQ ID NO: 38932 - DNA, 749 bp, Artificial Sequence
  chemically treated genomic DNA (Homo sapiens) CpG-island No: 38932
taacatctactcaaaaacccaaacgaaaactactcctaaaaaaaaaccgcgcttacgaaaacctaactaacctccacccgtaaccgatacgacgctcctaaaactaacgctctccaaaaacgaaaataaccgcgtctctataatacaatatcctacgtttttcccaccctcgcaccgctaccccaaaccatcgacactttctctacgacccgatatcctcccctaccgcgacccgcgcttccaccaacgtacccgccgccgccgaccctacgcccgaaatcaccgtaacgacccgcgtctccttctccaattcgtcctaatccaacaacgacgaccccgcttaaatcccgaacgccaataaaatccgaaaacgccaccgctaaaacgcacgcgacccctaccgtaaccataacactatcgccaacgcctaaaccaacaccgctccgcaccgactctaacgccaaccccaatcctacctcgataaaaaatccgcccgaaacgcctacaacgcgctaaacccaaaaacgccgctcgatacacgccgcaccgctcccgaaaccgattacaacgaaaaaaatcacccaactaaaatatcccgatctatacattcgaataatataaaaataaaaccgctaaaaaacgatccgcaaaatccaattcaaaccgacctttaaccaacgcaaccgaaaaactaactctctctccgaaaacctcctaaccatatacgaaccaaaaactacacttcccaa

SEQ ID NO: 38933 - DNA, 774 bp, Artificial Sequence
  chemically treated genomic DNA (Homo sapiens) CpG-island No: 38933
cgggtcgttttaaaggggtcgggagttggataatttggggtttcgttttaaagggacggtcgtttcgttttcgtcgtcgcggtttcgtcgagttcgtagggggggttttcgggtttgtcgtttcgggggcggcgtcggtttttcgggtcgtggttttggggtaagttcggggttagtagattcggttttaaaggagaagtcgtggttttttcgttattgtgtagtcgttagcgtcgcgtttgcgatttcgggtttgcggataggtcgtttcgggtttcgtcgttttcggatgcggcgttgagggcggtcgttatggagacggtagcggtcgcggtttcgggttcgggttgggtagtagaaggggagcgtcgacggcggcgttgttcgcgtcgagatcgagatcgggagtagcggcgtcgtcgaggtttaggcggcgacgcgtttcgggttttgttggtcgtttcgcgcggtttttcgttttcgtcgtcgtcgtcgtcgttcgttaggttttggtcgttagtttcgtttggagagcggtttgggggttcgagacgtcggcggtttcgttcgagatttcgattttcgcgatttcgagttcggaagcggtttgtcggttcgggtagtcgcggggaggaagaggaggaggaggaggaggaggggggcgtagacgacggcgaagtcgaggaggagtttgaggaggaggaagaggaggaggaggatttgatcgatggtttcgttatcgttagtttcgttattttcgaggttttgtaggtg

SEQ ID NO: 38934 - DNA, 774 bp, Artificial Sequence
  chemically treated genomic DNA (Homo sapiens) CpG-island No: 38934
cacctacaaaacctcgaaaataacgaaactaacgataacgaaaccatcgatcaaatcctcctcctcctcttcctcctcctcaaactcctcctcgacttcgccgtcgtctacgcccccctcctcctcctcctcctcctcttcctccccgcgactacccgaaccgacaaaccgcttccgaactcgaaatcgcgaaaatcgaaatctcgaacgaaaccgccgacgtctcgaacccccaaaccgctctccaaacgaaactaacgaccaaaacctaacgaacgacgacgacgacgacgaaaacgaaaaaccgcgcgaaacgaccaacaaaacccgaaacgcgtcgccgcctaaacctcgacgacgccgctactcccgatctcgatctcgacgcgaacaacgccgccgtcgacgctccccttctactacccaacccgaacccgaaaccgcgaccgctaccgtctccataacgaccgccctcaacgccgcatccgaaaacgacgaaacccgaaacgacctatccgcaaacccgaaatcgcaaacgcgacgctaacgactacacaataacgaaaaaaccacgacttctcctttaaaaccgaatctactaaccccgaacttaccccaaaaccacgacccgaaaaaccgacgccgcccccgaaacgacaaacccgaaaaccccccctacgaactcgacgaaaccgcgacgacgaaaacgaaacgaccgtccctttaaaacgaaaccccaaattatccaactcccgacccctttaaaacgacccg

SEQ ID NO: 38935 - DNA, 774 bp, Artificial Sequence
  chemically treated genomic DNA (Homo sapiens) CpG-island No: 38935
tatttgtaaggtttcgagggtggcgaagttggcgatggcgaagttatcgattaagttttttttttttttttttttttttttaggttttttttcggtttcgtcgtcgtttgcgttttttttttttttttttttttttttttttttttcgcggttgttcgagtcggtaggtcgttttcgagttcggggtcgcgggggtcgaggtttcggacggggtcgtcggcgtttcgggtttttaggtcgttttttagacgaagttgacgattaaggtttggcgggcggcggcggcgacgacgaggacgaggagtcgcgcggggcggttaatagggttcggggcgcgtcgtcgtttggatttcggcggcgtcgttgttttcggtttcggtttcggcgcgagtagcgtcgtcgtcggcgttttttttttgttgtttagttcggattcggggtcgcggtcgttgtcgtttttatggcgatcgtttttagcgtcgtattcggaggcggcggggttcgaagcggtttgttcgtaggttcggggtcgtaggcgcggcgttggcggttgtatagtgacgagagggttacggttttttttttaaagtcggatttgttggtttcgagtttgttttaaggttacggttcggggagtcggcgtcgttttcggggcgataagttcgagggttttttttgcgggttcggcggggtcgcgacggcgaaaacggggcggtcgtttttttaaggcgaggttttaagttgtttagttttcggtttttttaagacgattcg

SEQ ID NO: 38936 - DNA, 774 bp, Artificial Sequence
  chemically treated genomic DNA (Homo sapiens) CpG-island No: 38936
cgaatcgtcttaaaaaaaccgaaaactaaacaacttaaaacctcgccttaaaaaaacgaccgccccgttttcgccgtcgcgaccccgccgaacccgcaaaaaaaaccctcgaacttatcgccccgaaaacgacgccgactccccgaaccgtaaccttaaaacaaactcgaaaccaacaaatccgactttaaaaaaaaaaccgtaaccctctcgtcactatacaaccgccaacgccgcgcctacgaccccgaacctacgaacaaaccgcttcgaaccccgccgcctccgaatacgacgctaaaaacgatcgccataaaaacgacaacgaccgcgaccccgaatccgaactaaacaacaaaaaaaaaacgccgacgacgacgctactcgcgccgaaaccgaaaccgaaaacaacgacgccgccgaaatccaaacgacgacgcgccccgaaccctattaaccgccccgcgcgactcctcgtcctcgtcgtcgccgccgccgcccgccaaaccttaatcgtcaacttcgtctaaaaaacgacctaaaaacccgaaacgccgacgaccccgtccgaaacctcgacccccgcgaccccgaactcgaaaacgacctaccgactcgaacaaccgcgaaaaaaaaaaaaaaaaaaaaaaaaaaaaaaaaaacgcaaacgacgacgaaaccgaaaaaaaacctaaaaaaaaaaaaaaaaaaaaaaaaaacttaatcgataacttcgccatcgccaacttcgccaccctcgaaaccttacaaata

SEQ ID NO: 38937 - DNA, 708 bp, Artificial Sequence
  chemically treated genomic DNA (Homo sapiens) CpG-island No: 38937
atacgaataggttttcgtttatgtgcgtgcggacgtgggtaataaggttggagttttggttgaagtttttgtcgtattcggggtatttgtagggtttttcgtcggtgtgcgtgcggcggtgttggataaggtgggagttgcggatgaagtttttgtcgtagtcggaatatttgtagggttttttatcggtgtggatgcgttggtggcggataagggtggagtttatgatgaagtttttgtcgtagtcggcgtagatgtagggtcgttcgtcgcggtggatgcgttggtggttgatgaggttggagttgacgttgaagtttttgtcgtattttgggtatttgtagggtcgttcgttcgtgtgcgtgcgttggtgtcgtagtaacgtggcgtttagggtgaaggttttgtcgtatattgggtatttgaacgggttttcgcgtaggtgagttcgttggtgtttgatgagggtggagttgtggtcgaagtttttgtcgtattttaggtattcgtagggtttttcgtttgtgtgcgtgcgttggtgttgggttagtttcgagttttggatgaagtttttttcgtattcggtgtagcggtatggtttttcgttcgcgtggattttttggtgtttgaggaggttgtggttttggtcgaagcgtttttcgtattcggggtatttgtagggtttttcgtttgtgtgggtggtttggt

SEQ ID NO: 38938 - DNA, 708 bp, Artificial Sequence
  chemically treated genomic DNA (Homo sapiens) CpG-island No: 38938
accaaaccacccacacaaacgaaaaaccctacaaataccccgaatacgaaaaacgcttcgaccaaaaccacaacctcctcaaacaccaaaaaatccacgcgaacgaaaaaccataccgctacaccgaatacgaaaaaaacttcatccaaaactcgaaactaacccaacaccaacgcacgcacacaaacgaaaaaccctacgaatacctaaaatacgacaaaaacttcgaccacaactccaccctcatcaaacaccaacgaactcacctacgcgaaaacccgttcaaatacccaatatacgacaaaaccttcaccctaaacgccacgttactacgacaccaacgcacgcacacgaacgaacgaccctacaaatacccaaaatacgacaaaaacttcaacgtcaactccaacctcatcaaccaccaacgcatccaccgcgacgaacgaccctacatctacgccgactacgacaaaaacttcatcataaactccacccttatccgccaccaacgcatccacaccgataaaaaaccctacaaatattccgactacgacaaaaacttcatccgcaactcccaccttatccaacaccgccgcacgcacaccgacgaaaaaccctacaaataccccgaatacgacaaaaacttcaaccaaaactccaaccttattacccacgtccgcacgcacataaacgaaaacctattcgtat

SEQ ID NO: 38939 - DNA, 708 bp, Artificial Sequence
  chemically treated genomic DNA (Homo sapiens) CpG-island No: 38939
attaggttatttatataggcgagaaattttataagtgtttcgagtgcgggaagcgtttcggttagaattataatttttttaagtattagaagatttacgcgggcgagaagttatatcgttgtatcgagtgcgggaagagttttatttagagttcggagttgatttagtattagcgtacgtatataggcgagaagttttacgagtgtttagagtgcggtaagagtttcggttatagttttatttttattaagtattagcggatttatttgcgcgaggattcgtttaagtgtttagtgtgcggtaagatttttattttgagcgttacgttgttgcggtattagcgtacgtatacgggcgagcggttttataagtgtttagagtgcggtaagagttttagcgttagttttaattttattaattattagcgtatttatcgcggcgagcggttttatatttgcgtcgattgcggtaagagttttattatgagttttatttttattcgttattagcgtatttatatcggtgagaagttttataagtgtttcgattgcggtaagagttttattcgtagtttttattttatttagtatcgtcgtacgtatatcggcgagaagttttataagtgtttcgagtgcggtaagagttttagttagagttttaattttattatttacgttcgtacgtatatggacgagaatttgttcgtgt

SEQ ID NO: 38940 - DNA, 708 bp, Artificial Sequence
  chemically treated genomic DNA (Homo sapiens) CpG-island No: 38940
acacgaacaaattctcgtccatatacgtacgaacgtaaataataaaattaaaactctaactaaaactcttaccgcactcgaaacacttataaaacttctcgccgatatacgtacgacgatactaaataaaataaaaactacgaataaaactcttaccgcaatcgaaacacttataaaacttctcaccgatataaatacgctaataacgaataaaaataaaactcataataaaactcttaccgcaatcgacgcaaatataaaaccgctcgccgcgataaatacgctaataattaataaaattaaaactaacgctaaaactcttaccgcactctaaacacttataaaaccgctcgcccgtatacgtacgctaataccgcaacaacgtaacgctcaaaataaaaatcttaccgcacactaaacacttaaacgaatcctcgcgcaaataaatccgctaatacttaataaaaataaaactataaccgaaactcttaccgcactctaaacactcgtaaaacttctcgcctatatacgtacgctaatactaaatcaactccgaactctaaataaaactcttcccgcactcgatacaacgatataacttctcgcccgcgtaaatcttctaatacttaaaaaaattataattctaaccgaaacgcttcccgcactcgaaacacttataaaatttctcgcctatataaataacctaat

SEQ ID NO: 38941 - DNA, 586 bp, Artificial Sequence
  chemically treated genomic DNA (Homo sapiens) CpG-island No: 38941
  unsure (283)
cggtttcggcgtcgttgggcggttcgtttttttcgtcgcgcgcgtcgttgcgcgttttttttcgtcggtcgtcgtttttcgttcgttcgtttcgggtcggttttcgtcgcgcgggcgcgttcgggtgtcgcgtttcgcgttttcgcgcgtcgtttcggtcggttcggtgcggcggcgcggtcgtttcgcgtttggggtcgttgtttttgttcgcggcgcgggtcggggggttgcggtttcggggggcggtcggtggggcggcgcgggttcggggggcgggggngtgcggcggtttcgttgtttggtttcgtgcggtttgtgggttcgcgcggtcgcggttcgggtcggcggcgtcgggttcgttcgttgcgcggcgttggtcggttttttttcgtgggtttcgcggcgcggttttgtcgcgttcgtcgcgttgttgcgttcgggcgcgcgtttcgttttcggcggcgcgggggtcggtgcgattgttcgtttcgttttttttttttagtcgcgtcgcgttttcgtcgcgcgggcggtgggtcgattgcggcggcgggttcgggcgtgttcgtgtcgttttggtcgt

SEQ ID NO: 38942 - DNA, 586 bp, Artificial Sequence
  chemically treated genomic DNA (Homo sapiens) CpG-island No: 38942
  unsure (304)
acgaccaaaacgacacgaacacgcccgaacccgccgccgcaatcgacccaccgcccgcgcgacgaaaacgcgacgcgactaaaaaaaaaaaacgaaacgaacaatcgcaccgacccccgcgccgccgaaaacgaaacgcgcgcccgaacgcaacaacgcgacgaacgcgacaaaaccgcgccgcgaaacccacgaaaaaaaaccgaccaacgccgcgcaacgaacgaacccgacgccgccgacccgaaccgcgaccgcgcgaacccacaaaccgcacgaaaccaaacaacgaaaccgccgcacncccccgccccccgaacccgcgccgccccaccgaccgccccccgaaaccgcaaccccccgacccgcgccgcgaacaaaaacaacgaccccaaacgcgaaacgaccgcgccgccgcaccgaaccgaccgaaacgacgcgcgaaaacgcgaaacgcgacacccgaacgcgcccgcgcgacgaaaaccgacccgaaacgaacgaacgaaaaacgacgaccgacgaaaaaaaacgcgcaacgacgcgcgcgacgaaaaaaacgaaccgcccaacgacgccgaaaccg

SEQ ID NO: 38943 - DNA, 586 bp, Artificial Sequence
  chemically treated genomic DNA (Homo sapiens) CpG-island No: 38943
  unsure (304)
acgattaggacggtacgaatacgttcgggttcgtcgtcgtagtcggtttatcgttcgcgcgacggaggcgcggcgcgattgggggaggggagcgggacgaatagtcgtatcgattttcgcgtcgtcggaggcggggcgcgcgttcgggcgtaatagcgcggcgggcgcggtaaagtcgcgtcgcggaatttacgggggggggtcgattagcgtcgcgtagcgaacggattcggcgtcgtcggttcgggtcgcgatcgcgcgaatttataggtcgtacgaggttaggtagcggggtcgtcgtatnttttcgtttttcgggttcgcgtcgttttatcggtcgtttttcgggatcgtagtttttcggttcgcgtcgcgggtaggagtagcggttttaggcgcggggcggtcgcgtcgtcgtatcgggtcgatcggggcggcgcgcgggagcgcggggcgcggtattcgggcgcgttcgcgcggcgggggtcggttcggggcgggcgggcggggggcggcggtcggcgggggggggcgcgtagcggcgcgcgcgacggggggggcgggtcgtttagcggcgtcggggtcg

SEQ ID NO: 38944 - DNA, 586 bp, Artificial Sequence
  chemically treated genomic DNA (Homo sapiens) CpG-island No: 38944
  unsure (283)
cgaccccgacgccgctaaacgacccgccccccccgtcgcgcgcgccgctacgcgcccccccccgccgaccgccgccccccgcccgcccgccccgaaccgacccccgccgcgcgaacgcgcccgaataccgcgccccgcgctcccgcgcgccgccccgatcgacccgatacgacgacgcgaccgccccgcgcctaaaaccgctactcctacccgcgacgcgaaccgaaaaactacgatcccgaaaaacgaccgataaaacgacgcgaacccgaaaaacgaaaanatacgacgaccccgctacctaacctcgtacgacctataaattcgcgcgatcgcgacccgaaccgacgacgccgaatccgttcgctacgcgacgctaatcgacccccccccgtaaattccgcgacgcgactttaccgcgcccgccgcgctattacgcccgaacgcgcgccccgcctccgacgacgcgaaaatcgatacgactattcgtcccgctcccctcccccaatcgcgccgcgcctccgtcgcgcgaacgataaaccgactacgacgacgaacccgaacgtattcgtaccgtcctaatcgt

SEQ ID NO: 38945 - DNA, 616 bp, Artificial Sequence
  chemically treated genomic DNA (Homo sapiens) CpG-island No: 38945
gtcggttaagtcgaatatcggttatacgtaagcggcggcgggtgtggttggtgtgattaagatggtgatggcgatgcggtacgggtagttgttacgtacgttgtacgtggaatcgtcgtcgtcggaggtggattggtcggcggggacggtttaattttttacggagaatacgttttggtttaggagtggtcgtgttcgtcgggtgggggtgtcgtcgttcgggattagtggtattaacgcgtacgttattttcgaatagttttcgggagtgtcgagttagtttgcggggtcgggttcgggttttgtcgtggatgtttcggtggtgtcgtggatggtgtcgggtaaaatattcgaagcgttattcgcgtaggtaacggcgttgatgatttatttggacgagcgatttgatgttttttcgttggatgttgggtattcgttggcgttgatacggtcggcgttggatgagcgagcggttgtgttggggtcggatcgtgaaacgttgttgtgcggtgtgaaagcgttgtttggcggttatgaggtttttgggtttgttatcggattttttgggtttgtggggcgtatcgggtttgtatttttcgggtaaggtggttaatgg

SEQ ID NO: 38946 - DNA, 616 bp, Artificial Sequence
  chemically treated genomic DNA (Homo sapiens) CpG-island No: 38946
ccattaaccaccttacccgaaaaatacaaacccgatacgccccacaaacccaaaaaatccgataacaaacccaaaaacctcataaccgccaaacaacgctttcacaccgcacaacaacgtttcacgatccgaccccaacacaaccgctcgctcatccaacgccgaccgtatcaacgccaacgaatacccaacatccaacgaaaaaacatcaaatcgctcgtccaaataaatcatcaacgccgttacctacgcgaataacgcttcgaatattttacccgacaccatccacgacaccaccgaaacatccacgacaaaacccgaacccgaccccgcaaactaactcgacactcccgaaaactattcgaaaataacgtacgcgttaataccactaatcccgaacgacgacacccccacccgacgaacacgaccactcctaaaccaaaacgtattctccgtaaaaaattaaaccgtccccgccgaccaatccacctccgacgacgacgattccacgtacaacgtacgtaacaactacccgtaccgcatcgccatcaccatcttaatcacaccaaccacacccgccgccgcttacgtataaccgatattcgacttaaccgac

SEQ ID NO: 38947 - DNA, 616 bp, Artificial Sequence
  chemically treated genomic DNA (Homo sapiens) CpG-island No: 38947
ttattgattattttgttcggaaaatataaattcgatgcgttttataggtttaagagattcggtaataaatttagaagttttatgatcgttagatagcgtttttatatcgtataataacgttttacggttcgattttagtataatcgttcgtttatttagcgtcgatcgtgttaacgttagcgagtatttaatatttagcgaggagatattaggtcgttcgtttagataggttattaacgtcgttgtttgcgcggatagcgtttcgggtgttttgttcgatattatttacggtattatcggaatatttacgatagaattcgaattcggtttcgtagattgattcggtattttcgggggttgttcgaggatgacgtgcgcgttagtattattgatttcgaacgacgatatttttattcgacgaatacgattatttttgggttagggcgtgtttttcgtaaggagttgaatcgttttcgtcgattaatttattttcggcgacggcgattttacgtgtaacgtgcgtggtagttgttcgtgtcgtatcgttattattattttgattatattagttatattcgtcgtcgtttgcgtatgatcgatgttcgatttgatcgat

SEQ ID NO: 38948 - DNA, 616 bp, Artificial Sequence
  chemically treated genomic DNA (Homo sapiens) CpG-island No: 38948
atcgatcaaatcgaacatcgatcatacgcaaacgacgacgaatataactaatataatcaaaataataataacgatacgacacgaacaactaccacgcacgttacacgtaaaatcgccgtcgccgaaaataaattaatcgacgaaaacgattcaactccttacgaaaaacacgccctaacccaaaaataatcgtattcgtcgaataaaaatatcgtcgttcgaaatcaataatactaacgcgcacgtcatcctcgaacaacccccgaaaataccgaatcaatctacgaaaccgaattcgaattctatcgtaaatattccgataataccgtaaataatatcgaacaaaacacccgaaacgctatccgcgcaaacaacgacgttaataacctatctaaacgaacgacctaatatctcctcgctaaatattaaatactcgctaacgttaacacgatcgacgctaaataaacgaacgattatactaaaatcgaaccgtaaaacgttattatacgatataaaaacgctatctaacgatcataaaacttctaaatttattaccgaatctcttaaacctataaaacgcatcgaatttatattttccgaacaaaataatcaataa

SEQ ID NO: 38949 - DNA, 589 bp, Artificial Sequence
  chemically treated genomic DNA (Homo sapiens) CpG-island No: 38949
ggatcggaggcggggttatgaatagatcggattgggttaaaaggaataaggcgaggattgggcggggttagagggaaataggggcggggttaggcgtcgggagtttttatatgcgtttcgagttcgttagaagttgttaggttgaggttgttgtttcggcgggagttgtggcgcggagcggtttttttgttgcgtttgttttcgttttgttttacgatttatatttagtgttttattttttaagagttcgcgtttttcgcgcggcggtcgagaggcggttgttcgcggtttcgcgcgggcgcggggcgatggcggcgcgggggttagggtttcgcgcgtttcgtttgttgtttttggtttagttggtcgcggggcgttgcggtttagcgggcgcggcgggcggcgcgtagagaggtaagttcgggttgtagaggggcggggcgggagttggttcggattttatatcgcggtgtttaggaagtcgttaggcgacggtcgtcggaaaatttggttgcgaggggaggtgggttttttttttttgggggtttggagtgaggttttagtttaaatgtttagatttgtttattta

SEQ ID NO: 38950 - DNA, 589 bp, Artificial Sequence
  chemically treated genomic DNA (Homo sapiens) CpG-island No: 38950
taaataaacaaatctaaacatttaaactaaaacctcactccaaacccccaaaaaaaaaaaacccacctcccctcgcaaccaaattttccgacgaccgtcgcctaacgacttcctaaacaccgcgatataaaatccgaaccaactcccgccccgcccctctacaacccgaacttacctctctacgcgccgcccgccgcgcccgctaaaccgcaacgccccgcgaccaactaaaccaaaaacaacaaacgaaacgcgcgaaaccctaacccccgcgccgccatcgccccgcgcccgcgcgaaaccgcgaacaaccgcctctcgaccgccgcgcgaaaaacgcgaactcttaaaaaataaaacactaaatataaatcgtaaaacaaaacgaaaacaaacgcaacaaaaaaaccgctccgcgccacaactcccgccgaaacaacaacctcaacctaacaacttctaacgaactcgaaacgcatataaaaactcccgacgcctaaccccgcccctatttccctctaaccccgcccaatcctcgccttattccttttaacccaatccgatctattcataaccccgcctccgatcc

SEQ ID NO: 38951 - DNA, 589 bp, Artificial Sequence
  chemically treated genomic DNA (Homo sapiens) CpG-island No: 38951
taaatgagtaaatttggatatttaaattgaaattttattttaagtttttaggagaaaaaaatttattttttttcgtaattaggtttttcggcggtcgtcgtttggcggttttttgggtatcgcgatgtggagttcgggttagttttcgtttcgtttttttgtagttcgggtttatttttttgcgcgtcgttcgtcgcgttcgttagatcgtagcgtttcgcgattagttggattaagagtagtaggcggagcgcgcggggttttgattttcgcgtcgttatcgtttcgcgttcgcgcgggatcgcgggtagtcgtttttcgatcgtcgcgcggggaacgcgaatttttggggaatggagtattgagtgtgagtcgtgagataaaacgagggtagacgtagtagaggggtcgtttcgcgttatagttttcgtcgggatagtagttttagtttagtagtttttggcgggttcgggacgtatgtggaagttttcggcgtttagtttcgtttttatttttttttggtttcgtttaattttcgttttgttttttttggtttagttcggtttatttatagtttcgttttcgattt

SEQ ID NO: 38952 - DNA, 589 bp, Artificial Sequence
  chemically treated genomic DNA (Homo sapiens) CpG-island No: 38952
aaatcgaaaacgaaactataaataaaccgaactaaaccaaaaaaaacaaaacgaaaattaaacgaaaccaaaaaaaaataaaaacgaaactaaacgccgaaaacttccacatacgtcccgaacccgccaaaaactactaaactaaaactactatcccgacgaaaactataacgcgaaacgacccctctactacgtctaccctcgttttatctcacgactcacactcaatactccattccccaaaaattcgcgttccccgcgcgacgatcgaaaaacgactacccgcgatcccgcgcgaacgcgaaacgataacgacgcgaaaatcaaaaccccgcgcgctccgcctactactcttaatccaactaatcgcgaaacgctacgatctaacgaacgcgacgaacgacgcgcaaaaaaataaacccgaactacaaaaaaacgaaacgaaaactaacccgaactccacatcgcgatacccaaaaaaccgccaaacgacgaccgccgaaaaacctaattacgaaaaaaaataaatttttttctcctaaaaacttaaaataaaatttcaatttaaatatccaaatttactcattta

SEQ ID NO: 38953 - DNA, 695 bp, Artificial Sequence
  chemically treated genomic DNA (Homo sapiens) CpG-island No: 38953
acgcggtcgcggatttcgaatagggatagttggagacgggtttgggtagcgcgcggtttgtattcgcggttatttattttgtagttcggttcggttaggttatttcgggtaagggttgggggaattcgttgtttttagcgtcgttacggtcgggcgatattttgcgttttgggaagggggataggggtgcggcgcggtttcggttttcggttcgttcggattttcggttttattttgacgtggaagcggatgagcgttaggcggatgtagtgggttatgtagacgggcggtaggaattagatttttggcggcggggtgtttttgttttggatatggttgacgatttgttgtgtcgtttggcgttcgttgttttgtcgtttgatttattcgtgtagtcgggttttttcgagcgcgtcgttgaagaagacgaagagttcgatgttgtcgtcgaagtaggttttggttagcgtcgttaggtagttaagtatgtggttttattggtcgtcgttgatttagtcggtgtagaagtcgtcgtagaggcggtgtaggtagttgtcggcgtttattagtaggcgtagcggggtttgcgggggtcgttgtcgttcgtcgtttattaggttgtttcgggttagtttttgtagttttatcggtattacggcgttcgggtagtgtttttcgatgtagttttggaagtt

SEQ ID NO: 38954 - DNA, 695 bp, Artificial Sequence
  chemically treated genomic DNA (Homo sapiens) CpG-island No: 38954
aacttccaaaactacatcgaaaaacactacccgaacgccgtaataccgataaaactacaaaaactaacccgaaacaacctaataaacgacgaacgacaacgacccccgcaaaccccgctacgcctactaataaacgccgacaactacctacaccgcctctacgacgacttctacaccgactaaatcaacgacgaccaataaaaccacatacttaactacctaacgacgctaaccaaaacctacttcgacgacaacatcgaactcttcgtcttcttcaacgacgcgctcgaaaaaacccgactacacgaataaatcaaacgacaaaacaacgaacgccaaacgacacaacaaatcgtcaaccatatccaaaacaaaaacaccccgccgccaaaaatctaattcctaccgcccgtctacataacccactacatccgcctaacgctcatccgcttccacgtcaaaataaaaccgaaaatccgaacgaaccgaaaaccgaaaccgcgccgcacccctatcccccttcccaaaacgcaaaatatcgcccgaccgtaacgacgctaaaaacaacgaattcccccaacccttacccgaaataacctaaccgaaccgaactacaaaataaataaccgcgaatacaaaccgcgcgctacccaaacccgtctccaactatccctattcgaaatccgcgaccgcgt

SEQ ID NO: 38955 - DNA, 695 bp, Artificial Sequence
  chemically treated genomic DNA (Homo sapiens) CpG-island No: 38955
ggtttttaggattatatcgagaagtattgttcgagcgtcgtggtgtcggtggagttgtagaagttggttcggggtagtttggtgggcggcgggcggtagcggttttcgtagatttcgttgcgtttgttggtggacgtcgataattgtttgtatcgtttttacggcggtttttatatcgattgggttagcggcggttagtggaattatatgtttggttatttggcggcgttggttaaggtttgtttcggcggtaatatcgagtttttcgttttttttaacggcgcgttcgagaaggttcggttgtacgagtgggttaagcggtagggtaacgagcgttagacggtatagtagatcgttagttatgtttagaataagggtatttcgtcgttaaaggtttggtttttgtcgttcgtttgtatggtttattgtattcgtttggcgtttattcgtttttacgttaaggtgaggtcggggattcgggcgggtcggggatcggggtcgcgtcgtatttttatttttttttttagggcgtagaatgtcgttcggtcgtggcggcgttgggggtagcgagtttttttagtttttgttcgggatagtttggtcgggtcgggttgtaagatggatggtcgcgggtgtaggtcgcgcgttgtttaagttcgtttttagttgtttttgttcggggttcgcggtcgcgt

SEQ ID NO: 38956 - DNA, 695 bp, Artificial Sequence
  chemically treated genomic DNA (Homo sapiens) CpG-island No: 38956
acgcgaccgcgaaccccgaacaaaaacaactaaaaacgaacttaaacaacgcgcgacctacacccgcgaccatccatcttacaacccgacccgaccaaactatcccgaacaaaaactaaaaaaactcgctacccccaacgccgccacgaccgaacgacattctacgccctaaaaaaaaaaataaaaatacgacgcgaccccgatccccgacccgcccgaatccccgacctcaccttaacgtaaaaacgaataaacgccaaacgaatacaataaaccatacaaacgaacgacaaaaaccaaacctttaacgacgaaatacccttattctaaacataactaacgatctactataccgtctaacgctcgttaccctaccgcttaacccactcgtacaaccgaaccttctcgaacgcgccgttaaaaaaaacgaaaaactcgatattaccgccgaaacaaaccttaaccaacgccgccaaataaccaaacatataattccactaaccgccgctaacccaatcgatataaaaaccgccgtaaaaacgatacaaacaattatcgacgtccaccaacaaacgcaacgaaatctacgaaaaccgctaccgcccgccgcccaccaaactaccccgaaccaacttctacaactccaccgacaccacgacgctcgaacaatacttctcgatataatcctaaaaacc

SEQ ID NO: 38957 - DNA, 577 bp, Artificial Sequence
  chemically treated genomic DNA (Homo sapiens) CpG-island No: 38957
gtgtcgaggacgttcgaggatggtaaattattttttcgcgaaattatagtttcgttttcgagttaggtgtcggtaaagggtaataacgaaggaggtttaattttcgcgcgttttttagggtttcgggtttttcgtttttgtgttcgacgacggtatttttatcgcgatttttttttaggaattttttttaaaggcgattaagttataggaattttttttaacggcgattaagttataagagttttttacgcgaggtttgtacgtcgtgtttttttttttttttattcgtcggggcgtttcgttagggttacgcgtttttcgtttattatgatggttgggttttaatttatcgcggtagataggggtcgttggcgcgggggtttcgagtgggcgaagcggggagcgggttgtaggtcgagtagggttaagcggcggtagtggcggcgggtaggatagcgtttacgtaggagaggtatatcgcgttaggtgagataaagttaggcgtggatagtataggtgaggtgaggttaagtaacgtaagttttagtgttcgtgaggtagttggtttgcgtaggcg

SEQ ID NO: 38958 - DNA, 577 bp, Artificial Sequence
  chemically treated genomic DNA (Homo sapiens) CpG-island No: 38958
cgcctacgcaaaccaactacctcacgaacactaaaacttacgttacttaacctcacctcacctatactatccacgcctaactttatctcacctaacgcgatatacctctcctacgtaaacgctatcctacccgccgccactaccgccgcttaaccctactcgacctacaacccgctccccgcttcgcccactcgaaacccccgcgccaacgacccctatctaccgcgataaattaaaacccaaccatcataataaacgaaaaacgcgtaaccctaacgaaacgccccgacgaataaaaaaaaaaaaaaacacgacgtacaaacctcgcgtaaaaaactcttataacttaatcgccgttaaaaaaaattcctataacttaatcgcctttaaaaaaaattcctaaaaaaaaatcgcgataaaaataccgtcgtcgaacacaaaaacgaaaaacccgaaaccctaaaaaacgcgcgaaaattaaacctccttcgttattaccctttaccgacacctaactcgaaaacgaaactataatttcgcgaaaaaataatttaccatcctcgaacgtcctcgacac

SEQ ID NO: 38959 - DNA, 577 bp, Artificial Sequence
  chemically treated genomic DNA (Homo sapiens) CpG-island No: 38959
cgtttgcgtaaattagttgttttacgagtattggagtttgcgttatttggttttattttatttgtgttgtttacgtttggttttgttttatttgacgcgatatgttttttttgcgtgggcgttgttttgttcgtcgttattatcgtcgtttggttttgttcggtttgtagttcgtttttcgtttcgtttattcggggttttcgcgttagcggtttttgtttgtcgcggtgagttgaggtttagttattatggtgggcgggaagcgcgtggttttggcggggcgtttcgacgggtggggagaagggaggatacggcgtgtaggtttcgcgtgggaggtttttgtggtttggtcgtcgttgggggaggtttttgtggtttggtcgtttttgggggaggtttttgggagagggtcgcggtgaggatgtcgtcgtcgggtataggggcggaaagttcgggattttgaggaacgcgcggggattgggtttttttcgttgttattttttatcggtatttggttcgggggcggggttgtggtttcgcggaggaatgatttattattttcggacgttttcggtat

SEQ ID NO: 38960 - DNA, 577 bp, Artificial Sequence
  chemically treated genomic DNA (Homo sapiens) CpG-island No: 38960
ataccgaaaacgtccgaaaataataaatcattcctccgcgaaaccacaaccccgcccccgaaccaaataccgataaaaaataacaacgaaaaaaacccaatccccgcgcgttcctcaaaatcccgaactttccgcccctatacccgacgacgacatcctcaccgcgaccctctcccaaaaacctcccccaaaaacgaccaaaccacaaaaacctcccccaacgacgaccaaaccacaaaaacctcccacgcgaaacctacacgccgtatcctcccttctccccacccgtcgaaacgccccgccaaaaccacgcgcttcccgcccaccataataactaaacctcaactcaccgcgacaaacaaaaaccgctaacgcgaaaaccccgaataaacgaaacgaaaaacgaactacaaaccgaacaaaaccaaacgacgataataacgacgaacaaaacaacgcccacgcaaaaaaaacatatcgcgtcaaataaaacaaaaccaaacgtaaacaacacaaataaaataaaaccaaataacgcaaactccaatactcgtaaaacaactaatttacgcaaacg

SEQ ID NO: 38961 - DNA, 1091 bp, Artificial Sequence
  chemically treated genomic DNA (Homo sapiens) CpG-island No: 38961
agggcgcggtgggaggggaaattgaggttcggttaggtattttcgtcgcgtttagttcgtcgagaggtttaggtttcgggaggtatttggagtttgcgtttcgttcgcgtcgttttttgtttcgcgcgttgcgtttacgtgattcgggtttgggaggagtcggggcgggcgggggttatttgaataagggagttacgtgagcggggggcgggggtgggggggcggtgtcgggcggttgttacgtgacgcggtttcggggtcgtcgttgtcgttgtcgttgtcgtcgagtttagtcgagtcgcgtttatttcgggttttcgtttcgtttttattttcgtttttgttttggcggcgcgatttcgtttcgggcgcggtttttagtagtcgcgcgtcgttcgtttaagcgttcgtcgcgtagttaaaataaagagcgatggggttcgttgtcggtcggagtttttatttggggttcgcgttcgttcgtcgttcgtagcgttttttgtttttgttgtagttgttgttgttcgtcgttgtttcggggtttacgtaggtttaggtcgtttcgtttttcgaattgtgtaggtgggtggttcgttcggacgtaggtttcgttcgcggtgttcggggtgagcggtcggcgtggggggcggggagcgttcgaggagtttttggggtttttaagtcgttttcgtttcgcgtcggggttcgtttcgttttcgagggaaagttgtttgcgtggtgttcgcgagtttcgtcgggtttcgtgcgtaggcggggggcgcgggggtatacgcggtcgtggcggttttggagtttcgcgttcggttatttgtggttgtcgttgagtcgggggtggttttgtgcggagcggtcgtttcggtttttggggtcggcgtttgttttcgcgcggtcgggcgttcgggaaagttggaggtagaaattttagtttgttttgttttcgttgcgcgtttgtattagagtttcgttagcggggtatcggtgaggtttttcggtgtggagaggtttatcggggcgttggagttcgtaggaatggttttggagttgagtgtttgtggttttatttgttgatt

SEQ ID NO: 38962 - DNA, 1091 bp, Artificial Sequence
  chemically treated genomic DNA (Homo sapiens) CpG-island No: 38962
aatcaacaaataaaaccacaaacactcaactccaaaaccattcctacgaactccaacgccccgataaacctctccacaccgaaaaacctcaccgataccccgctaacgaaactctaatacaaacgcgcaacgaaaacaaaacaaactaaaatttctacctccaactttcccgaacgcccgaccgcgcgaaaacaaacgccgaccccaaaaaccgaaacgaccgctccgcacaaaaccacccccgactcaacgacaaccacaaataaccgaacgcgaaactccaaaaccgccacgaccgcgtatacccccgcgccccccgcctacgcacgaaacccgacgaaactcgcgaacaccacgcaaacaactttccctcgaaaacgaaacgaaccccgacgcgaaacgaaaacgacttaaaaaccccaaaaactcctcgaacgctccccgccccccacgccgaccgctcaccccgaacaccgcgaacgaaacctacgtccgaacgaaccacccacctacacaattcgaaaaacgaaacgacctaaacctacgtaaaccccgaaacaacgacgaacaacaacaactacaacaaaaacaaaaaacgctacgaacgacgaacgaacgcgaaccccaaataaaaactccgaccgacaacgaaccccatcgctctttattttaactacgcgacgaacgcttaaacgaacgacgcgcgactactaaaaaccgcgcccgaaacgaaatcgcgccgccaaaacaaaaacgaaaataaaaacgaaacgaaaacccgaaataaacgcgactcgactaaactcgacgacaacgacaacgacaacgacgaccccgaaaccgcgtcacgtaacaaccgcccgacaccgcccccccacccccgccccccgctcacgtaactcccttattcaaataacccccgcccgccccgactcctcccaaacccgaatcacgtaaacgcaacgcgcgaaacaaaaaacgacgcgaacgaaacgcaaactccaaatacctcccgaaacctaaacctctcgacgaactaaacgcgacgaaaatacctaaccgaacctcaatttcccctcccaccgcgccct

SEQ ID NO: 38963 - DNA, 1091 bp, Artificial Sequence
  chemically treated genomic DNA (Homo sapiens) CpG-island No: 38963
aattagtaaatgaaattataaatatttaattttaggattatttttgcgggttttaacgtttcggtgagtttttttatatcgaggggttttatcggtgtttcgttggcgaaattttgatgtaaacgcgtagcgggaataaagtaaattggagtttttgtttttaattttttcggacgttcggtcgcgcgagggtaggcgtcgattttaagggtcggggcgatcgtttcgtataaagttattttcgatttagcgatagttataagtggtcggacgcggggttttaggatcgttacgatcgcgtgtgttttcgcgtttttcgtttgcgtacgggattcggcgggattcgcggatattacgtaggtaattttttttcgggaacggggcggatttcggcgcggaacggaggcgatttggagattttaggagtttttcgagcgtttttcgttttttacgtcggtcgtttatttcgggtatcgcgagcggagtttgcgttcgggcgggttatttatttgtatagttcggggaacggggcggtttgggtttgcgtggatttcggggtagcgacgagtagtagtagttgtagtaggagtagagagcgttgcgggcggcgggcgggcgcgggttttaggtgggggtttcggtcggtagcggattttatcgttttttgttttgattgcgcggcgggcgtttaggcgaacggcgcgcgattgttgggggtcgcgttcgggacggggtcgcgtcgttagggtaaaggcggaggtggagacggagcgggagttcgaggtgagcgcggttcgattgggttcggcgatagcgatagcggtagcggcggtttcggaatcgcgttacgtgatagtcgttcggtatcgtttttttattttcgtttttcgtttacgtgatttttttgtttaggtgattttcgttcgtttcggttttttttaggttcgggttacgtgagcgtagcgcgcgggataggaagcggcgcgggcggggcgtaggttttaggtgtttttcggggtttgagtttttcggcgggttgggcgcggcgggggtgtttagtcgggttttagtttttttttttatcgcgtttt

SEQ ID NO: 38964 - DNA, 1091 bp, Artificial Sequence
  chemically treated genomic DNA (Homo sapiens) CpG-island No: 38964
aaaacgcgataaaaaaaaaaactaaaacccgactaaacacccccgccgcgcccaacccgccgaaaaactcaaaccccgaaaaacacctaaaacctacgccccgcccgcgccgcttcctatcccgcgcgctacgctcacgtaacccgaacctaaaaaaaaccgaaacgaacgaaaatcacctaaacaaaaaaatcacgtaaacgaaaaacgaaaataaaaaaacgataccgaacgactatcacgtaacgcgattccgaaaccgccgctaccgctatcgctatcgccgaacccaatcgaaccgcgctcacctcgaactcccgctccgtctccacctccgcctttaccctaacgacgcgaccccgtcccgaacgcgacccccaacaatcgcgcgccgttcgcctaaacgcccgccgcgcaatcaaaacaaaaaacgataaaatccgctaccgaccgaaacccccacctaaaacccgcgcccgcccgccgcccgcaacgctctctactcctactacaactactactactcgtcgctaccccgaaatccacgcaaacccaaaccgccccgttccccgaactatacaaataaataacccgcccgaacgcaaactccgctcgcgatacccgaaataaacgaccgacgtaaaaaacgaaaaacgctcgaaaaactcctaaaatctccaaatcgcctccgttccgcgccgaaatccgccccgttcccgaaaaaaaattacctacgtaatatccgcgaatcccgccgaatcccgtacgcaaacgaaaaacgcgaaaacacacgcgatcgtaacgatcctaaaaccccgcgtccgaccacttataactatcgctaaatcgaaaataactttatacgaaacgatcgccccgacccttaaaatcgacgcctaccctcgcgcgaccgaacgtccgaaaaaattaaaaacaaaaactccaatttactttattcccgctacgcgtttacatcaaaatttcgccaacgaaacaccgataaaacccctcgatataaaaaaactcaccgaaacgttaaaacccgcaaaaataatcctaaaattaaatatttataatttcatttactaatt

SEQ ID NO: 38965 - DNA, 1401 bp, Artificial Sequence
  chemically treated genomic DNA (Homo sapiens) CpG-island No: 38965
ttttcgttcgagttattttcgaagtagtcgatttttggggagaagcgttgcggaaaggggcgatttcgatgtagatggttttgtttcggcgttttaggtcgtcgcgcgcgtagttgcggtagttattgcgttttttcgtttttatttttggatgttttttttttttttttcggttagattttgagtaggagtttcgtttttagcgcgtcgttttagtttcggcgttttaaaagtcgggcgtatcgtttcgtcgcgttttgtttgtcgtatttttttttttttttgtagttcgcgttgaagtcgtacgttcggtttcgatttcggtattatgagtttcggttcggagtattatttgtgttttttttttttttatcgtaaggtgttcggggatggttttcgtttgttcgttcgtttttttggggtcggcggcgcgggcggttttcgttcgtagtcgttgtttcgtagtaatgtggttttttcggtcgtttgtttttcggtttcgtcgttcggtttcggtttggtttatcgtcggtcgtcggcgttcgacgggttggatttgagttaggcggcggcgcgtattaacgagtataagattattcgtattaacgagaaggagtagttgtagggttttaacgatcgtttcgtcgtgtttatcgagaaggtgtattagttggagacgtagaatcgcgcgttggaggtcgagttggtcgcgttgcgatagcgttacgttgagtcgtcgcgcgtcggcgagtttttttagcgcgagttgcgcgatttgcgcgcgtagttggaggaggttagttcggttcgttcgtaggttttgttggagcgcgacgggttggcggaggaggtgtagcggttgcgggcgcgttgcgaggaggagagtcgcggacgcgaaggcgtcgagcgcgttttgaaggcgtagtagcgcgacgtggacggcgttacgttggttcgtttggatttggagaagaaggtggagtcgttgttggacgagttggttttcgtacgttaggtgtacgacgaggaggtagtcgagttgttggttacgttgtaggcgtcgtcgtaggtcgcggtcgaggtggacgtgattgtggttaaattagatttgatttcggttttgagggagattcgcgtttagtatgagtttttggtcgttaagaatttgtagttcgcggaagaatggtataagtttaagtttgttaatttgaacgagtaggcggcgcgtagtatcgaggttattcgggttagtcgcgaggagatttacgagtatcggcgttagttgtaggcgcgtattatcgagatcgagggtttgcgcggggttaacgagtttttggagaggtagattttggagttggaggagcggtatagtgtcgaggtagttggttattaggtaagggt

SEQ ID NO: 38966 - DNA, 1401 bp, Artificial Sequence
  chemically treated genomic DNA (Homo sapiens) CpG-island No: 38966
acccttacctaataaccaactacctcgacactataccgctcctccaactccaaaatctacctctccaaaaactcgttaaccccgcgcaaaccctcgatctcgataatacgcgcctacaactaacgccgatactcgtaaatctcctcgcgactaacccgaataacctcgatactacgcgccgcctactcgttcaaattaacaaacttaaacttataccattcttccgcgaactacaaattcttaacgaccaaaaactcatactaaacgcgaatctccctcaaaaccgaaatcaaatctaatttaaccacaatcacgtccacctcgaccgcgacctacgacgacgcctacaacgtaaccaacaactcgactacctcctcgtcgtacacctaacgtacgaaaaccaactcgtccaacaacgactccaccttcttctccaaatccaaacgaaccaacgtaacgccgtccacgtcgcgctactacgccttcaaaacgcgctcgacgccttcgcgtccgcgactctcctcctcgcaacgcgcccgcaaccgctacacctcctccgccaacccgtcgcgctccaacaaaacctacgaacgaaccgaactaacctcctccaactacgcgcgcaaatcgcgcaactcgcgctaaaaaaactcgccgacgcgcgacgactcaacgtaacgctatcgcaacgcgaccaactcgacctccaacgcgcgattctacgtctccaactaatacaccttctcgataaacacgacgaaacgatcgttaaaaccctacaactactccttctcgttaatacgaataatcttatactcgttaatacgcgccgccgcctaactcaaatccaacccgtcgaacgccgacgaccgacgataaaccaaaccgaaaccgaacgacgaaaccgaaaaacaaacgaccgaaaaaaccacattactacgaaacaacgactacgaacgaaaaccgcccgcgccgccgaccccaaaaaaacgaacgaacaaacgaaaaccatccccgaacaccttacgataaaaaaaaaaaaaacacaaataatactccgaaccgaaactcataataccgaaatcgaaaccgaacgtacgacttcaacgcgaactacaaaaaaaaaaaaaaatacgacaaacaaaacgcgacgaaacgatacgcccgacttttaaaacgccgaaactaaaacgacgcgctaaaaacgaaactcctactcaaaatctaaccgaaaaaaaaaaaaaaaacatccaaaaataaaaacgaaaaaacgcaataactaccgcaactacgcgcgcgacgacctaaaacgccgaaacaaaaccatctacatcgaaatcgcccctttccgcaacgcttctccccaaaaatcgactacttcgaaaataactcgaacgaaaa

SEQ ID NO: 38967 - DNA, 1401 bp, Artificial Sequence
  chemically treated genomic DNA (Homo sapiens) CpG-island No: 38967
gtttttatttggtagttagttatttcggtattgtgtcgtttttttagttttaggatttgtttttttaaggattcgttggtttcgcgtaggttttcgatttcgatggtgcgcgtttgtagttggcgtcgatattcgtggattttttcgcggttggttcggatggtttcggtgttgcgcgtcgtttgttcgtttaggttggtaaatttggatttgtattattttttcgcggattgtaggtttttagcggttagggatttatattgggcgcggattttttttagagtcgaggttaggtttggtttagttatagttacgtttatttcggtcgcggtttgcgacgacgtttgtagcgtggttagtagttcggttattttttcgtcgtgtatttggcgtacgaaggttagttcgtttagtagcgattttatttttttttttaggtttaggcgggttagcgtggcgtcgtttacgtcgcgttgttgcgtttttagggcgcgttcggcgttttcgcgttcgcggttttttttttcgtagcgcgttcgtagtcgttgtatttttttcgttagttcgtcgcgttttagtagggtttgcgagcgagtcgagttggttttttttagttgcgcgcgtaggtcgcgtagttcgcgttggaagagttcgtcgacgcgcgacggtttagcgtggcgttgtcgtagcgcggttagttcggtttttaacgcgcggttttgcgtttttagttgatgtattttttcgatgaatacggcgaagcggtcgttgaggttttgtagttgttttttttcgttggtgcggatgattttgtattcgttggtgcgcgtcgtcgtttggtttaggtttagttcgtcggacgtcggcggtcggcgataggttaggtcgaggtcgagcgacgaggtcgaggagtaggcggtcgaggaggttatattgttgcgggatagcgattgcgagcggaagtcgttcgcgtcgtcggttttagagaggcgggcggataggcgagagttattttcgaatattttgcggtaggaggaggaggagtataggtagtgtttcgagtcgaagtttatggtgtcgggatcggggtcggacgtgcggttttaacgcgagttatagaagaaaggagaggtgcggtaggtagggcgcggcggggcggtgcgttcggtttttaaggcgtcggggttggggcggcgcgttgggggcggagtttttgtttagagtttggtcgggagagggaaggggggtatttaggagtgggggcggggaggcgtagtgattatcgtagttgcgcgcgcgacgatttggggcgtcgggatagggttatttgtatcggagtcgttttttttcgtagcgtttttttttaagaatcgattgtttcggaagtgattcgagcggagg

SEQ ID NO: 38968 - DNA, 1401 bp, Artificial Sequence
  chemically treated genomic DNA (Homo sapiens) CpG-island No: 38968
cctccgctcgaatcacttccgaaacaatcgattcttaaaaaaaaacgctacgaaaaaaaacgactccgatacaaataaccctatcccgacgccccaaatcgtcgcgcgcgcaactacgataatcactacgcctccccgcccccactcctaaataccccccttccctctcccgaccaaactctaaacaaaaactccgcccccaacgcgccgccccaaccccgacgccttaaaaaccgaacgcaccgccccgccgcgccctacctaccgcacctctcctttcttctataactcgcgttaaaaccgcacgtccgaccccgatcccgacaccataaacttcgactcgaaacactacctatactcctcctcctcctaccgcaaaatattcgaaaataactctcgcctatccgcccgcctctctaaaaccgacgacgcgaacgacttccgctcgcaatcgctatcccgcaacaatataacctcctcgaccgcctactcctcgacctcgtcgctcgacctcgacctaacctatcgccgaccgccgacgtccgacgaactaaacctaaaccaaacgacgacgcgcaccaacgaatacaaaatcatccgcaccaacgaaaaaaaacaactacaaaacctcaacgaccgcttcgccgtattcatcgaaaaaatacatcaactaaaaacgcaaaaccgcgcgttaaaaaccgaactaaccgcgctacgacaacgccacgctaaaccgtcgcgcgtcgacgaactcttccaacgcgaactacgcgacctacgcgcgcaactaaaaaaaaccaactcgactcgctcgcaaaccctactaaaacgcgacgaactaacgaaaaaaatacaacgactacgaacgcgctacgaaaaaaaaaaccgcgaacgcgaaaacgccgaacgcgccctaaaaacgcaacaacgcgacgtaaacgacgccacgctaacccgcctaaacctaaaaaaaaaaataaaatcgctactaaacgaactaaccttcgtacgccaaatacacgacgaaaaaataaccgaactactaaccacgctacaaacgtcgtcgcaaaccgcgaccgaaataaacgtaactataactaaaccaaacctaacctcgactctaaaaaaaatccgcgcccaatataaatccctaaccgctaaaaacctacaatccgcgaaaaaataatacaaatccaaatttaccaacctaaacgaacaaacgacgcgcaacaccgaaaccatccgaaccaaccgcgaaaaaatccacgaatatcgacgccaactacaaacgcgcaccatcgaaatcgaaaacctacgcgaaaccaacgaatccttaaaaaaacaaatcctaaaactaaaaaaacgacacaataccgaaataactaactaccaaataaaaac

SEQ ID NO: 38969 - DNA, 533 bp, Artificial Sequence
  chemically treated genomic DNA (Homo sapiens) CpG-island No: 38969
tcggaagggcgggatttggagttatagttaatcgtcgtattaggtcgaatcgcgggggtcggttaaacgcgtgcgggggaggtggtttttttcggtcgggtcgagaggtggttatattcgttgaaggatattagttgcggaatttgcggttttggtaggtgggtgaagaggggagttcgggtttggatttggcgtttgtacgttgtaggatcgttcgtcgtttttggtcgaggagtaattcgagtttttagttttggaggagagaaacggtggggaatgggaaaggagttagaaaaaacgaggggcgtaagggggcggttagcgggtgagaagtttcgaggtgaggcggataggtgcgtttaagggtttttatagttttcgaagatttttagattgtattcgttagtggagaaaaatgaggtttttcgcgaagcgtttttcgaggttatttagtgacgtaatattggacgaggattagggtttttgatttttattatcggtcgaattaatttttttttttttgtatgtttata

SEQ ID NO: 38970 - DNA, 533 bp, Artificial Sequence
  chemically treated genomic DNA (Homo sapiens) CpG-island No: 38970
tataaacatacaaaaaaaaaaaaattaattcgaccgataataaaaatcaaaaaccctaatcctcgtccaatattacgtcactaaataacctcgaaaaacgcttcgcgaaaaacctcatttttctccactaacgaatacaatctaaaaatcttcgaaaactataaaaacccttaaacgcacctatccgcctcacctcgaaacttctcacccgctaaccgcccccttacgcccctcgttttttctaactcctttcccattccccaccgtttctctcctccaaaactaaaaactcgaattactcctcgaccaaaaacgacgaacgatcctacaacgtacaaacgccaaatccaaacccgaactcccctcttcacccacctaccaaaaccgcaaattccgcaactaatatccttcaacgaatataaccacctctcgacccgaccgaaaaaaaccacctcccccgcacgcgtttaaccgacccccgcgattcgacctaatacgacgattaactataactccaaatcccgcccttccga

SEQ ID NO: 38971 - DNA, 533 bp, Artificial Sequence
  chemically treated genomic DNA (Homo sapiens) CpG-island No: 38971
tatggatatatagaagaaaagaggttaattcggtcggtgatggggattagaagttttagttttcgtttaatattacgttattgggtgatttcgagggacgtttcgcggagggttttatttttttttattggcgaatgtaatttaagggttttcggaaattgtgggagtttttgggcgtatttattcgttttatttcgaggttttttattcgttggtcgtttttttgcgtttttcgttttttttagttttttttttattttttatcgttttttttttttaaagttaagaattcgagttgtttttcggttagaaacggcgggcggttttgtaacgtgtaggcgttaggtttaagttcggatttttttttttatttatttgttaaagtcgtaaatttcgtagttggtgttttttaacgaatgtaattatttttcggttcggtcggaagaagttatttttttcgtacgcgtttagtcggttttcgcgattcggtttaatgcgacgattggttatggttttaaatttcgttttttcga

SEQ ID NO: 38972 - DNA, 533 bp, Artificial Sequence
  chemically treated genomic DNA (Homo sapiens) CpG-island No: 38972
tcgaaaaaacgaaatttaaaaccataaccaatcgtcgcattaaaccgaatcgcgaaaaccgactaaacgcgtacgaaaaaaataacttcttccgaccgaaccgaaaaataattacattcgttaaaaaacaccaactacgaaatttacgactttaacaaataaataaaaaaaaaaatccgaacttaaacctaacgcctacacgttacaaaaccgcccgccgtttctaaccgaaaaacaactcgaattcttaactttaaaaaaaaaaaacgataaaaaataaaaaaaaaactaaaaaaaacgaaaaacgcaaaaaaacgaccaacgaataaaaaacctcgaaataaaacgaataaatacgcccaaaaactcccacaatttccgaaaacccttaaattacattcgccaataaaaaaaaataaaaccctccgcgaaacgtccctcgaaatcacccaataacgtaatattaaacgaaaactaaaacttctaatccccatcaccgaccgaattaacctcttttcttctatatatccata

SEQ ID NO: 38973 - DNA, 515 bp, Artificial Sequence
  chemically treated genomic DNA (Homo sapiens) CpG-island No: 38973
cgcgcgtttcgtagtttgtttcggagttgtagggtttgcgtttcgcggaggtgagggtcgttaaattatatttttcggcgagttttttaggttgtcgcgtttgcgtagtggtggcgttcgaggtcggtcgaattttcgcgttttttcgtcgtttcgtttcgtttggtgtttttttcgattatggagggggtcgcggtggtgacggcgggtagcgtaggcgttgttaaaatcgagggagttgtagttttgtcgttttcgttttttgttttttcgttcgtttttatttttgtattcgtagcgggtgaggagggatcggcgtttttgtttgagacgggggttttcggttgtttcggttttcggttttttgagttggagtcggagcgtagtttgggtcgttttagaggtcgtttcgaggacgaggacgaggagttggaagaagaagaggagttggaggaggaagaagaggaggaggaggaggatatgagttatttttcgttgaggttggagggaggtcg

SEQ ID NO: 38974 - DNA, 515 bp, Artificial Sequence
  chemically treated genomic DNA (Homo sapiens) CpG-island No: 38974
cgacctccctccaacctcaacgaaaaataactcatatcctcctcctcctcctcttcttcctcctccaactcctcttcttcttccaactcctcgtcctcgtcctcgaaacgacctctaaaacgacccaaactacgctccgactccaactcaaaaaaccgaaaaccgaaacaaccgaaaacccccgtctcaaacaaaaacgccgatccctcctcacccgctacgaatacaaaaataaaaacgaacgaaaaaacaaaaaacgaaaacgacaaaactacaactccctcgattttaacaacgcctacgctacccgccgtcaccaccgcgaccccctccataatcgaaaaaaacaccaaacgaaacgaaacgacgaaaaaacgcgaaaattcgaccgacctcgaacgccaccactacgcaaacgcgacaacctaaaaaactcgccgaaaaatataatttaacgaccctcacctccgcgaaacgcaaaccctacaactccgaaacaaactacgaaacgcgcg

SEQ ID NO: 38975 - DNA, 515 bp, Artificial Sequence
  chemically treated genomic DNA (Homo sapiens) CpG-island No: 38975
cggtttttttttagttttaacgagaagtgatttatgttttttttttttttttttttttttttttttagttttttttttttttttaatttttcgttttcgttttcgaagcggtttttgaagcggtttaggttgcgtttcggttttagtttagggggtcgggagtcggagtagtcgggagttttcgttttagatagaggcgtcggtttttttttattcgttgcgggtgtaggggtgagggcgggcggggagataggaggcggaggcggtaaggttgtagttttttcggttttggtagcgtttacgttgttcgtcgttattatcgcgattttttttatggtcgggagagatattaggcgaggcgaggcggcgggagagcgcgggagttcggtcggtttcggacgttattattgcgtaggcgcggtagtttgaggggttcgtcgggaaatgtggtttagcggtttttattttcgcggggcgtaaattttgtagtttcggggtaggttgcggggcgcgcg

SEQ ID NO: 38976 - DNA, 515 bp, Artificial Sequence
  chemically treated genomic DNA (Homo sapiens) CpG-island No: 38976
cgcgcgccccgcaacctaccccgaaactacaaaatttacgccccgcgaaaataaaaaccgctaaaccacatttcccgacgaacccctcaaactaccgcgcctacgcaataataacgtccgaaaccgaccgaactcccgcgctctcccgccgcctcgcctcgcctaatatctctcccgaccataaaaaaaatcgcgataataacgacgaacaacgtaaacgctaccaaaaccgaaaaaactacaaccttaccgcctccgcctcctatctccccgcccgccctcacccctacacccgcaacgaataaaaaaaaaccgacgcctctatctaaaacgaaaactcccgactactccgactcccgaccccctaaactaaaaccgaaacgcaacctaaaccgcttcaaaaaccgcttcgaaaacgaaaacgaaaaattaaaaaaaaaaaaaaaactaaaaaaaaaaaaaaaaaaaaaaaaaaaaaacataaatcacttctcgttaaaactaaaaaaaaaccg

SEQ ID NO: 38977 - DNA, 739 bp, Artificial Sequence
  chemically treated genomic DNA (Homo sapiens) CpG-island No: 38977
gttttttatgtggcgaaaatgtaattacgtttgacggcgcgaggtggtttagtcgtaagatggcggcgttggcggaggagtagacggaggtggcggttaagttagagtttgagggatcgttaacgttgttattttcgtaggcgggggacggcgtaggcgagggtagcggcggtattattaataacggttttaacggcggcggcgggaacgttgcggcgtcgtcgtttattggcggggatggcgggatttttaagtttacggtggttgttttcgtcgttgtttcggcgggggcggtttcggtgttcgtcgttgtttcggacgtcggcgtttcgtatgatcgatagattttattggtcgtgttgtagtttttacggtagagtaaatttcgcgaggtcgaagaggcgttgcgtcgtgaggtcgggttgttggaggaggtagtggcgggtttcggagtttcgggagaggtggatagcgtcggcgttgaggtgattagcgcgttttttagtcgggtgatcgtttcggtttttggttttgcggttttcgatttttcgggtattggcgtttcgggggttacggtcgttttaggtttagttttaggttttgcggtttcgggtaaaggtgagtcgtggggtttcgggtaggtacggtcgtcgcgaaggggagtaagtcggtaaggtaggggttggtaggtttgtatttttgcgggtttgttttgaattttttgggttcgtttttaggg

SEQ ID NO: 38978 - DNA, 739 bp, Artificial Sequence
  chemically treated genomic DNA (Homo sapiens) CpG-island No: 38978
ccctaaaaacgaacccaaaaaattcaaaacaaacccgcaaaaatacaaacctaccaacccctaccttaccgacttactccccttcgcgacgaccgtacctacccgaaaccccacgactcacctttacccgaaaccgcaaaacctaaaactaaacctaaaacgaccgtaacccccgaaacgccaatacccgaaaaatcgaaaaccgcaaaaccaaaaaccgaaacgatcacccgactaaaaaacgcgctaatcacctcaacgccgacgctatccacctctcccgaaactccgaaacccgccactacctcctccaacaacccgacctcacgacgcaacgcctcttcgacctcgcgaaatttactctaccgtaaaaactacaacacgaccaataaaatctatcgatcatacgaaacgccgacgtccgaaacaacgacgaacaccgaaaccgcccccgccgaaacaacgacgaaaacaaccaccgtaaacttaaaaatcccgccatccccgccaataaacgacgacgccgcaacgttcccgccgccgccgttaaaaccgttattaataataccgccgctaccctcgcctacgccgtcccccgcctacgaaaataacaacgttaacgatccctcaaactctaacttaaccgccacctccgtctactcctccgccaacgccgccatcttacgactaaaccacctcgcgccgtcaaacgtaattacattttcgccacataaaaaac

SEQ ID NO: 38979 - DNA, 739 bp, Artificial Sequence
  chemically treated genomic DNA (Homo sapiens) CpG-island No: 38979
ttttagaggcgggtttaggaaatttaaaataagttcgtagaggtgtaggtttgttagtttttgttttatcggtttgttttttttcgcggcggtcgtatttattcgggattttacggtttatttttattcggagtcgtaggatttgaggttgaatttgagacgatcgtggttttcgaagcgttagtgttcggagggtcgggggtcgtaaggttaggggtcgaggcggttattcggttgagaagcgcgttggttattttagcgtcggcgttgtttatttttttcggggtttcggagttcgttattgttttttttagtagttcggttttacggcgtagcgttttttcggtttcgcggagtttgttttgtcgtaggaattgtagtacggttagtagagtttgtcggttatgcggagcgtcggcgttcggagtagcggcgggtatcggggtcgttttcgtcggggtagcggcggagatagttatcgtgggtttgggggtttcgttattttcgttagtggacgacgacgtcgtaacgttttcgtcgtcgtcgttggggtcgttgttggtagtgtcgtcgttattttcgtttgcgtcgtttttcgtttgcggaggtagtagcgttggcggttttttaggttttagtttgatcgttattttcgtttgttttttcgttagcgtcgttattttgcggttgagttatttcgcgtcgttaagcgtgattgtattttcgttatatggagggt

SEQ ID NO: 38980 - DNA, 739 bp, Artificial Sequence
  chemically treated genomic DNA (Homo sapiens) CpG-island No: 38980
accctccatataacgaaaatacaatcacgcttaacgacgcgaaataactcaaccgcaaaataacgacgctaacgaaaaaacaaacgaaaataacgatcaaactaaaacctaaaaaaccgccaacgctactacctccgcaaacgaaaaacgacgcaaacgaaaataacgacgacactaccaacaacgaccccaacgacgacgacgaaaacgttacgacgtcgtcgtccactaacgaaaataacgaaacccccaaacccacgataactatctccgccgctaccccgacgaaaacgaccccgatacccgccgctactccgaacgccgacgctccgcataaccgacaaactctactaaccgtactacaattcctacgacaaaacaaactccgcgaaaccgaaaaaacgctacgccgtaaaaccgaactactaaaaaaaacaataacgaactccgaaaccccgaaaaaaataaacaacgccgacgctaaaataaccaacgcgcttctcaaccgaataaccgcctcgacccctaaccttacgacccccgaccctccgaacactaacgcttcgaaaaccacgatcgtctcaaattcaacctcaaatcctacgactccgaataaaaataaaccgtaaaatcccgaataaatacgaccgccgcgaaaaaaaacaaaccgataaaacaaaaactaacaaacctacacctctacgaacttattttaaatttcctaaacccgcctctaaaa

SEQ ID NO: 38981 - DNA, 1185 bp, Artificial Sequence
  chemically treated genomic DNA (Homo sapiens) CpG-island No: 38981
gggcgcgcgggttttttgtcgtttggagtcgagttggtattggagcgttttttttttggagcgtagaggtattcgacgttttgcggtagttcgtagttttttttttacgattttttagaatagttttgttttgttttttttcggtttttcgagtgcgttcgttattttgtttcgcgagaggtgaacgcggagaaagtaggatgattatttacgttttcgagaaattttgggtaaagaaaggtattattttagttcgtacgttgaaagtcgtttttttttttttttttttttcgttgtgtttgaatttttcgggatatttagacggttggagtttttcgattttaaggcgggcgacggtaaagttaaacgttagcgcgttgcggttttcgggtatcgaggcgttttcgttttcgttatttatatagggcgttaagtgtttcgattcgcgagtgacgaggacgtataggttagtgatacgattcgtagttagtattgagcgggacgacggggttcgagcgtaggagggtgcgcggggagttgaggagcgtcgggggttcgggcgcggcgcgtatttgaggtcgtcgtcgaggaggcgacggggagtagcgcggttaagagtagtagcgtcgtttaggatagtcggcgcggcgcgcgtagggtcgtttcggtttcgggggttatcgagagttcggggtgggtcggggttgggtgtttgcggttggtaggggggcgttggtcggagtttggggagtgtcgaggcgtcgtcgtcgggttttcgtcgtcgttcgtttgttttgcgcgttttgcgcggtgttcgtcgcgtttttgtttcgcggcgatcgttttcggtcgtatatcggtagtcgcgtttcgttattgaggtcgtcgatttttcgtcgagttttttagttgcgttcgggcgttttttgtcggtgtgcggggtcggggttagggtcggcgggggcgattcgggcgataggggcgacgggggcggcggggttcgggttggaggcgggcggggcgcgggacgaaggggtcggagcgtttcggattgatttagcggttttgaatttggggcggtcgttgtgtcgggttaagtggttgaggaagttttttttttcgtttaatttttttattttttggttggggaagtcgtttatcgcgtcgaggagtgttttttgtttt

SEQ ID NO: 38982 - DNA, 1185 bp, Artificial Sequence
  chemically treated genomic DNA (Homo sapiens) CpG-island No: 38982
aaaacaaaaaacactcctcgacgcgataaacgacttccccaaccaaaaaataaaaaaattaaacgaaaaaaaaaacttcctcaaccacttaacccgacacaacgaccgccccaaattcaaaaccgctaaatcaatccgaaacgctccgaccccttcgtcccgcgccccgcccgcctccaacccgaaccccgccgcccccgtcgcccctatcgcccgaatcgcccccgccgaccctaaccccgaccccgcacaccgacaaaaaacgcccgaacgcaactaaaaaactcgacgaaaaatcgacgacctcaataacgaaacgcgactaccgatatacgaccgaaaacgatcgccgcgaaacaaaaacgcgacgaacaccgcgcaaaacgcgcaaaacaaacgaacgacgacgaaaacccgacgacgacgcctcgacactccccaaactccgaccaacgcccccctaccaaccgcaaacacccaaccccgacccaccccgaactctcgataacccccgaaaccgaaacgaccctacgcgcgccgcgccgactatcctaaacgacgctactactcttaaccgcgctactccccgtcgcctcctcgacgacgacctcaaatacgcgccgcgcccgaacccccgacgctcctcaactccccgcgcaccctcctacgctcgaaccccgtcgtcccgctcaatactaactacgaatcgtatcactaacctatacgtcctcgtcactcgcgaatcgaaacacttaacgccctatataaataacgaaaacgaaaacgcctcgatacccgaaaaccgcaacgcgctaacgtttaactttaccgtcgcccgccttaaaatcgaaaaactccaaccgtctaaatatcccgaaaaattcaaacacaacgaaaaaaaaaaaaaaaaaaaaacgactttcaacgtacgaactaaaataatacctttctttacccaaaatttctcgaaaacgtaaataatcatcctactttctccgcgttcacctctcgcgaaacaaaataacgaacgcactcgaaaaaccgaaaaaaaacaaaacaaaactattctaaaaaatcgtaaaaaaaaaactacgaactaccgcaaaacgtcgaatacctctacgctccaaaaaaaaaacgctccaataccaactcgactccaaacgacaaaaaacccgcgcgccc

SEQ ID NO: 38983 - DNA, 1185 bp, Artificial Sequence
  chemically treated genomic DNA (Homo sapiens) CpG-island No: 38983
gggataaagggtatttttcggcgcgatgggcgatttttttagttagaaaatgagagggttagacgaggggaggaatttttttagttatttggttcggtatagcgatcgttttaagtttagaatcgttaagttagttcggggcgtttcggttttttcgtttcgcgtttcgttcgtttttagttcgggtttcgtcgttttcgtcgtttttgtcgttcgggtcgttttcgtcggttttggtttcggtttcgtatatcggtagggggcgttcgagcgtagttaaaaggttcggcgggaggtcggcggttttagtggcggagcgcggttgtcggtgtgcggtcgggagcgatcgtcgcggggtaggggcgcggcgggtatcgcgtagagcgcgtagaatagacggacggcggcggggattcgacggcggcgtttcggtattttttagatttcggttagcgtttttttgttagtcgtaagtatttagtttcggtttatttcgggttttcgatggttttcgaggtcggggcgattttgcgcgcgtcgcgtcggttgttttgggcggcgttgttgtttttggtcgcgttgtttttcgtcgttttttcggcggcggttttaggtacgcgtcgcgttcgggttttcggcgttttttagtttttcgcgtatttttttgcgttcgggtttcgtcgtttcgtttagtgttggttacgggtcgtgttattagtttgtgcgttttcgttattcgcgggtcggggtatttggcgttttgtgtgggtggcgggagcggggacgtttcggtgttcggggatcgtagcgcgttggcgtttaattttgtcgtcgttcgttttggagtcgggaggttttagtcgtttaagtgtttcgggagatttaggtatagcggggaaaaaaggaaaagaaaggcgatttttagcgtgcggattggggtaatgtttttttttgtttagaatttttcgggagcgtaggtggttattttatttttttcgcgtttatttttcgcgaggtaggatgacgggcgtattcgggagatcggagggaggtagagtagggttgttttagaaggtcgtgggggaaaggttgcgagttgtcgtagggcgtcgggtgtttttgcgttttagaggagaagcgttttagtgttagttcggttttaggcggtaggaggttcgcgcgttt

SEQ ID NO: 38984 - DNA, 1185 bp, Artificial Sequence
  chemically treated genomic DNA (Homo sapiens) CpG-island No: 38984
aaacgcgcgaacctcctaccgcctaaaaccgaactaacactaaaacgcttctcctctaaaacgcaaaaacacccgacgccctacgacaactcgcaacctttcccccacgaccttctaaaacaaccctactctacctccctccgatctcccgaatacgcccgtcatcctacctcgcgaaaaataaacgcgaaaaaaataaaataaccacctacgctcccgaaaaattctaaacaaaaaaaaacattaccccaatccgcacgctaaaaatcgcctttcttttccttttttccccgctatacctaaatctcccgaaacacttaaacgactaaaacctcccgactccaaaacgaacgacgacaaaattaaacgccaacgcgctacgatccccgaacaccgaaacgtccccgctcccgccacccacacaaaacgccaaataccccgacccgcgaataacgaaaacgcacaaactaataacacgacccgtaaccaacactaaacgaaacgacgaaacccgaacgcaaaaaaatacgcgaaaaactaaaaaacgccgaaaacccgaacgcgacgcgtacctaaaaccgccgccgaaaaaacgacgaaaaacaacgcgaccaaaaacaacaacgccgcccaaaacaaccgacgcgacgcgcgcaaaatcgccccgacctcgaaaaccatcgaaaacccgaaataaaccgaaactaaatacttacgactaacaaaaaaacgctaaccgaaatctaaaaaataccgaaacgccgccgtcgaatccccgccgccgtccgtctattctacgcgctctacgcgatacccgccgcgcccctaccccgcgacgatcgctcccgaccgcacaccgacaaccgcgctccgccactaaaaccgccgacctcccgccgaaccttttaactacgctcgaacgccccctaccgatatacgaaaccgaaaccaaaaccgacgaaaacgacccgaacgacaaaaacgacgaaaacgacgaaacccgaactaaaaacgaacgaaacgcgaaacgaaaaaaccgaaacgccccgaactaacttaacgattctaaacttaaaacgatcgctataccgaaccaaataactaaaaaaattcctcccctcgtctaaccctctcattttctaactaaaaaaatcgcccatcgcgccgaaaaataccctttatccc

SEQ ID NO: 38985 - DNA, 845 bp, Artificial Sequence
  chemically treated genomic DNA (Homo sapiens) CpG-island No: 38985
gtcggggacgaaaggcgaagggggaaaattagagttttcgtcggtcgggatagcgtagtcgggttttagttcgttttacggtttacgttagaagatcgttttcggcgtcgcggacgtcggagattattgtttgcgttttcgtacgtacgtatttacgtattcgcgtacgcgcgcgtcggtttcgtttatcgtttcgttgtggtttttttggatcgtacgagttatcgttcgtatagtttcgtttcgtacggttaggcgaagcggagtcggtcgtgcggtgtgtgtgtatgtgttcgcggggcgtcgttttagtttcgggaagatggtggttgtagcggcggtaattgaggtaaggttgaggaggaggacggcggcgacggtagcgttcgcgggtaggagcggcgggtcgtattgggattgggacgtgattagggttgggaggtcggggttgggggtcgggttgcgtttttcgcggttgttgtttttatcgttgcggttacggttgttgttgttgttgttgttgttttcgtcgtcgttgttgttgttgttgttgttttgtgaggtcgaggtcgcggcggcggcggcggcggtgtcgggtttagtcgtagtcgaggttaaggaatgtgatcggttttgtgttaacggcggtcgttgtaattttggtatcggttagtgcgtttgtttcgtcggttgggtgggcgagtaatgttagtattgcgggggtcgttttaggtgagtggcgggtggtgtcggagggtcgggtttaattagaggttggggttgaggggcgttcgagacggttttaggttagagggagatgttggatagaaagtggagagggtagg

SEQ ID NO: 38986 - DNA, 845 bp, Artificial Sequence
  chemically treated genomic DNA (Homo sapiens) CpG-island No: 38986
cctaccctctccactttctatccaacatctccctctaacctaaaaccgtctcgaacgcccctcaaccccaacctctaattaaacccgaccctccgacaccacccgccactcacctaaaacgacccccgcaatactaacattactcgcccacccaaccgacgaaacaaacgcactaaccgataccaaaattacaacgaccgccgttaacacaaaaccgatcacattccttaacctcgactacgactaaacccgacaccgccgccgccgccgccgcgacctcgacctcacaaaacaacaacaacaacaacaacgacgacgaaaacaacaacaacaacaacaacaaccgtaaccgcaacgataaaaacaacaaccgcgaaaaacgcaacccgacccccaaccccgacctcccaaccctaatcacgtcccaatcccaatacgacccgccgctcctacccgcgaacgctaccgtcgccgccgtcctcctcctcaaccttacctcaattaccgccgctacaaccaccatcttcccgaaactaaaacgacgccccgcgaacacatacacacacaccgcacgaccgactccgcttcgcctaaccgtacgaaacgaaactatacgaacgataactcgtacgatccaaaaaaaccacaacgaaacgataaacgaaaccgacgcgcgcgtacgcgaatacgtaaatacgtacgtacgaaaacgcaaacaataatctccgacgtccgcgacgccgaaaacgatcttctaacgtaaaccgtaaaacgaactaaaacccgactacgctatcccgaccgacgaaaactctaattttcccccttcgcctttcgtccccgac

SEQ ID NO: 38987 - DNA, 845 bp, Artificial Sequence
  chemically treated genomic DNA (Homo sapiens) CpG-island No: 38987
tttattttttttattttttgtttagtatttttttttgatttggagtcgtttcgaacgttttttagttttagtttttggttggattcgatttttcgatattattcgttatttatttgaagcggttttcgtagtgttggtattgttcgtttatttagtcggcggggtagacgtattggtcggtgttagggttgtagcgatcgtcgttgatatagggtcggttatattttttggtttcggttgcggttgagttcgatatcgtcgtcgtcgtcgtcgcggtttcggttttatagggtagtagtagtagtagtagcggcggcgagagtaataatagtagtagtagtagtcgtggtcgtagcggtggagatagtagtcgcgggaggcgtagttcggtttttagtttcggttttttagttttggttacgttttagttttagtgcggttcgtcgtttttgttcgcgagcgttgtcgtcgtcgtcgtttttttttttagttttgttttagttgtcgtcgttgtagttattattttttcggggttgagacggcgtttcgcgaatatatatatatatatcgtacggtcggtttcgtttcgtttggtcgtgcggggcggggttgtgcggacggtggttcgtgcggtttaaaggggttatagcggggcggtgggcggggtcggcgcgcgcgtgcgcgagtacgtgggtgcgtgcgtgcgggggcgtagatagtggttttcggcgttcgcggcgtcggaggcgattttttgacgtggatcgtagaacgagttgaaattcggttgcgttgtttcggtcggcgaaagttttagtttttttttttcgtttttcgttttcggt

SEQ ID NO: 38988 - DNA, 845 bp, Artificial Sequence
  chemically treated genomic DNA (Homo sapiens) CpG-island No: 38988
accgaaaacgaaaaacgaaaaaaaaaaactaaaactttcgccgaccgaaacaacgcaaccgaatttcaactcgttctacgatccacgtcaaaaaatcgcctccgacgccgcgaacgccgaaaaccactatctacgcccccgcacgcacgcacccacgtactcgcgcacgcgcgcgccgaccccgcccaccgccccgctataacccctttaaaccgcacgaaccaccgtccgcacaaccccgccccgcacgaccaaacgaaacgaaaccgaccgtacgatatatatatatatattcgcgaaacgccgtctcaaccccgaaaaaataataactacaacgacgacaactaaaacaaaactaaaaaaaaaaacgacgacgacgacaacgctcgcgaacaaaaacgacgaaccgcactaaaactaaaacgtaaccaaaactaaaaaaccgaaactaaaaaccgaactacgcctcccgcgactactatctccaccgctacgaccacgactactactactactattattactctcgccgccgctactactactactactaccctataaaaccgaaaccgcgacgacgacgacgacgatatcgaactcaaccgcaaccgaaaccaaaaaatataaccgaccctatatcaacgacgatcgctacaaccctaacaccgaccaatacgtctaccccgccgactaaataaacgaacaataccaacactacgaaaaccgcttcaaataaataacgaataatatcgaaaaatcgaatccaaccaaaaactaaaactaaaaaacgttcgaaacgactccaaatcaaaaaaaaatactaaacaaaaaataaaaaaaataaa

SEQ ID NO: 38989 - DNA, 616 bp, Artificial Sequence
  chemically treated genomic DNA (Homo sapiens) CpG-island No: 38989
gttagatgtcgtcgtggttgcggttaagttaggcggtttgttcggcggcggttgtatcggggtaggaatcgatttttagttttattttcgcggacggtttttggagcggtttcgattttttttcggagaagaggggcgggagttacggttaggcgggaagggatgcgcgtttgagatttcggaacgtttcgcgttagtttaggagaattcgtaagttagcggcgtttgagttcgagttgtagttattttttgcgggttacgcgagttcgagggcgtttttcggagttcgggttggcgttgagttgtaggcgcgcgtttaatcgttttattgggtttattttatcgagaggtcggaggttgcgagtgtcgttgttgaaggttgtagtggatcgggttggatcgcggattttgagttatatcgcgggtttgggggtgtattttggatttaggggtggatcgttgggtggggagggggatttcgaatttggagttgggtgggggtggaaaggttacgaggagtcgcggcgttttaggagcgggtggtgggtatttgagaagtcgttattatgaggaagttttttagttttgggagacgtttgggttaggcgtttttgag

SEQ ID NO: 38990 - DNA, 616 bp, Artificial Sequence
  chemically treated genomic DNA (Homo sapiens) CpG-island No: 38990
ctcaaaaacgcctaacccaaacgtctcccaaaactaaaaaacttcctcataataacgacttctcaaatacccaccacccgctcctaaaacgccgcgactcctcgtaacctttccacccccacccaactccaaattcgaaatccccctccccacccaacgatccacccctaaatccaaaatacacccccaaacccgcgatataactcaaaatccgcgatccaacccgatccactacaaccttcaacaacgacactcgcaacctccgacctctcgataaaataaacccaataaaacgattaaacgcgcgcctacaactcaacgccaacccgaactccgaaaaacgccctcgaactcgcgtaacccgcaaaaaataactacaactcgaactcaaacgccgctaacttacgaattctcctaaactaacgcgaaacgttccgaaatctcaaacgcgcatcccttcccgcctaaccgtaactcccgcccctcttctccgaaaaaaaatcgaaaccgctccaaaaaccgtccgcgaaaataaaactaaaaatcgattcctaccccgatacaaccgccgccgaacaaaccgcctaacttaaccgcaaccacgacgacatctaac

SEQ ID NO: 38991 - DNA, 616 bp, Artificial Sequence
  chemically treated genomic DNA (Homo sapiens) CpG-island No: 38991
tttaggagcgtttggtttaggcgttttttaaaattgaggagtttttttatggtggcgattttttagatgtttattattcgtttttgagacgtcgcggtttttcgtggtttttttatttttatttagttttaaattcgagatttttttttttatttagcgatttatttttaaatttaagatgtatttttaaattcgcgatgtagtttagaattcgcgatttagttcggtttattatagtttttagtagcgatattcgtagttttcgatttttcgatagagtgagtttagtaaagcggttaggcgcgcgtttatagtttagcgttagttcggatttcggaaggcgttttcgagttcgcgtggttcgtagagggtgattgtagttcgggtttaggcgtcgttggtttgcgggtttttttgggttggcgcgggacgtttcggaattttaggcgcgtattttttttcgtttggtcgtgattttcgtttttttttttcgaagagagatcggggtcgttttagggatcgttcgcggggatggggttgagggtcggtttttgtttcggtgtagtcgtcgtcgggtagatcgtttggtttggtcgtagttacggcgatatttagt

SEQ ID NO: 38992 - DNA, 616 bp, Artificial Sequence
  chemically treated genomic DNA (Homo sapiens) CpG-island No: 38992
actaaatatcgccgtaactacgaccaaaccaaacgatctacccgacgacgactacaccgaaacaaaaaccgaccctcaaccccatccccgcgaacgatccctaaaacgaccccgatctctcttcgaaaaaaaaaaacgaaaatcacgaccaaacgaaaaaaaatacgcgcctaaaattccgaaacgtcccgcgccaacccaaaaaaacccgcaaaccaacgacgcctaaacccgaactacaatcaccctctacgaaccacgcgaactcgaaaacgccttccgaaatccgaactaacgctaaactataaacgcgcgcctaaccgctttactaaactcactctatcgaaaaatcgaaaactacgaatatcgctactaaaaactataataaaccgaactaaatcgcgaattctaaactacatcgcgaatttaaaaatacatcttaaatttaaaaataaatcgctaaataaaaaaaaaaatctcgaatttaaaactaaataaaaataaaaaaaccacgaaaaaccgcgacgtctcaaaaacgaataataaacatctaaaaaatcgccaccataaaaaaactcctcaattttaaaaaacgcctaaaccaaacgctcctaaa

SEQ ID NO: 38993 - DNA, 687 bp, Artificial Sequence
  chemically treated genomic DNA (Homo sapiens) CpG-island No: 38993
ttcgtttttttttagtaaggagtcggggttttttttagtttttttagttaggcggcggcggcgattggtaatgtttggttttaaaagaaacgcggtaatcggatttaatttttattgtgggggggtcggtttgggggtcggtagcggcggcgttatttcgttcgggagggcgatttttggttacggagaaggaggtttcggttcggcgagagatagggggaggggaggtcggcgcggtgattggcggaagcgtcggcgtaagtttttcgtttatttttacgttagattttcggagggtcgcgcggtcgtcgtttattggcgtcgaggttttcgacgttatcgcgattttcgcgaggttgttttttttcgcgtttattcgtcgcggcgtcgtttgaggagatggaagtttcggtcgttgacgttattatgtcgttcgaagaggagttggacgggtacgagtcggagtttttcgggaagcggtcggttgttttgtcgttgttggagttggtcggggaatttggtaataatattagtacggacgggttattattttcgacgtcgtcgttagtagaggaggaggaggacgagttgtatcggtagtcgttggagattatttttcggtattttcgggagtaggttatcggcgttaaggatataaagttaatgggtaggtttggggttattagt

SEQ ID NO: 38994 - DNA, 687 bp, Artificial Sequence
  chemically treated genomic DNA (Homo sapiens) CpG-island No: 38994
actaataaccccaaacctacccattaactttatatccttaacgccgataacctactcccgaaaataccgaaaaataatctccaacgactaccgatacaactcgtcctcctcctcctctactaacgacgacgtcgaaaataataacccgtccgtactaatattattaccaaattccccgaccaactccaacaacgacaaaacaaccgaccgcttcccgaaaaactccgactcgtacccgtccaactcctcttcgaacgacataataacgtcaacgaccgaaacttccatctcctcaaacgacgccgcgacgaataaacgcgaaaaaaaacaacctcgcgaaaatcgcgataacgtcgaaaacctcgacgccaataaacgacgaccgcgcgaccctccgaaaatctaacgtaaaaataaacgaaaaacttacgccgacgcttccgccaatcaccgcgccgacctcccctccccctatctctcgccgaaccgaaacctccttctccgtaaccaaaaatcgccctcccgaacgaaataacgccgccgctaccgacccccaaaccgacccccccacaataaaaattaaatccgattaccgcgtttcttttaaaaccaaacattaccaatcgccgccgccgcctaactaaaaaaactaaaaaaaaccccgactccttactaaaaaaaaacgaa

SEQ ID NO: 38995 - DNA, 687 bp, Artificial Sequence
  chemically treated genomic DNA (Homo sapiens) CpG-island No: 38995
gttggtggttttagatttgtttattggttttgtgtttttggcgtcggtggtttgttttcgaaggtatcgagagataatttttagcgattgtcggtataattcgtttttttttttttttgttggcggcggcgtcgagggtagtgattcgttcgtattggtgttattattagatttttcgattaattttagtagcggtaggatagtcggtcgtttttcgagaggtttcggttcgtattcgtttagttttttttcgggcgatatgatggcgttagcggtcggggtttttatttttttaagcggcgtcgcggcgggtgggcgcgaagaaaagtagtttcgcgggggtcgcggtgacgtcggggatttcggcgttaatgggcggcggtcgcgcgatttttcgggagtttggcgtgagggtggacggggggtttgcgtcggcgttttcgttaattatcgcgtcggttttttttttttttatttttcgtcgggtcgaggttttttttttcgtagttaaaagtcgttttttcgggcggggtggcgtcgtcgttgtcggtttttaagtcggtttttttatagtagaggttgagttcgattatcgcgttttttttgaggttaaatattgttagtcgtcgtcgtcgtttggttgagaaaattggggaagatttcgattttttattggaaggaagcgga

SEQ ID NO: 38996 - DNA, 687 bp, Artificial Sequence
  chemically treated genomic DNA (Homo sapiens) CpG-island No: 38996
tccgcttccttccaataaaaaatcgaaatcttccccaattttctcaaccaaacgacgacgacgactaacaatatttaacctcaaaaaaaacgcgataatcgaactcaacctctactataaaaaaaccgacttaaaaaccgacaacgacgacgccaccccgcccgaaaaaacgacttttaactacgaaaaaaaaaacctcgacccgacgaaaaataaaaaaaaaaaaaaccgacgcgataattaacgaaaacgccgacgcaaaccccccgtccaccctcacgccaaactcccgaaaaatcgcgcgaccgccgcccattaacgccgaaatccccgacgtcaccgcgacccccgcgaaactacttttcttcgcgcccacccgccgcgacgccgcttaaaaaaataaaaaccccgaccgctaacgccatcatatcgcccgaaaaaaaactaaacgaatacgaaccgaaacctctcgaaaaacgaccgactatcctaccgctactaaaattaatcgaaaaatctaataataacaccaatacgaacgaatcactaccctcgacgccgccgccaacaaaaaaaaaaaaaaacgaattataccgacaatcgctaaaaattatctctcgataccttcgaaaacaaaccaccgacgccaaaaacacaaaaccaataaacaaatctaaaaccaccaac

SEQ ID NO: 38997 - DNA, 778 bp, Artificial Sequence
  chemically treated genomic DNA (Homo sapiens) CpG-island No: 38997
gcgggtattttcgtttagggcgtttttttttcggattagcggtttttttaggtcgtttcgttttaggcgtttttggaggttgtttcgtttgtgtcgcgtcggtcgcgtcgtgttcgtatcgtttattcgagcggttcggaggttcgggttgtttaagtttttagttttagtcgggtacgaggatagcgttcgggagcgattgtagtttttgatttcggttgggttagttcgggttgtttaagtttttagtttcggtcgggtacgaggatagcgttcgggagcgattgtagttttcgatttcggttgggttagttcgggttttagtttacgtagtcgtcggggggcgttcggcgtagttcggtttgggtggttttggcgagtggggttgcgaggtagatcggttttatttcggggttttgaggggcgcgggttggggcgcgtggcgtgcggggttgggcgggggcgggcgcgagggcggagttgcggtcgaggcgcggaagtcggagcgcggtttagcgttttttagtggcgtcgcggaaggattgtttggagagagatttggttagaagggttacgggttacggggttcgtagataggtagagatttttcgggattcgtttcgcgttttttttcgggttcgttagacgtcgttttcggttcgttcgttatttttttgcgttgtgcgtcggattcgttacgattcggattagtttcgtggttcggaaatttttagtttgggtcgaattttgggaggaatttattcgtgaatttggttta

SEQ ID NO: 38998 - DNA, 778 bp, Artificial Sequence
  chemically treated genomic DNA (Homo sapiens) CpG-island No: 38998
taaaccaaattcacgaataaattcctcccaaaattcgacccaaactaaaaatttccgaaccacgaaactaatccgaatcgtaacgaatccgacgcacaacgcaaaaaaataacgaacgaaccgaaaacgacgtctaacgaacccgaaaaaaaacgcgaaacgaatcccgaaaaatctctacctatctacgaaccccgtaacccgtaacccttctaaccaaatctctctccaaacaatccttccgcgacgccactaaaaaacgctaaaccgcgctccgacttccgcgcctcgaccgcaactccgccctcgcgcccgcccccgcccaaccccgcacgccacgcgccccaacccgcgcccctcaaaaccccgaaataaaaccgatctacctcgcaaccccactcgccaaaaccacccaaaccgaactacgccgaacgccccccgacgactacgtaaactaaaacccgaactaacccaaccgaaatcgaaaactacaatcgctcccgaacgctatcctcgtacccgaccgaaactaaaaacttaaacaacccgaactaacccaaccgaaatcaaaaactacaatcgctcccgaacgctatcctcgtacccgactaaaactaaaaacttaaacaacccgaacctccgaaccgctcgaataaacgatacgaacacgacgcgaccgacgcgacacaaacgaaacaacctccaaaaacgcctaaaacgaaacgacctaaaaaaaccgctaatccgaaaaaaaaacgccctaaacgaaaatacccgc

SEQ ID NO: 38999 - DNA, 778 bp, Artificial Sequence
  chemically treated genomic DNA (Homo sapiens) CpG-island No: 38999
tgggttaagtttacggataaattttttttagaattcgatttaggttgaagattttcgagttacggagttggttcgggtcgtggcgggttcgacgtatagcgtaggagagtgacgagcgggtcggggacggcgtttaacggattcggagaggggcgcggggcgggtttcgggaggtttttatttgtttgcgagtttcgtggttcgtaatttttttggttaggtttttttttaggtaattttttcgcggcgttattggagagcgttgagtcgcgtttcggttttcgcgtttcggtcgtaatttcgttttcgcgttcgttttcgtttagtttcgtacgttacgcgttttagttcgcgttttttagggtttcggggtggggtcggtttgtttcgtagttttattcgttaggattatttaaatcgggttgcgtcgggcgtttttcgacggttgcgtgagttgaagttcgggttggtttagtcggggtcggaggttgtagtcgttttcgggcgttgttttcgtgttcggtcgagattagggatttaagtagttcgggttggtttagtcggggttagaggttgtagtcgttttcgggcgttgttttcgtgttcggttgagattagggatttaagtaattcgggttttcgagtcgttcgggtgagcggtgcgaatacggcgcggtcggcgcggtataggcggggtagtttttaggggcgtttggagcgaggcggtttgggagagtcgttggttcgggagggaagcgttttggacggaggtattcgt

SEQ ID NO: 39000 - DNA, 778 bp, Artificial Sequence
  chemically treated genomic DNA (Homo sapiens) CpG-island No: 39000
acgaatacctccgtccaaaacgcttccctcccgaaccaacgactctcccaaaccgcctcgctccaaacgcccctaaaaactaccccgcctataccgcgccgaccgcgccgtattcgcaccgctcacccgaacgactcgaaaacccgaattacttaaatccctaatctcaaccgaacacgaaaacaacgcccgaaaacgactacaacctctaaccccgactaaaccaacccgaactacttaaatccctaatctcgaccgaacacgaaaacaacgcccgaaaacgactacaacctccgaccccgactaaaccaacccgaacttcaactcacgcaaccgtcgaaaaacgcccgacgcaacccgatttaaataatcctaacgaataaaactacgaaacaaaccgaccccaccccgaaaccctaaaaaacgcgaactaaaacgcgtaacgtacgaaactaaacgaaaacgaacgcgaaaacgaaattacgaccgaaacgcgaaaaccgaaacgcgactcaacgctctccaataacgccgcgaaaaaattacctaaaaaaaaacctaaccaaaaaaattacgaaccacgaaactcgcaaacaaataaaaacctcccgaaacccgccccgcgcccctctccgaatccgttaaacgccgtccccgacccgctcgtcactctcctacgctatacgtcgaacccgccacgacccgaaccaactccgtaactcgaaaatcttcaacctaaatcgaattctaaaaaaaatttatccgtaaacttaaccca

SEQ ID NO: 39001 - DNA, 515 bp, Artificial Sequence
  chemically treated genomic DNA (Homo sapiens) CpG-island No: 39001
  unsure (315)
ggcggggtcgcgatcgtatagcgtagggagaggggacgacgcgggcgtcggggcgggcgggtttaacgggattcgggagaggggcggtcggggcgggagtttcggcgaggtttttatttgttttgcgagttttcggtggttcgttaatttttttgcgtttaggcgtcgtttttaggtaatttcgtttcgggcggttattggggttttgagtcgcgtttcggttacgtcgtttcgttatattacgtgttcggttcggtgcgagtagtttggcgttattgttttaggacggtttgtcgaggtattgaggtgggtttnttgattcgtattttattagttagtaggacgtgttgggtgtgcgtgtggtttcgttagatgggtgcgtgagtgaagatcgtgttggttacgttgggtttgaggttgtagtgatttatggcggtgttttagtgcgcgttgagatttaggatttaagtagtatcgttgtttagacggagttagagggtgtagttattttcgtg

SEQ ID NO: 39002 - DNA, 515 bp, Artificial Sequence
  chemically treated genomic DNA (Homo sapiens) CpG-island No: 39002
  unsure (201)
cacgaaaataactacaccctctaactccgtctaaacaacgatactacttaaatcctaaatctcaacgcgcactaaaacaccgccataaatcactacaacctcaaacccaacgtaaccaacacgatcttcactcacgcacccatctaacgaaaccacacgcacacccaacacgtcctactaactaataaaatacgaatcaanaaacccacctcaatacctcgacaaaccgtcctaaaacaataacgccaaactactcgcaccgaaccgaacacgtaatataacgaaacgacgtaaccgaaacgcgactcaaaaccccaataaccgcccgaaacgaaattacctaaaaacgacgcctaaacgcaaaaaaattaacgaaccaccgaaaactcgcaaaacaaataaaaacctcgccgaaactcccgccccgaccgcccctctcccgaatcccgttaaacccgcccgccccgacgcccgcgtcgtcccctctccctacgctatacgatcgcgaccccgcc

SEQ ID NO: 39003 - DNA, 515 bp, Artificial Sequence
  chemically treated genomic DNA (Homo sapiens) CpG-island No: 39003
  unsure (201)
tacgagagtgattatattttttgatttcgtttgagtagcgatgttgtttaagttttaagttttagcgcgtattagagtatcgttatagattattgtagttttagatttagcgtggttagtacggtttttatttacgtatttatttagcgggattatacgtatatttagtacgttttgttaattagtgaagtgcgagttagnaaatttattttagtgtttcgataggtcgttttgaagtagtagcgttagattgttcgtatcgagtcgagtacgtagtgtagcgaagcggcgtgatcggagcgcggtttagggttttagtggtcgttcggagcgaggttgtttggagacgacgtttgggcgtagaagggttaacgggttatcgggggttcgtagagtaggtagagatttcgtcgagattttcgtttcggtcgtttttttttcgggtttcgttagattcgttcgtttcggcgttcgcgtcgttttttttttttgcgttgtgcggtcgcgatttcgtt

SEQ ID NO: 39004 - DNA, 515 bp, Artificial Sequence
  chemically treated genomic DNA (Homo sapiens) CpG-island No: 39004
  unsure (315)
aacgaaatcgcgaccgcacaacgcaaaaaaaaaaaacgacgcgaacgccgaaacgaacgaatctaacgaaacccgaaaaaaaaacgaccgaaacgaaaatctcgacgaaatctctacctactctacgaacccccgataacccgttaacccttctacgcccaaacgtcgtctccaaacaacctcgctccgaacgaccactaaaaccctaaaccgcgctccgatcacgccgcttcgctacactacgtactcgactcgatacgaacaatctaacgctactacttcaaaacgacctatcgaaacactaaaataaatttnctaactcgcacttcactaattaacaaaacgtactaaatatacgtataatcccgctaaataaatacgtaaataaaaaccgtactaaccacgctaaatctaaaactacaataatctataacgatactctaatacgcgctaaaacttaaaacttaaacaacatcgctactcaaacgaaatcaaaaaatataatcactctcgta

SEQ ID NO: 39005 - DNA, 910 bp, Artificial Sequence
  chemically treated genomic DNA (Homo sapiens) CpG-island No: 39005
tttagcggcggggggtagagttcggggttgcggcgttgtttaatttcggcggcggtagcggcggcgttggaaggtgttgtttttaagtttatgttcgtttatgtaggtttcgtgggtttcggcgagggcggcggcgcgggcgtcgtggcgggtttgggttcgtggttgcggtatgggtcggggggcgcgtttcgttttttttttttttttttttaggttcgtgtagtagatggggcgttattatcgtcgtagtaagtagcgcgtagtcggcgtagttagttcgcggcggtagtagcggggcgtaggggtatcgtggcggtcggaggcggtaggtagggaaaggggcggaagagaagatataaagatcgtgagcgattgttgagacgagtttcgagcgcgtcggtatttcggttttagttagcgtgggttcggcgggcgtggatttttaagaggttggtttagttttagcgattatttatcggcggttcggatatttttgcgcggtagttttcgcggtcgattaattttagtttcgtattgtcgtttcgtttcgttttgtgttcgttaatttacgacgttataatttttcgtcgtgtttttttttttttttttattggttgtgatcgtacgttagttcgatttagtttgttaatcgtaggatttagagggttttttttttcgttcgtttagtgtaattcgagttttttgtttatcgattttaagtttttttttttgcgtcgtatgttgtttcgcgttttttttttttttttttttattttttttcgcgatttattgttttttcgcgtttaatagaaatgggcgatcgtaagttttattttcgtcggcgttataaaggtatcggtttttgatttttttttgaattaatgtgattcgatttatttttttttta

SEQ ID NO: 39006 - DNA, 910 bp, Artificial Sequence
  chemically treated genomic DNA (Homo sapiens) CpG-island No: 39006
taaaaaaaaaataaatcgaatcacattaattcaaaaaaaaatcaaaaaccgatacctttataacgccgacgaaaataaaacttacgatcgcccatttctattaaacgcgaaaaaacaataaatcgcgaaaaaaaataaaaaaaaaaaaaaaaaaaacgcgaaacaacatacgacgcaaaaaaaaaaacttaaaatcgataaacaaaaaactcgaattacactaaacgaacgaaaaaaaaaaccctctaaatcctacgattaacaaactaaatcgaactaacgtacgatcacaaccaataaaaaaaaaaaaaaaaacacgacgaaaaattataacgtcgtaaattaacgaacacaaaacgaaacgaaacgacaatacgaaactaaaattaatcgaccgcgaaaactaccgcgcaaaaatatccgaaccgccgataaataatcgctaaaactaaaccaacctcttaaaaatccacgcccgccgaacccacgctaactaaaaccgaaataccgacgcgctcgaaactcgtctcaacaatcgctcacgatctttatatcttctcttccgcccctttccctacctaccgcctccgaccgccacgatacccctacgccccgctactaccgccgcgaactaactacgccgactacgcgctacttactacgacgataataacgccccatctactacacgaacctaaaaaaaaaaaaaaaaaaaacgaaacgcgccccccgacccataccgcaaccacgaacccaaacccgccacgacgcccgcgccgccgccctcgccgaaacccacgaaacctacataaacgaacataaacttaaaaacaacaccttccaacgccgccgctaccgccgccgaaattaaacaacgccgcaaccccgaactctaccccccgccgctaaa

SEQ ID NO: 39007 - DNA, 910 bp, Artificial Sequence
  chemically treated genomic DNA (Homo sapiens) CpG-island No: 39007
tggagggaagatgaatcggattatattaatttaaggagaggttaaaggtcggtatttttgtaacgtcggcgagagtaagatttgcggtcgtttatttttgttgggcgcgaggaaatagtaaatcgcggaagggggtagagggggaaggaaagggagcgcgaggtagtatgcggcgtaggagagaggatttggagtcgatggatagggaattcgaattatattgagcgggcgggggagagggttttttgggttttgcgattggtaggttgagtcgggttgacgtgcggttataattaatggggaggaagggagggatacggcgggggattatggcgtcgtggattggcgggtatagggcggggcgggacggtagtgcgggattgagattgatcgatcgcgggggttgtcgcgtagagatattcgggtcgtcggtgggtggtcgttagggttgggttagttttttggaggtttacgttcgtcgagtttacgttggttggggtcggggtgtcggcgcgttcgggattcgttttagtagtcgtttacggtttttgtgttttttttttcgtttttttttttgtttgtcgttttcggtcgttacgatgtttttgcgtttcgttgttgtcgtcgcggattggttgcgtcggttgcgcgttgtttgttgcggcggtggtggcgttttatttgttatacgggtttgaagaaggaagaagaggaagcgaagcgcgtttttcggtttatgtcgtagttacgggtttagattcgttacggcgttcgcgtcgtcgttttcgtcggagtttacgagatttgtatggacgggtatgggtttgagagtagtattttttagcgtcgtcgttgtcgtcgtcgaggttgagtagcgtcgtagtttcgggttttgtttttcgtcgttgga

SEQ ID NO: 39008 - DNA, 910 bp, Artificial Sequence
  chemically treated genomic DNA (Homo sapiens) CpG-island No: 39008
tccaacgacgaaaaacaaaacccgaaactacgacgctactcaacctcgacgacgacaacgacgacgctaaaaaatactactctcaaacccatacccgtccatacaaatctcgtaaactccgacgaaaacgacgacgcgaacgccgtaacgaatctaaacccgtaactacgacataaaccgaaaaacgcgcttcgcttcctcttcttccttcttcaaacccgtataacaaataaaacgccaccaccgccgcaacaaacaacgcgcaaccgacgcaaccaatccgcgacgacaacaacgaaacgcaaaaacatcgtaacgaccgaaaacgacaaacaaaaaaaaaaacgaaaaaaaaaacacaaaaaccgtaaacgactactaaaacgaatcccgaacgcgccgacaccccgaccccaaccaacgtaaactcgacgaacgtaaacctccaaaaaactaacccaaccctaacgaccacccaccgacgacccgaatatctctacgcgacaacccccgcgatcgatcaatctcaatcccgcactaccgtcccgccccgccctatacccgccaatccacgacgccataatcccccgccgtatccctcccttcctccccattaattataaccgcacgtcaacccgactcaacctaccaatcgcaaaacccaaaaaaccctctcccccgcccgctcaatataattcgaattccctatccatcgactccaaatcctctctcctacgccgcatactacctcgcgctccctttccttccccctctacccccttccgcgatttactatttcctcgcgcccaacaaaaataaacgaccgcaaatcttactctcgccgacgttacaaaaataccgacctttaacctctccttaaattaatataatccgattcatcttccctcca

SEQ ID NO: 39009 - DNA, 871 bp, Artificial Sequence
  chemically treated genomic DNA (Homo sapiens) CpG-island No: 39009
gggtcgcgagaaatgaagggtgtggattgggtgggaggaatgcgggtggacgtagggtgggggatgttgaagggtgtcgagggggacgaaataagatggaggaaattgagtgcgttttcggagcggggtttgttttatcgaagtttgatttggcgttttcggggttcggggggtcggggatcgggtgcgggtcgttgaggtatacgagttcggcgcgatttcgtagcgttttttttagcgtttcggtttttttacggaagtttcgttcgttttgtcggaagttcgttaggtataggattcgtaggggtcgttgcgcggttattatgttcggtaaggagcgacggaagttatcggaagcggttttttttcgagcggaagtataatgtacggggcggaatcgaacgttagtatcgtttcgagggcgggtttcggagcgttaaggcgtttttatgataacggtaaaaggcggggcgtatttagagcgggggttgatatttgaggttcgggagcgcgttaaggagttagcggcgttattttttcgtttttgtagttgtagttttcgtaagttacggtcgaagggggacgcgcggattttttttgtatttgaggtcgtagattttggttagggtttcgtttttgcgattttgcgttttttttcgtttcgtttttgtgcgtttttcgtcgcggtcgtagggcggcggttagtgtttaggcgcggtttttttttttttttggaagttttcgtttattttttttcgcgcgggtcggttcggggcgtggggacggcggttttggtcgtggtttatcgtttagggttttaaggagttgttagcgtagaagtttatcgggtagggttgttgttaggaaatgt

SEQ ID NO: 39010 - DNA, 871 bp, Artificial Sequence
  chemically treated genomic DNA (Homo sapiens) CpG-island No: 39010
acatttcctaacaacaaccctacccgataaacttctacgctaacaactccttaaaaccctaaacgataaaccacgaccaaaaccgccgtccccacgccccgaaccgacccgcgcgaaaaaaaataaacgaaaacttccaaaaaaaaaaaaaaaccgcgcctaaacactaaccgccgccctacgaccgcgacgaaaaacgcacaaaaacgaaacgaaaaaaaacgcaaaatcgcaaaaacgaaaccctaaccaaaatctacgacctcaaatacaaaaaaaatccgcgcgtcccccttcgaccgtaacttacgaaaactacaactacaaaaacgaaaaaataacgccgctaactccttaacgcgctcccgaacctcaaatatcaacccccgctctaaatacgccccgccttttaccgttatcataaaaacgccttaacgctccgaaacccgccctcgaaacgatactaacgttcgattccgccccgtacattatacttccgctcgaaaaaaaaccgcttccgataacttccgtcgctccttaccgaacataataaccgcgcaacgacccctacgaatcctatacctaacgaacttccgacaaaacgaacgaaacttccgtaaaaaaaccgaaacgctaaaaaaaacgctacgaaatcgcgccgaactcgtatacctcaacgacccgcacccgatccccgaccccccgaaccccgaaaacgccaaatcaaacttcgataaaacaaaccccgctccgaaaacgcactcaatttcctccatcttatttcgtccccctcgacacccttcaacatcccccaccctacgtccacccgcattcctcccacccaatccacacccttcatttctcgcgaccc

SEQ ID NO: 39011 - DNA, 871 bp, Artificial Sequence
  chemically treated genomic DNA (Homo sapiens) CpG-island No: 39011
atattttttggtagtagttttattcgatggatttttacgttggtagttttttggggttttggacggtgaattacggttaggatcgtcgtttttacgtttcgggtcggttcgcgcgggggaaggtaggcgggggtttttaggagggaggagagatcgcgtttgggtattggtcgtcgttttgcgatcgcgacgggaaacgtataggagcggagcggagggaaacgtagggtcgtaggagcgagattttaattaaagtttgcgattttaggtgtaggaggggttcgcgcgttttttttcggtcgtggtttgcgaggattgtagttgtagggacgagaaggtggcgtcgttggttttttgacgcgttttcgggttttaggtattagttttcgttttgggtgcgtttcgttttttgtcgttgttatgggaacgttttggcgtttcgaggttcgttttcggggcggtgttgacgttcggtttcgtttcgtgtattgtgttttcgttcggggaaagatcgttttcggtggttttcgtcgttttttgtcgggtataatggtcgcgtagcgatttttgcgggttttgtgtttggcgggttttcggtagagcgagcggggttttcgtgagaagatcggggcgttgaggaaggcgttgcggggtcgcgtcgagttcgtgtgttttagcggttcgtattcggttttcgatttttcgggtttcgagggcgttagattagatttcggtgagataagtttcgtttcggaaacgtatttagttttttttattttgtttcgtttttttcgatattttttagtattttttattttgcgtttattcgtattttttttatttagtttatattttttatttttcgcgattt

SEQ ID NO: 39012 - DNA, 871 bp, Artificial Sequence
  chemically treated genomic DNA (Homo sapiens) CpG-island No: 39012
aaatcgcgaaaaataaaaaatataaactaaataaaaaaaatacgaataaacgcaaaataaaaaatactaaaaaatatcgaaaaaaacgaaacaaaataaaaaaaactaaatacgtttccgaaacgaaacttatctcaccgaaatctaatctaacgccctcgaaacccgaaaaatcgaaaaccgaatacgaaccgctaaaacacacgaactcgacgcgaccccgcaacgccttcctcaacgccccgatcttctcacgaaaaccccgctcgctctaccgaaaacccgccaaacacaaaacccgcaaaaatcgctacgcgaccattatacccgacaaaaaacgacgaaaaccaccgaaaacgatctttccccgaacgaaaacacaatacacgaaacgaaaccgaacgtcaacaccgccccgaaaacgaacctcgaaacgccaaaacgttcccataacaacgacaaaaaacgaaacgcacccaaaacgaaaactaatacctaaaacccgaaaacgcgtcaaaaaaccaacgacgccaccttctcgtccctacaactacaatcctcgcaaaccacgaccgaaaaaaaacgcgcgaacccctcctacacctaaaatcgcaaactttaattaaaatctcgctcctacgaccctacgtttccctccgctccgctcctatacgtttcccgtcgcgatcgcaaaacgacgaccaatacccaaacgcgatctctcctccctcctaaaaacccccgcctaccttcccccgcgcgaaccgacccgaaacgtaaaaacgacgatcctaaccgtaattcaccgtccaaaaccccaaaaaactaccaacgtaaaaatccatcgaataaaactactaccaaaaaatat

SEQ ID NO: 39013 - DNA, 554 bp, Artificial Sequence
  chemically treated genomic DNA (Homo sapiens) CpG-island No: 39013
ttagtgcggggaagagtcgtcgagattgggagaaggggcgttggttagggaggagacggggtagggagcggattcgttattcgtattttgggcggcggttttcgcgttttagtcgcgtttttcgatgatttttagtcgcgaagggcgagcgggcgggggttgggttgcgggttcgggttttaggaggtttgcggggtcggggaggggcgtggagtggttcgaggatcggtttggggattgggggtaggtgtttggacggacgcgggtcgagtatttttttcgggggcgggcgtagtgaaaatattttgggaggcggcgtcgcgcggttgagcgttgttgttttgggaataggacggcgttcggtattgcgagttgagagtatttttataaattttgtatgggaggcgtttcgtgagcgggggcggggagcggagcgagagggagggagttagagagtaagggagggagggaggaggagaggagggggaagtcggggggaggaagggaggcgtttcgtttcgtcgatcgttcggttttgtaaacgcgcgtcgggt

SEQ ID NO: 39014 - DNA, 554 bp, Artificial Sequence
  chemically treated genomic DNA (Homo sapiens) CpG-island No: 39014
acccgacgcgcgtttacaaaaccgaacgatcgacgaaacgaaacgcctcccttcctccccccgacttccccctcctctcctcctccctccctcccttactctctaactccctccctctcgctccgctccccgcccccgctcacgaaacgcctcccatacaaaatttataaaaatactctcaactcgcaataccgaacgccgtcctattcccaaaacaacaacgctcaaccgcgcgacgccgcctcccaaaatattttcactacgcccgcccccgaaaaaaatactcgacccgcgtccgtccaaacacctacccccaatccccaaaccgatcctcgaaccactccacgcccctccccgaccccgcaaacctcctaaaacccgaacccgcaacccaacccccgcccgctcgcccttcgcgactaaaaatcatcgaaaaacgcgactaaaacgcgaaaaccgccgcccaaaatacgaataacgaatccgctccctaccccgtctcctccctaaccaacgccccttctcccaatctcgacgactcttccccgcactaa

SEQ ID NO: 39015 - DNA, 554 bp, Artificial Sequence
  chemically treated genomic DNA (Homo sapiens) CpG-island No: 39015
gttcggcgcgcgtttgtaggatcgagcgatcggcggagcggggcgttttttttttttttttcggtttttttttttttttttttttttttttttttttgttttttagttttttttttttcgtttcgtttttcgttttcgtttacggagcgttttttatataaaatttatgaaagtgtttttagttcgtagtgtcgagcgtcgttttatttttaaggtagtagcgtttagtcgcgcggcgtcgttttttaaggtgtttttattgcgttcgttttcggggaagatgttcggttcgcgttcgtttaggtatttgtttttagtttttaagtcggttttcggattattttacgttttttttcggtttcgtaggttttttggagttcgaattcgtagtttagttttcgttcgttcgtttttcgcggttggaggttatcgggagacgcggttgggacgcgaggatcgtcgtttagagtacggatggcgagttcgttttttgtttcgttttttttttggttagcgtttttttttttagtttcgacggttttttttcgtattga

SEQ ID NO: 39016 - DNA, 554 bp, Artificial Sequence
  chemically treated genomic DNA (Homo sapiens) CpG-island No: 39016
tcaatacgaaaaaaaaccgtcgaaactaaaaaaaaaaacgctaaccaaaaaaaaaacgaaacaaaaaacgaactcgccatccgtactctaaacgacgatcctcgcgtcccaaccgcgtctcccgataacctccaaccgcgaaaaacgaacgaacgaaaactaaactacgaattcgaactccaaaaaacctacgaaaccgaaaaaaaacgtaaaataatccgaaaaccgacttaaaaactaaaaacaaatacctaaacgaacgcgaaccgaacatcttccccgaaaacgaacgcaataaaaacaccttaaaaaacgacgccgcgcgactaaacgctactaccttaaaaataaaacgacgctcgacactacgaactaaaaacactttcataaattttatataaaaaacgctccgtaaacgaaaacgaaaaacgaaacgaaaaaaaaaaaactaaaaaacaaaaaaaaaaaaaaaaaaaaaaaaaaaaaaaaaccgaaaaaaaaaaaaaaaacgccccgctccgccgatcgctcgatcctacaaacgcgcgccgaac

SEQ ID NO: 39017 - DNA, 601 bp, Artificial Sequence
  chemically treated genomic DNA (Homo sapiens) CpG-island No: 39017
gtgagtaggattagtttattgtttttgtttatttgttgagcgttgattggttttcgtttaggaaacggaaaaaggggcgtgtacgcgggcgcggttgcgtgagaggcgcgcggcggcgtagtaaatagtttttttttataaaattatggcgtcgtttaaatgtagtatcgtcgtttgcgtgatttgtttggagaagtttaaatatcgttgtttagtttgtcgcgtgttttagtgagcggggaggtcgcggggtttaggggcgcgggtgttcggttatggcgggagggcgggaggtcgggaggtcgggcgggagcgggcgggttgttggaggggtcggggattttcggggttgacgcggtttgtggtttttgttgttatagttgttcggtagtttgttttcggaagtataaaggtgagtttcgttttcgttagttttcgtattattgcgtacggggtagtttttacgtttagttttcgttttgggggcgtggatttttggcgtgcgttttttttttcgtttcgggttttcgcgggttttgtaggaattttgttttttttgatttggtttttggtgtttttgtgtgtcggatagttttttttg

SEQ ID NO: 39018 - DNA, 601 bp, Artificial Sequence
  chemically treated genomic DNA (Homo sapiens) CpG-island No: 39018
caaaaaaaactatccgacacacaaaaacaccaaaaaccaaatcaaaaaaaacaaaattcctacaaaacccgcgaaaacccgaaacgaaaaaaaaaacgcacgccaaaaatccacgcccccaaaacgaaaactaaacgtaaaaactaccccgtacgcaataatacgaaaactaacgaaaacgaaactcacctttatacttccgaaaacaaactaccgaacaactataacaacaaaaaccacaaaccgcgtcaaccccgaaaatccccgacccctccaacaacccgcccgctcccgcccgacctcccgacctcccgccctcccgccataaccgaacacccgcgcccctaaaccccgcgacctccccgctcactaaaacacgcgacaaactaaacaacgatatttaaacttctccaaacaaatcacgcaaacgacgatactacatttaaacgacgccataattttataaaaaaaaactatttactacgccgccgcgcgcctctcacgcaaccgcgcccgcgtacacgcccctttttccgtttcctaaacgaaaaccaatcaacgctcaacaaataaacaaaaacaataaactaatcctactcac

SEQ ID NO: 39019 - DNA, 601 bp, Artificial Sequence
  chemically treated genomic DNA (Homo sapiens) CpG-island No: 39019
tagagggaattgttcgatatatagagatattagggattaagttagaggaagtaaggtttttgtagaattcgcggagattcgaggcgggaaaggaagcgtacgttaagggtttacgtttttaagacggaggttggacgtgggggttgtttcgtgcgtagtggtacgagggttggcggggacggggtttatttttgtgttttcggaagtagattatcgagtagttgtaataatagaggttataggtcgcgttagtttcgagggttttcggtttttttagtagttcgttcgttttcgttcggtttttcggtttttcgttttttcgttatggtcggatattcgcgtttttggatttcgcgattttttcgtttattagggtacgcggtaggttggatagcggtatttgggtttttttaagtagattacgtagacgacggtgttatatttgagcgacgttatggttttgtggaaggagattgtttattgcgtcgtcgcgcgttttttacgtagtcgcgttcgcgtgtacgttttttttttcgttttttaaacggggattaattagcgtttagtaggtaggtaaaagtaatggattgattttgtttat

SEQ ID NO: 39020 - DNA, 601 bp, Artificial Sequence
  chemically treated genomic DNA (Homo sapiens) CpG-island No: 39020
ataaacaaaatcaatccattacttttacctacctactaaacgctaattaatccccgtttaaaaaacgaaaaaaaaaacgtacacgcgaacgcgactacgtaaaaaacgcgcgacgacgcaataaacaatctccttccacaaaaccataacgtcgctcaaatataacaccgtcgtctacgtaatctacttaaaaaaacccaaataccgctatccaacctaccgcgtaccctaataaacgaaaaaatcgcgaaatccaaaaacgcgaatatccgaccataacgaaaaaacgaaaaaccgaaaaaccgaacgaaaacgaacgaactactaaaaaaaccgaaaaccctcgaaactaacgcgacctataacctctattattacaactactcgataatctacttccgaaaacacaaaaataaaccccgtccccgccaaccctcgtaccactacgcacgaaacaacccccacgtccaacctccgtcttaaaaacgtaaacccttaacgtacgcttcctttcccgcctcgaatctccgcgaattctacaaaaaccttacttcctctaacttaatccctaatatctctatatatcgaacaattccctcta

SEQ ID NO: 39021 - DNA, 664 bp, Artificial Sequence
  chemically treated genomic DNA (Homo sapiens) CpG-island No: 39021
tttacggcgaggtttattagggtaatggtgtcgtcggattcgtataatatttcgtcggattcgtataatatttcgtcgtattcgtataagatttcgtcgcggcgatttttattgaaagatttttagttttggtgtcgttcgaaggtttaggaaatcgtgttttcgcgttttttttttagaacgtgggaagttgtcgttttatttttattttattttagggtcgtaaaatattttatcgtagttgaagttagtaagtcggattaggcgtttcggttaagtaacgtgcgcgttttttcgcgagtgttcgtttcgtttttagggaggagtcggtcgattttcggttatttagtagtgtcgtagtcgacggggtgcggttcggcgtttttaggtttttttttttattgtacgtttttgttttttttttttttttttttgttcgtgtttttttcgtcgtttgatttggttcgttcgtttttttagtttggtcgggcggggtttgaagtacggcgttcgggcgtgggatcggtgagtgttaattcgaatttatatttgaagttttttagacgcggaaggggtttgggaggttagtttgtttcgtagcggtgaggaagaagtaggcgtttttatttttttttttaaagcgtcgttttttttttttttgttt

SEQ ID NO: 39022 - DNA, 664 bp, Artificial Sequence
  chemically treated genomic DNA (Homo sapiens) CpG-island No: 39022
aaacaaaaaaaaaaaaaacgacgctttaaaaaaaaaaataaaaacgcctacttcttcctcaccgctacgaaacaaactaacctcccaaaccccttccgcgtctaaaaaacttcaaatataaattcgaattaacactcaccgatcccacgcccgaacgccgtacttcaaaccccgcccgaccaaactaaaaaaacgaacgaaccaaatcaaacgacgaaaaaaacacgaacaaaaaaaaaaaaaaaaaaaacaaaaacgtacaataaaaaaaaaaacctaaaaacgccgaaccgcaccccgtcgactacgacactactaaataaccgaaaatcgaccgactcctccctaaaaacgaaacgaacactcgcgaaaaaacgcgcacgttacttaaccgaaacgcctaatccgacttactaacttcaactacgataaaatattttacgaccctaaaataaaataaaaataaaacgacaacttcccacgttctaaaaaaaaaacgcgaaaacacgatttcctaaaccttcgaacgacaccaaaactaaaaatctttcaataaaaatcgccgcgacgaaatcttatacgaatacgacgaaatattatacgaatccgacgaaatattatacgaatccgacgacaccattaccctaataaacctcgccgtaaa

SEQ ID NO: 39023 - DNA, 664 bp, Artificial Sequence
  chemically treated genomic DNA (Homo sapiens) CpG-island No: 39023
aggtaaaaaggagggaaacggcgttttggaaggggaggtggagacgtttattttttttttatcgttgcggggtaaattggttttttaagtttttttcgcgtttgaagggttttagatataggttcgggttgatatttatcggttttacgttcgagcgtcgtgttttaggtttcgttcggttagattggaaaggcgggcgggttaggttaggcggcgggaagaatacgggtaggagagaaaagaggaggggtaagagcgtgtagtgaggaaaggaatttgggagcgtcgaatcgtatttcgtcggttgcggtattgttaagtggtcgggggtcggtcggtttttttttaggggcggggcgagtattcgcgggggggcgcgtacgttgtttggtcgggacgtttggttcggtttgttggttttaattacggtgagatgttttgcgattttggggtaaaatgagggtaaagcggtagttttttacgttttgggggagaagcgcggaagtacggttttttgggttttcgggcgatattaggattgggggttttttagtagaggtcgtcgcggcggagttttgtgcgagtgcggcggagtgttgtgcgagttcggcggagtgttgtgcgagttcggcgatattattattttgataggtttcgtcgtgag

SEQ ID NO: 39024 - DNA, 664 bp, Artificial Sequence
  chemically treated genomic DNA (Homo sapiens) CpG-island No: 39024
ctcacgacgaaacctatcaaaataataatatcgccgaactcgcacaacactccgccgaactcgcacaacactccgccgcactcgcacaaaactccgccgcgacgacctctactaaaaaacccccaatcctaatatcgcccgaaaacccaaaaaaccgtacttccgcgcttctcccccaaaacgtaaaaaactaccgctttaccctcattttaccccaaaatcgcaaaacatctcaccgtaattaaaaccaacaaaccgaaccaaacgtcccgaccaaacaacgtacgcgcccccccgcgaatactcgccccgcccctaaaaaaaaaccgaccgacccccgaccacttaacaataccgcaaccgacgaaatacgattcgacgctcccaaattcctttcctcactacacgctcttacccctcctcttttctctcctacccgtattcttcccgccgcctaacctaacccgcccgcctttccaatctaaccgaacgaaacctaaaacacgacgctcgaacgtaaaaccgataaatatcaacccgaacctatatctaaaacccttcaaacgcgaaaaaaacttaaaaaaccaatttaccccgcaacgataaaaaaaaaataaacgtctccacctccccttccaaaacgccgtttccctcctttttacct

SEQ ID NO: 39025 - DNA, 629 bp, Artificial Sequence
  chemically treated genomic DNA (Homo sapiens) CpG-island No: 39025
ttgacgtcgaggggtttgtttttcgttcgtggggaagttttttcggttcgcggttggggttgaggttgggcgattattttttttattagttttagttcgggtttagcgaatggttgggtttcgagaaggcgtcggttacgggcgggacgtttagggcgatttcgtatattttgggcgtaaatttttttagcgggtttttagcgcggttagttttagtttcgcgagaggacgtgggtttcgttcggcgttcgatttcgttcggttttatttttttttcgtttttcgtttttttttttttatttttcgcggcgcgagcggttgattgttcgtagaggaaacgatattcggagttgcgttttcgtttaggtcggttttgacgcgggtttcgttagttagtaatagggagtagaggtgggagttagcgaggcgattacgaaaacggtgaaggtcggaatcgatagtttttttcgagaagggtgaggaaagggtttgagttttttcgttttttggatttcgtagagtcgttgcggggtcgattttttttaggggcggggtcgcgttgggtaattgtagttttggggtcgattgggcggggtgcgtttagaagcggggagaaggggttagttggg

SEQ ID NO: 39026 - DNA, 629 bp, Artificial Sequence
  chemically treated genomic DNA (Homo sapiens) CpG-island No: 39026
cccaactaaccccttctccccgcttctaaacgcaccccgcccaatcgaccccaaaactacaattacccaacgcgaccccgcccctaaaaaaaatcgaccccgcaacgactctacgaaatccaaaaaacgaaaaaactcaaaccctttcctcacccttctcgaaaaaaactatcgattccgaccttcaccgttttcgtaatcgcctcgctaactcccacctctactccctattactaactaacgaaacccgcgtcaaaaccgacctaaacgaaaacgcaactccgaatatcgtttcctctacgaacaatcaaccgctcgcgccgcgaaaaataaaaaaaaaaaaacgaaaaacgaaaaaaaaataaaaccgaacgaaatcgaacgccgaacgaaacccacgtcctctcgcgaaactaaaactaaccgcgctaaaaacccgctaaaaaaatttacgcccaaaatatacgaaatcgccctaaacgtcccgcccgtaaccgacgccttctcgaaacccaaccattcgctaaacccgaactaaaactaataaaaaaaataatcgcccaacctcaaccccaaccgcgaaccgaaaaaacttccccacgaacgaaaaacaaacccctcgacgtcaa

SEQ ID NO: 39027 - DNA, 629 bp, Artificial Sequence
  chemically treated genomic DNA (Homo sapiens) CpG-island No: 39027
tttaattgatttttttttttcgtttttgggcgtatttcgtttagtcggttttaggattgtagttgtttagcgcgatttcgtttttgggagggatcgatttcgtagcggttttgcggagtttagggaacggggaggtttagattttttttttatttttttcggaggaggttgtcggtttcgatttttatcgttttcgtggtcgtttcgttaatttttatttttgttttttgttattggttgacgaggttcgcgttagggtcggtttgggcgggagcgtagtttcgaatgtcgttttttttacgggtagttagtcgttcgcgtcgcggggagtggaagaaggagggcgggggacgaggggaaggtggggtcgggcggggtcgggcgtcgggcgggatttacgttttttcgcgagattggggttggtcgcgttggggattcgttggagaaatttgcgtttagagtgtgcggggtcgttttggacgtttcgttcgtggtcggcgttttttcggagtttagttattcgttagattcgaattaggattggtaggaggggtgatcgtttaattttagttttagtcgcgggtcgggaaggtttttttacggacgaagggtaagtttttcgacgttag

SEQ ID NO: 39028 - DNA, 629 bp, Artificial Sequence
  chemically treated genomic DNA (Homo sapiens) CpG-island No: 39028
ctaacgtcgaaaaacttacccttcgtccgtaaaaaaaccttcccgacccgcgactaaaactaaaattaaacgatcacccctcctaccaatcctaattcgaatctaacgaataactaaactccgaaaaaacgccgaccacgaacgaaacgtccaaaacgaccccgcacactctaaacgcaaatttctccaacgaatccccaacgcgaccaaccccaatctcgcgaaaaaacgtaaatcccgcccgacgcccgaccccgcccgaccccaccttcccctcgtcccccgccctccttcttccactccccgcgacgcgaacgactaactacccgtaaaaaaaacgacattcgaaactacgctcccgcccaaaccgaccctaacgcgaacctcgtcaaccaataacaaaaaacaaaaataaaaattaacgaaacgaccacgaaaacgataaaaatcgaaaccgacaacctcctccgaaaaaaataaaaaaaaaatctaaacctccccgttccctaaactccgcaaaaccgctacgaaatcgatccctcccaaaaacgaaatcgcgctaaacaactacaatcctaaaaccgactaaacgaaatacgcccaaaaacgaaaaaaaaaaatcaattaaa

SEQ ID NO: 39029 - DNA, 613 bp, Artificial Sequence
  chemically treated genomic DNA (Homo sapiens) CpG-island No: 39029
ttttttttcgggttcggcgttttcgttttttttgtgcgcgcgtggaggtcggggcggggcggggcggggggtcggtcgtagtcggcgttgagtttgtagggtcgttttttttattcgtttttttcgagttttcgggtttcgttttattcggttcgtgggggagtatttgttttgtcgttttcgtttacgttttgtatttcgggatcgtttttgcgcgttttgggcgtattatggttcgcggggttgcgttggcgttgttgtttttcggtttgttgggtgttttggtcgtcgtttcgggtgagcgagcggagggattcgggttgggggacgcggagggcgcgggtcgggattggggattcgtttgagatgcggcgttgggggcgtttcgcggggatattcggagttttttttttgttcggtaggacgcgttgtgtttacgggggtttaggttcggaggaggcgtttattttttttttaacgttttttttggagtcgttttagagagaaaagttagcgtttgttgtcggagttgtaaatttttatatgtggggcggttttgggagaggtgcgttcgattttttttaatttaggggatttttttatagattttttt

SEQ ID NO: 39030 - DNA, 613 bp, Artificial Sequence
  chemically treated genomic DNA (Homo sapiens) CpG-island No: 39030
aaaaaaatctataaaaaaatcccctaaattaaaaaaaatcgaacgcacctctcccaaaaccgccccacatataaaaatttacaactccgacaacaaacgctaacttttctctctaaaacgactccaaaaaaaacgttaaaaaaaaaataaacgcctcctccgaacctaaacccccgtaaacacaacgcgtcctaccgaacaaaaaaaaaactccgaatatccccgcgaaacgcccccaacgccgcatctcaaacgaatccccaatcccgacccgcgccctccgcgtcccccaacccgaatccctccgctcgctcacccgaaacgacgaccaaaacacccaacaaaccgaaaaacaacaacgccaacgcaaccccgcgaaccataatacgcccaaaacgcgcaaaaacgatcccgaaatacaaaacgtaaacgaaaacgacaaaacaaatactcccccacgaaccgaataaaacgaaacccgaaaactcgaaaaaaacgaataaaaaaaacgaccctacaaactcaacgccgactacgaccgaccccccgccccgccccgccccgacctccacgcgcgcacaaaaaaaacgaaaacgccgaacccgaaaaaaaa

SEQ ID NO: 39031 - DNA, 613 bp, Artificial Sequence
  chemically treated genomic DNA (Homo sapiens) CpG-island No: 39031
agagagatttgtaagaaggttttttagattgggaagaatcggacgtattttttttaaggtcgttttatatgtaagagtttgtaatttcgataataaacgttgatttttttttttggaacggttttaggaaaagcgttggggagaaagtgggcgtttttttcgggtttgggttttcgtgggtatagcgcgttttgtcgggtagggaggaggtttcgggtgttttcgcggggcgtttttaacgtcgtattttaagcggatttttagtttcggttcgcgtttttcgcgttttttaattcggattttttcgttcgtttattcggggcggcgattagaatatttagtaggtcgaagagtagtagcgttagcgtagtttcgcgggttatggtgcgtttagagcgcgtagggacggtttcggagtgtagggcgtgggcgaaggcggtaggatagatatttttttacgggtcgggtggggcgaagttcggggattcgaagggggcgggtgaggggagcggttttgtaagtttagcgtcggttgcgatcggtttttcgtttcgtttcgtttcggtttttacgcgcgtatagaaggggcgggaacgtcgggttcggggaggag

SEQ ID NO: 39032 - DNA, 613 bp, Artificial Sequence
  chemically treated genomic DNA (Homo sapiens) CpG-island No: 39032
ctcctccccgaacccgacgttcccgccccttctatacgcgcgtaaaaaccgaaacgaaacgaaacgaaaaaccgatcgcaaccgacgctaaacttacaaaaccgctcccctcacccgcccccttcgaatccccgaacttcgccccacccgacccgtaaaaaaatatctatcctaccgccttcgcccacgccctacactccgaaaccgtccctacgcgctctaaacgcaccataacccgcgaaactacgctaacgctactactcttcgacctactaaatattctaatcgccgccccgaataaacgaacgaaaaaatccgaattaaaaaacgcgaaaaacgcgaaccgaaactaaaaatccgcttaaaatacgacgttaaaaacgccccgcgaaaacacccgaaacctcctccctacccgacaaaacgcgctatacccacgaaaacccaaacccgaaaaaaacgcccactttctccccaacgcttttcctaaaaccgttccaaaaaaaaaaatcaacgtttattatcgaaattacaaactcttacatataaaacgaccttaaaaaaaatacgtccgattcttcccaatctaaaaaaccttcttacaaatctctct

SEQ ID NO: 39033 - DNA, 722 bp, Artificial Sequence
  chemically treated genomic DNA (Homo sapiens) CpG-island No: 39033
cgcgcgtagtcgtttgtattcgagcgcgtcggttttcgagtagttattattgttattatcgtcgtcgtcgagtagttatttaggtagcgtttgtttcgggtacggagtattgcggatgcgggcgcggggtcggcgcggggtttcgggcgcgttcgggggtcgtgagcgtcgcgtttcgcgttttcgcgcgtttttcgttttttcgcgcgtttcgttggggttatgtagttttttatttcgtcggtgattaaggcgattttggtggttttttttattttcgttattttttttattttttacgtgattttttggtatatttgtcgcgatgtggattgtgattacggtatttgagcgtcgcggattttcggggtcgttaggcggggggcgtttttagcgttagggttatggggattgagtcgtttcgcggtgttttttagttcggcgttcgcgttttttatttcgggttttatcgttcgttttgtatttttatcgttttttggttttgatttttagggacgtatcggggagagcgggtgagtgcgttcgtgcgggcgttttggggggttacggttggggagttttaatttcggggaggacgcggaattcggacgcgggattgaattcgaggatttacggagttcggggtttttttatggggtacgggaagcggtagatgcgcgtgtagagaggtgggcgtaggttttttttgtattttttttagg

SEQ ID NO: 39034 - DNA, 722 bp, Artificial Sequence
  chemically treated genomic DNA (Homo sapiens) CpG-island No: 39034
cctaaaaaaaatacaaaaaaaacctacgcccacctctctacacgcgcatctaccgcttcccgtaccccataaaaaaaccccgaactccgtaaatcctcgaattcaatcccgcgtccgaattccgcgtcctccccgaaattaaaactccccaaccgtaaccccccaaaacgcccgcacgaacgcactcacccgctctccccgatacgtccctaaaaatcaaaaccaaaaaacgataaaaatacaaaacgaacgataaaacccgaaataaaaaacgcgaacgccgaactaaaaaacaccgcgaaacgactcaatccccataaccctaacgctaaaaacgccccccgcctaacgaccccgaaaatccgcgacgctcaaataccgtaatcacaatccacatcgcgacaaatataccaaaaaatcacgtaaaaaataaaaaaaataacgaaaataaaaaaaaccaccaaaatcgccttaatcaccgacgaaataaaaaactacataaccccaacgaaacgcgcgaaaaaacgaaaaacgcgcgaaaacgcgaaacgcgacgctcacgacccccgaacgcgcccgaaaccccgcgccgaccccgcgcccgcatccgcaatactccgtacccgaaacaaacgctacctaaataactactcgacgacgacgataataacaataataactactcgaaaaccgacgcgctcgaatacaaacgactacgcgcg

SEQ ID NO: 39035 - DNA, 722 bp, Artificial Sequence
  chemically treated genomic DNA (Homo sapiens) CpG-island No: 39035
tttggagggggtatagggggggtttgcgtttatttttttgtacgcgtatttgtcgtttttcgtgttttataggggagtttcgggtttcgtgaattttcgggtttagtttcgcgttcggatttcgcgtttttttcgaagttggggttttttaatcgtggttttttaaagcgttcgtacgagcgtatttattcgtttttttcggtgcgtttttgaaggttaaggttaggaggcggtggaggtgtagggcgggcggtggggttcggagtagggggcgcgggcgtcgagttggggggtatcgcgggacggtttagtttttatggttttggcgttgggggcgtttttcgtttggcgatttcgggggttcgcggcgtttagatgtcgtggttatagtttatatcgcggtagatgtattagaggattacgtagaggatgaggaggatggcgaagatgaagagggttattaggatcgttttggttatcggcgagatgagagattgtatggttttagcggggcgcgcgggagggcggggggcgcgcgggggcgcggggcgcggcgtttacgattttcgagcgcgttcggagtttcgcgtcggtttcgcgttcgtattcgtaatgtttcgtgttcgggatagacgttgtttgggtggttgttcggcggcggcggtggtggtagtggtggttgttcggaggtcggcgcgttcgggtgtaggcggttgcgcgcg

SEQ ID NO: 39036 - DNA, 722 bp, Artificial Sequence
  chemically treated genomic DNA (Homo sapiens) CpG-island No: 39036
cgcgcgcaaccgcctacacccgaacgcgccgacctccgaacaaccaccactaccaccaccgccgccgccgaacaaccacccaaacaacgtctatcccgaacacgaaacattacgaatacgaacgcgaaaccgacgcgaaactccgaacgcgctcgaaaatcgtaaacgccgcgccccgcgcccccgcgcgccccccgccctcccgcgcgccccgctaaaaccatacaatctctcatctcgccgataaccaaaacgatcctaataaccctcttcatcttcgccatcctcctcatcctctacgtaatcctctaatacatctaccgcgatataaactataaccacgacatctaaacgccgcgaacccccgaaatcgccaaacgaaaaacgcccccaacgccaaaaccataaaaactaaaccgtcccgcgataccccccaactcgacgcccgcgccccctactccgaaccccaccgcccgccctacacctccaccgcctcctaaccttaaccttcaaaaacgcaccgaaaaaaacgaataaatacgctcgtacgaacgctttaaaaaaccacgattaaaaaaccccaacttcgaaaaaaacgcgaaatccgaacgcgaaactaaacccgaaaattcacgaaacccgaaactcccctataaaacacgaaaaacgacaaatacgcgtacaaaaaaataaacgcaaaccccccctataccccctccaaa

SEQ ID NO: 39037 - DNA, 602 bp, Artificial Sequence
  chemically treated genomic DNA (Homo sapiens) CpG-island No: 39037
cgttacgcggttacgtatattgtcgcgggagtttacgtatattgacgtgggaggttacgtatattgtcgtcgggaggttacgtatattaacgtgggaggttacgtatattgtcgcgggagtttacgtatattgacgtgggaggttacgtatattgtcgcgggaggtcgcgtttattgtcgtcgggaggtcgcgtttattgttgtcgggaggtcgcgtttattgtcgtcgggaggtcgcgtatattgtcgttgttgtgtgggtttgtgttgaaggtaaagggtcgggaggtcgcgtatattgtcgttgttgttcgggtttgtgttgaaggtaaagggtcgggaggtcgcgtatattgtcgttgttgttcgggtttgtgttgaaggtaaagggtcgggaggtcgcgtatattgtcgttgttgttcgggtttgtgttgaaggtaaagggtcgggaggtcgcgtatattgtcgttgttgttcgggtttgtgttgaaggtaaaggtcgggaggtcgcgtatattgtcgttgttgtttgggtttgtgttgaaggtaaggaatattcgtgtttatttttaaatttaggtttacgtgttttttttaggtt

SEQ ID NO: 39038 - DNA, 602 bp, Artificial Sequence
  chemically treated genomic DNA (Homo sapiens) CpG-island No: 39038
aacctaaaaaaaacacgtaaacctaaatttaaaaataaacacgaatattccttaccttcaacacaaacccaaacaacaacgacaatatacgcgacctcccgacctttaccttcaacacaaacccgaacaacaacgacaatatacgcgacctcccgaccctttaccttcaacacaaacccgaacaacaacgacaatatacgcgacctcccgaccctttaccttcaacacaaacccgaacaacaacgacaatatacgcgacctcccgaccctttaccttcaacacaaacccgaacaacaacgacaatatacgcgacctcccgaccctttaccttcaacacaaacccacacaacaacgacaatatacgcgacctcccgacgacaataaacgcgacctcccgacaacaataaacgcgacctcccgacgacaataaacgcgacctcccgcgacaatatacgtaacctcccacgtcaatatacgtaaactcccgcgacaatatacgtaacctcccacgttaatatacgtaacctcccgacgacaatatacgtaacctcccacgtcaatatacgtaaactcccgcgacaatatacgtaaccgcgtaacg

SEQ ID NO: 39039 - DNA, 602 bp, Artificial Sequence
  chemically treated genomic DNA (Homo sapiens) CpG-island No: 39039
aatttggggagaatacgtaaatttaagtttgaaaatgagtacggatgttttttatttttaatataaatttagataatagcggtagtgtgcgcggtttttcggtttttatttttaatataaattcggataatagcggtagtgtgcgcggtttttcggttttttatttttaatataaattcggataatagcggtagtgtgcgcggtttttcggttttttatttttaatataaattcggataatagcggtagtgtgcgcggtttttcggttttttatttttaatataaattcggataatagcggtagtgtgcgcggtttttcggttttttatttttaatataaatttatataatagcggtagtgtgcgcggtttttcggcggtagtgggcgcgatttttcggtagtagtgggcgcgatttttcggcggtagtgggcgcgatttttcgcggtagtgtgcgtgattttttacgttagtgtgcgtgaattttcgcggtagtgtgcgtgattttttacgttagtgtgcgtgatttttcggcggtagtgtgcgtgattttttacgttagtgtgcgtgaattttcgcggtagtgtgcgtgatcgcgtggcg

SEQ ID NO: 39040 - DNA, 602 bp, Artificial Sequence
  chemically treated genomic DNA (Homo sapiens) CpG-island No: 39040
cgccacgcgatcacgcacactaccgcgaaaattcacgcacactaacgtaaaaaatcacgcacactaccgccgaaaaatcacgcacactaacgtaaaaaatcacgcacactaccgcgaaaattcacgcacactaacgtaaaaaatcacgcacactaccgcgaaaaatcgcgcccactaccgccgaaaaatcgcgcccactactaccgaaaaatcgcgcccactaccgccgaaaaaccgcgcacactaccgctattatataaatttatattaaaaataaaaaaccgaaaaaccgcgcacactaccgctattatccgaatttatattaaaaataaaaaaccgaaaaaccgcgcacactaccgctattatccgaatttatattaaaaataaaaaaccgaaaaaccgcgcacactaccgctattatccgaatttatattaaaaataaaaaaccgaaaaaccgcgcacactaccgctattatccgaatttatattaaaaataaaaaccgaaaaaccgcgcacactaccgctattatctaaatttatattaaaaataaaaaacatccgtactcattttcaaacttaaatttacgtattctccccaaatt

SEQ ID NO: 39041 - DNA, 553 bp, Artificial Sequence
  chemically treated genomic DNA (Homo sapiens) CpG-island No: 39041
  unsure (328)
aggttttgcgggtacggggcggtatcgcgggtgcgcggttttatcgcgtaacgagagttgatacggtttttttttacgtatcgatattttttcgtttttttcgtatttgtttttgggcgtggtttcgttttttttttcgtcgtttttcgtggatttttattacgggattcgttttcggttgtttggtggtcgtcgttttttttcgatttttatatatttatttttttaattatattcggtttacgaattcgggttgttcgatcgggatttttttttcgtttatacgtttcgtttttttttattttttaaatttttattcgatcgggtntcgttggttttcgtatcgtatttacgatgtttcgtttttcgtttttttaatatttttcgttttttttttttcgtatatttttttagcgcgattttttttttttttttcgtttcgattatttttttttttataacggtttttttttttttttattcgatgttgtattttttttcgtttatcgtatttttatttttttatttttatacgtaattgtttaataaattt

SEQ ID NO: 39042 - DNA, 553 bp, Artificial Sequence
  chemically treated genomic DNA (Homo sapiens) CpG-island No: 39042
  unsure (226)
aaatttattaaacaattacgtataaaaataaaaaaataaaaatacgataaacgaaaaaaaatacaacatcgaataaaaaaaaaaaaaaaccgttataaaaaaaaaaataatcgaaacgaaaaaaaaaaaaaaaatcgcgctaaaaaaatatacgaaaaaaaaaaaacgaaaaatattaaaaaaacgaaaaacgaaacatcgtaaatacgatacgaaaaccaacganacccgatcgaataaaaatttaaaaaataaaaaaaaacgaaacgtataaacgaaaaaaaaatcccgatcgaacaacccgaattcgtaaaccgaatataattaaaaaaataaatatataaaaatcgaaaaaaaacgacgaccaccaaacaaccgaaaacgaatcccgtaataaaaatccacgaaaaacgacgaaaaaaaaaacgaaaccacgcccaaaaacaaatacgaaaaaaacgaaaaaatatcgatacgtaaaaaaaaaccgtatcaactctcgttacgcgataaaaccgcgcacccgcgataccgccccgtacccgcaaaacct

SEQ ID NO: 39043 - DNA, 553 bp, Artificial Sequence
  chemically treated genomic DNA (Homo sapiens) CpG-island No: 39043
  unsure (226)
gaatttattgggtaattgcgtataaaaataaaagggtgggagtacggtgggcgggagagggtgtaatatcgggtgggagagggaaaaaatcgttgtgggggggggggtaatcggggcgggggggggggggggaatcgcgttggaaaaatgtgcggggggaaaagggcggagggtgttgagaaggcggggggcggggtatcgtgggtgcggtacgggggttaacganattcgatcgaataagaatttagggggtggggggggacggagcgtgtggacgggggggaaatttcggtcgggtaattcgggttcgtgggtcggatgtgattgaagaaatgggtgtatgggaatcgggaggagacggcggttattaggtagtcgggggcgaatttcgtggtgagggtttacgaggggcggcggggggaagggcggggttacgtttagagataaatgcggggaaaacgggggggtatcggtgcgtaaggggaaatcgtgttagttttcgttgcgcggtaaaatcgcgtattcgcggtgtcgtttcgtattcgtagagttt

SEQ ID NO: 39044 - DNA, 553 bp, Artificial Sequence
  chemically treated genomic DNA (Homo sapiens) CpG-island No: 39044
  unsure (328)
aaactctacgaatacgaaacgacaccgcgaatacgcgattttaccgcgcaacgaaaactaacacgatttccccttacgcaccgatacccccccgttttccccgcatttatctctaaacgtaaccccgcccttccccccgccgcccctcgtaaaccctcaccacgaaattcgcccccgactacctaataaccgccgtctcctcccgattcccatacacccatttcttcaatcacatccgacccacgaacccgaattacccgaccgaaatttcccccccgtccacacgctccgtccccccccaccccctaaattcttattcgatcgaatntcgttaacccccgtaccgcacccacgataccccgccccccgccttctcaacaccctccgcccttttccccccgcacatttttccaacgcgattcccccccccccccccgccccgattacccccccccccacaacgattttttccctctcccacccgatattacaccctctcccgcccaccgtactcccacccttttatttttatacgcaattacccaataaattc

SEQ ID NO: 39045 - DNA, 657 bp, Artificial Sequence
  chemically treated genomic DNA (Homo sapiens) CpG-island No: 39045
taaaggtgaagtagtcggcgaagggtgcgcggtgggcgcggagtcgggtcgggttcggtttttcggaggcgcgttttagggcgtgtaggagtttatcgtaggttcgcgttattaggtcgggttcgggcggtcgtggttttgttagtagtagtattaggtttagacgtagcggggtattagcgagaaggtggcgcgtagtcgtttagatcgtcgtttttgcgtattacgcggtagttcgttgcgcgtggaatttttacggcgtgttcgtttcgttggcgaagtaggcgttcgggtaggttagtagcggcgttagtagcgttttggtcgcgtcgggtcgtaggagtcgtcggggttcgtcgtttaggagcgttacggttagtttggttaggtcggcggcggtagagtatatttggttcgacggtcggtattagtttaggttatagagtggcgtcggtcgttcgttgtcgtagaagttcgcggttaggcgcgcgcgtacgtcgggcgtgaggttaaagttcgtgtttgttatttttagcggttttagtacgtttttcgagatttagcgttggtagtcgttttgggcggtgtgagttgttaggacgtgggttaggagcgagaaggttagcgtgttgtaatggtatttggaaggagagtagt

SEQ ID NO: 39046 - DNA, 657 bp, Artificial Sequence
  chemically treated genomic DNA (Homo sapiens) CpG-island No: 39046
actactctccttccaaataccattacaacacgctaaccttctcgctcctaacccacgtcctaacaactcacaccgcccaaaacgactaccaacgctaaatctcgaaaaacgtactaaaaccgctaaaaataacaaacacgaactttaacctcacgcccgacgtacgcgcgcgcctaaccgcgaacttctacgacaacgaacgaccgacgccactctataacctaaactaataccgaccgtcgaaccaaatatactctaccgccgccgacctaaccaaactaaccgtaacgctcctaaacgacgaaccccgacgactcctacgacccgacgcgaccaaaacgctactaacgccgctactaacctacccgaacgcctacttcgccaacgaaacgaacacgccgtaaaaattccacgcgcaacgaactaccgcgtaatacgcaaaaacgacgatctaaacgactacgcgccaccttctcgctaataccccgctacgtctaaacctaatactactactaacaaaaccacgaccgcccgaacccgacctaataacgcgaacctacgataaactcctacacgccctaaaacgcgcctccgaaaaaccgaacccgacccgactccgcgcccaccgcgcacccttcgccgactacttcaccttta

SEQ ID NO: 39047 - DNA, 657 bp, Artificial Sequence
  chemically treated genomic DNA (Homo sapiens) CpG-island No: 39047
attgttttttttttagatgttattatagtacgttggttttttcgtttttggtttacgttttggtagtttatatcgtttagggcgattattagcgttgggtttcggagaacgtgttggagtcgttggggatggtagatacgggttttgattttacgttcgacgtgcgcgcgcgtttggtcgcgggtttttacggtagcgggcggtcggcgttattttatgatttgggttggtatcggtcgtcgggttagatgtattttatcgtcgtcgatttggttaagttggtcgtggcgtttttgggcggcgggtttcggcggtttttgcggttcgacgcggttaagacgttgttggcgtcgttgttggtttgttcgggcgtttatttcgttaacgagacgggtacgtcgtgggagttttacgcgtagcgggttatcgcgtggtgcgtaaggacggcgatttggacggttacgcgttattttttcgttggtgtttcgttgcgtttgggtttggtgttgttgttggtagggttacggtcgttcgggttcgatttggtggcgcgggtttacgatgagtttttgtacgttttggagcgcgttttcgggaggtcgagttcggttcggtttcgcgtttatcgcgtatttttcgtcggttattttatttttg

SEQ ID NO: 39048 - DNA, 657 bp, Artificial Sequence
  chemically treated genomic DNA (Homo sapiens) CpG-island No: 39048
caaaaataaaataaccgacgaaaaatacgcgataaacgcgaaaccgaaccgaactcgacctcccgaaaacgcgctccaaaacgtacaaaaactcatcgtaaacccgcgccaccaaatcgaacccgaacgaccgtaaccctaccaacaacaacaccaaacccaaacgcaacgaaacaccaacgaaaaaataacgcgtaaccgtccaaatcgccgtccttacgcaccacgcgataacccgctacgcgtaaaactcccacgacgtacccgtctcgttaacgaaataaacgcccgaacaaaccaacaacgacgccaacaacgtcttaaccgcgtcgaaccgcaaaaaccgccgaaacccgccgcccaaaaacgccacgaccaacttaaccaaatcgacgacgataaaatacatctaacccgacgaccgataccaacccaaatcataaaataacgccgaccgcccgctaccgtaaaaacccgcgaccaaacgcgcgcgcacgtcgaacgtaaaatcaaaacccgtatctaccatccccaacgactccaacacgttctccgaaacccaacgctaataatcgccctaaacgatataaactaccaaaacgtaaaccaaaaacgaaaaaaccaacgtactataataacatctaaaaaaaaaacaat

SEQ ID NO: 39049 - DNA, 545 bp, Artificial Sequence
  chemically treated genomic DNA (Homo sapiens) CpG-island No: 39049
  unsure (336)
gacgacgttattcgtgtcgttcgttcgttttttttttttttgttttttttttttttcgttttttacgttttttttttttcgcgtttttcgtgtttttttttttcgtttttcgttgtcgcgtttttgtttttttcgttttgttttattttcgtttttttttttttttcgttcgtttttttgtttttttatttattttttttagtattgttcggttatttcgtcgattgttcgtcgcgttttttgttttttttcgtttttttttttcgtattttttttcggtttttgttttcgttcgcggtttttttttttttttttttttttttttttttgtgtttnttgtttgtcgcggttacgtttttttttttcgtcgtttgtgtttgcgttcgttcggtttcgtttcggttgtcgtgggtattttttatttttcgttgttcgtttttttaacggtaggcgttgacgcgtagattcgcgcgtttttgtttcgttttagtagttgcgtacgttgttacgtattgtttgttgttcgttcgtcgtttcgcgaattt

SEQ ID NO: 39050 - DNA, 545 bp, Artificial Sequence
  chemically treated genomic DNA (Homo sapiens) CpG-island No: 39050
  unsure (210)
aaattcgcgaaacgacgaacgaacaacaaacaatacgtaacaacgtacgcaactactaaaacgaaacaaaaacgcgcgaatctacgcgtcaacgcctaccgttaaaaaaacgaacaacgaaaaataaaaaatacccacgacaaccgaaacgaaaccgaacgaacgcaaacacaaacgacgaaaaaaaaaaacgtaaccgcgacaaacaanaaacacaaaaaaaaaaaaaaaaaaaaaaaaaaaaaaaccgcgaacgaaaacaaaaaccgaaaaaaaatacgaaaaaaaaaaacgaaaaaaaacaaaaaacgcgacgaacaatcgacgaaataaccgaacaatactaaaaaaaataaataaaaaaacaaaaaaacgaacgaaaaaaaaaaaaaaacgaaaataaaacaaaacgaaaaaaacaaaaacgcgacaacgaaaaacgaaaaaaaaaaacacgaaaaacgcgaaaaaaaaaaaacgtaaaaaacgaaaaaaaaaaaaaacaaaaaaaaaaaaaacgaacgaacgacacgaataacgtcgtc

SEQ ID NO: 39051 - DNA, 545 bp, Artificial Sequence
  chemically treated genomic DNA (Homo sapiens) CpG-island No: 39051
  unsure (210)
agattcgcggggcgacgaacggataataggtaatacgtggtagcgtgcgtagttattaagacggggtaggagcgcgcggatttgcgcgttaacgtttatcgttgaagggacgagtagcggggagtggggggtgtttacgatagtcggagcggggtcgggcgagcgtaaatataaacggcggggagagggggcgtgatcgcggtaaataanagatataaaaggagggagggggggggggggaagagaatcgcgaacgagggtaggggtcgagagagggtacgaaaagaggaggcgaaggaaagtaggaggcgcggcgaatagtcggcgaggtggtcgggtaatgttggagaagataaatgaaagaataggagggcggacggaaaggaagggggagcgggggtggagtagggcggaggagataagggcgcgataacgaggagcggagaggagagatacgaggggcgcggggagagagggacgtggagagcgaaggagggggagaataaggggaggggggacgggcgagcggtacggatggcgtcgtt

SEQ ID NO: 39052 - DNA, 545 bp, Artificial Sequence
  chemically treated genomic DNA (Homo sapiens) CpG-island No: 39052
  unsure (336)
aacgacgccatccgtaccgctcgcccgtcccccctccccttattctccccctccttcgctctccacgtccctctctccccgcgcccctcgtatctctcctctccgctcctcgttatcgcgcccttatctcctccgccctactccacccccgctcccccttcctttccgtccgccctcctattctttcatttatcttctccaacattacccgaccacctcgccgactattcgccgcgcctcctactttccttcgcctcctcttttcgtaccctctctcgacccctaccctcgttcgcgattctcttccccccccccccctccctccttttatatctnttatttaccgcgatcacgccccctctccccgccgtttatatttacgctcgcccgaccccgctccgactatcgtaaacaccccccactccccgctactcgtcccttcaacgataaacgttaacgcgcaaatccgcgcgctcctaccccgtcttaataactacgcacgctaccacgtattacctattatccgttcgtcgccccgcgaatct

SEQ ID NO: 39053 - DNA, 692 bp, Artificial Sequence
  chemically treated genomic DNA (Homo sapiens) CpG-island No: 39053
cgatagagcgagcggtttttacggtcgtcggcggttcggcggttcgagatgttatttgggaagaaggcggtagtcgcggcggcggcggttgtagcggtagtaatcgggacggaggttggttttgggatagtaggcggtttcgagaacgggtttgaggtggtcgcgtagttcgcgggtttgtcgggtttagtcgaggtcgggtcgggggcggtgggggagcgtatatttcgtaagaaagagttttcgcgggtttcgtttttcgggggtttggcggaatcgtcggggttcgtagggttttaggtcggttttattgtcgtgtttgggtttgcgatttttatggaaattggaatagtagagatttcggaggggcgtcggattagtcggcgtaagcgggcgaaggtaaggttcgattttttttttaaacgatatcgtttggtgtcgagttttttcgaggttttttcgttttttttcgtcgtcgtcgggttttgggttttgcgattatttagatttttttttgtatcgttgcgtacgttacgttttttttagttggacgggtggggtgagaaaggaaaagtttttgtcggtgttgattgcggtttttgtgttgggtttcgagcgacgtgggaaggggtatcgatgattgttgggaggggtattttattttttaggttttttttgtatatttttttatt

SEQ ID NO: 39054 - DNA, 692 bp, Artificial Sequence
  chemically treated genomic DNA (Homo sapiens) CpG-island No: 39054
aataaaaaaatatacaaaaaaaacctaaaaaataaaatacccctcccaacaatcatcgataccccttcccacgtcgctcgaaacccaacacaaaaaccgcaatcaacaccgacaaaaacttttcctttctcaccccacccgtccaactaaaaaaaacgtaacgtacgcaacgatacaaaaaaaaatctaaataatcgcaaaacccaaaacccgacgacgacgaaaaaaaacgaaaaaacctcgaaaaaactcgacaccaaacgatatcgtttaaaaaaaaaatcgaaccttaccttcgcccgcttacgccgactaatccgacgcccctccgaaatctctactattccaatttccataaaaatcgcaaacccaaacacgacaataaaaccgacctaaaaccctacgaaccccgacgattccgccaaacccccgaaaaacgaaacccgcgaaaactctttcttacgaaatatacgctcccccaccgcccccgacccgacctcgactaaacccgacaaacccgcgaactacgcgaccacctcaaacccgttctcgaaaccgcctactatcccaaaaccaacctccgtcccgattactaccgctacaaccgccgccgccgcgactaccgccttcttcccaaataacatctcgaaccgccgaaccgccgacgaccgtaaaaaccgctcgctctatcg

SEQ ID NO: 39055 - DNA, 692 bp, Artificial Sequence
  chemically treated genomic DNA (Homo sapiens) CpG-island No: 39055
aatgaaaaggtgtgtaagaaagatttaaggaataaaatattttttttagtaattatcgatgtttttttttacgtcgttcgggatttagtataaagatcgtagttaatatcggtaaagatttttttttttttattttattcgtttagttagaggggacgtggcgtgcgtagcgatataaggggaggtttgagtggtcgtagggtttaagattcggcggcggcgggggagggcggagaagtttcggggaagttcggtattaggcggtgtcgtttgagggaagggtcgagttttattttcgttcgtttgcgtcggttggttcgacgttttttcggagtttttgttattttagtttttatgggggtcgtagatttaggtacgatagtagggtcggtttgaggttttgcggatttcggcggtttcgttaggttttcggggggcgaggttcgcggaggtttttttttgcggggtgtgcgtttttttatcgttttcggttcgatttcggttgggttcgataggttcgcgggttgcgcggttattttagattcgttttcggagtcgtttgttgttttagggttagttttcgtttcggttgttgtcgttgtagtcgtcgtcgtcgcggttgtcgttttttttttagataatatttcgggtcgtcgggtcgtcgacggtcgtaggggtcgttcgttttgtcg

SEQ ID NO: 39056 - DNA, 692 bp, Artificial Sequence
  chemically treated genomic DNA (Homo sapiens) CpG-island No: 39056
cgacaaaacgaacgacccctacgaccgtcgacgacccgacgacccgaaatattatctaaaaaaaaaacgacaaccgcgacgacgacgactacaacgacaacaaccgaaacgaaaactaaccctaaaacaacaaacgactccgaaaacgaatctaaaataaccgcgcaacccgcgaacctatcgaacccaaccgaaatcgaaccgaaaacgataaaaaaacgcacaccccgcaaaaaaaaacctccgcgaacctcgccccccgaaaacctaacgaaaccgccgaaatccgcaaaacctcaaaccgaccctactatcgtacctaaatctacgacccccataaaaactaaaataacaaaaactccgaaaaaacgtcgaaccaaccgacgcaaacgaacgaaaataaaactcgacccttccctcaaacgacaccgcctaataccgaacttccccgaaacttctccgccctcccccgccgccgccgaatcttaaaccctacgaccactcaaacctccccttatatcgctacgcacgccacgtcccctctaactaaacgaataaaataaaaaaaaaaaaatctttaccgatattaactacgatctttatactaaatcccgaacgacgtaaaaaaaaacatcgataattactaaaaaaaatattttattccttaaatctttcttacacaccttttcatt

SEQ ID NO: 39057 - DNA, 564 bp, Artificial Sequence
  chemically treated genomic DNA (Homo sapiens) CpG-island No: 39057
atgcgtattttaggttttttcgcgttttatttcgtttttcgcgtagttttttttttttttcggtgttttttcgtttttttttttttcgttattttcgtacgttttcgtatttttcgtcgtattttcgacgttcgttttttcgttttattcgttatcgttatcggttttttttcggtatcggagtcgcgttttttgtttttatatcgtcgattatttgtgcgtcggttggagggggcggtattgtcgagggtcggtagttcgtcgggtgttttgcgtttttttttttttttttttttttttttcgtttttttcgttttatttttattttttttttcgtttcgatttgttattcgttatttatttttttttcgtttttcggtttttatattcgtatttttatcgatcgttcgtttttttcgttcgtcgcgttttcgttattgttcgcgattttattttattttacgttcgttcgattttttcgttcggtcggtttcgttttcgtttttcgtttttattatttcgtatgcgtgttaatttttcgtcgttatacgttcgttgtttcgt

SEQ ID NO: 39058 - DNA, 564 bp, Artificial Sequence
  chemically treated genomic DNA (Homo sapiens) CpG-island No: 39058
acgaaacaacgaacgtataacgacgaaaaattaacacgcatacgaaataataaaaacgaaaaacgaaaacgaaaccgaccgaacgaaaaaatcgaacgaacgtaaaataaaataaaatcgcgaacaataacgaaaacgcgacgaacgaaaaaaacgaacgatcgataaaaatacgaatataaaaaccgaaaaacgaaaaaaaaataaataacgaataacaaatcgaaacgaaaaaaaaaataaaaataaaacgaaaaaaacgaaaaaaaaaaaaaaaaaaaaaaaaaaacgcaaaacacccgacgaactaccgaccctcgacaataccgccccctccaaccgacgcacaaataatcgacgatataaaaacaaaaaacgcgactccgataccgaaaaaaaaccgataacgataacgaataaaacgaaaaaacgaacgtcgaaaatacgacgaaaaatacgaaaacgtacgaaaataacgaaaaaaaaaaaaacgaaaaaacaccgaaaaaaaaaaaaaactacgcgaaaaacgaaataaaacgcgaaaaaacctaaaatacgcat

SEQ ID NO: 39059 - DNA, 564 bp, Artificial Sequence
  chemically treated genomic DNA (Homo sapiens) CpG-island No: 39059
acgggataacgagcgtatggcgacgaggaattggtacgtatgcgggatggtggaagcgaaaaacgggggcggggtcgatcggacggaaaaatcggacgggcgtaaggtggaataaaatcgcggataatggcggggacgcggcgggcggggagggcgaacgatcgatgggagtgcgaatatgggggtcgggaaacggaagaagggtggatggcggatgataaatcgaagcggagagaaggatggaaatggagcgggaagggcggaagggggggggggggggggggaaaagcgtaggatattcggcgggttgtcgattttcggtaatgtcgttttttttagtcggcgtatagatggtcgacggtatgggaataaagggcgcgatttcggtgtcgaggagaaatcggtggcggtggcgggtggggcggaaaggcgggcgtcggggatgcggcggggaatacgggggcgtacggaagtgacgggggggagggggacggaggggtatcgagaagggagggaaattgcgcggggggcggggtggggcgcggggaaatttggggtacgtat

SEQ ID NO: 39060 - DNA, 564 bp, Artificial Sequence
  chemically treated genomic DNA (Homo sapiens) CpG-island No: 39060
atacgtaccccaaatttccccgcgccccaccccgccccccgcgcaatttccctcccttctcgatacccctccgtccccctcccccccgtcacttccgtacgcccccgtattccccgccgcatccccgacgcccgcctttccgccccacccgccaccgccaccgatttctcctcgacaccgaaatcgcgccctttattcccataccgtcgaccatctatacgccgactaaaaaaaacgacattaccgaaaatcgacaacccgccgaatatcctacgcttttcccccccccccccccccccttccgcccttcccgctccatttccatccttctctccgcttcgatttatcatccgccatccacccttcttccgtttcccgacccccatattcgcactcccatcgatcgttcgccctccccgcccgccgcgtccccgccattatccgcgattttattccaccttacgcccgtccgatttttccgtccgatcgaccccgcccccgtttttcgcttccaccatcccgcatacgtaccaattcctcgtcgccatacgctcgttatcccgt

SEQ ID NO: 39061 - DNA, 519 bp, Artificial Sequence
  chemically treated genomic DNA (Homo sapiens) CpG-island No: 39061
  unsure (351)
ttttttcgtttttgttcgttttcgttttttttttcgttttttttttttcgtttttcgttttttttttgttttcgtttttgttttcgtttttttttttttttttgtttttttcgtcgtcgtttttcgttttcgttcgtttttcgggttgatttgttttttttcgtttttgttttcgttttttcgttcgttttcgggttttcgtttttcgttcgtcgtttttttttcgtttttttttttgttttttgttcgtcgttttttcgtttttttgttttttcgcggttttcgttttttcgttttttcgattttttatttcgtcgttttttcgtcgttcgtatcgttttttgtcgcggnttgttattttgtttttttgcgttttttattcgttttcgttcgttcgttttatgttcgcgtttttttttcgttcgtatatcgttgtcgatttttcgtcgttttcgttcgatcgtcgttttttcgtcgtttcgatcgttttcgttgttgtttttgttacgacgcgttttt

SEQ ID NO: 39062 - DNA, 519 bp, Artificial Sequence
  chemically treated genomic DNA (Homo sapiens) CpG-island No: 39062
  unsure (169)
aaaaacgcgtcgtaacaaaaacaacaacgaaaacgatcgaaacgacgaaaaaacgacgatcgaacgaaaacgacgaaaaatcgacaacgatatacgaacgaaaaaaaaacgcgaacataaaacgaacgaacgaaaacgaataaaaaacgcaaaaaaacaaaataacaanccgcgacaaaaaacgatacgaacgacgaaaaaacgacgaaataaaaaatcgaaaaaacgaaaaaacgaaaaccgcgaaaaaacaaaaaaacgaaaaaacgacgaacaaaaaacaaaaaaaaaaacgaaaaaaaaacgacgaacgaaaaacgaaaacccgaaaacgaacgaaaaaacgaaaacaaaaacgaaaaaaaacaaatcaacccgaaaaacgaacgaaaacgaaaaacgacgacgaaaaaaacaaaaaaaaaaaaaaaaacgaaaacaaaaacgaaaacaaaaaaaaaacgaaaaacgaaaaaaaaaaaacgaaaaaaaaaacgaaaacgaacaaaaacgaaaaaa

SEQ ID NO: 39063 - DNA, 519 bp, Artificial Sequence
  chemically treated genomic DNA (Homo sapiens) CpG-island No: 39063
  unsure (169)
aagagcgcgtcgtgatagaaatagtagcgaaggcgatcggggcgacggaaaaacggcggtcgggcggagacgacgaaaaatcggtaacgatgtacgagcggaaagaaggcgcggatatgaggcgaacgggcgggggcggatggagaacgtaggagggtagagtgataantcgcgataaggaacggtacgagcgacgggagagcgacggaatagggaatcggggggacgaaggaacgggaatcgcgaaggaataaaggggcggggaggcggcgggtaaaggataggaaaggaggcgggaggggggcggcgaacggggggcgggaattcgggggcgaacggagggacgagggtaagggcgaaaaaaggtaagttagttcgggaggcgggcgaaagcggaggacgacgacggagggagtaaggaaaagggggggggcggggataagggcgggaataggggggaggcgggaaacggagggggggggacgggggaggaggcggaaacgagtaaggacgggaaaa

SEQ ID NO: 39064 - DNA, 519 bp, Artificial Sequence
  chemically treated genomic DNA (Homo sapiens) CpG-island No: 39064
  unsure (351)
ttttcccgtccttactcgtttccgcctcctcccccgtccccccccctccgtttcccgcctcccccctattcccgcccttatccccgcccccccccttttccttactccctccgtcgtcgtcctccgctttcgcccgcctcccgaactaacttaccttttttcgcccttaccctcgtccctccgttcgcccccgaattcccgccccccgttcgccgcccccctcccgcctcctttcctatcctttacccgccgcctccccgcccctttattccttcgcgattcccgttccttcgtccccccgattccctattccgtcgctctcccgtcgctcgtaccgttccttatcgcganttatcactctaccctcctacgttctccatccgcccccgcccgttcgcctcatatccgcgccttctttccgctcgtacatcgttaccgatttttcgtcgtctccgcccgaccgccgtttttccgtcgccccgatcgccttcgctactatttctatcacgacgcgctctt

SEQ ID NO: 39065 - DNA, 517 bp, Artificial Sequence
  chemically treated genomic DNA (Homo sapiens) CpG-island No: 39065
cgggtcgatttttcgaggttttatatttgggtttgaggggcgcggttcgtagcggcgggtgtaggggcgattgttagtttttatttcgtttcggggtgcgttcggaggtcgatatttggaggacgtttttagttttcgcgggacgttacgtttgcgcgttagggattcgggataagaagtgcgcgtcgggtttcggttgcgcgtcgcggggttattagtttgcgcgtagggtttaggcgatcgtgcggttatggatacgttacggggtatcggtattttcgtggtgtgggattacgtggtgttcgcgggtatgttggttatttcggtcgttatcggtatttattacgttttcgttgggggcggttagtagatttttaaggattttttgatgggcggtcgtagaatgatcgtagtgttcgtggcgttgttttttatcgttagttttatgttagtcgttattgttttgggtatttttttcgaggtttatcgttttggggttatttttagtatttttgtt

SEQ ID NO: 39066 - DNA, 517 bp, Artificial Sequence
  chemically treated genomic DNA (Homo sapiens) CpG-island No: 39066
aacaaaaatactaaaaataaccccaaaacgataaacctcgaaaaaaatacccaaaacaataacgactaacataaaactaacgataaaaaacaacgccacgaacactacgatcattctacgaccgcccatcaaaaaatccttaaaaatctactaaccgcccccaacgaaaacgtaataaataccgataacgaccgaaataaccaacatacccgcgaacaccacgtaatcccacaccacgaaaataccgataccccgtaacgtatccataaccgcacgatcgcctaaaccctacgcgcaaactaataaccccgcgacgcgcaaccgaaacccgacgcgcacttcttatcccgaatccctaacgcgcaaacgtaacgtcccgcgaaaactaaaaacgtcctccaaatatcgacctccgaacgcaccccgaaacgaaataaaaactaacaatcgcccctacacccgccgctacgaaccgcgcccctcaaacccaaatataaaacctcgaaaaatcgacccg

SEQ ID NO: 39067 - DNA, 517 bp, Artificial Sequence
  chemically treated genomic DNA (Homo sapiens) CpG-island No: 39067
ggtaaagatgttaaaaatggttttaaaacggtagatttcggagggggtgtttaggatagtgacggttgatatgaagttagcggtgagggatagcgttacgggtattgcggttattttgcggtcgtttattaggaagtttttggaggtttgttggtcgtttttagcgaaggcgtagtagatgtcgatggcggtcgagatgattagtatgttcgcgaatattacgtagttttatattacgaaggtgtcgatgtttcgtggcgtgtttatggtcgtacggtcgtttgagttttgcgcgtaaattggtggtttcgcggcgcgtagtcggagttcggcgcgtattttttatttcggatttttggcgcgtaggcgtggcgtttcgcggggattggaggcgttttttaggtgtcggttttcgaacgtatttcgaggcggggtgagggttggtagtcgtttttgtattcgtcgttgcgagtcgcgttttttaaatttaggtatgggatttcggaaaatcgattcg

SEQ ID NO: 39068 - DNA, 517 bp, Artificial Sequence
  chemically treated genomic DNA (Homo sapiens) CpG-island No: 39068
cgaatcgattttccgaaatcccatacctaaatttaaaaaacgcgactcgcaacgacgaatacaaaaacgactaccaaccctcaccccgcctcgaaatacgttcgaaaaccgacacctaaaaaacgcctccaatccccgcgaaacgccacgcctacgcgccaaaaatccgaaataaaaaatacgcgccgaactccgactacgcgccgcgaaaccaccaatttacgcgcaaaactcaaacgaccgtacgaccataaacacgccacgaaacatcgacaccttcgtaatataaaactacgtaatattcgcgaacatactaatcatctcgaccgccatcgacatctactacgccttcgctaaaaacgaccaacaaacctccaaaaacttcctaataaacgaccgcaaaataaccgcaatacccgtaacgctatccctcaccgctaacttcatatcaaccgtcactatcctaaacaccccctccgaaatctaccgttttaaaaccatttttaacatctttacc

SEQ ID NO: 39069 - DNA, 530 bp, Artificial Sequence
  chemically treated genomic DNA (Homo sapiens) CpG-island No: 39069
ttgtggttggggtcggttaagtcgaatatcggttatacgtaagcggcggcgggtgtggttggtgtgattaagatggtgatggcgatgcggtacgggtagttgttacgtacgttgttcgtggaatcgtcgtcgtcggaggtggattggtcggcggggacggtttaattttttacggagaatacgttttggtttaggagtggtcgtgttcgtcgggtgggggtgtcgtcgttcgggattagtggtattaacgcgtacgttattttcgaatagttttcgggagtgtcgagttagtttgcggggtcgggttcgggttttgtcgaggatgattcggtgatgatgcggttggtgtggggttttttttcgtagcgttatacgtatagttttcgttcgtcgtttattttatttgtttcggcgtttttcgtcgtttttttttttttgtttcgcgattttttttgtcgtatttttgttttgtatcgttgtagtaggcgtggtcgtttcgttttttttatcgtttttattatgtttagttt

SEQ ID NO: 39070 - DNA, 530 bp, Artificial Sequence
  chemically treated genomic DNA (Homo sapiens) CpG-island No: 39070
aaactaaacataataaaaacgataaaaaaaacgaaacgaccacgcctactacaacgatacaaaacaaaaatacgacaaaaaaaatcgcgaaacaaaaaaaaaaaaacgacgaaaaacgccgaaacaaataaaataaacgacgaacgaaaactatacgtataacgctacgaaaaaaaaccccacaccaaccgcatcatcaccgaatcatcctcgacaaaacccgaacccgaccccgcaaactaactcgacactcccgaaaactattcgaaaataacgtacgcgttaataccactaatcccgaacgacgacacccccacccgacgaacacgaccactcctaaaccaaaacgtattctccgtaaaaaattaaaccgtccccgccgaccaatccacctccgacgacgacgattccacgaacaacgtacgtaacaactacccgtaccgcatcgccatcaccatcttaatcacaccaaccacacccgccgccgcttacgtataaccgatattcgacttaaccgaccccaaccacaa

SEQ ID NO: 39071 - DNA, 530 bp, Artificial Sequence
  chemically treated genomic DNA (Homo sapiens) CpG-island No: 39071
aagttagatatagtggaaacggtgaaaaggacgagacgattacgtttattgtaacggtgtagagtaagaatacggtagaaaaaatcgcggaataggggaaagggggcgacggggaacgtcggagtaggtagggtgaacgacgaacgggaattatgcgtatagcgttgcggggaaagattttatattaatcgtattattatcggattattttcgatagaattcgaattcggtttcgtagattgattcggtattttcgggggttgttcgaggatgacgtgcgcgttagtattattgatttcgaacgacgatatttttattcgacgaatacgattatttttgggttagggcgtgtttttcgtaaggagttgaatcgttttcgtcgattaatttattttcggcgacggcgattttacgaataacgtgcgtggtagttgttcgtgtcgtatcgttattattattttgattatattagttatattcgtcgtcgtttgcgtatgatcgatgttcgatttgatcgattttaattataa

SEQ ID NO: 39072 - DNA, 530 bp, Artificial Sequence
  chemically treated genomic DNA (Homo sapiens) CpG-island No: 39072
ttataattaaaatcgatcaaatcgaacatcgatcatacgcaaacgacgacgaatataactaatataatcaaaataataataacgatacgacacgaacaactaccacgcacgttattcgtaaaatcgccgtcgccgaaaataaattaatcgacgaaaacgattcaactccttacgaaaaacacgccctaacccaaaaataatcgtattcgtcgaataaaaatatcgtcgttcgaaatcaataatactaacgcgcacgtcatcctcgaacaacccccgaaaataccgaatcaatctacgaaaccgaattcgaattctatcgaaaataatccgataataatacgattaatataaaatctttccccgcaacgctatacgcataattcccgttcgtcgttcaccctacctactccgacgttccccgtcgccccctttcccctattccgcgattttttctaccgtattcttactctacaccgttacaataaacgtaatcgtctcgtccttttcaccgtttccactatatctaactt

SEQ ID NO: 39073 - DNA, 1140 bp, Artificial Sequence
  chemically treated genomic DNA (Homo sapiens) CpG-island No: 39073
tttggtggcggaaacgttgtagtattgtagtatgaatgaagggtcggttcggcgcggttaggaaagtttttttgggtcgaaggaaggtgtggttgggtatttttgggtagttatcgttagttttcgttcggagtgaaggggcgagaggtgacggagacggaggggttttagacggtcggcgggatagtttgtatcgtttttgttgagcggaggtcgtttcgggaagggggacgcggttttcggtttggaacgattcgagacggcggtggttgaggtttttcgcgcgaggcgtggaggtcggcggggcgcgggtagtggttaagtcgggatttttgggtatttggcgagcgttttcgcgattagggcggggattcggtttcgtaggtcggtgcggatcgagcgaggcgcgatatcgggaggttcgagtttttaggcggtaggaagttggttttcggacgtttaggtttttgggtcgtcgtttagtatatgggtcgtttttttttagggtcgttttcgcgagggtcgtattttagggacggtagtcgtagttttcggcggacgagaaggtgggggagggagattggttcggaggttggggagaggttttgaggtttcgggttggattcgtcgtagtttttatcgatcgcggtcgatggggtaagtttaagttgcgttcgacgaggtaggaaatttttcgatttggtggggaaaatattaaaataaacggtcgttaggcgttttagttcgttcgttttagtcgtcgttttttttagttagattttcgttagtttatatcgttaggtacgattttcgtcgattttttcgtaagtaggttacgaggatttggagttaggacgttacgacgggttttatttttttagtcgttattatcgttttagtttattttgttagcgtcggtcgttatagtgattttgattgaaatttattcggtgtatcgttacgggaacgcgtattttttaagggtttttttattttttttttcgcgtcgtagtttaggaatgttacgtgaacgacgttacggaagtcgtgttggtagagggtagaaaaaagggtaaggtaatttttaacgggtttttaggcgttattttagttaagggttggaagttttaaatttcggga

SEQ ID NO: 39074 - DNA, 1140 bp, Artificial Sequence
  chemically treated genomic DNA (Homo sapiens) CpG-island No: 39074
tcccgaaatttaaaacttccaacccttaactaaaataacgcctaaaaacccgttaaaaattaccttacccttttttctaccctctaccaacacgacttccgtaacgtcgttcacgtaacattcctaaactacgacgcgaaaaaaaaaataaaaaaacccttaaaaaatacgcgttcccgtaacgatacaccgaataaatttcaatcaaaatcactataacgaccgacgctaacaaaataaactaaaacgataataacgactaaaaaaataaaacccgtcgtaacgtcctaactccaaatcctcgtaacctacttacgaaaaaatcgacgaaaatcgtacctaacgatataaactaacgaaaatctaactaaaaaaaacgacgactaaaacgaacgaactaaaacgcctaacgaccgtttattttaatattttccccaccaaatcgaaaaatttcctacctcgtcgaacgcaacttaaacttaccccatcgaccgcgatcgataaaaactacgacgaatccaacccgaaacctcaaaacctctccccaacctccgaaccaatctccctcccccaccttctcgtccgccgaaaactacgactaccgtccctaaaatacgaccctcgcgaaaacgaccctaaaaaaaaacgacccatatactaaacgacgacccaaaaacctaaacgtccgaaaaccaacttcctaccgcctaaaaactcgaacctcccgatatcgcgcctcgctcgatccgcaccgacctacgaaaccgaatccccgccctaatcgcgaaaacgctcgccaaatacccaaaaatcccgacttaaccactacccgcgccccgccgacctccacgcctcgcgcgaaaaacctcaaccaccgccgtctcgaatcgttccaaaccgaaaaccgcgtcccccttcccgaaacgacctccgctcaacaaaaacgatacaaactatcccgccgaccgtctaaaacccctccgtctccgtcacctctcgccccttcactccgaacgaaaactaacgataactacccaaaaatacccaaccacaccttccttcgacccaaaaaaactttcctaaccgcgccgaaccgacccttcattcatactacaatactacaacgtttccgccaccaaa

SEQ ID NO: 39075 - DNA, 1140 bp, Artificial Sequence
  chemically treated genomic DNA (Homo sapiens) CpG-island No: 39075
tttcgaggtttgaagtttttagtttttaattaagatggcgtttggaggttcgttaaaaattattttgtttttttttttgttttttattaatacggttttcgtggcgtcgtttacgtgatatttttggattacggcgcgggagagggggtaggagggtttttgaagggtgcgcgttttcgtggcggtgtatcgggtaggttttagttagagttattatggcggtcggcgttggtaaggtaagttgaggcggtggtggcggttagggaggtaggattcgtcgtggcgttttggttttaaattttcgtagtttgtttgcggagaggtcggcggaggtcgtgtttagcggtgtgggttggcgggggtttggttggagggggcgacggttgaggcgggcgggttgaggcgtttgacggtcgtttgttttgatgttttttttattaggtcggaaagttttttgtttcgtcgggcgtagtttgagtttgttttatcggtcgcgatcggtggaggttgcggcggatttagttcggggttttaaggtttttttttaattttcgggttagttttttttttttattttttcgttcgtcgggagttgcggttgtcgtttttgagatgcgattttcgcgggggcgattttgaggggaggcggtttatgtgttgagcggcggtttagaagtttaggcgttcggggattaattttttgtcgtttgggaattcgagtttttcggtgtcgcgtttcgttcggttcgtatcggtttgcggagtcgggttttcgttttggtcgcggggacgttcgttaggtgtttaggagtttcgatttggttattgttcgcgtttcgtcggtttttacgtttcgcgcggagaattttagttatcgtcgtttcggatcgttttaggtcggggatcgcgttttttttttcggggcggttttcgtttagtaggggcgatgtagattgtttcgtcggtcgtttagagttttttcgttttcgttatttttcgtttttttatttcgggcgaggattggcggtggttgtttagaggtgtttagttatattttttttcggtttaaaaggatttttttggtcgcgtcgaatcgattttttatttatgttgtagtgttgtaacgttttcgttattaag

SEQ ID NO: 39076 - DNA, 1140 bp, Artificial Sequence
  chemically treated genomic DNA (Homo sapiens) CpG-island No: 39076
cttaataacgaaaacgttacaacactacaacataaataaaaaatcgattcgacgcgaccaaaaaaatccttttaaaccgaaaaaaaatataactaaacacctctaaacaaccaccgccaatcctcgcccgaaataaaaaaacgaaaaataacgaaaacgaaaaaactctaaacgaccgacgaaacaatctacatcgcccctactaaacgaaaaccgccccgaaaaaaaaaacgcgatccccgacctaaaacgatccgaaacgacgataactaaaattctccgcgcgaaacgtaaaaaccgacgaaacgcgaacaataaccaaatcgaaactcctaaacacctaacgaacgtccccgcgaccaaaacgaaaacccgactccgcaaaccgatacgaaccgaacgaaacgcgacaccgaaaaactcgaattcccaaacgacaaaaaattaatccccgaacgcctaaacttctaaaccgccgctcaacacataaaccgcctcccctcaaaatcgcccccgcgaaaatcgcatctcaaaaacgacaaccgcaactcccgacgaacgaaaaaataaaaaaaaaaaactaacccgaaaattaaaaaaaaaccttaaaaccccgaactaaatccgccgcaacctccaccgatcgcgaccgataaaacaaactcaaactacgcccgacgaaacaaaaaactttccgacctaataaaaaaaacatcaaaacaaacgaccgtcaaacgcctcaacccgcccgcctcaaccgtcgccccctccaaccaaacccccgccaacccacaccgctaaacacgacctccgccgacctctccgcaaacaaactacgaaaatttaaaaccaaaacgccacgacgaatcctacctccctaaccgccaccaccgcctcaacttaccttaccaacgccgaccgccataataactctaactaaaacctacccgatacaccgccacgaaaacgcgcacccttcaaaaaccctcctaccccctctcccgcgccgtaatccaaaaatatcacgtaaacgacgccacgaaaaccgtattaataaaaaacaaaaaaaaaaacaaaataatttttaacgaacctccaaacgccatcttaattaaaaactaaaaacttcaaacctcgaaa

SEQ ID NO: 39077 - DNA, 534 bp, Artificial Sequence
  chemically treated genomic DNA (Homo sapiens) CpG-island No: 39077
ttcgtttcgttttttcgagtttttcggtgaacgaagtggttttttatatttttgtttagtatttcgtgtattagttcggcggtgatttttttggttgttttagtacgcgcgcgtatagggtatggcgagggttggatttgtggttatatgtcgcgttttatatgcgtttgtgcgcggtcgtttcgatcgttttagtcgcgttcggtttcgtgtttttttatatttttttttgaaagtcgtgtcgtttcggcgttacgttcgtaatcgttcgtcgcgttcgttttatttttattttttttcgtcgttttttttttttatcgttatgtttgttaacgggaatgtcgaggtcgtttttattgaatttttacgtttagttttttttttttattgttatgaaattcgacgtttcgtttttttcgcgagtttttgacgtcgattatcgtcgatagtttttttcgtttttttgcgttttcgttcgtttttttcgttgatcgcgtatttttcgcgttcgttcgcgtgtagttacgagattat

SEQ ID NO: 39078 - DNA, 534 bp, Artificial Sequence
  chemically treated genomic DNA (Homo sapiens) CpG-island No: 39078
ataatctcgtaactacacgcgaacgaacgcgaaaaatacgcgatcaacgaaaaaaacgaacgaaaacgcaaaaaaacgaaaaaaactatcgacgataatcgacgtcaaaaactcgcgaaaaaaacgaaacgtcgaatttcataacaataaaaaaaaaaaactaaacgtaaaaattcaataaaaacgacctcgacattcccgttaacaaacataacgataaaaaaaaaaaacgacgaaaaaaaataaaaataaaacgaacgcgacgaacgattacgaacgtaacgccgaaacgacacgactttcaaaaaaaaatataaaaaaacacgaaaccgaacgcgactaaaacgatcgaaacgaccgcgcacaaacgcatataaaacgcgacatataaccacaaatccaaccctcgccataccctatacgcgcgcgtactaaaacaaccaaaaaaatcaccgccgaactaatacacgaaatactaaacaaaaatataaaaaaccacttcgttcaccgaaaaactcgaaaaaacgaaacgaa

SEQ ID NO: 39079 - DNA, 534 bp, Artificial Sequence
  chemically treated genomic DNA (Homo sapiens) CpG-island No: 39079
gtaatttcgtggttatacgcgagcgggcgcggggaatgcgcggttaacgggagaaacgggcgagagcgtagagaaacgggaggaattatcgacgatggtcggcgttagaagttcgcgaaagaagcggagcgtcgagttttataataatggaggggaagaattgggcgtaagggtttaataggggcgatttcggtattttcgttggtagatataacggtgagggaagggggcggcggagaaaggtgggaatggggcgaacgcggcgggcgattgcgaacgtagcgtcgaagcggtacggtttttaaggggaaatgtggggggatacgggatcgaacgcggttagagcggtcggggcggtcgcgtataagcgtatgtggaacgcggtatatggttataaatttagttttcgttatgttttgtgcgcgcgcgtgttaaagtaattaaaagggttatcgtcgggttaatatacggggtgttaaataggggtatgaaaggttatttcgtttatcggggaattcgagaaggcggggcgaa

SEQ ID NO: 39080 - DNA, 534 bp, Artificial Sequence
  chemically treated genomic DNA (Homo sapiens) CpG-island No: 39080
ttcgccccgccttctcgaattccccgataaacgaaataacctttcatacccctatttaacaccccgtatattaacccgacgataacccttttaattactttaacacgcgcgcgcacaaaacataacgaaaactaaatttataaccatataccgcgttccacatacgcttatacgcgaccgccccgaccgctctaaccgcgttcgatcccgtatccccccacatttccccttaaaaaccgtaccgcttcgacgctacgttcgcaatcgcccgccgcgttcgccccattcccacctttctccgccgcccccttccctcaccgttatatctaccaacgaaaataccgaaatcgcccctattaaacccttacgcccaattcttcccctccattattataaaactcgacgctccgcttctttcgcgaacttctaacgccgaccatcgtcgataattcctcccgtttctctacgctctcgcccgtttctcccgttaaccgcgcattccccgcgcccgctcgcgtataaccacgaaattac

SEQ ID NO: 39081 - DNA, 700 bp, Artificial Sequence
  chemically treated genomic DNA (Homo sapiens) CpG-island No: 39081
tcgttgtggttggggtcggttaagtcgaatatcggttatacgtaagcggcggcgggtgtggttggtgtgattaagatggtgatggcgatgcggtacgggtagttgttacgtacgttgtacgtggaatcgtcgtcgtcggaggtggattggtcggcggggacggtttaattttttacggagaatacgttttggtttaggagtggtcgtgttcgtcgggtgggggtgtcgtcgttcgggattagtggtattaacgcgtacgttattttcgaatagttttcgggagtgtcgagttagtttgcggggtcgggttcgggttttgtcgtggatgtttcggtggtgtcgtggatggtgtcgggtaaaatattcgaagcgttattcgcgtaggtaacggcgttgatgatttatttggacgagcgatttgatgttttttcgttggatgttgggtattcgttggcgttgatacggtcggcgttggatgagcgagcggtggtggttgggtcggatcgtgaaacgttgttgtgcggtgtgaaagcgttgtttgtcggttatgaggtttttgggttgtgatcggatttgtgggggttgagggttcgatcgggtttgtgttttttcggttaggtggttagtggtttggggatgggtcgagggttttatcgggtttttacggggttcgttgttgttttttaataagttttgtggt

SEQ ID NO: 39082 - DNA, 700 bp, Artificial Sequence
  chemically treated genomic DNA (Homo sapiens) CpG-island No: 39082
accacaaaacttattaaaaaacaacaacgaaccccgtaaaaacccgataaaaccctcgacccatccccaaaccactaaccacctaaccgaaaaaacacaaacccgatcgaaccctcaacccccacaaatccgatcacaacccaaaaacctcataaccgacaaacaacgctttcacaccgcacaacaacgtttcacgatccgacccaaccaccaccgctcgctcatccaacgccgaccgtatcaacgccaacgaatacccaacatccaacgaaaaaacatcaaatcgctcgtccaaataaatcatcaacgccgttacctacgcgaataacgcttcgaatattttacccgacaccatccacgacaccaccgaaacatccacgacaaaacccgaacccgaccccgcaaactaactcgacactcccgaaaactattcgaaaataacgtacgcgttaataccactaatcccgaacgacgacacccccacccgacgaacacgaccactcctaaaccaaaacgtattctccgtaaaaaattaaaccgtccccgccgaccaatccacctccgacgacgacgattccacgtacaacgtacgtaacaactacccgtaccgcatcgccatcaccatcttaatcacaccaaccacacccgccgccgcttacgtataaccgatattcgacttaaccgaccccaaccacaacga

SEQ ID NO: 39083 - DNA, 700 bp, Artificial Sequence
  chemically treated genomic DNA (Homo sapiens) CpG-island No: 39083
gttataaggtttgttaaaaggtagtagcgaatttcgtgaaagttcggtaaagttttcggtttatttttaagttattgattatttgatcggaaaaatataaattcgatcgggtttttagtttttatagattcggttataatttagaagttttatgatcggtagatagcgtttttatatcgtataataacgttttacggttcgatttagttattatcgttcgtttatttagcgtcgatcgtgttaacgttagcgagtatttaatatttagcgaggagatattaggtcgttcgtttagataggttattaacgtcgttgtttgcgcggatagcgtttcgggtgttttgttcgatattatttacggtattatcggaatatttacgatagaattcgaattcggtttcgtagattgattcggtattttcgggggttgttcgaggatgacgtgcgcgttagtattattgatttcgaacgacgatatttttattcgacgaatacgattatttttgggttagggcgtgtttttcgtaaggagttgaatcgttttcgtcgattaatttattttcggcgacggcgattttacgtgtaacgtgcgtggtagttgttcgtgtcgtatcgttattattattttgattatattagttatattcgtcgtcgtttgcgtatgatcgatgttcgatttgatcgattttaattataacgg

SEQ ID NO: 39084 - DNA, 700 bp, Artificial Sequence
  chemically treated genomic DNA (Homo sapiens) CpG-island No: 39084
ccgttataattaaaatcgatcaaatcgaacatcgatcatacgcaaacgacgacgaatataactaatataatcaaaataataataacgatacgacacgaacaactaccacgcacgttacacgtaaaatcgccgtcgccgaaaataaattaatcgacgaaaacgattcaactccttacgaaaaacacgccctaacccaaaaataatcgtattcgtcgaataaaaatatcgtcgttcgaaatcaataatactaacgcgcacgtcatcctcgaacaacccccgaaaataccgaatcaatctacgaaaccgaattcgaattctatcgtaaatattccgataataccgtaaataatatcgaacaaaacacccgaaacgctatccgcgcaaacaacgacgttaataacctatctaaacgaacgacctaatatctcctcgctaaatattaaatactcgctaacgttaacacgatcgacgctaaataaacgaacgataataactaaatcgaaccgtaaaacgttattatacgatataaaaacgctatctaccgatcataaaacttctaaattataaccgaatctataaaaactaaaaacccgatcgaatttatatttttccgatcaaataatcaataacttaaaaataaaccgaaaactttaccgaactttcacgaaattcgctactaccttttaacaaaccttataac

SEQ ID NO: 39085 - DNA, 600 bp, Artificial Sequence
  chemically treated genomic DNA (Homo sapiens) CpG-island No: 39085
  unsure (72)
attcgtcgtaattttacgtttgggataaggtatttttttttcgtcgaattttttacgagtcgtttcgcgttncgcggattcgcggtatgtatttttttcgttatttttttttttcgaggttttttttatttattttttttcgtcgtttttcgttcgtcgttttttttttacgtcggttcgtcggtagttcgcgtcgtttttttttacgtttcgcgtattacgtcgtttttcgttttcgatttcgttcgtttttcgtttttttttttcgtttcgtttttcgtttttcgttttttttttttttttttttttttttttttttttttttttattttttttttttcgtttttttttttttttttttttagttttttttttttttttttttttttcgtttttttttttttttttttttttttttttttttttttttttttacgtttcgttttttttttcgtttcgtttcgcgttttttttttttttttttttttttttttttttttttcgttttttttttttttttttatttttcgtttttttttttttttttttttttttttttttttttttttttttttttttttttttttttttttttttttt

SEQ ID NO: 39086 - DNA, 600 bp, Artificial Sequence
  chemically treated genomic DNA (Homo sapiens) CpG-island No: 39086
  unsure (529)
aaaaaaaaaaaaaaaaaaaaaaaaaaaaaaaaaaaaaaaaaaaaaaaaaaaaaaaaaaaaaaaaaaaaaacgaaaaataaaaaaaaaaaaaaaaaacgaaaaaaaaaaaaaaaaaaaaaaaaaaaaaaaaaaaacgcgaaacgaaacgaaaaaaaaaacgaaacgtaaaaaaaaaaaaaaaaaaaaaaaaaaaaaaaaaaaaaaaaaaacgaaaaaaaaaaaaaaaaaaaaaaaactaaaaaaaaaaaaaaaaaaaaacgaaaaaaaaaaaataaaaaaaaaaaaaaaaaaaaaaaaaaaaaaaaaaaaaaaacgaaaaacgaaaaacgaaacgaaaaaaaaaaacgaaaaacgaacgaaatcgaaaacgaaaaacgacgtaatacgcgaaacgtaaaaaaaaacgacgcgaactaccgacgaaccgacgtaaaaaaaaaacgacgaacgaaaaacgacgaaaaaaaataaataaaaaaaacctcgaaaaaaaaaaataacgaaaaaaatacataccgcgaatccgcgnaacgcgaaacgactcgtaaaaaattcgacgaaaaaaaaataccttatcccaaacgtaaaattacgacgaat

SEQ ID NO: 39087 - DNA, 600 bp, Artificial Sequence
  chemically treated genomic DNA (Homo sapiens) CpG-island No: 39087
  unsure (529)
ggggggggggggggggggggggggggggggggggggggggggggggggggggggggggggggggggggagcggggggtggggggggggggggggggcgggggggggggggggggggggggggggggggggggggcgcggggcggggcggaggggggggcggggcgtgggggggggggggggggggggggggggggggggggggaggggacgggggggggggggggggggggggagttgggggggggggggggggggggcgggggggggggggtggggggggggggggggggggggggggggggggggggggggcggggggcggggggcggggcggggggggggggcggggggcgggcgggatcgggggcgaggagcggcgtggtgcgcggggcgtgggggggggcgacgcgagttgtcggcgggtcggcgtggggggggggcggcgggcggggggcggcgaggaggggtgagtagggggggtttcggggggaggggatggcggaggagatgtatgtcgcgagttcgcgnggcgcggggcggttcgtagggggttcggcggggggagggtgttttgttttagacgtggggttgcggcggat

SEQ ID NO: 39088 - DNA, 600 bp, Artificial Sequence
  chemically treated genomic DNA (Homo sapiens) CpG-island No: 39088
  unsure (72)
atccgccgcaaccccacgtctaaaacaaaacaccctccccccgccgaaccccctacgaaccgccccgcgccncgcgaactcgcgacatacatctcctccgccatcccctccccccgaaaccccccctactcacccctcctcgccgccccccgcccgccgccccccccccacgccgacccgccgacaactcgcgtcgcccccccccacgccccgcgcaccacgccgctcctcgcccccgatcccgcccgccccccgccccccccccccgccccgccccccgccccccgccccccccccccccccccccccccccccccccccccccccacccccccccccccgcccccccccccccccccccccaactcccccccccccccccccccccccgtcccctcccccccccccccccccccccccccccccccccccccacgccccgcccccccctccgccccgccccgcgcccccccccccccccccccccccccccccccccccccgccccccccccccccccccaccccccgctcccccccccccccccccccccccccccccccccccccccccccccccccccccccccccccccccccc

SEQ ID NO: 39089 - DNA, 528 bp, Artificial Sequence
  chemically treated genomic DNA (Homo sapiens) CpG-island No: 39089
gtggttggggtcggttaagtcgaatatcggttatacgtaagcggcggcgggtgtggttggtgacgatgttaagtttttgttggtttgtgatggtatcggtcgatcggtgatttcggtggatcgattcgtattgcggtcggttgcggttcggcggatcggtgcgcgtcgataggtttattaagttcggttgtatcggttgagttggttaacggtttaattgtcgatattcgtttagttatcgttttgcgtgtttttcggtattttagaagtgttcgttgatatataggtgtattcggattttcggtcgttgacggttgcgttggatgtcggtgtcgaattattcggcgtcgttatcgtatttacgtttttcggcggtggacgaatagcggatgttcgggagacgattcggtatgtattcgatttggtataaggttggtttttcgattagcgatttaacgaatttcgattgtagtagcgtttatttgtttgtttataggtaaatattgttgatgtgtttcgaatggtaat

SEQ ID NO: 39090 - DNA, 528 bp, Artificial Sequence
  chemically treated genomic DNA (Homo sapiens) CpG-island No: 39090
attaccattcgaaacacatcaacaatatttacctataaacaaacaaataaacgctactacaatcgaaattcgttaaatcgctaatcgaaaaaccaaccttataccaaatcgaatacataccgaatcgtctcccgaacatccgctattcgtccaccgccgaaaaacgtaaatacgataacgacgccgaataattcgacaccgacatccaacgcaaccgtcaacgaccgaaaatccgaatacacctatatatcaacgaacacttctaaaataccgaaaaacacgcaaaacgataactaaacgaatatcgacaattaaaccgttaaccaactcaaccgatacaaccgaacttaataaacctatcgacgcgcaccgatccgccgaaccgcaaccgaccgcaatacgaatcgatccaccgaaatcaccgatcgaccgataccatcacaaaccaacaaaaacttaacatcgtcaccaaccacacccgccgccgcttacgtataaccgatattcgacttaaccgaccccaaccac

SEQ ID NO: 39091 - DNA, 528 bp, Artificial Sequence
  chemically treated genomic DNA (Homo sapiens) CpG-island No: 39091
attgttattcggaatatattaatagtatttgtttgtgggtaaataggtggacgttgttgtaatcgggattcgttgagtcgttgatcggaaagttagttttgtattaggtcgagtgtatgtcgagtcgtttttcggatattcgttgttcgtttatcgtcggggggcgtgggtgcgatgacgacgtcgggtggttcggtatcggtatttaacgtagtcgttaacgatcggaggttcggatatatttgtatgttagcggatatttttgaggtgtcgagaagtacgtaggacggtggttgagcggatgtcggtagttgaatcgttggttagtttaatcggtataatcgagtttgatgggtttgtcggcgcgtatcggttcgtcgggtcgtagtcgatcgtaatacgagtcggtttatcgagattatcggtcgatcggtgttattataaattagtagggatttggtatcgttattagttatattcgtcgtcgtttgcgtatgatcgatgttcgatttgatcgattttaattat

SEQ ID NO: 39092 - DNA, 528 bp, Artificial Sequence
  chemically treated genomic DNA (Homo sapiens) CpG-island No: 39092
ataattaaaatcgatcaaatcgaacatcgatcatacgcaaacgacgacgaatataactaataacgataccaaatccctactaatttataataacaccgatcgaccgataatctcgataaaccgactcgtattacgatcgactacgacccgacgaaccgatacgcgccgacaaacccatcaaactcgattataccgattaaactaaccaacgattcaactaccgacatccgctcaaccaccgtcctacgtacttctcgacacctcaaaaatatccgctaacatacaaatatatccgaacctccgatcgttaacgactacgttaaataccgataccgaaccacccgacgtcgtcatcgcacccacgccccccgacgataaacgaacaacgaatatccgaaaaacgactcgacatacactcgacctaatacaaaactaactttccgatcaacgactcaacgaatcccgattacaacaacgtccacctatttacccacaaacaaatactattaatatattccgaataacaat

SEQ ID NO: 39093 - DNA, 852 bp, Artificial Sequence
  chemically treated genomic DNA (Homo sapiens) CpG-island No: 39093
gttcgggcgataattcgcgcgttacgttgattcggaatggtttaaggattggcgtgttacgggtgatatcgaatttgaaagtcgaatttgtcgcgttggattttttttaattcggacgttgtttagggcggtagttaaaattagttttttaagggtggcggggagtaaagcgttttcgtttaaagtattttgagtagcgcgcgtttgatttcgattcgtagggtcggtgttttcgtagatttcgtttagggttttagtttattcgatgatttgcgttatcgcggcgcgtattaagtttaagtcgtagtgtcgtagtacgggtagttagcgtagttcggggatcgagtttaggtttacgttgaagcgcggcgttgttgggggcgaggcggttgatagttcggtttcggttagtagtagtagtagtagggacggaagtttcgggcgcgtttttcggttcgcggttcgtatggttcgggttttagcggtcgtaatttggagatttgtagtcgttgtcggagttcgggtaagtcgtggaggaggaggagttggggttgggttgcgatcgttggaggtggggttcgcgtacgattcgttcgtttttgttatcggtaagtcggagcggcgatatttttcgttttcgtcgcgtatttattagttcgtttcgattttttatcgggtttggaggtttttgatcgcggggtcgttaagggttggggttgtcggtagtcggttttttattaattgtcggttttagcgtatttgtttgggtcgaaggagtgtaggttgcggtcgggaggggttgtaagatttttagtagcgaaaaggtgttaggaaagattttttagttaaatt

SEQ ID NO: 39094 - DNA, 852 bp, Artificial Sequence
  chemically treated genomic DNA (Homo sapiens) CpG-island No: 39094
aatttaactaaaaaatctttcctaacaccttttcgctactaaaaatcttacaacccctcccgaccgcaacctacactccttcgacccaaacaaatacgctaaaaccgacaattaataaaaaaccgactaccgacaaccccaacccttaacgaccccgcgatcaaaaacctccaaacccgataaaaaatcgaaacgaactaataaatacgcgacgaaaacgaaaaatatcgccgctccgacttaccgataacaaaaacgaacgaatcgtacgcgaaccccacctccaacgatcgcaacccaaccccaactcctcctcctccacgacttacccgaactccgacaacgactacaaatctccaaattacgaccgctaaaacccgaaccatacgaaccgcgaaccgaaaaacgcgcccgaaacttccgtccctactactactactactaaccgaaaccgaactatcaaccgcctcgcccccaacaacgccgcgcttcaacgtaaacctaaactcgatccccgaactacgctaactacccgtactacgacactacgacttaaacttaatacgcgccgcgataacgcaaatcatcgaataaactaaaaccctaaacgaaatctacgaaaacaccgaccctacgaatcgaaatcaaacgcgcgctactcaaaatactttaaacgaaaacgctttactccccgccacccttaaaaaactaattttaactaccgccctaaacaacgtccgaattaaaaaaaatccaacgcgacaaattcgactttcaaattcgatatcacccgtaacacgccaatccttaaaccattccgaatcaacgtaacgcgcgaattatcgcccgaac

SEQ ID NO: 39095 - DNA, 852 bp, Artificial Sequence
  chemically treated genomic DNA (Homo sapiens) CpG-island No: 39095
agtttaattgaaaagttttttttgatattttttcgttattgaaaattttatagtttttttcggtcgtagtttatattttttcggtttaagtaggtgcgttggaatcggtagttggtgagaagtcggttgtcggtagttttaatttttagcggtttcgcggttagggatttttaggttcgatggagagtcggggcgggttagtggatgcgcggcggggacgggaggtgtcgtcgtttcggtttgtcggtgataggggcgggcgggtcgtgcgcgggttttatttttagcgatcgtagtttagttttagtttttttttttttacggtttattcgggtttcgatagcggttgtaggtttttaagttgcggtcgttggagttcgagttatgcggatcgcggatcgggaggcgcgttcggggttttcgtttttgttgttgttgttgttggtcggggtcgggttgttagtcgtttcgtttttagtagcgtcgcgttttaacgtgagtttggattcggttttcgagttgcgttggttgttcgtgttgcggtattacgatttggatttggtgcgcgtcgcgatggcgtaagttatcgggtgagttggggttttggacggggtttgcggggatatcggttttgcgggtcggagttaaacgcgcgttgtttagagtgttttaaacggggacgttttatttttcgttatttttggagaattggttttggttgtcgttttgagtagcgttcgggttggggagaatttagcgcggtaggttcggtttttaagttcggtgttattcgtggtacgttagtttttgagttatttcgggttagcgtggcgcgcgagttgtcgttcgggt

SEQ ID NO: 39096 - DNA, 852 bp, Artificial Sequence
  chemically treated genomic DNA (Homo sapiens) CpG-island No: 39096
acccgaacgacaactcgcgcgccacgctaacccgaaataactcaaaaactaacgtaccacgaataacaccgaacttaaaaaccgaacctaccgcgctaaattctccccaacccgaacgctactcaaaacgacaaccaaaaccaattctccaaaaataacgaaaaataaaacgtccccgtttaaaacactctaaacaacgcgcgtttaactccgacccgcaaaaccgatatccccgcaaaccccgtccaaaaccccaactcacccgataacttacgccatcgcgacgcgcaccaaatccaaatcgtaataccgcaacacgaacaaccaacgcaactcgaaaaccgaatccaaactcacgttaaaacgcgacgctactaaaaacgaaacgactaacaacccgaccccgaccaacaacaacaacaacaaaaacgaaaaccccgaacgcgcctcccgatccgcgatccgcataactcgaactccaacgaccgcaacttaaaaacctacaaccgctatcgaaacccgaataaaccgtaaaaaaaaaaaaactaaaactaaactacgatcgctaaaaataaaacccgcgcacgacccgcccgcccctatcaccgacaaaccgaaacgacgacacctcccgtccccgccgcgcatccactaacccgccccgactctccatcgaacctaaaaatccctaaccgcgaaaccgctaaaaattaaaactaccgacaaccgacttctcaccaactaccgattccaacgcacctacttaaaccgaaaaaatataaactacgaccgaaaaaaactataaaattttcaataacgaaaaaatatcaaaaaaaacttttcaattaaact

SEQ ID NO: 39097 - DNA, 531 bp, Artificial Sequence
  chemically treated genomic DNA (Homo sapiens) CpG-island No: 39097
  unsure (375..376, 387..388, 527)
tgcgcgttttgtttttgtatttatagttattatttatcggggagtcggtatatcggttcgtttagataattaggcgttatgggtgcgttattaattagtgacgggagaagacggggcggagagagattcgtgaaggaagtgacgtaaaacgagcgttatagagaacgcgagtcgggagttcgtggaggttatggtttttcggcgttttttgttggttggggaggggaatttttttttcgtcgtcgttttgagcgaaattttggattagagtatttaatttatcgttatttgtttttagcgttcggtcgagttggttcgggatttattggtttgggagaatttgtagtgtttgcgcgagcgaggtagcgagttcgnntttttgcgaannttcgtttagcggtcggcgcgttttaaagtggaaagggtgggggcgtggggatgtaatttacgtggagattgtttttgatcgttttacggatatttatataaagtcggttttgtgtttagatttgggttggtttgtacgnttta

SEQ ID NO: 39098 - DNA, 531 bp, Artificial Sequence
  chemically treated genomic DNA (Homo sapiens) CpG-island No: 39098
  unsure (5, 144..145, 156..)
taaancgtacaaaccaacccaaatctaaacacaaaaccgactttatataaatatccgtaaaacgatcaaaaacaatctccacgtaaattacatccccacgcccccaccctttccactttaaaacgcgccgaccgctaaacgaannttcgcaaaaanncgaactcgctacctcgctcgcgcaaacactacaaattctcccaaaccaataaatcccgaaccaactcgaccgaacgctaaaaacaaataacgataaattaaatactctaatccaaaatttcgctcaaaacgacgacgaaaaaaaaattcccctccccaaccaacaaaaaacgccgaaaaaccataacctccacgaactcccgactcgcgttctctataacgctcgttttacgtcacttccttcacgaatctctctccgccccgtcttctcccgtcactaattaataacgcacccataacgcctaattatctaaacgaaccgatataccgactccccgataaataataactataaatacaaaaacaaaacgcgca

SEQ ID NO: 39099 - DNA, 531 bp, Artificial Sequence
  chemically treated genomic DNA (Homo sapiens) CpG-island No: 39099
  unsure (5, 144..145, 156..)
taaancgtgtagattagtttaagtttgggtataaagtcggttttatgtgaatattcgtgggacgattaagaataatttttacgtgggttatatttttacgtttttattttttttattttgggacgcgtcggtcgttgggcgggnnttcgtagaggnncgggttcgttatttcgttcgcgtaggtattgtagatttttttaggttagtggatttcgagttaattcggtcgggcgttggaggtaggtggcggtaagttgagtgttttgatttagggtttcgtttagagcggcggcgaaggagaaatttttttttttaattaataggaggcgtcgaggggttatggtttttacggattttcggttcgcgttttttgtggcgttcgttttacgttattttttttacggattttttttcgtttcgttttttttcgttattagttgatgacgtatttatggcgtttggttgtttagacgagtcggtgtatcgatttttcggtggatgataattatgagtgtaaaagtaagacgcgta

SEQ ID NO: 39100 - DNA, 531 bp, Artificial Sequence
  chemically treated genomic DNA (Homo sapiens) CpG-island No: 39100
  unsure (375..376, 387..388, 527)
tacgcgtcttacttttacactcataattatcatccaccgaaaaatcgatacaccgactcgtctaaacaaccaaacgccataaatacgtcatcaactaataacgaaaaaaaacgaaacgaaaaaaaatccgtaaaaaaaataacgtaaaacgaacgccacaaaaaacgcgaaccgaaaatccgtaaaaaccataacccctcgacgcctcctattaattaaaaaaaaaaatttctccttcgccgccgctctaaacgaaaccctaaatcaaaacactcaacttaccgccacctacctccaacgcccgaccgaattaactcgaaatccactaacctaaaaaaatctacaatacctacgcgaacgaaataacgaacccgnncctctacgaanncccgcccaacgaccgacgcgtcccaaaataaaaaaaataaaaacgtaaaaatataacccacgtaaaaattattcttaatcgtcccacgaatattcacataaaaccgactttatacccaaacttaaactaatctacacgnttta

SEQ ID NO: 39101 - DNA, 510 bp, Artificial Sequence
  chemically treated genomic DNA (Homo sapiens) CpG-island No: 39101
  unsure (460)
ggttagtgcgtggtgggaaggggcgggattttgttagtcgcggttgtcgttggagtcggtgttcgggttggtgatggggttaattttttttcgtaagatttttatttgtatttatttagtttcgtcgtcgtttcgtcgcgtcgcgttttaatcgtttttttttttttagtaacgcgggtaagagatgtttttttttttttcgtttagtttttcgggaataacgcgttttgtttttttttttcgttcgttaatcggtagcgttaacggagaaggaggtaggtaggggagagatgtggtgtgtggaaaggtggtttttttcgtcgggtcgtcggcgttttagttagggttttttgacgtttcgttgttgttagttcgtcgttaggtcgggtttcgagtgatcgaggttcgtttggtcgcggttgcggttttcgtgtagttgtagttattgttttgtgtttanttcgttattcgggggttatgtgaaaagtaaatttttcgaggtttagcgga

SEQ ID NO: 39102 - DNA, 510 bp, Artificial Sequence
  chemically treated genomic DNA (Homo sapiens) CpG-island No: 39102
  unsure (51)
tccgctaaacctcgaaaaatttacttttcacataacccccgaataacgaantaaacacaaaacaataactacaactacacgaaaaccgcaaccgcgaccaaacgaacctcgatcactcgaaacccgacctaacgacgaactaacaacaacgaaacgtcaaaaaaccctaactaaaacgccgacgacccgacgaaaaaaaccacctttccacacaccacatctctcccctacctacctccttctccgttaacgctaccgattaacgaacgaaaaaaaaaaacaaaacgcgttattcccgaaaaactaaacgaaaaaaaaaaaaacatctcttacccgcgttactaaaaaaaaaaaaacgattaaaacgcgacgcgacgaaacgacgacgaaactaaataaatacaaataaaaatcttacgaaaaaaaattaaccccatcaccaacccgaacaccgactccaacgacaaccgcgactaacaaaatcccgccccttcccaccacgcactaacc

SEQ ID NO: 39103 - DNA, 510 bp, Artificial Sequence
  chemically treated genomic DNA (Homo sapiens) CpG-island No: 39103
  unsure (51)
ttcgttaggtttcgaggggtttgttttttatatggttttcgggtggcgggntgggtataaggtagtggttgtagttgtacgggagtcgtagtcgcggttaggcgagtttcggttattcggaattcgatttaacggcgggttggtagtagcgggacgttagaaggttttggttgaagcgtcgacgattcggcggggaaggttatttttttatatattatattttttttttgtttgttttttttttcgttagcgttatcggttggcgggcgggggaggggagtaaggcgcgttattttcggggagttggacgggggagggaagggtattttttattcgcgttattgaggaggaggaggcggttggagcgcggcgcggcggggcgacggcggggttgggtgggtgtaagtaagagttttacgaaagggaattaattttattattagttcggatatcggttttagcggtagtcgcggttggtagaatttcgtttttttttattacgtattagtt

SEQ ID NO: 39104 - DNA, 510 bp, Artificial Sequence
  chemically treated genomic DNA (Homo sapiens) CpG-island No: 39104
  unsure (460)
aactaatacgtaataaaaaaaaacgaaattctaccaaccgcgactaccgctaaaaccgatatccgaactaataataaaattaattccctttcgtaaaactcttacttacacccacccaaccccgccgtcgccccgccgcgccgcgctccaaccgcctcctcctcctcaataacgcgaataaaaaatacccttccctcccccgtccaactccccgaaaataacgcgccttactcccctcccccgcccgccaaccgataacgctaacgaaaaaaaaaacaaacaaaaaaaaaatataatatataaaaaaataaccttccccgccgaatcgtcgacgcttcaaccaaaaccttctaacgtcccgctactaccaacccgccgttaaatcgaattccgaataaccgaaactcgcctaaccgcgactacgactcccgtacaactacaaccactaccttatacccancccgccacccgaaaaccatataaaaaacaaacccctcgaaacctaacgaa

SEQ ID NO: 39105 - DNA, 603 bp, Artificial Sequence
  chemically treated genomic DNA (Homo sapiens) CpG-island No: 39105
tttcgagtttttttcgggtcgggaagcgcggagatgacggcgttcgttttttcgtcgtcgttttaaggtattcgggggtgtttgttcggggtgttcgcgcgggggtgtttgttcggggttgttcggtgggagtattcgtcgcgttttgttttgcggattttgaatttttcgggcggacggcgtcggtcgggagggggtcgcgggtagtttcgcgttttcgcgggttttcggttggcggtcgtggttacgtcgattatcgtttcggggggtttggggaggaggggatcgggttttagtcgtgcgggtacgtattgttttttcgttttttcgttggcggggtgagtgttttcgtgggagttttcggtgtggagttagtttgtttcgcgggcggggggggtggggggttcggcgtcgttacgagtataggaaggaggtcgggagtattcgaggcggggtcggtcgtcggggttcgtttcgtcgtttagttgtggagcgcgttcggaaatttttgttcgtcgttcgttggattagttttttacgagttttggggtttttttttttttttttatttcggttttcggcgtttagttgggtggggggagg

SEQ ID NO: 39106 - DNA, 603 bp, Artificial Sequence
  chemically treated genomic DNA (Homo sapiens) CpG-island No: 39106
cctccccccacccaactaaacgccgaaaaccgaaataaaaaaaaaaaaaaaaaccccaaaactcgtaaaaaactaatccaacgaacgacgaacaaaaatttccgaacgcgctccacaactaaacgacgaaacgaaccccgacgaccgaccccgcctcgaatactcccgacctccttcctatactcgtaacgacgccgaaccccccaccccccccgcccgcgaaacaaactaactccacaccgaaaactcccacgaaaacactcaccccgccaacgaaaaaacgaaaaaacaatacgtacccgcacgactaaaacccgatcccctcctccccaaaccccccgaaacgataatcgacgtaaccacgaccgccaaccgaaaacccgcgaaaacgcgaaactacccgcgaccccctcccgaccgacgccgtccgcccgaaaaattcaaaatccgcaaaacaaaacgcgacgaatactcccaccgaacaaccccgaacaaacacccccgcgcgaacaccccgaacaaacacccccgaataccttaaaacgacgacgaaaaaacgaacgccgtcatctccgcgcttcccgacccgaaaaaaactcgaaa

SEQ ID NO: 39107 - DNA, 603 bp, Artificial Sequence
  chemically treated genomic DNA (Homo sapiens) CpG-island No: 39107
tttttttttatttagttagacgtcgggggtcgggatgggaggaggaagggaagttttagaattcgtgaaaaattggtttagcgggcggcggataaaagttttcgagcgcgttttatagttgggcggcggagcgggtttcggcggtcggtttcgtttcggatgttttcggttttttttttgtgttcgtgacggcgtcgagttttttatttttttcgttcgcgaggtaggttagttttatatcgagggtttttacgaaaatatttatttcgttaacggaagggcgagggaataatacgtgttcgtacggttagggttcggtttttttttttttaggtttttcggggcggtggtcggcgtgattacgatcgttagtcgggaattcgcgagggcgcggggttgttcgcggttttttttcggtcggcgtcgttcgttcgggaggtttaaagttcgtagagtagggcgcggcggatgtttttatcgagtagtttcgagtaggtattttcgcgcgagtatttcgggtaggtattttcggatattttagggcggcggcgggagggcgggcgtcgttattttcgcgtttttcggttcgagaaggattcgaaa

SEQ ID NO: 39108 - DNA, 603 bp, Artificial Sequence
  chemically treated genomic DNA (Homo sapiens) CpG-island No: 39108
tttcgaatccttctcgaaccgaaaaacgcgaaaataacgacgcccgccctcccgccgccgccctaaaatatccgaaaatacctacccgaaatactcgcgcgaaaatacctactcgaaactactcgataaaaacatccgccgcgccctactctacgaactttaaacctcccgaacgaacgacgccgaccgaaaaaaaaccgcgaacaaccccgcgccctcgcgaattcccgactaacgatcgtaatcacgccgaccaccgccccgaaaaacctaaaaaaaaaaaaaccgaaccctaaccgtacgaacacgtattattccctcgcccttccgttaacgaaataaatattttcgtaaaaaccctcgatataaaactaacctacctcgcgaacgaaaaaaataaaaaactcgacgccgtcacgaacacaaaaaaaaaaccgaaaacatccgaaacgaaaccgaccgccgaaacccgctccgccgcccaactataaaacgcgctcgaaaacttttatccgccgcccgctaaaccaatttttcacgaattctaaaacttcccttcctcctcccatcccgacccccgacgtctaactaaataaaaaaaaa

SEQ ID NO: 39109 - DNA, 564 bp, Artificial Sequence
  chemically treated genomic DNA (Homo sapiens) CpG-island No: 39109
cgcgtttcgttatcgtgtgcgtttcggggcggggcggggcgggggcgggggcgggggcgggggcgggatcgggcgttcgggtttcgttttcggtatttttgtaggcgattttgttttcgtcgtggttttcgggtgttaggagatagttgtcggcgttgggttgtgcgagacgttaattgtatttttcgggtttaacgttgtgaggtagcgcgcggaggaattggggataagcgtttcggagtttttaaatagagcgcggtcgttgggggatagcgcgcggcgtcgggtcggggcggggcggtttttttgtcggaggacgcgaatcggtacgttgcgtttttaaggagtttagttgggttgggcgtcggagttgggagcggcgcgggtaggagttcggcggtaggttttagttcggggttagagatcgagggtcggggttcgggttcggcggcgggatttaggcggttgaggttggttaggtgagcggaggcgggcgggcgggcggtggtgcgtttttagggggatggggcgttttgatggtttcgtgattttttttttagtgtt

SEQ ID NO: 39110 - DNA, 564 bp, Artificial Sequence
  chemically treated genomic DNA (Homo sapiens) CpG-island No: 39110
aacactaaaaaaaaaatcacgaaaccatcaaaacgccccatccccctaaaaacgcaccaccgcccgcccgcccgcctccgctcacctaaccaacctcaaccgcctaaatcccgccgccgaacccgaaccccgaccctcgatctctaaccccgaactaaaacctaccgccgaactcctacccgcgccgctcccaactccgacgcccaacccaactaaactccttaaaaacgcaacgtaccgattcgcgtcctccgacaaaaaaaccgccccgccccgacccgacgccgcgcgctatcccccaacgaccgcgctctatttaaaaactccgaaacgcttatccccaattcctccgcgcgctacctcacaacgttaaacccgaaaaatacaattaacgtctcgcacaacccaacgccgacaactatctcctaacacccgaaaaccacgacgaaaacaaaatcgcctacaaaaataccgaaaacgaaacccgaacgcccgatcccgcccccgcccccgcccccgcccccgccccgccccgccccgaaacgcacacgataacgaaacgcg

SEQ ID NO: 39111 - DNA, 564 bp, Artificial Sequence
  chemically treated genomic DNA (Homo sapiens) CpG-island No: 39111
gatattgggggagaggttacggggttattagggcgttttatttttttaggagcgtattatcgttcgttcgttcgttttcgtttatttgattagttttaatcgtttgggtttcgtcgtcgggttcggatttcggttttcggtttttagtttcgggttgggatttgtcgtcgggtttttattcgcgtcgtttttagtttcggcgtttagtttagttggattttttaaaggcgtagcgtgtcggttcgcgtttttcgatagaaaagtcgtttcgtttcgattcggcgtcgcgcgttgttttttagcggtcgcgttttgtttgggggtttcggggcgtttatttttagttttttcgcgcgttgttttatagcgttaaattcggagggtatagttagcgtttcgtataatttaacgtcggtaattgttttttagtattcgaaagttacggcgagagtaggatcgtttatagaggtatcgggggcggagttcgagcgttcggtttcgttttcgttttcgttttcgttttcgtttcgtttcgtttcggaacgtatacggtggcggggcgcg

SEQ ID NO: 39112 - DNA, 564 bp, Artificial Sequence
  chemically treated genomic DNA (Homo sapiens) CpG-island No: 39112
cgcgccccgccaccgtatacgttccgaaacgaaacgaaacgaaaacgaaaacgaaaacgaaaacgaaaccgaacgctcgaactccgcccccgatacctctataaacgatcctactctcgccgtaactttcgaatactaaaaaacaattaccgacgttaaattatacgaaacgctaactataccctccgaatttaacgctataaaacaacgcgcgaaaaaactaaaaataaacgccccgaaacccccaaacaaaacgcgaccgctaaaaaacaacgcgcgacgccgaatcgaaacgaaacgacttttctatcgaaaaacgcgaaccgacacgctacgcctttaaaaaatccaactaaactaaacgccgaaactaaaaacgacgcgaataaaaacccgacgacaaatcccaacccgaaactaaaaaccgaaaaccgaaatccgaacccgacgacgaaacccaaacgattaaaactaatcaaataaacgaaaacgaacgaacgaacgataatacgctcctaaaaaaataaaacgccctaataaccccgtaacctctcccccaatatc

SEQ ID NO: 39113 - DNA, 581 bp, Artificial Sequence
  chemically treated genomic DNA (Homo sapiens) CpG-island No: 39113
cggttttcgttcgacgattttgttcggttcgcgttaggtagttcgtagttttttcgcggttcggggtcgttttacgtcgttcgttcgttcgttgggtcgcgtatcgtgtgggattgtaggttttggttcgtttcgatggttgttgttagcggtatcgtgtcgtttagtagtattttgtcggttggcggtttttttatgaaggttatttcgggacgttcggtcgtcgtcgtttagggacgcgaggtaggaattcgaggcgtcgattttcgtcgttcgttcggttttatcgtcgtcgttgttaatacgcgtcgttttacgcgtcgtcgggttcgcggggttttagcgtcgttttttttacggtcgtcgtttcggagttttagcgtcgatttagcgtagaacgtgtgggggtcgttagtattgtcgttcgttggttcgttttttcgtttcgcggttgttatgggtttgcgtttttttgtttttcgtagtcgtatcgtagattcggtgtttttagtttcgggtttcggattagggaatattattttaagttattattattaggatttttagatttagagacgttt

SEQ ID NO: 39114 - DNA, 581 bp, Artificial Sequence
  chemically treated genomic DNA (Homo sapiens) CpG-island No: 39114
aaacgtctctaaatctaaaaatcctaataataataacttaaaataatattccctaatccgaaacccgaaactaaaaacaccgaatctacgatacgactacgaaaaacaaaaaaacgcaaacccataacaaccgcgaaacgaaaaaacgaaccaacgaacgacaatactaacgacccccacacgttctacgctaaatcgacgctaaaactccgaaacgacgaccgtaaaaaaaacgacgctaaaaccccgcgaacccgacgacgcgtaaaacgacgcgtattaacaacgacgacgataaaaccgaacgaacgacgaaaatcgacgcctcgaattcctacctcgcgtccctaaacgacgacgaccgaacgtcccgaaataaccttcataaaaaaaccgccaaccgacaaaatactactaaacgacacgataccgctaacaacaaccatcgaaacgaaccaaaacctacaatcccacacgatacgcgacccaacgaacgaacgaacgacgtaaaacgaccccgaaccgcgaaaaaactacgaactacctaacgcgaaccgaacaaaatcgtcgaacgaaaaccg

SEQ ID NO: 39115 - DNA, 581 bp, Artificial Sequence
  chemically treated genomic DNA (Homo sapiens) CpG-island No: 39115
aggcgtttttggatttgaggattttggtagtgatggtttagggtggtgttttttggttcgaagttcggagttaagggtatcgggtttgcggtgcggttgcgaggagtagggaagcgtaggtttatggtagtcgcgaggcggaggagcgggttagcgggcggtagtgttggcggtttttatacgttttgcgttgggtcggcgttaggatttcggggcggcggtcgtgggaagggcggcgttaggatttcgcgggttcggcggcgcgtggggcggcgcgtgttgatagcggcggcggtggaatcgggcgggcggcgggagtcggcgtttcgggtttttatttcgcgtttttaggcggcggcggtcgggcgtttcgggatggtttttatggagaagtcgttagtcggtaaggtgttgttggacgatacggtgtcgttgatagtagttatcgaggcgagttagagtttgtagttttatacggtgcgcggtttagcgggcgggcgggcggcgtggggcggtttcgggtcgcgagggggttgcgggttgtttggcgcgggtcgggtagggtcgtcggacggagatcg

SEQ ID NO: 39116 - DNA, 581 bp, Artificial Sequence
  chemically treated genomic DNA (Homo sapiens) CpG-island No: 39116
cgatctccgtccgacgaccctacccgacccgcgccaaacaacccgcaaccccctcgcgacccgaaaccgccccacgccgcccgcccgcccgctaaaccgcgcaccgtataaaactacaaactctaactcgcctcgataactactatcaacgacaccgtatcgtccaacaacaccttaccgactaacgacttctccataaaaaccatcccgaaacgcccgaccgccgccgcctaaaaacgcgaaataaaaacccgaaacgccgactcccgccgcccgcccgattccaccgccgccgctatcaacacgcgccgccccacgcgccgccgaacccgcgaaatcctaacgccgcccttcccacgaccgccgccccgaaatcctaacgccgacccaacgcaaaacgtataaaaaccgccaacactaccgcccgctaacccgctcctccgcctcgcgactaccataaacctacgcttccctactcctcgcaaccgcaccgcaaacccgatacccttaactccgaacttcgaaccaaaaaacaccaccctaaaccatcactaccaaaatcctcaaatccaaaaacgcct

SEQ ID NO: 39117 - DNA, 737 bp, Artificial Sequence
  chemically treated genomic DNA (Homo sapiens) CpG-island No: 39117
aggtgcggggaatttgggtcgtaagcgtcgaagttattcggtgaagaaggtttggagtattggttttcgattcgtcgtcgaagatttgggttgagcgatggtggtattaggtttaagggatttgatttttaaaaggcggaacgggagcgttggtgtgttcggttcgttaaagttgtagtcgttcgcggttttcggcgtttggtttgtttcgtttgcgcgaggttttcggtaggcggcgttgttgtttcggttgagcgggcggaacggtttggatttcgcggtttttgtttttagttttgcggtcgatttgagagttgggatttcgggcggggagcgggaggttgagtaggggtagtcggagtcgtcgtaggaggggttgaggggtgtttcgcggtttttttcggtcgtttcggtggtttttcgggttttttggttaagggcgttgggttgcgggtgggtttcggggggagtcgtttcgtatagtaggcgcgagttaatttatttttttttattttttcggtggcgttgtggtttttaaaattttcgttttttttttttatagttattagaaggcgcggtttgttatttggataaacgcggttttttttagagttcggttgcgttttaaagtcgggtttcgttttattttcgataaagatattttttgatttgtttttcgttagattttagtaattttttgggttttcgggaagttgatttcgtttttgggtttttat

SEQ ID NO: 39118 - DNA, 737 bp, Artificial Sequence
  chemically treated genomic DNA (Homo sapiens) CpG-island No: 39118
ataaaaacccaaaaacgaaatcaacttcccgaaaacccaaaaaattactaaaatctaacgaaaaacaaatcaaaaaatatctttatcgaaaataaaacgaaacccgactttaaaacgcaaccgaactctaaaaaaaaccgcgtttatccaaataacaaaccgcgccttctaataactataaaaaaaaaaaacgaaaattttaaaaaccacaacgccaccgaaaaaataaaaaaaaataaattaactcgcgcctactatacgaaacgactccccccgaaacccacccgcaacccaacgcccttaaccaaaaaacccgaaaaaccaccgaaacgaccgaaaaaaaccgcgaaacacccctcaacccctcctacgacgactccgactacccctactcaacctcccgctccccgcccgaaatcccaactctcaaatcgaccgcaaaactaaaaacaaaaaccgcgaaatccaaaccgttccgcccgctcaaccgaaacaacaacgccgcctaccgaaaacctcgcgcaaacgaaacaaaccaaacgccgaaaaccgcgaacgactacaactttaacgaaccgaacacaccaacgctcccgttccgccttttaaaaatcaaatcccttaaacctaataccaccatcgctcaacccaaatcttcgacgacgaatcgaaaaccaatactccaaaccttcttcaccgaataacttcgacgcttacgacccaaattccccgcacct

SEQ ID NO: 39119 - DNA, 737 bp, Artificial Sequence
  chemically treated genomic DNA (Homo sapiens) CpG-island No: 39119
atggaagtttagaggcgaaattagtttttcggggatttagaaaattgttggagtttggcgaggggtaaattaggaagtgtttttgtcggagatgggacggaattcggttttggggcgtaatcgggttttgggggagatcgcgtttgtttaggtggtaggtcgcgttttttgatggttgtgaagagaaggagcgggggttttaagagttatagcgttatcgagagagtggaaaggagtagattagttcgcgtttgttatgcgaggcgatttttttcgagatttattcgtagtttagcgtttttggttaggaggttcggaaagttatcgaggcggtcgaaaggggtcgcggggtattttttagttttttttgcggcggtttcggttgtttttgtttagtttttcgtttttcgttcggagttttagtttttagatcggtcgtagagttgggaatagaagtcgcggggtttaggtcgtttcgttcgtttagtcggagtagtagcgtcgtttgtcgggggtttcgcgtaggcgagataggttagacgtcggaggtcgcgggcggttgtagttttgacgggtcgaatatattagcgttttcgtttcgttttttgaaaattaaattttttgggtttggtgttattatcgtttagtttaggttttcgacgacgggtcgaaggttagtgttttaggttttttttatcgagtggtttcggcgtttgcggtttaggtttttcgtattt

SEQ ID NO: 39120 - DNA, 737 bp, Artificial Sequence
  chemically treated genomic DNA (Homo sapiens) CpG-island No: 39120
aaatacgaaaaacctaaaccgcaaacgccgaaaccactcgataaaaaaaacctaaaacactaaccttcgacccgtcgtcgaaaacctaaactaaacgataataacaccaaacccaaaaaatttaattttcaaaaaacgaaacgaaaacgctaatatattcgacccgtcaaaactacaaccgcccgcgacctccgacgtctaacctatctcgcctacgcgaaacccccgacaaacgacgctactactccgactaaacgaacgaaacgacctaaaccccgcgacttctattcccaactctacgaccgatctaaaaactaaaactccgaacgaaaaacgaaaaactaaacaaaaacaaccgaaaccgccgcaaaaaaaactaaaaaataccccgcgacccctttcgaccgcctcgataactttccgaacctcctaaccaaaaacgctaaactacgaataaatctcgaaaaaaatcgcctcgcataacaaacgcgaactaatctactcctttccactctctcgataacgctataactcttaaaacccccgctccttctcttcacaaccatcaaaaaacgcgacctaccacctaaacaaacgcgatctcccccaaaacccgattacgccccaaaaccgaattccgtcccatctccgacaaaaacacttcctaatttacccctcgccaaactccaacaattttctaaatccccgaaaaactaatttcgcctctaaacttccat

SEQ ID NO: 39121 - DNA, 731 bp, Artificial Sequence
  chemically treated genomic DNA (Homo sapiens) CpG-island No: 39121
gaatttgttttcgggtcgtgttttttttggcgtcgagtttttagatagttcgggacgtttttgtgcgtattggacgcgcgacgcgtagtagttattggttcgattcgcgtttttttaagtatttttcgaaggggcgtagtttttgtttattttggttgtcgagggattgttgcgtcggttttcgtatttattcgtataggtttcgtcgttggtcgtcgggagatagttgttcggcggtagcggtggcggcgggtttaggagggtcggggttgagcgtttgtagtagtttagaagcgtaggaaggcgcggcggtcgggtggtgcgggtggtgatgcgggtggtggtgcggatggtagtttgcggggttgttgtagtttatggttgcggtcggggagttatcgttgaggtcgtgagttacggcgttggcggcggtcgcggcgttttcgggcgcgtagttattttagttttttcggagtggggcgttatacgttgtcggttaggatggtttcggggattgcgcgttgtttaagttcgttgtcgttgtagttgcggtcgttacgtggtaatcgtcgtagttcgggtattgcggggggttgacgaagttttgcggcgttaggttgaggtcgttagagtggcgtacggagttagggtatatgtttacgtttttgtttaggaggtagtttacgtatatggtggcgagggttcgggagtagattttattatgttgtttg

SEQ ID NO: 39122 - DNA, 731 bp, Artificial Sequence
  chemically treated genomic DNA (Homo sapiens) CpG-island No: 39122
caaacaacataataaaatctactcccgaaccctcgccaccatatacgtaaactacctcctaaacaaaaacgtaaacatataccctaactccgtacgccactctaacgacctcaacctaacgccgcaaaacttcgtcaaccccccgcaatacccgaactacgacgattaccacgtaacgaccgcaactacaacgacaacgaacttaaacaacgcgcaatccccgaaaccatcctaaccgacaacgtataacgccccactccgaaaaaactaaaataactacgcgcccgaaaacgccgcgaccgccgccaacgccgtaactcacgacctcaacgataactccccgaccgcaaccataaactacaacaaccccgcaaactaccatccgcaccaccacccgcatcaccacccgcaccacccgaccgccgcgccttcctacgcttctaaactactacaaacgctcaaccccgaccctcctaaacccgccgccaccgctaccgccgaacaactatctcccgacgaccaacgacgaaacctatacgaataaatacgaaaaccgacgcaacaatccctcgacaaccaaaataaacaaaaactacgccccttcgaaaaatacttaaaaaaacgcgaatcgaaccaataactactacgcgtcgcgcgtccaatacgcacaaaaacgtcccgaactatctaaaaactcgacgccaaaaaaaacacgacccgaaaacaaattc

SEQ ID NO: 39123 - DNA, 731 bp, Artificial Sequence
  chemically treated genomic DNA (Homo sapiens) CpG-island No: 39123
taggtagtatggtgaggtttgttttcggattttcgttattatgtacgtgagttattttttggataaggacgtgagtatgtattttagtttcgtgcgttattttggcggttttaatttggcgtcgtagaatttcgttagtttttcgtagtattcggattacggcggttattacgtggcggtcgtagttgtagcggtagcgaatttggatagcgcgtagttttcggggttattttggtcggtagcgtatggcgttttatttcgggaggattggaatggttacgcgttcggaggcgtcgcggtcgtcgttaacgtcgtggtttacggttttaacggtggtttttcggtcgtagttatgggttatagtagtttcgtagattattattcgtattattattcgtattattattcgtattattcggtcgtcgcgtttttttgcgtttttgggttgttgtaaacgtttaatttcggtttttttgggttcgtcgttatcgttgtcgtcgagtagttgtttttcggcggttagcggcggaatttgtgcgagtggatgcggaagtcggcgtagtagtttttcggtagttaaggtaagtagaggttgcgttttttcggagggtgtttgggaaggcgcgggtcgagttagtggttgttgcgcgtcgcgcgtttagtgcgtataggggcgtttcgggttgtttgggagttcggcgttaggaggggtacggttcggagataaattt

SEQ ID NO: 39124 - DNA, 731 bp, Artificial Sequence
  chemically treated genomic DNA (Homo sapiens) CpG-island No: 39124
aaatttatctccgaaccgtacccctcctaacgccgaactcccaaacaacccgaaacgcccctatacgcactaaacgcgcgacgcgcaacaaccactaactcgacccgcgccttcccaaacaccctccgaaaaaacgcaacctctacttaccttaactaccgaaaaactactacgccgacttccgcatccactcgcacaaattccgccgctaaccgccgaaaaacaactactcgacgacaacgataacgacgaacccaaaaaaaccgaaattaaacgtttacaacaacccaaaaacgcaaaaaaacgcgacgaccgaataatacgaataataatacgaataataatacgaataataatctacgaaactactataacccataactacgaccgaaaaaccaccgttaaaaccgtaaaccacgacgttaacgacgaccgcgacgcctccgaacgcgtaaccattccaatcctcccgaaataaaacgccatacgctaccgaccaaaataaccccgaaaactacgcgctatccaaattcgctaccgctacaactacgaccgccacgtaataaccgccgtaatccgaatactacgaaaaactaacgaaattctacgacgccaaattaaaaccgccaaaataacgcacgaaactaaaatacatactcacgtccttatccaaaaaataactcacgtacataataacgaaaatccgaaaacaaacctcaccatactaccta

SEQ ID NO: 39125 - DNA, 911 bp, Artificial Sequence
  chemically treated genomic DNA (Homo sapiens) CpG-island No: 39125
agtcgtaaatttcgagttttagcggtcgttttttttttttttcgttttttttgatttaaggttttaaaagataaacgtgttatttttcgtttcgtttttggattttggtttcgatcgaatgtagtggggatcgagaagcgtaaggtttaggatttgttagaggggcgcgttaagggcgtttttgtttcgttaggatattatcgtttgggtattttattttattttttcgtagttttttttggggtcgggcggggcggggcggggtaggggggtcgggcgcggtttacgcgttttttcgagtgcgcggtgcgggacgggcgcggttgacgcgttttcgtcggtgtttgtgttttttcgtaggttaggagggtattttgcgttgttattcggatttggcgggtagcgagttgtagcggggtacgtttacggtcgagtcgtagcgggaatagagcggcgtaggtttgaggagtttgggcgcggacgagcggttgcggttggtcgagtttaacgcgtagtatcgcgcgcgtttcggtttttttttcgtgttcgtcgcgcgttttagcgatcggacggcggtgtcgcgcgagttggcgcgtcggttgttttgttcgttcgcgtaggagttgcgtattgttttgggcgaggtgaagaagatcggtagtttgcgtttggtcgatttttttcgcgtagatttcgttaagttgtagttgtcgcgcgggttagggattcgggacgtataatcggacgcgcgggggttacggttcggagttgtgcgttttgggcgggaggcggattcgggtttggaatagcgtttatatacgtgtataaaggaagtggagaattgaggtaattatacgagtaatgagtttttttgttcgtttatttatacgcgtacgcgttgttaaaatatt

SEQ ID NO: 39126 - DNA, 911 bp, Artificial Sequence
  chemically treated genomic DNA (Homo sapiens) CpG-island No: 39126
aatattttaacaacgcgtacgcgtataaataaacgaacaaaaaaactcattactcgtataattacctcaattctccacttcctttatacacgtatataaacgctattccaaacccgaatccgcctcccgcccaaaacgcacaactccgaaccgtaacccccgcgcgtccgattatacgtcccgaatccctaacccgcgcgacaactacaacttaacgaaatctacgcgaaaaaaatcgaccaaacgcaaactaccgatcttcttcacctcgcccaaaacaatacgcaactcctacgcgaacgaacaaaacaaccgacgcgccaactcgcgcgacaccgccgtccgatcgctaaaacgcgcgacgaacacgaaaaaaaaaccgaaacgcgcgcgatactacgcgttaaactcgaccaaccgcaaccgctcgtccgcgcccaaactcctcaaacctacgccgctctattcccgctacgactcgaccgtaaacgtaccccgctacaactcgctacccgccaaatccgaataacaacgcaaaataccctcctaacctacgaaaaaacacaaacaccgacgaaaacgcgtcaaccgcgcccgtcccgcaccgcgcactcgaaaaaacgcgtaaaccgcgcccgacccccctaccccgccccgccccgcccgaccccaaaaaaaactacgaaaaaataaaataaaatacccaaacgataatatcctaacgaaacaaaaacgcccttaacgcgcccctctaacaaatcctaaaccttacgcttctcgatccccactacattcgatcgaaaccaaaatccaaaaacgaaacgaaaaataacacgtttatcttttaaaaccttaaatcaaaaaaaacgaaaaaaaaaaaaaacgaccgctaaaactcgaaatttacgact

SEQ ID NO: 39127 - DNA, 911 bp, Artificial Sequence
  chemically treated genomic DNA (Homo sapiens) CpG-island No: 39127
gatattttggtaacgcgtgcgcgtgtgggtgggcggataaaaggatttattattcgtatgattgttttaattttttattttttttgtgtacgtgtgtggacgttgttttaggttcgagttcgtttttcgtttaggacgtatagtttcgggtcgtggttttcgcgcgttcggttgtgcgtttcgggtttttggttcgcgcggtagttatagtttggcggggtttgcgcggaggaggtcggttaggcgtaggttgtcgattttttttatttcgtttagagtagtgcgtagtttttgcgcggacgggtagagtagtcggcgcgttagttcgcgcggtatcgtcgttcggtcgttgaagcgcgcggcgagtacgaaggggaaatcgaagcgcgcgcggtattgcgcgttgagttcggttagtcgtagtcgttcgttcgcgtttaggttttttaggtttgcgtcgttttgttttcgttgcgattcggtcgtgagcgtgtttcgttgtagttcgttgttcgttaggttcgggtggtagcgtaggatgtttttttggtttgcggagaagtatagatatcggcgggagcgcgttaatcgcgttcgtttcgtatcgcgtattcgagggggcgcgtaggtcgcgttcggtttttttgtttcgtttcgtttcgttcggttttaaagaaggttgcgggagggtgaagtagagtatttaggcggtgatgttttggcggaataggggcgtttttggcgcgtttttttaataagttttggattttgcgtttttcggtttttattatattcggtcgggattaggatttaggggcggggcgggaagtgatacgtttgttttttgagattttgggttaagaagagcggaggagagagagggcggtcgttgaggttcggaatttacgatt

SEQ ID NO: 39128 - DNA, 911 bp, Artificial Sequence
  chemically treated genomic DNA (Homo sapiens) CpG-island No: 39128
aatcgtaaattccgaacctcaacgaccgccctctctctcctccgctcttcttaacccaaaatctcaaaaaacaaacgtatcacttcccgccccgcccctaaatcctaatcccgaccgaatataataaaaaccgaaaaacgcaaaatccaaaacttattaaaaaaacgcgccaaaaacgcccctattccgccaaaacatcaccgcctaaatactctacttcaccctcccgcaaccttctttaaaaccgaacgaaacgaaacgaaacaaaaaaaccgaacgcgacctacgcgccccctcgaatacgcgatacgaaacgaacgcgattaacgcgctcccgccgatatctatacttctccgcaaaccaaaaaaacatcctacgctaccacccgaacctaacgaacaacgaactacaacgaaacacgctcacgaccgaatcgcaacgaaaacaaaacgacgcaaacctaaaaaacctaaacgcgaacgaacgactacgactaaccgaactcaacgcgcaataccgcgcgcgcttcgatttccccttcgtactcgccgcgcgcttcaacgaccgaacgacgataccgcgcgaactaacgcgccgactactctacccgtccgcgcaaaaactacgcactactctaaacgaaataaaaaaaatcgacaacctacgcctaaccgacctcctccgcgcaaaccccgccaaactataactaccgcgcgaaccaaaaacccgaaacgcacaaccgaacgcgcgaaaaccacgacccgaaactatacgtcctaaacgaaaaacgaactcgaacctaaaacaacgtccacacacgtacacaaaaaaaataaaaaattaaaacaatcatacgaataataaatccttttatccgcccacccacacgcgcacgcgttaccaaaatatc

SEQ ID NO: 39129 - DNA, 577 bp, Artificial Sequence
  chemically treated genomic DNA (Homo sapiens) CpG-island No: 39129
ggcgattaagatattttcgcgagggtttagggcgcgtttttttcgttaggttttagatttcggttttgcgttatttttttttacgtttcggcgcgggcgtagttagttcggttttttttaggtttttaagtttcggatcgagtgtggggtcgtttttttttttcggaaggagttatcgtcgttttaagtggaagaggagaggaagggggcgggggagcggggggcggggagcggaggcggaggaggggaagggggatttttttggtttttacgtggttcgggcgtttgtgaatcgcgtttatcggagggttttatagcgaaatataaaagtagttgggaagcggcggggattcgagtttttagcgtcgggcggagcggcggatagagtttcgtagcgtttcgcggtcgcgatggggtcgaagcgttcgaattttcggagtttataaattggcggggttcggttcgtcgtcgggattcgggtgtcgggttttgggttggaagcgcggcggcgtatcgttataattcgggagatttggtaggaggtttgggggttcgttcgtttcggggggttttgtgt

SEQ ID NO: 39130 - DNA, 577 bp, Artificial Sequence
  chemically treated genomic DNA (Homo sapiens) CpG-island No: 39130
acacaaaaccccccgaaacgaacgaacccccaaacctcctaccaaatctcccgaattataacgatacgccgccgcgcttccaacccaaaacccgacacccgaatcccgacgacgaaccgaaccccgccaatttataaactccgaaaattcgaacgcttcgaccccatcgcgaccgcgaaacgctacgaaactctatccgccgctccgcccgacgctaaaaactcgaatccccgccgcttcccaactacttttatatttcgctataaaaccctccgataaacgcgattcacaaacgcccgaaccacgtaaaaaccaaaaaaatcccccttcccctcctccgcctccgctccccgccccccgctcccccgcccccttcctctcctcttccacttaaaacgacgataactccttccgaaaaaaaaaaacgaccccacactcgatccgaaacttaaaaacctaaaaaaaaccgaactaactacgcccgcgccgaaacgtaaaaaaaaataacgcaaaaccgaaatctaaaacctaacgaaaaaaacgcgccctaaaccctcgcgaaaatatcttaatcgcc

SEQ ID NO: 39131 - DNA, 577 bp, Artificial Sequence
  chemically treated genomic DNA (Homo sapiens) CpG-island No: 39131
atataaggtttttcggggcgggcgggtttttaaattttttgttaagtttttcgggttgtggcggtgcgtcgtcgcgtttttagtttaagattcggtattcgggtttcggcggcgagtcgggtttcgttagtttgtgggtttcgggggttcgggcgtttcggttttatcgcggtcgcggggcgttgcggggttttgttcgtcgtttcgttcggcgttggaaattcgagttttcgtcgttttttaattgtttttgtatttcgttgtgagatttttcggtgggcgcgatttataggcgttcggattacgtgggagttagggggatttttttttttttttttcgttttcgtttttcgtttttcgttttttcgttttttttttttttttttttatttaaagcggcgatggtttttttcgagagggagaggcggttttatattcggttcgggatttgggggtttggaggaagtcggattggttgcgttcgcgtcggggcgtaggagggggtggcgtagagtcggagtttggggtttggcgggagggacgcgttttgggttttcgcgggggtgttttggtcgtt

SEQ ID NO: 39132 - DNA, 577 bp, Artificial Sequence
  chemically treated genomic DNA (Homo sapiens) CpG-island No: 39132
aacgaccaaaacacccccgcgaaaacccaaaacgcgtccctcccgccaaaccccaaactccgactctacgccaccccctcctacgccccgacgcgaacgcaaccaatccgacttcctccaaacccccaaatcccgaaccgaatataaaaccgcctctccctctcgaaaaaaaccatcgccgctttaaataaaaaaaaaaaaaaaaaaaacgaaaaaacgaaaaacgaaaaacgaaaacgaaaaaaaaaaaaaaaaatccccctaactcccacgtaatccgaacgcctataaatcgcgcccaccgaaaaatctcacaacgaaatacaaaaacaattaaaaaacgacgaaaactcgaatttccaacgccgaacgaaacgacgaacaaaaccccgcaacgccccgcgaccgcgataaaaccgaaacgcccgaacccccgaaacccacaaactaacgaaacccgactcgccgccgaaacccgaataccgaatcttaaactaaaaacgcgacgacgcaccgccacaacccgaaaaacttaacaaaaaatttaaaaacccgcccgccccgaaaaaccttatat

SEQ ID NO: 39133 - DNA, 583 bp, Artificial Sequence
  chemically treated genomic DNA (Homo sapiens) CpG-island No: 39133
cggcgttgaaatttagtacgttttttcggagataggcgcgtacggcgggtagcggtatcgagttttgtagcgcgtataggtattcgtagtgggagaagaagttcgtcgcgttgtcgcggcgtagttttacggagtcgattatggttcgagggcggtttcgggggatgttcgtcgcggagacgtcgttcgcgtttatttaagaacgttgagtcgtaattcggtcgtttcggtatttacggttaggcgatagcggtagtttcgtatcgggtttaggagcggtgattcggtcggaagacgtaaggttagagttttaagttaggtcggttttttaacgttttattttcgcgttgtttttcgttttgcggtttaagtagttggcgttcgttttatagttttttgaggcgtcgggatttaagtcggtgggcggtgtcgtggaacggtgcgttaagacgttaacgtgttcgttgtgcgtcggtacgtaggtttcgttttttgaggacgggtgagttcgttgttatttgagatagtggtcgggagagtttgagggtttgcgaaagagtttattgatcgattcgaataaaag

SEQ ID NO: 39134 - DNA, 583 bp, Artificial Sequence
  chemically treated genomic DNA (Homo sapiens) CpG-island No: 39134
cttttattcgaatcgatcaataaactctttcgcaaaccctcaaactctcccgaccactatctcaaataacaacgaactcacccgtcctcaaaaaacgaaacctacgtaccgacgcacaacgaacacgttaacgtcttaacgcaccgttccacgacaccgcccaccgacttaaatcccgacgcctcaaaaaactataaaacgaacgccaactacttaaaccgcaaaacgaaaaacaacgcgaaaataaaacgttaaaaaaccgacctaacttaaaactctaaccttacgtcttccgaccgaatcaccgctcctaaacccgatacgaaactaccgctatcgcctaaccgtaaataccgaaacgaccgaattacgactcaacgttcttaaataaacgcgaacgacgtctccgcgacgaacatcccccgaaaccgccctcgaaccataatcgactccgtaaaactacgccgcgacaacgcgacgaacttcttctcccactacgaatacctatacgcgctacaaaactcgataccgctacccgccgtacgcgcctatctccgaaaaaacgtactaaatttcaacgccg

SEQ ID NO: 39135 - DNA, 583 bp, Artificial Sequence
  chemically treated genomic DNA (Homo sapiens) CpG-island No: 39135
tttttattcggatcgattagtaaattttttcgtaaatttttaaattttttcgattattattttaggtagtagcgaatttattcgtttttaggaggcgggatttgcgtgtcgacgtatagcgagtacgttgacgttttggcgtatcgttttacggtatcgtttatcggtttgaatttcggcgttttagaggattatgaggcgggcgttaattgtttgggtcgtagggcgggaggtagcgcgggagtggggcgttgaggggtcggtttagtttggggttttggttttgcgtttttcgatcgaattatcgtttttgagttcggtgcggggttgtcgttatcgtttggtcgtgggtgtcggagcggtcgggttgcgatttagcgtttttgggtgggcgcgggcggcgttttcgcggcgggtatttttcgaggtcgttttcgggttatgatcgatttcgtgaagttgcgtcgcgatagcgcggcggatttttttttttattacgagtatttgtgcgcgttgtagaattcggtgtcgttgttcgtcgtgcgcgtttgttttcgggagggcgtgttggattttaacgtcg

SEQ ID NO: 39136 - DNA, 583 bp, Artificial Sequence
  chemically treated genomic DNA (Homo sapiens) CpG-island No: 39136
cgacgttaaaatccaacacgccctcccgaaaacaaacgcgcacgacgaacaacgacaccgaattctacaacgcgcacaaatactcgtaataaaaaaaaaaatccgccgcgctatcgcgacgcaacttcacgaaatcgatcataacccgaaaacgacctcgaaaaatacccgccgcgaaaacgccgcccgcgcccacccaaaaacgctaaatcgcaacccgaccgctccgacacccacgaccaaacgataacgacaaccccgcaccgaactcaaaaacgataattcgatcgaaaaacgcaaaaccaaaaccccaaactaaaccgacccctcaacgccccactcccgcgctacctcccgccctacgacccaaacaattaacgcccgcctcataatcctctaaaacgccgaaattcaaaccgataaacgataccgtaaaacgatacgccaaaacgtcaacgtactcgctatacgtcgacacgcaaatcccgcctcctaaaaacgaataaattcgctactacctaaaataataatcgaaaaaatttaaaaatttacgaaaaaatttactaatcgatccgaataaaaa

SEQ ID NO: 39137 - DNA, 1007 bp, Artificial Sequence
  chemically treated genomic DNA (Homo sapiens) CpG-island No: 39137
atttgcgcggttttattttcgggttttcgtagggcgtttcgagagttgcggatgggggtagtaggagtcgggcgggaatagaggaaagcgtcggttttgagatttagggaggagtttcggtgaaggaattcggggcgggtttttgtttagatttttaagaagttttaaaaatggcgggcggtaattcggcgagtcggacgcgtaggcgttatcgtggtcgttttttcgttagtcgcgggcggtttaagaatcgtttatagcgtttttatttagaagtttacgtttttcgcgattggttgaattgcgcgagcgtttcgtgtgggggcggggtcgttacgtagcggttacgtttttcgtttcgttggtgcgcgtgcgcgtaatttttattggaaagcgtttgcgcgcgtttttgtcgcggtttttagttcgcgttttagttttttttttttttcgggtaggttcgtttcgttagtaaggtagtgagtatcgcggttagtagagggcggttcggatttaagtttgtagcggcgttattggcgtgtggaaaatgttattagatggcgggttaggattgtagtttcgttgaaggcgcggttttcgttttcgaattttcggcgattatttcgtaataattttttttatatcgggaataatatatcggagatttttggggggaaattaggtcgatggtcggcggcgttcggatgggtagttgaggtgagtgcgggcggcggcgacggcggcggggggcgggaaagagggggaatgcggcggtagcggcgcgggggttggaagcgtcgatttaagatggaggtcgggcgagagcgagagagcgcgagcggcgagcgggcgggtcgggcgcgggtttcgtgcgggggagggaggtcgcgcgggtttgtgcggggtgcggcggtcgtgggtcgttcgagtgttcggagagacgtttgtgggcgcggtgggtatttcggcgttttcgtcgtttgttatttttttcgcgggtattaaaa

SEQ ID NO: 39138 - DNA, 1007 bp, Artificial Sequence
  chemically treated genomic DNA (Homo sapiens) CpG-island No: 39138
ttttaatacccgcgaaaaaaataacaaacgacgaaaacgccgaaatacccaccgcgcccacaaacgtctctccgaacactcgaacgacccacgaccgccgcaccccgcacaaacccgcgcgacctccctcccccgcacgaaacccgcgcccgacccgcccgctcgccgctcgcgctctctcgctctcgcccgacctccatcttaaatcgacgcttccaacccccgcgccgctaccgccgcattccccctctttcccgccccccgccgccgtcgccgccgcccgcactcacctcaactacccatccgaacgccgccgaccatcgacctaatttccccccaaaaatctccgatatattattcccgatataaaaaaaattattacgaaataatcgccgaaaattcgaaaacgaaaaccgcgccttcaacgaaactacaatcctaacccgccatctaataacattttccacacgccaataacgccgctacaaacttaaatccgaaccgccctctactaaccgcgatactcactaccttactaacgaaacgaacctacccgaaaaaaaaaaaaaactaaaacgcgaactaaaaaccgcgacaaaaacgcgcgcaaacgctttccaataaaaattacgcgcacgcgcaccaacgaaacgaaaaacgtaaccgctacgtaacgaccccgcccccacacgaaacgctcgcgcaattcaaccaatcgcgaaaaacgtaaacttctaaataaaaacgctataaacgattcttaaaccgcccgcgactaacgaaaaaacgaccacgataacgcctacgcgtccgactcgccgaattaccgcccgccatttttaaaacttcttaaaaatctaaacaaaaacccgccccgaattccttcaccgaaactcctccctaaatctcaaaaccgacgctttcctctattcccgcccgactcctactacccccatccgcaactctcgaaacgccctacgaaaacccgaaaataaaaccgcgcaaat

SEQ ID NO: 39139 - DNA, 1007 bp, Artificial Sequence
  chemically treated genomic DNA (Homo sapiens) CpG-island No: 39139
ttttggtgttcgcgggaggggtggtaagcgacgaagacgtcggggtgtttatcgcgtttatagacgttttttcgggtattcggacggtttacgatcgtcgtatttcgtataggttcgcgcggtttttttttttcgtacggggttcgcgttcggttcgttcgttcgtcgttcgcgttttttcgttttcgttcggtttttattttggatcggcgtttttagttttcgcgtcgttgtcgtcgtattttttttttttttcgtttttcgtcgtcgtcgtcgtcgttcgtatttattttagttgtttattcgggcgtcgtcgattatcgatttagtttttttttaaaagttttcggtgtgttattttcgatgtggggggggttgttacggggtggtcgtcgggggttcgggagcgggggtcgcgtttttaacggagttgtaattttaattcgttatttggtggtattttttatacgttaatggcgtcgttgtagatttgggttcggatcgttttttgttggtcgcggtgtttattgttttgttgacgggacgggtttgttcggaaaggggagggagttgaggcgcgagttaggggtcgcggtaggggcgcgcgtaaacgttttttagtggggattgcgcgtacgcgtattagcggggcgggaaacgtggtcgttgcgtggcggtttcgtttttatacggagcgttcgcgtagtttagttaatcgcgagaggcgtaggtttttggataagggcgttgtggacggtttttgggtcgttcgcggttggcggaaggacggttacggtggcgtttgcgcgttcggttcgtcgagttgtcgttcgttatttttggagttttttggagatttaggtaggaattcgtttcgggtttttttatcgaggtttttttttaggttttagggtcggcgtttttttttgttttcgttcggtttttgttgtttttattcgtagttttcgagacgttttgcggaaattcgagggtgaggtcgcgtagat

SEQ ID NO: 39140 - DNA, 1007 bp, Artificial Sequence
  chemically treated genomic DNA (Homo sapiens) CpG-island No: 39140
atctacgcgacctcaccctcgaatttccgcaaaacgtctcgaaaactacgaataaaaacaacaaaaaccgaacgaaaacaaaaaaaaacgccgaccctaaaacctaaaaaaaaacctcgataaaaaaacccgaaacgaattcctacctaaatctccaaaaaactccaaaaataacgaacgacaactcgacgaaccgaacgcgcaaacgccaccgtaaccgtccttccgccaaccgcgaacgacccaaaaaccgtccacaacgcccttatccaaaaacctacgcctctcgcgattaactaaactacgcgaacgctccgtataaaaacgaaaccgccacgcaacgaccacgtttcccgccccgctaatacgcgtacgcgcaatccccactaaaaaacgtttacgcgcgcccctaccgcgacccctaactcgcgcctcaactccctcccctttccgaacaaacccgtcccgtcaacaaaacaataaacaccgcgaccaacaaaaaacgatccgaacccaaatctacaacgacgccattaacgtataaaaaataccaccaaataacgaattaaaattacaactccgttaaaaacgcgacccccgctcccgaacccccgacgaccaccccgtaacaaccccccccacatcgaaaataacacaccgaaaacttttaaaaaaaaactaaatcgataatcgacgacgcccgaataaacaactaaaataaatacgaacgacgacgacgacgacgaaaaacgaaaaaaaaaaaaaatacgacgacaacgacgcgaaaactaaaaacgccgatccaaaataaaaaccgaacgaaaacgaaaaaacgcgaacgacgaacgaacgaaccgaacgcgaaccccgtacgaaaaaaaaaaaccgcgcgaacctatacgaaatacgacgatcgtaaaccgtccgaatacccgaaaaaacgtctataaacgcgataaacaccccgacgtcttcgtcgcttaccacccctcccgcgaacaccaaaa

SEQ ID NO: 39141 - DNA, 543 bp, Artificial Sequence
  chemically treated genomic DNA (Homo sapiens) CpG-island No: 39141
taggcgatatttacgtttatattttattcggcgatatttacgtttatattttattcgggcgatatttacgtttatattttattcgggcgatatttacgtttatattttattcgggcgatatttacgtttatattttattcgggcgatatttacgtttatattttattcgggcgatatttacgtttatattttattcgggcgatatttacgtttatattttagttcgggcgatatttacgtttatattttattcgggcgatatttacgtttatattttattcgggcgatatttacgtttatattttattcgggcgatatttacgtttatattttattcgggcgatatttatattttatttaggcgatatttatatttatattttatttaggcgatatttatatttatattttatttaggcgatatttatattttatttaggcgatatttatatttatattttatttgggcgatatttacgtttatattttattcgggtgatatttatattttatttaggcgatatttatagttatattttattt

SEQ ID NO: 39142 - DNA, 543 bp, Artificial Sequence
  chemically treated genomic DNA (Homo sapiens) CpG-island No: 39142
aaataaaatataactataaatatcgcctaaataaaatataaatatcacccgaataaaatataaacgtaaatatcgcccaaataaaatataaatataaatatcgcctaaataaaatataaatatcgcctaaataaaatataaatataaatatcgcctaaataaaatataaatataaatatcgcctaaataaaatataaatatcgcccgaataaaatataaacgtaaatatcgcccgaataaaatataaacgtaaatatcgcccgaataaaatataaacgtaaatatcgcccgaataaaatataaacgtaaatatcgcccgaactaaaatataaacgtaaatatcgcccgaataaaatataaacgtaaatatcgcccgaataaaatataaacgtaaatatcgcccgaataaaatataaacgtaaatatcgcccgaataaaatataaacgtaaatatcgcccgaataaaatataaacgtaaatatcgcccgaataaaatataaacgtaaatatcgccgaataaaatataaacgtaaatatcgccta

SEQ ID NO: 39143 - DNA, 543 bp, Artificial Sequence
  chemically treated genomic DNA (Homo sapiens) CpG-island No: 39143
ggataaggtgtggttgtgggtgtcgtttggataaggtgtgggtgttattcggataaggtgtgggcgtgggtgtcgtttagataaggtgtgggtgtgggtgtcgtttggataaggtgtgggtgtcgtttggataaggtgtgggtgtgggtgtcgtttggataaggtgtgggtgtgggtgtcgtttggataaggtgtgggtgtcgttcggataaggtgtgggcgtgggtgtcgttcggataaggtgtgggcgtgggtgtcgttcggataaggtgtgggcgtgggtgtcgttcggataaggtgtgggcgtgggtgtcgttcggattaaggtgtgggcgtgggtgtcgttcggataaggtgtgggcgtgggtgtcgttcggataaggtgtgggcgtgggtgtcgttcggataaggtgtgggcgtgggtgtcgttcggataaggtgtgggcgtgggtgtcgttcggataaggtgtgggcgtgggtgtcgttcggataaggtgtgggcgtgggtgtcgtcggataaggtgtgggcgtgggtgtcgtttg

SEQ ID NO: 39144 - DNA, 543 bp, Artificial Sequence
  chemically treated genomic DNA (Homo sapiens) CpG-island No: 39144
caaacgacacccacgcccacaccttatccgacgacacccacgcccacaccttatccgaacgacacccacgcccacaccttatccgaacgacacccacgcccacaccttatccgaacgacacccacgcccacaccttatccgaacgacacccacgcccacaccttatccgaacgacacccacgcccacaccttatccgaacgacacccacgcccacaccttaatccgaacgacacccacgcccacaccttatccgaacgacacccacgcccacaccttatccgaacgacacccacgcccacaccttatccgaacgacacccacgcccacaccttatccgaacgacacccacaccttatccaaacgacacccacacccacaccttatccaaacgacacccacacccacaccttatccaaacgacacccacaccttatccaaacgacacccacacccacaccttatctaaacgacacccacgcccacaccttatccgaataacacccacaccttatccaaacgacacccacaaccacaccttatcc

SEQ ID NO: 39145 - DNA, 598 bp, Artificial Sequence
  chemically treated genomic DNA (Homo sapiens) CpG-island No: 39145
  unsure (321, 354)
tcgcgtttgttgagttcgttttttttttttcgttcgtttttgtcgttttttttcgtcgcgtttcgtttcggttttttcgttttcgttttcgtttttttttcgttcggttttttttggcgcgtttcgttttttttttttcgcggttcgcgtttttgtttttttttttgcgttttttttttttttttcgcgttttttttttttcgttcgtttttttttttttcgttcgttttttttgtttttttttttcgttttttttttttttcgttttttttttcgcgtttttttttcgttcgttttttttttttttttcgttcgtttttntttttttttcgttttttttttttttcgtttttntttttgtttcgtttcgttttttttttttttcgtcgttttttttttttgttttttttgcgcgttttttcgcgttttcggcgtttttcgtttttttttcgttttttttttgtttttttttcgtttttttttttttttttttttttcgtttttttcgtttttttttttcgcgtcgtttcgttcgcgttcgcgtttttttttttttttcgtttcgttgtttttttttttcgtttttttttttcgtttt

SEQ ID NO: 39146 - DNA, 598 bp, Artificial Sequence
  chemically treated genomic DNA (Homo sapiens) CpG-island No: 39146
  unsure (245, 278)
aaaacgaaaaaaaaaaacgaaaaaaaaaaacaacgaaacgaaaaaaaaaaaaaaacgcgaacgcgaacgaaacgacgcgaaaaaaaaaaacgaaaaaaacgaaaaaaaaaaaaaaaaaaaaaaacgaaaaaaaaacaaaaaaaaaacgaaaaaaaaacgaaaaacgccgaaaacgcgaaaaaacgcgcaaaaaaaacaaaaaaaaaaaacgacgaaaaaaaaaaaaaacgaaacgaaacaaaaanaaaaacgaaaaaaaaaaaaaacgaaaaaaaaanaaaaacgaacgaaaaaaaaaaaaaaaacgaacgaaaaaaaaacgcgaaaaaaaaaacgaaaaaaaaaaaaaacgaaaaaaaaaaacaaaaaaaacgaacgaaaaaaaaaaaaacgaacgaaaaaaaaaaaacgcgaaaaaaaaaaaaaaaacgcaaaaaaaaaaacaaaaacgcgaaccgcgaaaaaaaaaaaacgaaacgcgccaaaaaaaaccgaacgaaaaaaaaacgaaaacgaaaacgaaaaaaccgaaacgaaacgcgacgaaaaaaaacgacaaaaacgaacgaaaaaaaaaaaacgaactcaacaaacgcga

SEQ ID NO: 39147 - DNA, 598 bp, Artificial Sequence
  chemically treated genomic DNA (Homo sapiens) CpG-island No: 39147
  unsure (245, 278)
gggacggagaggggaggcgagggagaggggtagcgggacgaggggaaagaggggacgcgggcgcgggcggggcggcgcgaggagggaaaacgggagaggcgggagaggggagggagggaagaggcggaggggggataagagggagacgaaggggggacgagagacgtcgggggcgcgaggaggcgcgtagggaggatagagaggggaagcggcggggaggaaagggggcggaacgaggtagaagngagggcggggaggggggggagcgggggggaagnaggggcgggcggggagggggggaggggcgggcggaaggggggcgcgggggggggggcggggggaggagaggacgggggggggggatagggggggcgagcggaggaggggggggcgggcgggggggggggggcgcgggggagggggggggggcgtagggggaggaataagggcgcgagtcgcggggaaggaagggcgggacgcgttaggaaaggtcgaacggggggaggacgggggcggggacgggggggtcggagcggggcgcggcgggggaggacggtaggagcgggcgggggggggagggcgagtttagtagacgcgg

SEQ ID NO: 39148 - DNA, 598 bp, Artificial Sequence
  chemically treated genomic DNA (Homo sapiens) CpG-island No: 39148
  unsure (321, 354)
ccgcgtctactaaactcgccctcccccccccgcccgctcctaccgtcctcccccgccgcgccccgctccgacccccccgtccccgcccccgtcctccccccgttcgacctttcctaacgcgtcccgcccttccttccccgcgactcgcgcccttattcctccccctacgccccccccccctcccccgcgcccccccccccccgcccgcccccccctcctccgctcgccccccctatcccccccccccgtcctctcctccccccgcccccccccccgcgccccccttccgcccgcccctccccccctccccgcccgcccctncttcccccccgctcccccccctccccgccctcncttctacctcgttccgccccctttcctccccgccgcttcccctctctatcctccctacgcgcctcctcgcgcccccgacgtctctcgtccccccttcgtctccctcttatcccccctccgcctcttccctccctcccctctcccgcctctcccgttttccctcctcgcgccgccccgcccgcgcccgcgtcccctctttcccctcgtcccgctacccctctccctcgcctcccctctccgtccc

SEQ ID NO: 39149 - DNA, 562 bp, Artificial Sequence
  chemically treated genomic DNA (Homo sapiens) CpG-island No: 39149
cgcgcgggtaaagattttcggggatgatatttcgcgcgtcgcggtttcgtgcgcgcggtttttcgtattcgcgggtcgttttatttttttttttgtattttaagagttcggtttggttttcgaggtcgggagttacgcggtatcgtagtttcgagggagaggacgttcgtaattaatacgtacgcgggtattaagagggtataggttagggcggcgagggtcgaacggggtcggggggtacgcggagttggattagaattagcgagggcgcgtagatattgaacggatgcgaaggtttcggacgcggagcggtttcgggcgttttgcgtggggcgcgagcggaggtttcgacgtatttacggtgtcgagggcgggcggttgtattcgcgttcgcgggcgtttatcgtacggaataacgtttttatgttcggacgtcgtcgttagagacggatcgatcgttacgttttttgtaaatttattaatatattttatttttttttattggtgtattcgttttatcgttttatttatttttttttgttcggttatttttgaaattttt

SEQ ID NO: 39150 - DNA, 562 bp, Artificial Sequence
  chemically treated genomic DNA (Homo sapiens) CpG-island No: 39150
aaaaatttcaaaaataaccgaacaaaaaaaaataaataaaacgataaaacgaatacaccaataaaaaaaaataaaatatattaataaatttacaaaaaacgtaacgatcgatccgtctctaacgacgacgtccgaacataaaaacgttattccgtacgataaacgcccgcgaacgcgaatacaaccgcccgccctcgacaccgtaaatacgtcgaaacctccgctcgcgccccacgcaaaacgcccgaaaccgctccgcgtccgaaaccttcgcatccgttcaatatctacgcgccctcgctaattctaatccaactccgcgtaccccccgaccccgttcgaccctcgccgccctaacctataccctcttaatacccgcgtacgtattaattacgaacgtcctctccctcgaaactacgataccgcgtaactcccgacctcgaaaaccaaaccgaactcttaaaatacaaaaaaaaaaataaaacgacccgcgaatacgaaaaaccgcgcgcacgaaaccgcgacgcgcgaaatatcatccccgaaaatctttacccgcgcg

SEQ ID NO: 39151 - DNA, 562 bp, Artificial Sequence
  chemically treated genomic DNA (Homo sapiens) CpG-island No: 39151
gggagttttaggagtggtcgagtaggggggggtgggtggggcggtgaggcgaatatattaatagggggggataggatatattggtgggtttatagggggcgtggcggtcggttcgtttttaacggcggcgttcgaatatgggggcgttatttcgtgcggtgggcgttcgcggacgcgggtatagtcgttcgttttcggtatcgtaagtgcgtcggggttttcgttcgcgttttacgtaggacgttcggggtcgtttcgcgttcgggattttcgtattcgtttagtgtttgcgcgttttcgttggttttggtttagtttcgcgtgtttttcggtttcgttcggttttcgtcgttttggtttgtgtttttttggtgttcgcgtgcgtgttggttgcgggcgttttttttttcgaggttgcggtgtcgcgtggttttcggtttcggagattaggtcggatttttggagtgtaggggaggaggtggggcggttcgcgagtgcgggggatcgcgcgtacggagtcgcggcgcgcggggtattattttcgggggtttttattcgcgcg

SEQ ID NO: 39152 - DNA, 562 bp, Artificial Sequence
  chemically treated genomic DNA (Homo sapiens) CpG-island No: 39152
cgcgcgaataaaaacccccgaaaataataccccgcgcgccgcgactccgtacgcgcgatcccccgcactcgcgaaccgccccacctcctcccctacactccaaaaatccgacctaatctccgaaaccgaaaaccacgcgacaccgcaacctcgaaaaaaaaaacgcccgcaaccaacacgcacgcgaacaccaaaaaaacacaaaccaaaacgacgaaaaccgaacgaaaccgaaaaacacgcgaaactaaaccaaaaccaacgaaaacgcgcaaacactaaacgaatacgaaaatcccgaacgcgaaacgaccccgaacgtcctacgtaaaacgcgaacgaaaaccccgacgcacttacgataccgaaaacgaacgactatacccgcgtccgcgaacgcccaccgcacgaaataacgcccccatattcgaacgccgccgttaaaaacgaaccgaccgccacgccccctataaacccaccaatatatcctatccccccctattaatatattcgcctcaccgccccacccacccccccctactcgaccactcctaaaactccc

SEQ ID NO: 39153 - DNA, 668 bp, Artificial Sequence
  chemically treated genomic DNA (Homo sapiens) CpG-island No: 39153
gcgacgcgttttgttgtaatgggcggatcggttgcgtgtaatcgtttgagatatgtcgtaacgaataggggtacgttagttataagtatacgtttttttcgttcgttcgtttttagggaagggagacgtggatagtagaatgttttaaacgatatttgcgcggaatcgggggggtggtttattgcggtacggcgtttgcgtaacgaatgtaatcggtggtgtttaaattatatttttttttttatttttttcgatggtggtggtggattagaatgttttaatcgattatacggcggatgcggacggcgttttgatggttaaagtggcgaggcggttgacgtgcgttgcgttagagaatatgatataacgaatgggggtacgcgtgcgtataagtatacgtttttttttcgtttttatgggattacgttatatttatggaatttggtatgggcgatttttttcgtgtggcgtttgatttggcgttcgcgtgggattttttttaatttatatcgtacgttttttatgggcgattttgcgggttttttgcggttttgcggttacggtttttttttgttcgtacgttacggtacgacggtacgtacggatttaaatagtgcgtttaatgatacgtatataaatttgtgtaaaatcgatcgtttattttatta

SEQ ID NO: 39154 - DNA, 668 bp, Artificial Sequence
  chemically treated genomic DNA (Homo sapiens) CpG-island No: 39154
taataaaataaacgatcgattttacacaaatttatatacgtatcattaaacgcactatttaaatccgtacgtaccgtcgtaccgtaacgtacgaacaaaaaaaaaccgtaaccgcaaaaccgcaaaaaacccgcaaaatcgcccataaaaaacgtacgatataaattaaaaaaaatcccacgcgaacgccaaatcaaacgccacacgaaaaaaatcgcccataccaaattccataaatataacgtaatcccataaaaacgaaaaaaaaacgtatacttatacgcacgcgtacccccattcgttatatcatattctctaacgcaacgcacgtcaaccgcctcgccactttaaccatcaaaacgccgtccgcatccgccgtataatcgattaaaacattctaatccaccaccaccatcgaaaaaaataaaaaaaaaaatataatttaaacaccaccgattacattcgttacgcaaacgccgtaccgcaataaaccacccccccgattccgcgcaaatatcgtttaaaacattctactatccacgtctcccttccctaaaaacgaacgaacgaaaaaaacgtatacttataactaacgtacccctattcgttacgacatatctcaaacgattacacgcaaccgatccgcccattacaacaaaacgcgtcgc

SEQ ID NO: 39155 - DNA, 668 bp, Artificial Sequence
  chemically treated genomic DNA (Homo sapiens) CpG-island No: 39155
tagtggaatgaacggtcgattttgtataaatttatgtacgtattattaggcgtattgtttgagttcgtacgtgtcgtcgtgtcgtgacgtgcggatagggagggatcgtagtcgtaaaatcgtaggaggttcgtaaagtcgtttatggggagcgtgcgatgtaggttgaaaaggattttacgcgagcgttaaattaggcgttatacgggggaggtcgtttatgttaaattttataagtatagcgtgattttataggggcggggggggggcgtatatttatgcgtacgcgtgtttttattcgttatgttatgttttttagcgtaacgtacgttaatcgtttcgttattttggttattaaggcgtcgttcgtattcgtcgtatgatcgattaggatattttggtttattattattatcgaagggggtgagggggaggatatagtttgggtattatcggttgtattcgttgcgtaaacgtcgtatcgtaatgagttattttttcggtttcgcgtaaatgtcgtttaggatattttgttatttacgttttttttttttaggggcgggcgggcggggggggcgtatatttatggttggcgtgtttttattcgttacgatatgttttaagcggttgtacgtaatcggttcgtttattgtaataaggcgcgtcgt

SEQ ID NO: 39156 - DNA, 668 bp, Artificial Sequence
  chemically treated genomic DNA (Homo sapiens) CpG-island No: 39156
acgacgcgccttattacaataaacgaaccgattacgtacaaccgcttaaaacatatcgtaacgaataaaaacacgccaaccataaatatacgccccccccgcccgcccgcccctaaaaaaaaaaaacgtaaataacaaaatatcctaaacgacatttacgcgaaaccgaaaaaataactcattacgatacgacgtttacgcaacgaatacaaccgataatacccaaactatatcctccccctcacccccttcgataataataataaaccaaaatatcctaatcgatcatacgacgaatacgaacgacgccttaataaccaaaataacgaaacgattaacgtacgttacgctaaaaaacataacataacgaataaaaacacgcgtacgcataaatatacgccccccccccgcccctataaaatcacgctatacttataaaatttaacataaacgacctcccccgtataacgcctaatttaacgctcgcgtaaaatccttttcaacctacatcgcacgctccccataaacgactttacgaacctcctacgattttacgactacgatccctccctatccgcacgtcacgacacgacgacacgtacgaactcaaacaatacgcctaataatacgtacataaatttatacaaaatcgaccgttcattccacta

SEQ ID NO: 39157 - DNA, 869 bp, Artificial Sequence
  chemically treated genomic DNA (Homo sapiens) CpG-island No: 39157
aagagtagcgacgtatcgaatggatggttatcgaatcgttggtcgattttttcgatttatatgattcgggtaaaacggtggaaggttattcggtatttaaacgcgcggtgttgattgcgcgtaagtcgtagaggtttggtattattgtcggatgcggcgtgaacgttttattcggtttacggagggtgcgggaatttgtaggtttgataagacgcgtaagcgtcgtattaggtagtcggtattattgtcggatgcggcgtaaacgttttattcggtttacggagggtgcgggaatttgtaggtttgataagacgcgtaagcgtcgtattaggtagtcggtatcgttgtcggatgcggcgtaaacgttttattcggtttacggatggtgcgggaatttgtaggtttgataagacgcgtaagcgtcgtattaggtagttggtattgttgtcggatgcggcgtaaacgttttattcggtttacggagggtgcgggaatttgtaggtttgataagacgcgtaagcgtcgtattaggtagtcggtatcgttgtcggatgcggcgtaaacgttttattcggtttacggagggtgcgggaatttgtaggtttgataagacgcgttagcgtcgtattaggtattatgtattaattgtcggatgcggcgtaaacgttttattcggtttacggttcggattatttgtaggtacgataagacgcgatagcgtcgtattaggtattatgtattaattgtcggatgcggcgtaaacgttttattcggtttacggttcggattatttgtaggtacgataagacgcgatagcgtcgtatcgggtatggtttgttagatacgttatagatttaaatgttattgaa

SEQ ID NO: 39158 - DNA, 869 bp, Artificial Sequence
  chemically treated genomic DNA (Homo sapiens) CpG-island No: 39158
ttcaataacatttaaatctataacgtatctaacaaaccatacccgatacgacgctatcgcgtcttatcgtacctacaaataatccgaaccgtaaaccgaataaaacgtttacgccgcatccgacaattaatacataatacctaatacgacgctatcgcgtcttatcgtacctacaaataatccgaaccgtaaaccgaataaaacgtttacgccgcatccgacaattaatacataatacctaatacgacgctaacgcgtcttatcaaacctacaaattcccgcaccctccgtaaaccgaataaaacgtttacgccgcatccgacaacgataccgactacctaatacgacgcttacgcgtcttatcaaacctacaaattcccgcaccctccgtaaaccgaataaaacgtttacgccgcatccgacaacaataccaactacctaatacgacgcttacgcgtcttatcaaacctacaaattcccgcaccatccgtaaaccgaataaaacgtttacgccgcatccgacaacgataccgactacctaatacgacgcttacgcgtcttatcaaacctacaaattcccgcaccctccgtaaaccgaataaaacgtttacgccgcatccgacaataataccgactacctaatacgacgcttacgcgtcttatcaaacctacaaattcccgcaccctccgtaaaccgaataaaacgttcacgccgcatccgacaataataccaaacctctacgacttacgcgcaatcaacaccgcgcgtttaaataccgaataaccttccaccgttttacccgaatcatataaatcgaaaaaatcgaccaacgattcgataaccatccattcgatacgtcgctactctt

SEQ ID NO: 39159 - DNA, 869 bp, Artificial Sequence
  chemically treated genomic DNA (Homo sapiens) CpG-island No: 39159
tttagtggtatttagatttatgacgtatttggtaaattatgttcgatgcgacgttgtcgcgttttatcgtgtttataaatagttcgaatcgtaggtcggataaggcgtttacgtcgtattcggtaattggtgtatgatgtttgatgcgacgttgtcgcgttttatcgtgtttataaatagttcgaatcgtaggtcggataaggcgtttacgtcgtattcggtaattggtgtatgatgtttgatgcgacgttggcgcgttttattaggtttataaattttcgtatttttcgtaggtcggataaggcgtttacgtcgtattcggtaacggtgtcgattgtttgatgcgacgtttgcgcgttttattaggtttataaattttcgtatttttcgtaggtcggataaggcgtttacgtcgtattcggtaatagtgttaattgtttgatgcgacgtttgcgcgttttattaggtttataaattttcgtattattcgtaggtcggataaggcgtttacgtcgtattcggtaacggtgtcgattgtttgatgcgacgtttgcgcgttttattaggtttataaattttcgtatttttcgtaggtcggataaggcgtttacgtcgtattcggtaatggtgtcgattgtttgatgcgacgtttgcgcgttttattaggtttataaattttcgtatttttcgtaggtcggataaggcgtttacgtcgtattcggtagtaatattagatttttacggtttgcgcgtaattagtatcgcgcgtttaggtgtcggataattttttatcgttttattcggattatgtgggtcgaggaaatcggttagcgattcggtaattatttattcggtgcgtcgttgttttt

SEQ ID NO: 39160 - DNA, 869 bp, Artificial Sequence
  chemically treated genomic DNA (Homo sapiens) CpG-island No: 39160
aaaaacaacgacgcaccgaataaataattaccgaatcgctaaccgatttcctcgacccacataatccgaataaaacgataaaaaattatccgacacctaaacgcgcgatactaattacgcgcaaaccgtaaaaatctaatattactaccgaatacgacgtaaacgccttatccgacctacgaaaaatacgaaaatttataaacctaataaaacgcgcaaacgtcgcatcaaacaatcgacaccattaccgaatacgacgtaaacgccttatccgacctacgaaaaatacgaaaatttataaacctaataaaacgcgcaaacgtcgcatcaaacaatcgacaccgttaccgaatacgacgtaaacgccttatccgacctacgaataatacgaaaatttataaacctaataaaacgcgcaaacgtcgcatcaaacaattaacactattaccgaatacgacgtaaacgccttatccgacctacgaaaaatacgaaaatttataaacctaataaaacgcgcaaacgtcgcatcaaacaatcgacaccgttaccgaatacgacgtaaacgccttatccgacctacgaaaaatacgaaaatttataaacctaataaaacgcgccaacgtcgcatcaaacatcatacaccaattaccgaatacgacgtaaacgccttatccgacctacgattcgaactatttataaacacgataaaacgcgacaacgtcgcatcaaacatcatacaccaattaccgaatacgacgtaaacgccttatccgacctacgattcgaactatttataaacacgataaaacgcgacaacgtcgcatcgaacataatttaccaaatacgtcataaatctaaataccactaaa

SEQ ID NO: 39161 - DNA, 560 bp, Artificial Sequence
  chemically treated genomic DNA (Homo sapiens) CpG-island No: 39161
cgcgatcgatatttgattgtttgtagttattaaacgtcgtatgtgtcgggtaagcgtgataatagttggtttatacgcgtttagtttgtatgtcgcgttttattttataggttagattatcgttgcggttttagacgttcgcgtttaggttatattgcgtatcgttcgttagttttagcgttttttttatcgttttgaaggtggttatcgttagtatcgggttaaaaatttttttttggaatattcgtatattgttttgattaaatagaatcgtcggttcgaggtagtagtcgttttttagtttattttttagtagtttgcgtcgttcgtttgtgagtacgttagcgtgattgtgtcgttgtaatgggcgtgaacgtgataggtaaaaacgacgcggaaggtgttgaagtttgtattaacgttattcgtgaattggcgaagaaagtggatatttcggtaggtttacgcgatttgaacgtgaaagaagaagatttcgcggtattggcgattaatgttttgaaagatgtttgtggttttattaattcgatttaggtaattta

SEQ ID NO: 39162 - DNA, 560 bp, Artificial Sequence
  chemically treated genomic DNA (Homo sapiens) CpG-island No: 39162
taaattacctaaatcgaattaataaaaccacaaacatctttcaaaacattaatcgccaataccgcgaaatcttcttctttcacgttcaaatcgcgtaaacctaccgaaatatccactttcttcgccaattcacgaataacgttaatacaaacttcaacaccttccgcgtcgtttttacctatcacgttcacgcccattacaacgacacaatcacgctaacgtactcacaaacgaacgacgcaaactactaaaaaataaactaaaaaacgactactacctcgaaccgacgattctatttaatcaaaacaatatacgaatattccaaaaaaaaatttttaacccgatactaacgataaccaccttcaaaacgataaaaaaaacgctaaaactaacgaacgatacgcaatataacctaaacgcgaacgtctaaaaccgcaacgataatctaacctataaaataaaacgcgacatacaaactaaacgcgtataaaccaactattatcacgcttacccgacacatacgacgtttaataactacaaacaatcaaatatcgatcgcg

SEQ ID NO: 39163 - DNA, 560 bp, Artificial Sequence
  chemically treated genomic DNA (Homo sapiens) CpG-island No: 39163
tgagttgtttggatcgggttagtaaagttataggtattttttagggtattagtcgttaatatcgcgaaattttttttttttacgtttaggtcgcgtaggtttgtcgggatatttatttttttcgttagtttacggatggcgttaatgtaggttttagtatttttcgcgtcgtttttatttgttacgtttacgtttattgtagcggtatagttacgttgacgtgtttataggcgggcggcgtaagttgttggaaggtgaattgaaagacggttattatttcgaatcgacgattttgtttggttagaataatatgcgggtgttttaggaggagatttttggttcggtgttggcggtgattatttttaaaacgatggaagaagcgttggagttggcgaacgatacgtaatatggtttgggcgcgggcgtttggagtcgtaacggtaatttggtttataagatggggcgcggtatataggttgggcgcgtgtggattaattgttattacgtttattcggtatatgcggcgtttggtggttataaataattaggtatcggtcgcg

SEQ ID NO: 39164 - DNA, 560 bp, Artificial Sequence
  chemically treated genomic DNA (Homo sapiens) CpG-island No: 39164
cgcgaccgatacctaattatttataaccaccaaacgccgcatataccgaataaacgtaataacaattaatccacacgcgcccaacctatataccgcgccccatcttataaaccaaattaccgttacgactccaaacgcccgcgcccaaaccatattacgtatcgttcgccaactccaacgcttcttccatcgttttaaaaataatcaccgccaacaccgaaccaaaaatctcctcctaaaacacccgcatattattctaaccaaacaaaatcgtcgattcgaaataataaccgtctttcaattcaccttccaacaacttacgccgcccgcctataaacacgtcaacgtaactataccgctacaataaacgtaaacgtaacaaataaaaacgacgcgaaaaatactaaaacctacattaacgccatccgtaaactaacgaaaaaaataaatatcccgacaaacctacgcgacctaaacgtaaaaaaaaaaaatttcgcgatattaacgactaataccctaaaaaatacctataactttactaacccgatccaaacaactca

SEQ ID NO: 39165 - DNA, 796 bp, Artificial Sequence
  chemically treated genomic DNA (Homo sapiens) CpG-island No: 39165
cgaaacgggtcgtttcgttttatattttttttcgggtgtttgggttttttcggaataaagtgattttttatttgttcgtaggtaggtggagttcgttttacgcggtacgcgttttttttttttatagtcgcgtgtagacgcggatttttagggatattgcggacgcgagaaaggatacgttttttcgcgggagtataagtttatcgtatagaattcgcgcgttttttttcgaacgaacgcgtacgcgcgcgtagggggcgggtttttttttcgatatttattgagcgttcggtttttttattttattttatcgaatttcggtcgtttaggtttcgttttcgcgacgggtcgtcgggaggaggcgatcggaagttatttaaagtagagatcgaggtgataggcgagttggttggattcggagcgcggtcgaggttttttgcgttcgcggcggcggaatggttcgtgcgcggttcgtcgcgtcgcggttttgtggtttttagacgtcggttttcgttttcggcgttgattttcggcgcgggtattgttttttattcggtttttgtcgttcgtttttttaggttttcgtttaggtaaagggtttcgggagggtattgaggggttgaagaattttagcggggagtgcgagcgtcggtttcgcggtttcggtttcggtttcggtttcgcgtcggtagtgtgcggggttttcgcggatcggggtgattgattttgagattgttttttgtatcgaatttattcgggtttcgttagtatgaagatggaattggtttatattttt

SEQ ID NO: 39166 - DNA, 796 bp, Artificial Sequence
  chemically treated genomic DNA (Homo sapiens) CpG-island No: 39166
aaaaatataaaccaattccatcttcatactaacgaaacccgaataaattcgatacaaaaaacaatctcaaaatcaatcaccccgatccgcgaaaaccccgcacactaccgacgcgaaaccgaaaccgaaaccgaaaccgcgaaaccgacgctcgcactccccgctaaaattcttcaacccctcaataccctcccgaaaccctttacctaaacgaaaacctaaaaaaacgaacgacaaaaaccgaataaaaaacaatacccgcgccgaaaatcaacgccgaaaacgaaaaccgacgtctaaaaaccacaaaaccgcgacgcgacgaaccgcgcacgaaccattccgccgccgcgaacgcaaaaaacctcgaccgcgctccgaatccaaccaactcgcctatcacctcgatctctactttaaataacttccgatcgcctcctcccgacgacccgtcgcgaaaacgaaacctaaacgaccgaaattcgataaaataaaataaaaaaaccgaacgctcaataaatatcgaaaaaaaaacccgccccctacgcgcgcgtacgcgttcgttcgaaaaaaaacgcgcgaattctatacgataaacttatactcccgcgaaaaaacgtatcctttctcgcgtccgcaatatccctaaaaatccgcgtctacacgcgactataaaaaaaaaaaacgcgtaccgcgtaaaacgaactccacctacctacgaacaaataaaaaatcactttattccgaaaaaacccaaacacccgaaaaaaaatataaaacgaaacgacccgtttcg

SEQ ID NO: 39167 - DNA, 796 bp, Artificial Sequence
  chemically treated genomic DNA (Homo sapiens) CpG-island No: 39167
agaagtgtaaattaattttatttttatgttgacgggattcgagtgaattcggtataaagggtagttttaaaattaattatttcgattcgcgagagtttcgtatattgtcggcgcggggtcggggtcggggtcggagtcgcgaggtcggcgttcgtatttttcgttagggttttttagttttttagtgttttttcggagttttttatttgaacgggagtttgagagaacggacgataggagtcgagtggaaagtagtgttcgcgtcggagattagcgtcgagggcgggagtcgacgtttagggattatagagtcgcgacgcggcgagtcgcgtacgggttatttcgtcgtcgcgaacgtagaaagtttcgatcgcgtttcgagtttagttagttcgtttgttatttcgatttttgttttaagtggttttcggtcgttttttttcgacggttcgtcgcggaggcggagtttgggcggtcggagttcggtggggtggggtgaggaggtcgggcgtttagtgggtgtcgggaagaagattcgttttttgcgcgcgcgtgcgcgttcgttcgaggggaggcgcgcgagttttgtgcggtggatttatgttttcgcgagggggcgtgttttttttcgcgttcgtagtgtttttgagggttcgcgtttatacgcggttgtgaggaaggaaggcgcgtgtcgcgtgggacgggttttatttgtttgcggatagatggagggttattttgtttcgagaagatttagatattcgagggaggatgtgaaacggaacgattcgtttcg

SEQ ID NO: 39168 - DNA, 796 bp, Artificial Sequence
  chemically treated genomic DNA (Homo sapiens) CpG-island No: 39168
cgaaacgaatcgttccgtttcacatcctccctcgaatatctaaatcttctcgaaacaaaataaccctccatctatccgcaaacaaataaaacccgtcccacgcgacacgcgccttccttcctcacaaccgcgtataaacgcgaaccctcaaaaacactacgaacgcgaaaaaaaacacgccccctcgcgaaaacataaatccaccgcacaaaactcgcgcgcctcccctcgaacgaacgcgcacgcgcgcgcaaaaaacgaatcttcttcccgacacccactaaacgcccgacctcctcaccccaccccaccgaactccgaccgcccaaactccgcctccgcgacgaaccgtcgaaaaaaaacgaccgaaaaccacttaaaacaaaaatcgaaataacaaacgaactaactaaactcgaaacgcgatcgaaactttctacgttcgcgacgacgaaataacccgtacgcgactcgccgcgtcgcgactctataatccctaaacgtcgactcccgccctcgacgctaatctccgacgcgaacactactttccactcgactcctatcgtccgttctctcaaactcccgttcaaataaaaaactccgaaaaaacactaaaaaactaaaaaaccctaacgaaaaatacgaacgccgacctcgcgactccgaccccgaccccgaccccgcgccgacaatatacgaaactctcgcgaatcgaaataattaattttaaaactaccctttataccgaattcactcgaatcccgtcaacataaaaataaaattaatttacacttct

SEQ ID NO: 39169 - DNA, 828 bp, Artificial Sequence
  chemically treated genomic DNA (Homo sapiens) CpG-island No: 39169
aggcgtcgaaggatttagttggggtcgtaggcgtttgtttttttttcgttcgttagggtgggggcgcgtttatgcggtttttttcgcgggtcgatttcgggtgttttgaggcgtttaggagttttttttagatttcgggggggagggtacggtagttacgggagtttttcggttatttcgcgtttcgggttgtagtttagaagtttggaagatgtttttatattaattttgagagcgtataagttttcgttttttttttcgtcgtcgcgggaagcgttcgtcgtttttttttcgcgtttcgcggtttagttttgcgagtttttaagattcgttggacgtttttcgggaggtgagttgagggggtaaagaagaattagagagagaaggcgtcgcgagtagtttttgggatgtagggaggtcggggcgggtcgttggttcgaaggaggttggataggagttggggggcgtttaggcgtttgttgaggggaaggcgggggcggggacgttcgggaatattcggaattgtagagtcgggcggcgttttagttgtattgcgcggagttggcgcggttcgggattaggagttgagtaaatcgtcgcggttaataggaggcgttattcggattcgggttcggcgtcggggtgtcgcgcggcggcgggcgggtaggttttggagcggtagttttttcggaaagtgtttttggtcgggagtgtcgtagaattttagcgttacgaggtgaggggtgtcgcggtgtgtcgtttgtcgttggagatcggaggatgtgttttttttatttttatttttttgttatgaaaattaattgagga

SEQ ID NO: 39170 - DNA, 828 bp, Artificial Sequence
  chemically treated genomic DNA (Homo sapiens) CpG-island No: 39170
tcctcaattaattttcataacaaaaaaataaaaataaaaaaaacacatcctccgatctccaacgacaaacgacacaccgcgacacccctcacctcgtaacgctaaaattctacgacactcccgaccaaaaacactttccgaaaaaactaccgctccaaaacctacccgcccgccgccgcgcgacaccccgacgccgaacccgaatccgaataacgcctcctattaaccgcgacgatttactcaactcctaatcccgaaccgcgccaactccgcgcaatacaactaaaacgccgcccgactctacaattccgaatattcccgaacgtccccgcccccgccttcccctcaacaaacgcctaaacgccccccaactcctatccaacctccttcgaaccaacgacccgccccgacctccctacatcccaaaaactactcgcgacgccttctctctctaattcttctttaccccctcaactcacctcccgaaaaacgtccaacgaatcttaaaaactcgcaaaactaaaccgcgaaacgcgaaaaaaaaacgacgaacgcttcccgcgacgacgaaaaaaaaaacgaaaacttatacgctctcaaaattaatataaaaacatcttccaaacttctaaactacaacccgaaacgcgaaataaccgaaaaactcccgtaactaccgtaccctcccccccgaaatctaaaaaaaactcctaaacgcctcaaaacacccgaaatcgacccgcgaaaaaaaccgcataaacgcgcccccaccctaacgaacgaaaaaaaaacaaacgcctacgaccccaactaaatccttcgacgcct

SEQ ID NO: 39171 - DNA, 828 bp, Artificial Sequence
  chemically treated genomic DNA (Homo sapiens) CpG-island No: 39171
tttttaattagtttttataatagaaaaataaagatgagaagaatatatttttcggtttttagcggtaggcgatatatcgcgatattttttatttcgtgacgttggggttttgcggtattttcggttaaaagtatttttcgaaaaaattgtcgttttaaagtttgttcgttcgtcgtcgcgcgatatttcggcgtcgagttcgggttcgagtgacgttttttgttggtcgcggcggtttgtttagtttttggtttcgggtcgcgttaatttcgcgtagtgtagttgaggcgtcgttcggttttgtaatttcgggtgttttcgggcgttttcgttttcgttttttttttagtaggcgtttgggcgttttttaatttttgtttagtttttttcggattaacgattcgtttcggtttttttgtattttagagattattcgcggcgttttttttttttaatttttttttatttttttagtttatttttcgaggagcgtttaacgggttttgggggttcgtagaattgagtcgcgaagcgcgggggaaaggcggcgagcgtttttcgcggcggcggggaggaagacgaagatttgtgcgtttttaaagttaatgtgaaaatattttttaaatttttgggttgtagttcgaaacgcggggtagtcggaaggttttcgtagttgtcgtgttttttttttcggggtttgggaagggtttttaggcgttttagagtattcggggtcggttcgcgggggaggtcgtatagacgcgtttttattttgacgaacggggaaggggtaggcgtttgcgattttaattaaatttttcggcgttt

SEQ ID NO: 39172 - DNA, 828 bp, Artificial Sequence
  chemically treated genomic DNA (Homo sapiens) CpG-island No: 39172
aaacgccgaaaaatttaattaaaatcgcaaacgcctaccccttccccgttcgtcaaaataaaaacgcgtctatacgacctcccccgcgaaccgaccccgaatactctaaaacgcctaaaaacccttcccaaaccccgaaaaaaaaaacacgacaactacgaaaaccttccgactaccccgcgtttcgaactacaacccaaaaatttaaaaaatattttcacattaactttaaaaacgcacaaatcttcgtcttcctccccgccgccgcgaaaaacgctcgccgcctttcccccgcgcttcgcgactcaattctacgaacccccaaaacccgttaaacgctcctcgaaaaataaactaaaaaaataaaaaaaaattaaaaaaaaaaaacgccgcgaataatctctaaaatacaaaaaaaccgaaacgaatcgttaatccgaaaaaaactaaacaaaaattaaaaaacgcccaaacgcctactaaaaaaaaaacgaaaacgaaaacgcccgaaaacacccgaaattacaaaaccgaacgacgcctcaactacactacgcgaaattaacgcgacccgaaaccaaaaactaaacaaaccgccgcgaccaacaaaaaacgtcactcgaacccgaactcgacgccgaaatatcgcgcgacgacgaacgaacaaactttaaaacgacaattttttcgaaaaatacttttaaccgaaaataccgcaaaaccccaacgtcacgaaataaaaaatatcgcgatatatcgcctaccgctaaaaaccgaaaaatatattcttctcatctttatttttctattataaaaactaattaaaaa

SEQ ID NO: 39173 - DNA, 680 bp, Artificial Sequence
  chemically treated genomic DNA (Homo sapiens) CpG-island No: 39173
aaacgggtcgcgaatcgtagtattatgttggttaagaagattattattaaggacggaggtacggtgagttgagtttcgcgtcggcgagcgtttttcggggtttttattcggttttttttttagatttttatattgtcgtttttaggcgtttcggtgtttttttttttttttttattttgttcgcgttgtcggtgtttcggggtcgcggattcgtatgtcgtcgtttcgggaatcgtttttcgttgttcgggtttgcggttttcggggttcgttttttttttttttcgtatttgtcgttttttgttttggtcgtttttgtaggttttgcggtttcgaattttacgtgcgtttttgtcgcggggaggaatgtgcggggttttttcggcggttcgttcgtcgcgtttttcgtcgtcgtagtttcgtttcgttttcgtcgttaggtttcgcggagtcgtcgttgcgtttgttaaggggttgggaattatttttgtttttttatatgttgttaacggggtggcgtttggcgcggggatttcgttgcggtttcgtagtacgttcgttttttgtttttacgtttttttgcgtcggtgtttcggttttgggttgtttatagtaaattttgatcggagatgggttttttttatttttcggagtcggaagtatgacggtagatatttggg

SEQ ID NO: 39174 - DNA, 680 bp, Artificial Sequence
  chemically treated genomic DNA (Homo sapiens) CpG-island No: 39174
cccaaatatctaccgtcatacttccgactccgaaaaataaaaaaaacccatctccgatcaaaatttactataaacaacccaaaaccgaaacaccgacgcaaaaaaacgtaaaaacaaaaaacgaacgtactacgaaaccgcaacgaaatccccgcgccaaacgccaccccgttaacaacatataaaaaaacaaaaataattcccaaccccttaacaaacgcaacgacgactccgcgaaacctaacgacgaaaacgaaacgaaactacgacgacgaaaaacgcgacgaacgaaccgccgaaaaaaccccgcacattcctccccgcgacaaaaacgcacgtaaaattcgaaaccgcaaaacctacaaaaacgaccaaaacaaaaaacgacaaatacgaaaaaaaaaaaaaacgaaccccgaaaaccgcaaacccgaacaacgaaaaacgattcccgaaacgacgacatacgaatccgcgaccccgaaacaccgacaacgcgaacaaaataaaaaaaaaaaaaaaaacaccgaaacgcctaaaaacgacaatataaaaatctaaaaaaaaaaccgaataaaaaccccgaaaaacgctcgccgacgcgaaactcaactcaccgtacctccgtccttaataataatcttcttaaccaacataatactacgattcgcgacccgttt

SEQ ID NO: 39175 - DNA, 680 bp, Artificial Sequence
  chemically treated genomic DNA (Homo sapiens) CpG-island No: 39175
tttaggtgtttgtcgttatgttttcgatttcgggaagtgagggaagtttattttcggttagggtttattgtaagtagtttagagtcggagtatcgacgtagagagacgtggaaatagaaagcgaacgtattacggggtcgtagcgggattttcgcgttagacgttatttcgttagtaatatatgggagagtagggatggtttttagttttttgataagcgtagcgacggtttcgcggggtttggcggcgaaggcgaggcgaggttgcggcgacgaggggcgcggcgggcgggtcgtcgggggagtttcgtatattttttttcgcggtagaggcgtacgtggggttcgaggtcgtagggtttgtagaggcggttagagtagagggcggtaggtgcgggaaagaaagaggacgggtttcggaggtcgtaagttcgagtagcggaggacgattttcggagcggcggtatgcgggttcgcgatttcgaggtatcggtagcgcggatagggtgggggaagggagggaggtatcgggacgtttagagacggtagtgtgggggtttgaaggagagatcggatgggggtttcgagggacgttcgtcggcgcggaatttagtttatcgtgttttcgtttttaatgatgatttttttggttagtatgatattgcggttcgcggttcgttt

SEQ ID NO: 39176 - DNA, 680 bp, Artificial Sequence
  chemically treated genomic DNA (Homo sapiens) CpG-island No: 39176
aaacgaaccgcgaaccgcaatatcatactaaccaaaaaaatcatcattaaaaacgaaaacacgataaactaaattccgcgccgacgaacgtccctcgaaacccccatccgatctctccttcaaacccccacactaccgtctctaaacgtcccgatacctccctcccttcccccaccctatccgcgctaccgatacctcgaaatcgcgaacccgcataccgccgctccgaaaatcgtcctccgctactcgaacttacgacctccgaaacccgtcctctttctttcccgcacctaccgccctctactctaaccgcctctacaaaccctacgacctcgaaccccacgtacgcctctaccgcgaaaaaaaatatacgaaactcccccgacgacccgcccgccgcgcccctcgtcgccgcaacctcgcctcgccttcgccgccaaaccccgcgaaaccgtcgctacgcttatcaaaaaactaaaaaccatccctactctcccatatattactaacgaaataacgtctaacgcgaaaatcccgctacgaccccgtaatacgttcgctttctatttccacgtctctctacgtcgatactccgactctaaactacttacaataaaccctaaccgaaaataaacttccctcacttcccgaaatcgaaaacataacgacaaacacctaaa

SEQ ID NO: 39177 - DNA, 702 bp, Artificial Sequence
  chemically treated genomic DNA (Homo sapiens) CpG-island No: 39177
ttaaaggatgtaatcgaaaggtatttgttacgtttgcgaatacggtcgtttttttttttcgttttttttttatcgaggtttttcggagggttacggtcgagttcgagtttggggttgtcgggttcgtcgcgttcgcggtttttcggttttgaggtttttcgaaagcgtcggggatatagtttttcgttagttgttgtcgttgttgtaggcggcgattgcgttttcggaggtagtacgcgaattaggcggcgtagttttggaagatgagtagttttattacgttgattaatagttttaggacgtcgacgatgagtattagttcggggttatcgatgcgttcgggtcgggttaggcgtagtacggtttttacgaagatggtgaagtagagcgcggtgaggaagatcgcgttgtttagcgcgtttattatttcggcgcgggcgtagtcgtaggtggcgttgaagtttcgggtggggttcgggcgatgtagtcggcgtttaggtttacgtatagcgagattaggtcggagagtatgttgaaggagtcggagagtagcgcgatggagttgtttaggtagtcggagattagtttcgttacgaagaaggcgacggtgagtattagtatgaagagtagtcggtacgttttgttagagtagcggtttatttcgttattagtttcgcgttcgcgtcgtttaggggagcgtag

SEQ ID NO: 39178 - DNA, 702 bp, Artificial Sequence
  chemically treated genomic DNA (Homo sapiens) CpG-island No: 39178
ctacgctcccctaaacgacgcgaacgcgaaactaataacgaaataaaccgctactctaacaaaacgtaccgactactcttcatactaatactcaccgtcgccttcttcgtaacgaaactaatctccgactacctaaacaactccatcgcgctactctccgactccttcaacatactctccgacctaatctcgctatacgtaaacctaaacgccgactacatcgcccgaaccccacccgaaacttcaacgccacctacgactacgcccgcgccgaaataataaacgcgctaaacaacgcgatcttcctcaccgcgctctacttcaccatcttcgtaaaaaccgtactacgcctaacccgacccgaacgcatcgataaccccgaactaatactcatcgtcgacgtcctaaaactattaatcaacgtaataaaactactcatcttccaaaactacgccgcctaattcgcgtactacctccgaaaacgcaatcgccgcctacaacaacgacaacaactaacgaaaaactatatccccgacgctttcgaaaaacctcaaaaccgaaaaaccgcgaacgcgacgaacccgacaaccccaaactcgaactcgaccgtaaccctccgaaaaacctcgataaaaaaaaaacgaaaaaaaaaaacgaccgtattcgcaaacgtaacaaatacctttcgattacatcctttaa

SEQ ID NO: 39179 - DNA, 702 bp, Artificial Sequence
  chemically treated genomic DNA (Homo sapiens) CpG-island No: 39179
ttgcgtttttttgggcggcgcgggcgcggggttggtggcgagatgggtcgttattttggtaagacgtgtcggttgttttttatgttggtgtttatcgtcgtttttttcgtggcggagttggttttcggttatttgggtaattttatcgcgttgtttttcgatttttttaatatgtttttcgatttgatttcgttgtgcgtgggtttgagcgtcggttatatcgttcgggttttattcggggttttagcgttatttacggttacgttcgcgtcgaggtggtgggcgcgttgagtaacgcggttttttttatcgcgttttgttttattattttcgtggaggtcgtgttgcgtttggttcggttcgagcgtatcgatgatttcgagttggtgtttatcgtcggcgttttggggttgttggttaacgtggtggggttgtttattttttaggattgcgtcgtttggttcgcgtgttgttttcggggacgtagtcgtcgtttgtagtagcggtagtagttggcggagggttgtgttttcggcgttttcggggggttttagggtcggaggatcgcgggcgcggcggattcgatagttttaggttcggattcggtcgtaatttttcgggggatttcggtggaaaggaagcgggagaagggggcgatcgtgttcgtaaacgtagtaggtgtttttcggttgtattttttgg

SEQ ID NO: 39180 - DNA, 702 bp, Artificial Sequence
  chemically treated genomic DNA (Homo sapiens) CpG-island No: 39180
ccaaaaaatacaaccgaaaaacacctactacgtttacgaacacgatcgcccccttctcccgcttcctttccaccgaaatcccccgaaaaattacgaccgaatccgaacctaaaactatcgaatccgccgcgcccgcgatcctccgaccctaaaaccccccgaaaacgccgaaaacacaaccctccgccaactactaccgctactacaaacgacgactacgtccccgaaaacaacacgcgaaccaaacgacgcaatcctaaaaaataaacaaccccaccacgttaaccaacaaccccaaaacgccgacgataaacaccaactcgaaatcatcgatacgctcgaaccgaaccaaacgcaacacgacctccacgaaaataataaaacaaaacgcgataaaaaaaaccgcgttactcaacgcgcccaccacctcgacgcgaacgtaaccgtaaataacgctaaaaccccgaataaaacccgaacgatataaccgacgctcaaacccacgcacaacgaaatcaaatcgaaaaacatattaaaaaaatcgaaaaacaacgcgataaaattacccaaataaccgaaaaccaactccgccacgaaaaaaacgacgataaacaccaacataaaaaacaaccgacacgtcttaccaaaataacgacccatctcgccaccaaccccgcgcccgcgccgcccaaaaaaacgcaa

SEQ ID NO: 39181 - DNA, 729 bp, Artificial Sequence
  chemically treated genomic DNA (Homo sapiens) CpG-island No: 39181
tggtcgtgcgattttgcgttttagcgcgtttgcgtcggcgttttttgttcgtttcgattggttgagggttgcgtatgtttcgaggttcgtcgcggttcggcgttcgttcgcgttttttttttattttatttttttagcggttttcggagtcggttcgaaagatgtcggcggcggtgattggttgcggcgggttcgtttttcgggtttttcgttttcgtcgtcgttattacggagtttttagtggtgagtgtgcggagcgtcgaggttcgcgtttcgtcgttgttttcgtcgtcggggcgggcgtcgcggtgtttttgtcgagcgtgagtttcgaattgttatcgcgtcgagttttagttttattcgtcggtgttcgcggttcgagtttttttcgtttcgttggcggttcgcgttttttttcgtcgtgcgcgttcgtcgttgtggtttgtagttatttcgtttcgttgttttgttttcgttgtttttgtcgtttttttcgcggttttatgcgggcggggttgtcggttgtcgttttgatgtttcgcgacgtcggttttgagtttcgttttttcggtgggaaacgtagaattggttattcgttattttaggcggtggggtttgaatgagagcggtgtttcggtaggtcgttagaaagttatagtcgtttatttgagcgtttgtaagagatggaggtaggagtggtgaggtgagagttttagatttgagggt

SEQ ID NO: 39182 - DNA, 729 bp, Artificial Sequence
  chemically treated genomic DNA (Homo sapiens) CpG-island No: 39182
accctcaaatctaaaactctcacctcaccactcctacctccatctcttacaaacgctcaaataaacgactataactttctaacgacctaccgaaacaccgctctcattcaaaccccaccgcctaaaataacgaataaccaattctacgtttcccaccgaaaaaacgaaactcaaaaccgacgtcgcgaaacatcaaaacgacaaccgacaaccccgcccgcataaaaccgcgaaaaaaacgacaaaaacaacgaaaacaaaacaacgaaacgaaataactacaaaccacaacgacgaacgcgcacgacgaaaaaaaacgcgaaccgccaacgaaacgaaaaaaactcgaaccgcgaacaccgacgaataaaactaaaactcgacgcgataacaattcgaaactcacgctcgacaaaaacaccgcgacgcccgccccgacgacgaaaacaacgacgaaacgcgaacctcgacgctccgcacactcaccactaaaaactccgtaataacgacgacgaaaacgaaaaacccgaaaaacgaacccgccgcaaccaatcaccgccgccgacatctttcgaaccgactccgaaaaccgctaaaaaaataaaataaaaaaaaaacgcgaacgaacgccgaaccgcgacgaacctcgaaacatacgcaaccctcaaccaatcgaaacgaacaaaaaacgccgacgcaaacgcgctaaaacgcaaaatcgcacgacca

SEQ ID NO: 39183 - DNA, 729 bp, Artificial Sequence
  chemically treated genomic DNA (Homo sapiens) CpG-island No: 39183
atttttagatttggggtttttattttattatttttgtttttattttttataaacgtttagatgggcgattgtaattttttgacgatttatcgaggtatcgtttttatttaaattttatcgtttaaggtggcgagtaattagttttacgttttttatcgggggagcgagatttaaggtcggcgtcgcggagtattaaagcgatagtcgatagtttcgttcgtataaggtcgcgggaaggacggtaagagtagcggagataaagtagcgaggcgaggtagttataggttatagcggcgaacgcgtacggcgggggagagcgcgggtcgttagcgaggcggggaaagttcggatcgcggatatcgacggatgaggttggggttcggcgcggtgatagttcggggtttacgttcggtagggatatcgcggcgttcgtttcggcgacggaagtagcggcggaacgcgagtttcggcgtttcgtatatttattattgggagtttcgtaatggcggcggcgggggcggagaattcggggggcgggttcgtcgtagttagttatcgtcgtcggtatttttcgaatcggtttcgaaaatcgttgagggagtggggtgaggggagggcgcgggcggacgtcggatcgcggcgggtttcggagtatgcgtagtttttagttaatcggggcgggtagaggacgtcgacgtaggcgcgttgggacgtagggtcgtacggtta

SEQ ID NO: 39184 - DNA, 729 bp, Artificial Sequence
  chemically treated genomic DNA (Homo sapiens) CpG-island No: 39184
taaccgtacgaccctacgtcccaacgcgcctacgtcgacgtcctctacccgccccgattaactaaaaactacgcatactccgaaacccgccgcgatccgacgtccgcccgcgccctcccctcaccccactccctcaacgattttcgaaaccgattcgaaaaataccgacgacgataactaactacgacgaacccgccccccgaattctccgcccccgccgccgccattacgaaactcccaataataaatatacgaaacgccgaaactcgcgttccgccgctacttccgtcgccgaaacgaacgccgcgatatccctaccgaacgtaaaccccgaactatcaccgcgccgaaccccaacctcatccgtcgatatccgcgatccgaactttccccgcctcgctaacgacccgcgctctcccccgccgtacgcgttcgccgctataacctataactacctcgcctcgctactttatctccgctactcttaccgtccttcccgcgaccttatacgaacgaaactatcgactatcgctttaatactccgcgacgccgaccttaaatctcgctcccccgataaaaaacgtaaaactaattactcgccaccttaaacgataaaatttaaataaaaacgatacctcgataaatcgtcaaaaaattacaatcgcccatctaaacgtttataaaaaataaaaacaaaaataataaaataaaaaccccaaatctaaaaat

SEQ ID NO: 39185 - DNA, 609 bp, Artificial Sequence
  chemically treated genomic DNA (Homo sapiens) CpG-island No: 39185
ttttcggtttttcgtttttcgaagtttttttcgggataaggaagaggaagaggaggagaggtcggggacgagttcgtttttagttttaggtcggttcgttgttaggtgggagtcgaggagggggtcgcgggggggttttgtatatattcgcgggatgaaggttttcggtttgatcgtcggtagcgggtcgtttttgggttaggttgtagttcgttcgttattttttgtttttttttttttattgttaaagtttttttttttttgtttcgttttcgtgtcgtattattcgttttttttttgtaggttaaatcggggtgaagtttttgttcggtagtcggacgtatatttttcgattttcgtttggtttcgcgtttttttttttttatttttttttgttcggacgtgattgggttttcgttttatatacgttttattttttaagttttgtggtaaaagcgattttttcggcgtttcgtttgtagtaatgggaaatatttgtgagtcgagcggagtcgtcggttaggggaattgggggcgcgattttagtattatttgtgtgggaggagatcggggtaaaagtggaaaaggtaaagttttggggcgttattt

SEQ ID NO: 39186 - DNA, 609 bp, Artificial Sequence
  chemically treated genomic DNA (Homo sapiens) CpG-island No: 39186
aaataacgccccaaaactttaccttttccacttttaccccgatctcctcccacacaaataatactaaaatcgcgcccccaattcccctaaccgacgactccgctcgactcacaaatatttcccattactacaaacgaaacgccgaaaaaatcgcttttaccacaaaacttaaaaaataaaacgtatataaaacgaaaacccaatcacgtccgaacaaaaaaaaataaaaaaaaaaaaacgcgaaaccaaacgaaaatcgaaaaatatacgtccgactaccgaacaaaaacttcaccccgatttaacctacaaaaaaaaaacgaataatacgacacgaaaacgaaacaaaaaaaaaaaaactttaacaataaaaaaaaaaaaacaaaaaataacgaacgaactacaacctaacccaaaaacgacccgctaccgacgatcaaaccgaaaaccttcatcccgcgaatatatacaaaacccccccgcgaccccctcctcgactcccacctaacaacgaaccgacctaaaactaaaaacgaactcgtccccgacctctcctcctcttcctcttccttatcccgaaaaaaacttcgaaaaacgaaaaaccgaaaa

SEQ ID NO: 39187 - DNA, 609 bp, Artificial Sequence
  chemically treated genomic DNA (Homo sapiens) CpG-island No: 39187
gggtgacgttttaaagttttattttttttatttttgtttcgatttttttttatataagtggtgttgggatcgcgtttttaatttttttggtcgacggtttcgttcggtttataagtgttttttattattgtaggcgggacgtcggggaaatcgtttttgttatagaatttggagagtagagcgtgtgtggaacgggaatttaattacgttcgggtaggggaaagtgggaaaggaagagcgcggagttaggcggggatcgggggatatgcgttcggttgtcgggtaagaattttatttcgatttaatttgtagaggagaggcgagtagtgcggtacgggaacggggtaaggaggaggaaattttagtaatggaggaaggagaatagaaagtggcgagcgaattgtagtttggtttaagagcggttcgttgtcggcggttaggtcgggagtttttatttcgcgaatatgtgtagggttttttcgcgatttttttttcgatttttatttggtagcggatcggtttggagttggaggcgggttcgttttcggttttttttttttttttttttttttgtttcgggaaggatttcggggagcgaagaatcgggag

SEQ ID NO: 39188 - DNA, 609 bp, Artificial Sequence
  chemically treated genomic DNA (Homo sapiens) CpG-island No: 39188
ctcccgattcttcgctccccgaaatccttcccgaaacaaaaaaaaaaaaaaaaaaaaaaaaccgaaaacgaacccgcctccaactccaaaccgatccgctaccaaataaaaatcgaaaaaaaaatcgcgaaaaaaccctacacatattcgcgaaataaaaactcccgacctaaccgccgacaacgaaccgctcttaaaccaaactacaattcgctcgccactttctattctccttcctccattactaaaatttcctcctccttaccccgttcccgtaccgcactactcgcctctcctctacaaattaaatcgaaataaaattcttacccgacaaccgaacgcatatcccccgatccccgcctaactccgcgctcttcctttcccactttcccctacccgaacgtaattaaattcccgttccacacacgctctactctccaaattctataacaaaaacgatttccccgacgtcccgcctacaataataaaaaacacttataaaccgaacgaaaccgtcgaccaaaaaaattaaaaacgcgatcccaacaccacttatataaaaaaaaatcgaaacaaaaataaaaaaaataaaactttaaaacgtcaccc

SEQ ID NO: 39189 - DNA, 516 bp, Artificial Sequence
  chemically treated genomic DNA (Homo sapiens) CpG-island No: 39189
tttttcgcgtttacgtgcgaggaggtagatcgttcgattcgtgagtagtagtcgtgagggatcggcggttattcgcgcgtggtaggcgtagggcggtttcgtttatttcgggtagtaaacgagaggtggatcgtagtgttcggggtttttaacgttagcggttttcgaattattaaggcggtttcgcgcgttaattggagttgtcgaatggttttagcggagtttcggttttttttatcggtaacgttattcgttttaggttcggaatttttttttttgcgttgttgtagttcgtcgtataatttttcgacgttttttagtttatgcgggtattttggatttcgttatcgtagcgtttttttagcgatacggataattcgtaatttttgtttcgtcgttttttatatatttttatttttttttttttaaatgcgttattatagtttagtttttatttttttcggtagtattttcgtttcggtttatcgggcgtataattagtattttattcgattt

SEQ ID NO: 39190 - DNA, 516 bp, Artificial Sequence
  chemically treated genomic DNA (Homo sapiens) CpG-island No: 39190
aaatcgaataaaatactaattatacgcccgataaaccgaaacgaaaatactaccgaaaaaaataaaaactaaactataataacgcatttaaaaaaaaaaaaataaaaatatataaaaaacgacgaaacaaaaattacgaattatccgtatcgctaaaaaaacgctacgataacgaaatccaaaatacccgcataaactaaaaaacgtcgaaaaattatacgacgaactacaacaacgcaaaaaaaaaaattccgaacctaaaacgaataacgttaccgataaaaaaaaccgaaactccgctaaaaccattcgacaactccaattaacgcgcgaaaccgccttaataattcgaaaaccgctaacgttaaaaaccccgaacactacgatccacctctcgtttactacccgaaataaacgaaaccgccctacgcctaccacgcgcgaataaccgccgatccctcacgactactactcacgaatcgaacgatctacctcctcgcacgtaaacgcgaaaaa

SEQ ID NO: 39191 - DNA, 516 bp, Artificial Sequence
  chemically treated genomic DNA (Homo sapiens) CpG-island No: 39191
gggtcgggtggggtgttggttgtgcgttcggtgggtcggggcgagggtgttgtcggagggggtgggggttgggttgtggtggcgtatttgggaggaggggggtgggggtgtgtggggggcgacggggtaggggttgcggattgttcgtgtcgttgggggggcgttgcggtagcgaggtttagggtattcgtatgggttggggggcgtcgggagattgtgcggcgggttgtagtagcgtagggaagagggtttcgggtttggggcgaatggcgttgtcggtggggagagtcggggtttcgttgaagttattcggtagttttagttaacgcgcggggtcgttttggtggttcggaggtcgttggcgttgaaagtttcgggtattgcggtttatttttcgtttgttgttcgaaatgggcggggtcgttttgcgtttgttacgcgcgagtggtcgtcggttttttacggttgttgtttacgggtcgggcggtttgttttttcgtacgtgggcgcgaaggg

SEQ ID NO: 39192 - DNA, 516 bp, Artificial Sequence
  chemically treated genomic DNA (Homo sapiens) CpG-island No: 39192
cccttcgcgcccacgtacgaaaaaacaaaccgcccgacccgtaaacaacaaccgtaaaaaaccgacgaccactcgcgcgtaacaaacgcaaaacgaccccgcccatttcgaacaacaaacgaaaaataaaccgcaatacccgaaactttcaacgccaacgacctccgaaccaccaaaacgaccccgcgcgttaactaaaactaccgaataacttcaacgaaaccccgactctccccaccgacaacgccattcgccccaaacccgaaaccctcttccctacgctactacaacccgccgcacaatctcccgacgccccccaacccatacgaataccctaaacctcgctaccgcaacgcccccccaacgacacgaacaatccgcaacccctaccccgtcgccccccacacacccccacccccctcctcccaaatacgccaccacaacccaacccccaccccctccgacaacaccctcgccccgacccaccgaacgcacaaccaacaccccacccgaccc

SEQ ID NO: 39193 - DNA, 945 bp, Artificial Sequence
  chemically treated genomic DNA (Homo sapiens) CpG-island No: 39193
cgcgcgggtaaagattttcggggatgatatttcgcgcgtcgcggtttcgtgcgcgcggtttttcgtattcgcgggtcgttttatttttttttttgtattttaagagttcggtttggttttcgaggtcgggagttacgcggtatcgtagtttcgagggagaggacgttcgtaattaatacgtacgcgggtattaagagggtataggttagggcggcgagggtcgaatggggtcggggggtacgcggagttggattagaattagcgagggcgcgtagatattgaacggatgcgaaggtttcggacgcggagcggttcggggcgtcgtgcgtggggcgcgagcggaggttcgggcgttatttacggcggggagggcgggtggttgtttcgagtttagggagcgcgtatcggacggtaaagggtcggaggttcggaggcgcgggagagaagggtcgtttggtcgcgtcgtgacggcgagaagtttttgttagcgcgggagtcggtcgggagaatgcggtcgggttgtagggataggcgcgaggcggcgtcgtagttcgtagtgggtttcgtcgttcggtcggagcgcgcggcgatgtagtaattttagttcgtcgtggggtcgtttttttttcgatagtcgttcggttcggagtcgagagggttatagtagtttatagcggagagtcggggcgatcgtagtttttatttatcggttcgcggtttcgtcgtcggcgtcggggttgcgttttgagttttatggtttcgtcgcgtcgcggtcgttcggcgtattcgtttcgtattatatcgtacgtagcggcgcgagcgattttcgttttcggttcgtttacgggcgcggttacgttttttttcggcgggggggttcggtcggagtaggaggggggtttagtgtcggttttattaattagggttaatttacggggtcgtttt

SEQ ID NO: 39194 - DNA, 945 bp, Artificial Sequence
  chemically treated genomic DNA (Homo sapiens) CpG-island No: 39194
aaaacgaccccgtaaattaaccctaattaataaaaccgacactaaacccccctcctactccgaccgaacccccccgccgaaaaaaaacgtaaccgcgcccgtaaacgaaccgaaaacgaaaatcgctcgcgccgctacgtacgatataatacgaaacgaatacgccgaacgaccgcgacgcgacgaaaccataaaactcaaaacgcaaccccgacgccgacgacgaaaccgcgaaccgataaataaaaactacgatcgccccgactctccgctataaactactataaccctctcgactccgaaccgaacgactatcgaaaaaaaaacgaccccacgacgaactaaaattactacatcgccgcgcgctccgaccgaacgacgaaacccactacgaactacgacgccgcctcgcgcctatccctacaacccgaccgcattctcccgaccgactcccgcgctaacaaaaacttctcgccgtcacgacgcgaccaaacgacccttctctcccgcgcctccgaacctccgaccctttaccgtccgatacgcgctccctaaactcgaaacaaccacccgccctccccgccgtaaataacgcccgaacctccgctcgcgccccacgcacgacgccccgaaccgctccgcgtccgaaaccttcgcatccgttcaatatctacgcgccctcgctaattctaatccaactccgcgtaccccccgaccccattcgaccctcgccgccctaacctataccctcttaatacccgcgtacgtattaattacgaacgtcctctccctcgaaactacgataccgcgtaactcccgacctcgaaaaccaaaccgaactcttaaaatacaaaaaaaaaaataaaacgacccgcgaatacgaaaaaccgcgcgcacgaaaccgcgacgcgcgaaatatcatccccgaaaatctttacccgcgcg

SEQ ID NO: 39195 - DNA, 945 bp, Artificial Sequence
  chemically treated genomic DNA (Homo sapiens) CpG-island No: 39195
gaagcggtttcgtgagttggttttggttggtggagtcggtattgagttttttttttgtttcggtcgagttttttcgtcgggagggggcgtggtcgcgttcgtggacgggtcggaggcgagagtcgttcgcgtcgttgcgtgcggtgtggtgcgaggcgggtgcgtcgggcggtcgcggcgcggcgggattatggagtttagagcgtagtttcggcgtcggcggcgggatcgcggatcggtgagtgagggttgcggtcgtttcggtttttcgttgtaggttgttgtggttttttcggtttcgggtcgggcggttgtcgggggaggggcggttttacggcgaattgaagttgttgtatcgtcgcgcgtttcggtcgggcggcggggtttattgcgggttgcggcgtcgtttcgcgtttatttttgtagttcggtcgtattttttcggtcggttttcgcgttggtaggggtttttcgtcgttacggcgcggttaggcggtttttttttttcgcgttttcgggttttcggttttttgtcgttcggtgcgcgttttttggattcgggatagttattcgtttttttcgtcgtaagtggcgttcgggttttcgttcgcgttttacgtacgacgtttcgggtcgtttcgcgttcgggattttcgtattcgtttagtgtttgcgcgttttcgttggttttggtttagtttcgcgtgtttttcggttttattcggttttcgtcgttttggtttgtgtttttttggtgttcgcgtgcgtgttggttgcgggcgttttttttttcgaggttgcggtgtcgcgtggttttcggtttcggagattaggtcggatttttggagtgtaggggaggaggtggggcggttcgcgagtgcgggggatcgcgcgtacggagtcgcggcgcgcggggtattattttcgggggtttttattcgcgcg

SEQ ID NO: 39196 - DNA, 945 bp, Artificial Sequence
  chemically treated genomic DNA (Homo sapiens) CpG-island No: 39196
cgcgcgaataaaaacccccgaaaataataccccgcgcgccgcgactccgtacgcgcgatcccccgcactcgcgaaccgccccacctcctcccctacactccaaaaatccgacctaatctccgaaaccgaaaaccacgcgacaccgcaacctcgaaaaaaaaaacgcccgcaaccaacacgcacgcgaacaccaaaaaaacacaaaccaaaacgacgaaaaccgaataaaaccgaaaaacacgcgaaactaaaccaaaaccaacgaaaacgcgcaaacactaaacgaatacgaaaatcccgaacgcgaaacgacccgaaacgtcgtacgtaaaacgcgaacgaaaacccgaacgccacttacgacgaaaaaaacgaataactatcccgaatccaaaaaacgcgcaccgaacgacaaaaaaccgaaaacccgaaaacgcgaaaaaaaaaaaccgcctaaccgcgccgtaacgacgaaaaacccctaccaacgcgaaaaccgaccgaaaaaatacgaccgaactacaaaaataaacgcgaaacgacgccgcaacccgcaataaaccccgccgcccgaccgaaacgcgcgacgatacaacaacttcaattcgccgtaaaaccgcccctcccccgacaaccgcccgacccgaaaccgaaaaaaccacaacaacctacaacgaaaaaccgaaacgaccgcaaccctcactcaccgatccgcgatcccgccgccgacgccgaaactacgctctaaactccataatcccgccgcgccgcgaccgcccgacgcacccgcctcgcaccacaccgcacgcaacgacgcgaacgactctcgcctccgacccgtccacgaacgcgaccacgccccctcccgacgaaaaaactcgaccgaaacaaaaaaaaaactcaataccgactccaccaaccaaaaccaactcacgaaaccgcttc

SEQ ID NO: 39197 - DNA, 521 bp, Artificial Sequence
  chemically treated genomic DNA (Homo sapiens) CpG-island No: 39197
  unsure (414)
gtgggagtgcgggatcgggcggggcggcgtgggggatacggtgggtgtatggggggggtcgggtttcgttgggcggcggggcggtcgtttgtggtcggggggtgttggggtgggtggcggcggtttgcgcgtggcgttggcgggcgggggtggcgtcgggcgggggcgggtgtggcggggtgggggggggcgcggggcgggggggcggtgggggcgggggcgtgggcggtcggtttcggcggggttggggggtttttcggtcgggcgggggggggtcggcgtgcgggcggggggcgcgcggtgttcgcggttgcgggcgcggcgttgcgcgtgtggcgtttgtcggcgggggcgtcgcgcggtgatgcggcgtgtcggggggcgtgggggggcgcggcgcgcggcgcgcgcgtngggtgtgtcgtcggtgcgttgggttgtgggggtggggcgcgcgggtcggttcgttcgggtggggcgggcgtcggcggggggtgaagggcggggggtgtgagcggggg

SEQ ID NO: 39198 - DNA, 521 bp, Artificial Sequence
  chemically treated genomic DNA (Homo sapiens) CpG-island No: 39198
  unsure (108)
cccccgctcacaccccccgcccttcaccccccgccgacgcccgccccacccgaacgaaccgacccgcgcgccccacccccacaacccaacgcaccgacgacacacccnacgcgcgcgccgcgcgccgcgcccccccacgccccccgacacgccgcatcaccgcgcgacgcccccgccgacaaacgccacacgcgcaacgccgcgcccgcaaccgcgaacaccgcgcgccccccgcccgcacgccgacccccccccgcccgaccgaaaaaccccccaaccccgccgaaaccgaccgcccacgcccccgcccccaccgcccccccgccccgcgcccccccccaccccgccacacccgcccccgcccgacgccacccccgcccgccaacgccacgcgcaaaccgccgccacccaccccaacaccccccgaccacaaacgaccgccccgccgcccaacgaaacccgaccccccccatacacccaccgtatcccccacgccgccccgcccgatcccgcactcccac

SEQ ID NO: 39199 - DNA, 521 bp, Artificial Sequence
  chemically treated genomic DNA (Homo sapiens) CpG-island No: 39199
  unsure (108)
ttttcgtttatatttttcgttttttatttttcgtcggcgttcgttttattcgaacgggtcgattcgcgcgttttatttttataatttagcgtatcggcgatatatttngcgcgcgcgtcgcgcgtcgcgtttttttacgtttttcggtacgtcgtattatcgcgcgacgttttcgtcggtaagcgttatacgcgtaacgtcgcgttcgtaatcgcgagtatcgcgcgtttttcgttcgtacgtcggttttttttcgttcggtcgaaagattttttaatttcgtcgaggtcggtcgtttacgttttcgtttttatcgttttttcgtttcgcgtttttttttatttcgttatattcgttttcgttcggcgttattttcgttcgttagcgttacgcgtaggtcgtcgttatttattttagtatttttcgattataggcgatcgtttcgtcgtttagcgaagttcggttttttttatatatttatcgtattttttacgtcgtttcgttcggtttcgtatttttat

SEQ ID NO: 39200 - DNA, 521 bp, Artificial Sequence
  chemically treated genomic DNA (Homo sapiens) CpG-island No: 39200
  unsure (414)
ataaaaatacgaaaccgaacgaaacgacgtaaaaaatacgataaatatataaaaaaaaccgaacttcgctaaacgacgaaacgatcgcctataatcgaaaaatactaaaataaataacgacgacctacgcgtaacgctaacgaacgaaaataacgccgaacgaaaacgaatataacgaaataaaaaaaaacgcgaaacgaaaaaacgataaaaacgaaaacgtaaacgaccgacctcgacgaaattaaaaaatctttcgaccgaacgaaaaaaaaccgacgtacgaacgaaaaacgcgcgatactcgcgattacgaacgcgacgttacgcgtataacgcttaccgacgaaaacgtcgcgcgataatacgacgtaccgaaaaacgtaaaaaaacgcgacgcgcgacgcgcgcgcnaaatatatcgccgatacgctaaattataaaaataaaacgcgcgaatcgacccgttcgaataaaacgaacgccgacgaaaaataaaaaacgaaaaatataaacgaaaa

SEQ ID NO: 39201 - DNA, 924 bp, Artificial Sequence
  chemically treated genomic DNA (Homo sapiens) CpG-island No: 39201
gggcgtcgggcgacggattggtaggggcgcgcggggcgggcggaagcgtaggggtggggtgtagggcggggggagcgcgtatcggggggcggggggcggcgtcggcgttgggagtgggggagcgggttgggcggttgcgtcggttttgttttagtcgttgtcgttagggcgcggggggcggggggttcggcgtcgcgagttcggttattgtgggagtcgtttttttcggtttcgttacgtttttttcgattgcgttttagtttggggcgcgttcggtcgtcgtcgttttcgttgtcgttacgggttcgttttttttttttttcggtttttagggtaaggcgcggggcgcggggttggatgtaggcgttttgttcgttgcgcgggatgcgtagcggcggttggggagcggtgattgatcgttttcggcggtcgcgttttagttttcggtagtcggcggtcgcggataggcggtttgataggcgcgggtatagcggtagtgcgggtttcgtatttgtagttttcgcggtcggcgtcggggagcggcgaagattcggagttggggttttttttttgcgggcgttgttagggtggaagggaggcgtgtttttcgggaaaatgggatacggagttttgtaggggtcgggcgtcggattttagggagcgggtagggttgggcggggaaggtcgtttttcggttttagggttcggtcgttggttttagcgttttgtcggttttcggtcgcgcgttttcgttttttgttagttacgtttggcgggcgcgcggatttattcgcgtcgttttaggttcgcgggcgcgtttttttttcgtcgtggggaaacgggtgggggttaggtggggagggtcgtagggggtgagagtatttggtgaggtgtttgtcgtcgatcggtttgcggtttaggggg

SEQ ID NO: 39202 - DNA, 924 bp, Artificial Sequence
  chemically treated genomic DNA (Homo sapiens) CpG-island No: 39202
ccccctaaaccgcaaaccgatcgacgacaaacacctcaccaaatactctcaccccctacgaccctccccacctaacccccacccgtttccccacgacgaaaaaaaaacgcgcccgcgaacctaaaacgacgcgaataaatccgcgcgcccgccaaacgtaactaacaaaaaacgaaaacgcgcgaccgaaaaccgacaaaacgctaaaaccaacgaccgaaccctaaaaccgaaaaacgaccttccccgcccaaccctacccgctccctaaaatccgacgcccgacccctacaaaactccgtatcccattttcccgaaaaacacgcctcccttccaccctaacaacgcccgcaaaaaaaaaaccccaactccgaatcttcgccgctccccgacgccgaccgcgaaaactacaaatacgaaacccgcactaccgctatacccgcgcctatcaaaccgcctatccgcgaccgccgactaccgaaaactaaaacgcgaccgccgaaaacgatcaatcaccgctccccaaccgccgctacgcatcccgcgcaacgaacaaaacgcctacatccaaccccgcgccccgcgccttaccctaaaaaccgaaaaaaaaaaaaaacgaacccgtaacgacaacgaaaacgacgacgaccgaacgcgccccaaactaaaacgcaatcgaaaaaaacgtaacgaaaccgaaaaaaacgactcccacaataaccgaactcgcgacgccgaaccccccgccccccgcgccctaacgacaacgactaaaacaaaaccgacgcaaccgcccaacccgctcccccactcccaacgccgacgccgccccccgccccccgatacgcgctccccccgccctacaccccacccctacgcttccgcccgccccgcgcgcccctaccaatccgtcgcccgacgccc

SEQ ID NO: 39203 - DNA, 924 bp, Artificial Sequence
  chemically treated genomic DNA (Homo sapiens) CpG-island No: 39203
ttttttaggtcgtaggtcggtcggcgataggtattttattaggtgtttttattttttgcgattttttttatttggtttttattcgtttttttacggcggaggaggggcgcgttcgcgagtttggggcggcgcgggtgggttcgcgcgttcgttaagcgtggttgataaagagcggggacgcgcgatcgaggatcgatagggcgttggggttagcggtcgagttttggggtcgggaagcgatttttttcgtttagttttgttcgttttttaaggttcggcgttcggtttttgtagggtttcgtgttttattttttcggggaatacgttttttttttattttggtagcgttcgtagaggggaaattttagtttcgagttttcgtcgtttttcggcgtcggtcgcgggggttgtaggtgcgaggttcgtattgtcgttgtgttcgcgtttgttaagtcgtttgttcgcggtcgtcggttgtcgggagttggggcgcggtcgtcgggggcgattaattatcgttttttagtcgtcgttgcgtatttcgcgtagcgggtagggcgtttgtatttaatttcgcgtttcgcgttttattttgggagtcgaaggaggaagaagacgggttcgtggcggtagcgaaggcggcggcggtcgggcgcgttttaggttggagcgtagtcgaggggagcgtggcggagtcgaggggagcggtttttataatggtcgagttcgcggcgtcgagtttttcgtttttcgcgttttagcggtagcggttgaagtagagtcggcgtagtcgtttaattcgtttttttatttttagcgtcgacgtcgtttttcgtttttcgatgcgcgtttttttcgttttgtattttatttttgcgttttcgttcgtttcgcgcgtttttgttagttcgtcgttcggcgttt

SEQ ID NO: 39204 - DNA, 924 bp, Artificial Sequence
  chemically treated genomic DNA (Homo sapiens) CpG-island No: 39204
aaacgccgaacgacgaactaacaaaaacgcgcgaaacgaacgaaaacgcaaaaataaaatacaaaacgaaaaaaacgcgcatcgaaaaacgaaaaacgacgtcgacgctaaaaataaaaaaacgaattaaacgactacgccgactctacttcaaccgctaccgctaaaacgcgaaaaacgaaaaactcgacgccgcgaactcgaccattataaaaaccgctcccctcgactccgccacgctcccctcgactacgctccaacctaaaacgcgcccgaccgccgccgccttcgctaccgccacgaacccgtcttcttcctccttcgactcccaaaataaaacgcgaaacgcgaaattaaatacaaacgccctacccgctacgcgaaatacgcaacgacgactaaaaaacgataattaatcgcccccgacgaccgcgccccaactcccgacaaccgacgaccgcgaacaaacgacttaacaaacgcgaacacaacgacaatacgaacctcgcacctacaacccccgcgaccgacgccgaaaaacgacgaaaactcgaaactaaaatttcccctctacgaacgctaccaaaataaaaaaaaaacgtattccccgaaaaaataaaacacgaaaccctacaaaaaccgaacgccgaaccttaaaaaacgaacaaaactaaacgaaaaaaatcgcttcccgaccccaaaactcgaccgctaaccccaacgccctatcgatcctcgatcgcgcgtccccgctctttatcaaccacgcttaacgaacgcgcgaacccacccgcgccgccccaaactcgcgaacgcgcccctcctccgccgtaaaaaaacgaataaaaaccaaataaaaaaaatcgcaaaaaataaaaacacctaataaaatacctatcgccgaccgacctacgacctaaaaaa

SEQ ID NO: 39205 - DNA, 1097 bp, Artificial Sequence
  chemically treated genomic DNA (Homo sapiens) CpG-island No: 39205
gtaggttagcgttgattggggttttcgttcgttttgtggagtcggttcgggtttttttgtcgttcggtcggtttagttttttattttgacgcgcggggttttttatttagcgggattttcgcgtgggtcggtttttcgcgtttttcggttcgggttttagttcgggtcgggcgggggtcggtagtttttgggggattcgtgtgggtagttcgggtttagtcggtcgtagtttggggtcgaggattcgtcgggattcggaggcggcggggagagggggcggggaacgggtcgggtttggcgtttttgataggaggagtcgtcgtcgtcgttcgtcgttgtagtcgcgtcggggcgggttgagggaggagcggagtcgaggggtgaggacgcggaaacgcgagtcgggatcggcggagcgcgagcgggtcgggtgcgagcggattgaggagcggagcgcgattgtcgggtcgggcgaggcgggcggacggcggagagcgagggcgtcgtcgtcgtttttgagacgtataaagggtcgaggttggggtcgtcgtcgttttagcgcgcgggtttggaatcggtagttttcggggttcggcgagaaggcggtgcgggcggttatggtcggttacgtgtcgggttagtagtcggttaatcgtagttaggagaaggagttcgtgtaggcgtacgaggatgtgttggagcggtataaaggtagggtcggggattggtcggcgttgaggttcgcgggtcggcgtagcgtggttttcggagtcggtcggttcggcggttgtaggtggggcggtcgggcggggtcgtatttatcgcgcggggtttggttttgagttgttgtttttcggggttagtttatttatagagttgagataagttttcggaaatcgttttcggggtagtcggcgcgtttagagcgttagttatatgatttgttttattattcggttttagttggaagaaggcgagataaggcgttggtttggagatcggtcgtcgtggggagttgttggggaggaggaggaggaggagttgggcgcgggagaaattattcgttttgttttgggtgcgagtttttttttagaggg

SEQ ID NO: 39206 - DNA, 1097 bp, Artificial Sequence
  chemically treated genomic DNA (Homo sapiens) CpG-island No: 39206
ccctctaaaaaaaaactcgcacccaaaacaaaacgaataatttctcccgcgcccaactcctcctcctcctcctccccaacaactccccacgacgaccgatctccaaaccaacgccttatctcgccttcttccaactaaaaccgaataataaaacaaatcatataactaacgctctaaacgcgccgactaccccgaaaacgatttccgaaaacttatctcaactctataaataaactaaccccgaaaaacaacaactcaaaaccaaaccccgcgcgataaatacgaccccgcccgaccgccccacctacaaccgccgaaccgaccgactccgaaaaccacgctacgccgacccgcgaacctcaacgccgaccaatccccgaccctacctttataccgctccaacacatcctcgtacgcctacacgaactccttctcctaactacgattaaccgactactaacccgacacgtaaccgaccataaccgcccgcaccgccttctcgccgaaccccgaaaactaccgattccaaacccgcgcgctaaaacgacgacgaccccaacctcgaccctttatacgtctcaaaaacgacgacgacgccctcgctctccgccgtccgcccgcctcgcccgacccgacaatcgcgctccgctcctcaatccgctcgcacccgacccgctcgcgctccgccgatcccgactcgcgtttccgcgtcctcacccctcgactccgctcctccctcaacccgccccgacgcgactacaacgacgaacgacgacgacgactcctcctatcaaaaacgccaaacccgacccgttccccgccccctctccccgccgcctccgaatcccgacgaatcctcgaccccaaactacgaccgactaaacccgaactacccacacgaatcccccaaaaactaccgacccccgcccgacccgaactaaaacccgaaccgaaaaacgcgaaaaaccgacccacgcgaaaatcccgctaaataaaaaaccccgcgcgtcaaaataaaaaactaaaccgaccgaacgacaaaaaaacccgaaccgactccacaaaacgaacgaaaaccccaatcaacgctaacctac

SEQ ID NO: 39207 - DNA, 1097 bp, Artificial Sequence
  chemically treated genomic DNA (Homo sapiens) CpG-island No: 39207
ttttttgggaggaagttcgtatttagagtagagcgggtggtttttttcgcgtttaatttttttttttttttttttttagtaattttttacggcggtcggtttttaggttagcgttttgtttcgtttttttttagttggggtcggataatagggtaaattatgtaattggcgttttgagcgcgtcgattgtttcgggggcggttttcgaaggtttattttaattttgtaaataaattggtttcgagaagtagtagtttagggttaagtttcgcgcggtgggtgcgatttcgttcggtcgttttatttgtagtcgtcgagtcgatcggtttcgaaggttacgttgcgtcggttcgcgggttttagcgtcggttagttttcggttttatttttgtatcgttttagtatattttcgtacgtttgtacgaatttttttttttggttgcggttggtcggttgttgattcggtacgtagtcggttatggtcgttcgtatcgttttttcgtcgagtttcgggggttgtcggttttaggttcgcgcgttgaggcggcggcggttttagtttcgattttttgtgcgttttagagacggcgacggcgttttcgtttttcgtcgttcgttcgtttcgttcggttcggtagtcgcgtttcgttttttagttcgttcgtattcggttcgttcgcgtttcgtcggtttcggttcgcgttttcgcgtttttatttttcggtttcgttttttttttagttcgtttcggcgcggttgtagcggcgggcggcggcggcggttttttttgttaggagcgttaggttcggttcgtttttcgtttttttttttcgtcgttttcgggtttcggcgagttttcggttttaggttgcggtcggttgggttcgggttgtttatacgggttttttaggggttgtcgattttcgttcggttcggattggggttcgagtcgaggggcgcgagaggtcggtttacgcgggagtttcgttgggtgggaggtttcgcgcgttaggatgaaaggttgggtcggtcgaacggtagggagattcgggtcggttttatagggcgagcgggagttttagttagcgttgatttat

SEQ ID NO: 39208 - DNA, 1097 bp, Artificial Sequence
  chemically treated genomic DNA (Homo sapiens) CpG-island No: 39208
ataaatcaacgctaactaaaactcccgctcgccctataaaaccgacccgaatctccctaccgttcgaccgacccaacctttcatcctaacgcgcgaaacctcccacccaacgaaactcccgcgtaaaccgacctctcgcgcccctcgactcgaaccccaatccgaaccgaacgaaaatcgacaacccctaaaaaacccgtataaacaacccgaacccaaccgaccgcaacctaaaaccgaaaactcgccgaaacccgaaaacgacgaaaaaaaaaaacgaaaaacgaaccgaacctaacgctcctaacaaaaaaaaccgccgccgccgcccgccgctacaaccgcgccgaaacgaactaaaaaaaaaacgaaaccgaaaaataaaaacgcgaaaacgcgaaccgaaaccgacgaaacgcgaacgaaccgaatacgaacgaactaaaaaacgaaacgcgactaccgaaccgaacgaaacgaacgaacgacgaaaaacgaaaacgccgtcgccgtctctaaaacgcacaaaaaatcgaaactaaaaccgccgccgcctcaacgcgcgaacctaaaaccgacaacccccgaaactcgacgaaaaaacgatacgaacgaccataaccgactacgtaccgaatcaacaaccgaccaaccgcaaccaaaaaaaaaaattcgtacaaacgtacgaaaatatactaaaacgatacaaaaataaaaccgaaaactaaccgacgctaaaacccgcgaaccgacgcaacgtaaccttcgaaaccgatcgactcgacgactacaaataaaacgaccgaacgaaatcgcacccaccgcgcgaaacttaaccctaaactactacttctcgaaaccaatttatttacaaaattaaaataaaccttcgaaaaccgcccccgaaacaatcgacgcgctcaaaacgccaattacataatttaccctattatccgaccccaactaaaaaaaaacgaaacaaaacgctaacctaaaaaccgaccgccgtaaaaaattactaaaaaaaaaaaaaaaaaaaaattaaacgcgaaaaaaaccacccgctctactctaaatacgaacttcctcccaaaaaa

SEQ ID NO: 39209 - DNA, 1079 bp, Artificial Sequence
  chemically treated genomic DNA (Homo sapiens) CpG-island No: 39209
gggcggatatgtcgtatattatatggcggataatttgggggtgtggttggtttgcgggggatatcggatgttattatggatgatttgtatatgggatggatcgatggatggtttgggggcggttatatgacgcggggttattgatgatggggcgtcgggcgacggattggtatgggcgcgcggggcgggcggaatcgtatgggtggggtgtatggcggggggatcgcgtatcggggggcggggggcggcgtcggcgttgggagtgggggagcgggttgggcggttgcgtcggttttgttttagtcgttgtcgttagggcgcggggggcggggggttcggcgtcgcgagttcggttattgtgggagtcgtttttttcggtttcgttacgtttttttcgattgcgttttagtttggggcgcgttcggtcgtcgtcgttttcgttgtcgttacgggttcgttttttttttttttcggtttttagggtaaggcgcggggcgcggggttggatgtatgcgttttgttcgttgcgcgggatgcgtatcggcggttggggagcggtgattgatcgttttcggcggtcgcgttttatttttcggcgaggcggcggtcgcggataggcggtttgataggcgcgggtatatcggtagtgcgggtttcgtatttgtatttttcgcggtcggcgtcggggagcggcgaatattcggagttggggttttttttttgcgggcgttgttatggtggaatggaggcgtgtttttcgggaaaatgggatacggatttttgtatgggtcgggcgtcggattttatggagcgggtagggttggggcggggaatgtcgtttttcggttttatggttcggtcgttggttttatcgttttgtcggttttcggtcgcgcgttttcgttttttgttatttacgtttggcgggcgcgcggatttattcgcgtcgttttatgttcgcgggcgcgtttttttttcgtcgtggggaaacgggtgggggttatgtggggagggtcgtatggggtgatattatttggtgaggtgtttgtcgtcgatcggtttgcggtttatggggtggg

SEQ ID NO: 39210 - DNA, 1079 bp, Artificial Sequence
  chemically treated genomic DNA (Homo sapiens) CpG-island No: 39210
cccaccccataaaccgcaaaccgatcgacgacaaacacctcaccaaataatatcaccccatacgaccctccccacataacccccacccgtttccccacgacgaaaaaaaaacgcgcccgcgaacataaaacgacgcgaataaatccgcgcgcccgccaaacgtaaataacaaaaaacgaaaacgcgcgaccgaaaaccgacaaaacgataaaaccaacgaccgaaccataaaaccgaaaaacgacattccccgccccaaccctacccgctccataaaatccgacgcccgacccatacaaaaatccgtatcccattttcccgaaaaacacgcctccattccaccataacaacgcccgcaaaaaaaaaaccccaactccgaatattcgccgctccccgacgccgaccgcgaaaaatacaaatacgaaacccgcactaccgatatacccgcgcctatcaaaccgcctatccgcgaccgccgcctcgccgaaaaataaaacgcgaccgccgaaaacgatcaatcaccgctccccaaccgccgatacgcatcccgcgcaacgaacaaaacgcatacatccaaccccgcgccccgcgccttaccctaaaaaccgaaaaaaaaaaaaaacgaacccgtaacgacaacgaaaacgacgacgaccgaacgcgccccaaactaaaacgcaatcgaaaaaaacgtaacgaaaccgaaaaaaacgactcccacaataaccgaactcgcgacgccgaaccccccgccccccgcgccctaacgacaacgactaaaacaaaaccgacgcaaccgcccaacccgctcccccactcccaacgccgacgccgccccccgccccccgatacgcgatccccccgccatacaccccacccatacgattccgcccgccccgcgcgcccataccaatccgtcgcccgacgccccatcatcaataaccccgcgtcatataaccgcccccaaaccatccatcgatccatcccatatacaaatcatccataataacatccgatatcccccgcaaaccaaccacacccccaaattatccgccatataatatacgacatatccgccc

SEQ ID NO: 39211 - DNA, 1079 bp, Artificial Sequence
  chemically treated genomic DNA (Homo sapiens) CpG-island No: 39211
tttattttataggtcgtaggtcggtcggcgataggtattttattaggtgatattattttatgcgattttttttatatggtttttattcgtttttttacggcggaggaggggcgcgttcgcgagtatggggcggcgcgggtgggttcgcgcgttcgttaagcgtggatgataaagagcggggacgcgcgatcgaggatcgatagggcgatggggttagcggtcgagttatggggtcgggaagcgatatttttcgttttagttttgttcgttttataaggttcggcgttcggtttatgtagggattcgtgttttattttttcggggaatacgtttttattttattatggtagcgttcgtagaggggaaattttagtttcgagtattcgtcgtttttcggcgtcggtcgcgggggatgtaggtgcgaggttcgtattgtcgatgtgttcgcgtttgttaagtcgtttgttcgcggtcgtcgtttcgtcgggagatggggcgcggtcgtcgggggcgattaattatcgttttttagtcgtcgatgcgtatttcgcgtagcgggtagggcgtatgtatttaatttcgcgtttcgcgttttattttgggagtcgaaggaggaagaagacgggttcgtggcggtagcgaaggcggcggcggtcgggcgcgttttaggttggagcgtagtcgaggggagcgtggcggagtcgaggggagcggtttttataatggtcgagttcgcggcgtcgagtttttcgtttttcgcgttttagcggtagcggttgaagtagagtcggcgtagtcgtttaattcgtttttttatttttagcgtcgacgtcgtttttcgtttttcgatgcgcgattttttcgttatgtattttatttatgcgatttcgttcgtttcgcgcgtttatgttagttcgtcgttcggcgttttattattaatgatttcgcgttatatggtcgtttttaggttatttatcggtttattttatatgtaaattatttatagtggtattcggtgtttttcgtaggttaattatatttttaaattattcgttatatgatatgcgatatattcgttt

SEQ ID NO: 39212 - DNA, 1079 bp, Artificial Sequence
  chemically treated genomic DNA (Homo sapiens) CpG-island No: 39212
aaacgaatatatcgcatatcatataacgaataatttaaaaatataattaacctacgaaaaacaccgaataccactataaataatttacatataaaataaaccgataaataacctaaaaacgaccatataacgcgaaatcattaataataaaacgccgaacgacgaactaacataaacgcgcgaaacgaacgaaatcgcataaataaaatacataacgaaaaaatcgcgcatcgaaaaacgaaaaacgacgtcgacgctaaaaataaaaaaacgaattaaacgactacgccgactctacttcaaccgctaccgctaaaacgcgaaaaacgaaaaactcgacgccgcgaactcgaccattataaaaaccgctcccctcgactccgccacgctcccctcgactacgctccaacctaaaacgcgcccgaccgccgccgccttcgctaccgccacgaacccgtcttcttcctccttcgactcccaaaataaaacgcgaaacgcgaaattaaatacatacgccctacccgctacgcgaaatacgcatcgacgactaaaaaacgataattaatcgcccccgacgaccgcgccccatctcccgacgaaacgacgaccgcgaacaaacgacttaacaaacgcgaacacatcgacaatacgaacctcgcacctacatcccccgcgaccgacgccgaaaaacgacgaatactcgaaactaaaatttcccctctacgaacgctaccataataaaataaaaacgtattccccgaaaaaataaaacacgaatccctacataaaccgaacgccgaaccttataaaacgaacaaaactaaaacgaaaaatatcgcttcccgaccccataactcgaccgctaaccccatcgccctatcgatcctcgatcgcgcgtccccgctctttatcatccacgcttaacgaacgcgcgaacccacccgcgccgccccatactcgcgaacgcgcccctcctccgccgtaaaaaaacgaataaaaaccatataaaaaaaatcgcataaaataatatcacctaataaaatacctatcgccgaccgacctacgacctataaaataaa

SEQ ID NO: 39213 - DNA, 776 bp, Artificial Sequence
  chemically treated genomic DNA (Homo sapiens) CpG-island No: 39213
  unsure (20)
tagtaggtttcgtttttcgntgttcgttatcggttttttcgtgaaaaaaattaaatcggtatttttattcggtcgttttttattggatatgtgagtgagcgatgttcgttcggattaatgagtcgtagttacggtttggcgagcgtttttcggttcgttttcgcgcggtcgtttttcggattatcggattggtttggggcgggacgtgggcgcgggggcgcggcgtgcggtacgttgtagggttgaagcggcggcggcggtggggattgtacgtagttcggcgttcggtatggtttttttggtgttcggtaggtgcgggttagcggagggaggcgggcgagttggggtcggtttgaaaggtttcgaatttttaggtcgtttttcggcgggtcgcggtcgtaggcggtcggaagtgggtttggcgggcgggaggcgcgggtttcggcgttcggaggagttgttaggttgtttcggcggaggtgcgggtgcgcgggagattcgggcgttcgtggggaggggttttcgtagtcgcggggggcgggagtttcgtgcgttggagtcgggcgcggggtttagggtcgggcgggagagtcgcggagtttagtttcggtcggatttcggggagggggtttgtattttcggagagtcgtaggggagtttgtttcgggtttttttcgaattcgtgcgtggggacggaggttggcgggcgttttgtattgttgtttgtttttgttatttgttttatgtagtttttatttttaaaaattgaaatgtta

SEQ ID NO: 39214 - DNA, 776 bp, Artificial Sequence
  chemically treated genomic DNA (Homo sapiens) CpG-island No: 39214
  unsure (757)
taacatttcaatttttaaaaataaaaactacataaaacaaataacaaaaacaaacaacaatacaaaacgcccgccaacctccgtccccacgcacgaattcgaaaaaaacccgaaacaaactcccctacgactctccgaaaatacaaaccccctccccgaaatccgaccgaaactaaactccgcgactctcccgcccgaccctaaaccccgcgcccgactccaacgcacgaaactcccgccccccgcgactacgaaaacccctccccacgaacgcccgaatctcccgcgcacccgcacctccgccgaaacaacctaacaactcctccgaacgccgaaacccgcgcctcccgcccgccaaacccacttccgaccgcctacgaccgcgacccgccgaaaaacgacctaaaaattcgaaacctttcaaaccgaccccaactcgcccgcctccctccgctaacccgcacctaccgaacaccaaaaaaaccataccgaacgccgaactacgtacaatccccaccgccgccgccgcttcaaccctacaacgtaccgcacgccgcgcccccgcgcccacgtcccgccccaaaccaatccgataatccgaaaaacgaccgcgcgaaaacgaaccgaaaaacgctcgccaaaccgtaactacgactcattaatccgaacgaacatcgctcactcacatatccaataaaaaacgaccgaataaaaataccgatttaatttttttcacgaaaaaaccgataacgaacancgaaaaacgaaacctacta

SEQ ID NO: 39215 - DNA, 776 bp, Artificial Sequence
  chemically treated genomic DNA (Homo sapiens) CpG-island No: 39215
  unsure (757)
taatattttagtttttaaaagtaggagttgtataaagtaggtggtagaaataagtagtagtgtaggacgttcgttaattttcgtttttacgtacgagttcgagaagagttcggaataagtttttttgcgatttttcgggaatatagatttttttttcgggattcggtcggggttgggtttcgcggttttttcgttcggttttggatttcgcgttcggttttagcgtacgaggttttcgtttttcgcggttgcggaagtttttttttacgggcgttcgagtttttcgcgtattcgtattttcgtcggggtaatttagtagttttttcggacgtcgaggttcgcgtttttcgttcgttaggtttattttcggtcgtttgcggtcgcggttcgtcggggaacggtttagagattcgaaattttttaggtcgattttagttcgttcgttttttttcgttggttcgtatttatcgagtattaggagagttatgtcgagcgtcgggttacgtgtagtttttatcgtcgtcgtcgttttagttttgtagcgtgtcgtacgtcgcgttttcgcgtttacgtttcgttttaggttagttcggtggttcgaggggcggtcgcgcgggggcgggtcggaaggcgttcgttaagtcgtggttgcggtttattggttcgggcggatatcgtttatttatatatttaatgggaggcggtcgggtagaggtatcggtttggttttttttacgggggggtcggtggcgagtancggaaggcggggtttgttg

SEQ ID NO: 39216 - DNA, 776 bp, Artificial Sequence
  chemically treated genomic DNA (Homo sapiens) CpG-island No: 39216
  unsure (20)
caacaaaccccgccttccgntactcgccaccgacccccccgtaaaaaaaaccaaaccgatacctctacccgaccgcctcccattaaatatataaataaacgatatccgcccgaaccaataaaccgcaaccacgacttaacgaacgccttccgacccgcccccgcgcgaccgcccctcgaaccaccgaactaacctaaaacgaaacgtaaacgcgaaaacgcgacgtacgacacgctacaaaactaaaacgacgacgacgataaaaactacacgtaacccgacgctcgacataactctcctaatactcgataaatacgaaccaacgaaaaaaaacgaacgaactaaaatcgacctaaaaaatttcgaatctctaaaccgttccccgacgaaccgcgaccgcaaacgaccgaaaataaacctaacgaacgaaaaacgcgaacctcgacgtccgaaaaaactactaaattaccccgacgaaaatacgaatacgcgaaaaactcgaacgcccgtaaaaaaaaacttccgcaaccgcgaaaaacgaaaacctcgtacgctaaaaccgaacgcgaaatccaaaaccgaacgaaaaaaccgcgaaacccaaccccgaccgaatcccgaaaaaaaaatctatattcccgaaaaatcgcaaaaaaacttattccgaactcttctcgaactcgtacgtaaaaacgaaaattaacgaacgtcctacactactacttatttctaccacctactttatacaactcctacttttaaaaactaaaatatta

SEQ ID NO: 39217 - DNA, 772 bp, Artificial Sequence
  chemically treated genomic DNA (Homo sapiens) CpG-island No: 39217
  unsure (338)
tttcgcgtagatttaacgtagttttttttcgttttgattgtttatggtttggggacgaattggttcgtcgtagtatttgcggagatgttattagttcggtcgcggggaagcgcgcggaggtgtacgttgtttacgtttttaatgggaaagcgtaggttggtgcgtagtcggatttcgtgtttgtgtttttatttcgtttttgtttcgggttttcgtttcgcggtgcgtttttatcgggagtcggcggggcgcgggtcgcgcggtagggggttgcgggcgacgggcggcgggtgcggggtcggagcgttttgtcggttttcgggaggtagcggtttcgntgtttcgcgtttcgtttcgttttttatttcgggttttggaggcggtttcggtttcgtaggatatttgtatacgggtcgttcgtttttcgtttcgttttagttaggggttcgagagtcggggagtaggtgtaggcgtcgggtaggaaggcgcggaggagacgcgtagggtttttagttttttacgcgcgagggtcggggttttgggggtttttgcggcgcgttttacggggttttttgtcgtacgattgcgttgtcgcgttcgggacgcgtggacggttgagtcgggtgggagtcgggaaaaggttttgagttcgggattatttcgttttttcgttgcggtcgtcgtagtttcgtttgtttatttattttcgttttatagagatatgcgcggattttaggggaattatttatttttaggtgtttttaggttagtg

SEQ ID NO: 39218 - DNA, 772 bp, Artificial Sequence
  chemically treated genomic DNA (Homo sapiens) CpG-island No: 39218
  unsure (435)
cactaacctaaaaacacctaaaaataaataattcccctaaaatccgcgcatatctctataaaacgaaaataaataaacaaacgaaactacgacgaccgcaacgaaaaaacgaaataatcccgaactcaaaaccttttcccgactcccacccgactcaaccgtccacgcgtcccgaacgcgacaacgcaatcgtacgacaaaaaaccccgtaaaacgcgccgcaaaaacccccaaaaccccgaccctcgcgcgtaaaaaactaaaaaccctacgcgtctcctccgcgccttcctacccgacgcctacacctactccccgactctcgaacccctaactaaaacgaaacgaaaaacgaacgacccgtatacaaatatcctacgaaaccgaaaccgcctccaaaacccgaaataaaaaacgaaacgaaacgcgaaacancgaaaccgctacctcccgaaaaccgacaaaacgctccgaccccgcacccgccgcccgtcgcccgcaaccccctaccgcgcgacccgcgccccgccgactcccgataaaaacgcaccgcgaaacgaaaacccgaaacaaaaacgaaataaaaacacaaacacgaaatccgactacgcaccaacctacgctttcccattaaaaacgtaaacaacgtacacctccgcgcgcttccccgcgaccgaactaataacatctccgcaaatactacgacgaaccaattcgtccccaaaccataaacaatcaaaacgaaaaaaaactacgttaaatctacgcgaaa

SEQ ID NO: 39219 - DNA, 772 bp, Artificial Sequence
  chemically treated genomic DNA (Homo sapiens) CpG-island No: 39219
  unsure (435)
tattggtttggagatatttgggagtaggtgatttttttgagattcgcgtatgtttttgtgaggcgagagtgggtgggtaagcggggttgcggcggtcgtagcgggagggcggggtggtttcgagtttagagttttttttcgatttttattcggtttagtcgtttacgcgtttcggacgcggtagcgtagtcgtgcggtaggagatttcgtgggacgcgtcgtagaagtttttagggtttcggttttcgcgcgtaggggattggagattttgcgcgtttttttcgcgtttttttgttcggcgtttgtatttgtttttcggttttcgggtttttggttggagcgaggcgggaggcggacggttcgtatgtaaatattttgcggggtcggggtcgtttttagagttcgggataaaaggcggggcggggcgcggggtancgaagtcgttgtttttcgggagtcggtagagcgtttcggtttcgtattcgtcgttcgtcgttcgtagttttttatcgcgcggttcgcgtttcgtcggttttcggtaaggacgtatcgcggagcggggattcgaggtaggggcggggtggggatataggtacggggttcggttgcgtattagtttgcgtttttttattggaaacgtgggtagcgtgtattttcgcgcgttttttcgcggtcgggttggtagtattttcgtaggtgttgcggcgggttagttcgtttttaggttatgggtagttaaggcggaaaggagttgcgttgggtttgcgcgggg

SEQ ID NO: 39220 - DNA, 772 bp, Artificial Sequence
  chemically treated genomic DNA (Homo sapiens) CpG-island No: 39220
  unsure (338)
ccccgcgcaaacccaacgcaactcctttccgccttaactacccataacctaaaaacgaactaacccgccgcaacacctacgaaaatactaccaacccgaccgcgaaaaaacgcgcgaaaatacacgctacccacgtttccaataaaaaaacgcaaactaatacgcaaccgaaccccgtacctatatccccaccccgcccctacctcgaatccccgctccgcgatacgtccttaccgaaaaccgacgaaacgcgaaccgcgcgataaaaaactacgaacgacgaacgacgaatacgaaaccgaaacgctctaccgactcccgaaaaacaacgacttcgntaccccgcgccccgccccgccttttatcccgaactctaaaaacgaccccgaccccgcaaaatatttacatacgaaccgtccgcctcccgcctcgctccaaccaaaaacccgaaaaccgaaaaacaaatacaaacgccgaacaaaaaaacgcgaaaaaaacgcgcaaaatctccaatcccctacgcgcgaaaaccgaaaccctaaaaacttctacgacgcgtcccacgaaatctcctaccgcacgactacgctaccgcgtccgaaacgcgtaaacgactaaaccgaataaaaatcgaaaaaaaactctaaactcgaaaccaccccgccctcccgctacgaccgccgcaaccccgcttacccacccactctcgcctcacaaaaacatacgcgaatctcaaaaaaatcacctactcccaaatatctccaaaccaata

SEQ ID NO: 39221 - DNA, 534 bp, Artificial Sequence
  chemically treated genomic DNA (Homo sapiens) CpG-island No: 39221
cgggtcggagtcgaagaggagaggggagcggtttagatagcgggtcgcgaataattataacggattaacgaaagaaataagtatcgtagatataaatatatcgacgaagataacgcgtagatttagtcgttacgtcggatttattaatagatcgtatagcggacgtcgcgtcgacgcgacgagcgagtcggttcgtttagtaagtaacgggcgtcgatcgcgcgttcgcgcgtcgcgtagagtattcgacgggggtcgatacgaatcgagttatagcgacggcgcgcggcggcgttaacggcggaatcggtcgcggcggacgacggcgcgacgcgttacgggtaggagcgtagtaggttaaaagtcggtagcgtcgttataaggatcggtatagtagacgagcgggtcgtggtattatcgtaggaagagcgagcgcgacggtgcgggagggcggagaggggtcgcgggagagtcggagtagggtaggagtgcggcgaggtaggttggggtatcgagaggggtagtattagtgag

SEQ ID NO: 39222 - DNA, 534 bp, Artificial Sequence
  chemically treated genomic DNA (Homo sapiens) CpG-island No: 39222
ctcactaatactacccctctcgataccccaacctacctcgccgcactcctaccctactccgactctcccgcgacccctctccgccctcccgcaccgtcgcgctcgctcttcctacgataataccacgacccgctcgtctactataccgatccttataacgacgctaccgacttttaacctactacgctcctacccgtaacgcgtcgcgccgtcgtccgccgcgaccgattccgccgttaacgccgccgcgcgccgtcgctataactcgattcgtatcgacccccgtcgaatactctacgcgacgcgcgaacgcgcgatcgacgcccgttacttactaaacgaaccgactcgctcgtcgcgtcgacgcgacgtccgctatacgatctattaataaatccgacgtaacgactaaatctacgcgttatcttcgtcgatatatttatatctacgatacttatttctttcgttaatccgttataattattcgcgacccgctatctaaaccgctcccctctcctcttcgactccgacccg

SEQ ID NO: 39223 - DNA, 534 bp, Artificial Sequence
  chemically treated genomic DNA (Homo sapiens) CpG-island No: 39223
tttattggtgttgtttttttcgatgttttagtttgtttcgtcgtatttttgttttgtttcggttttttcgcggttttttttcgttttttcgtatcgtcgcgttcgttttttttgcggtggtgttacggttcgttcgtttgttgtgtcggtttttgtagcggcgttgtcggtttttggtttgttgcgtttttgttcgtggcgcgtcgcgtcgtcgttcgtcgcggtcggtttcgtcgttggcgtcgtcgcgcgtcgtcgttgtggttcggttcgtgtcggttttcgtcgggtgttttgcgcggcgcgcgggcgcgcggtcggcgttcgttgtttgttgggcgggtcggttcgttcgtcgcgtcggcgcggcgttcgttgtgcggtttgttgatgggttcggcgtggcggttgggtttgcgcgttgttttcgtcggtgtgtttgtgtttgcggtgtttgtttttttcgttggttcgttgtggttgttcgcggttcgttgtttgggtcgtttttttttttttttcggtttcggttcg

SEQ ID NO: 39224 - DNA, 534 bp, Artificial Sequence
  chemically treated genomic DNA (Homo sapiens) CpG-island No: 39224
cgaaccgaaaccgaaaaaaaaaaaaaaacgacccaaacaacgaaccgcgaacaaccacaacgaaccaacgaaaaaaacaaacaccgcaaacacaaacacaccgacgaaaacaacgcgcaaacccaaccgccacgccgaacccatcaacaaaccgcacaacgaacgccgcgccgacgcgacgaacgaaccgacccgcccaacaaacaacgaacgccgaccgcgcgcccgcgcgccgcgcaaaacacccgacgaaaaccgacacgaaccgaaccacaacgacgacgcgcgacgacgccaacgacgaaaccgaccgcgacgaacgacgacgcgacgcgccacgaacaaaaacgcaacaaaccaaaaaccgacaacgccgctacaaaaaccgacacaacaaacgaacgaaccgtaacaccaccgcaaaaaaaacgaacgcgacgatacgaaaaaacgaaaaaaaaccgcgaaaaaaccgaaacaaaacaaaaatacgacgaaacaaactaaaacatcgaaaaaaacaacaccaataaa

SEQ ID NO: 39225 - DNA, 632 bp, Artificial Sequence
  chemically treated genomic DNA (Homo sapiens) CpG-island No: 39225
aagtcgaggttttaagcgcggggaatgcggttttgttcgatcgttggtttcgcgttttttttcgggtgtataagttttgttttttcgcgtttttttcgagtatttagtttttcgagtagagaggggaattagaggagcgtcgaagtcgggagagaaaaggggcgggcgtcgttttggtaagaagttcgggtttggtttttaagcgtcggcgaatcggttattcggcgagttagtaattagttcgtttcgacggttgcgttcggtggttagattcggcgttcgatatttggagcgagtgcgttggggcgtcggataggagaggttaggttggtaaaggcgcgggaggcggggtcggagcgtgggtcgggtatcgcggggcggggcgcgtcgttcgtttcgtgtgcgcggcggagcgttagggcgggggtatagtcggtttttaatcgcgtataatgagatagcgttgagcgttcgaagtggggtcgaaggaaatatcgagaggagttcggtcgggataggaagagggtggggatcgcgcgaaaggtggtgagtgtttttgggcgtttttttttaacgttttgttagattcgttttcgggttgattttttagttggttttttggattttagagt

SEQ ID NO: 39226 - DNA, 632 bp, Artificial Sequence
  chemically treated genomic DNA (Homo sapiens) CpG-island No: 39226
actctaaaatccaaaaaaccaactaaaaaatcaacccgaaaacgaatctaacaaaacgttaaaaaaaaacgcccaaaaacactcaccacctttcgcgcgatccccaccctcttcctatcccgaccgaactcctctcgatatttccttcgaccccacttcgaacgctcaacgctatctcattatacgcgattaaaaaccgactatacccccgccctaacgctccgccgcgcacacgaaacgaacgacgcgccccgccccgcgatacccgacccacgctccgaccccgcctcccgcgcctttaccaacctaacctctcctatccgacgccccaacgcactcgctccaaatatcgaacgccgaatctaaccaccgaacgcaaccgtcgaaacgaactaattactaactcgccgaataaccgattcgccgacgcttaaaaaccaaacccgaacttcttaccaaaacgacgcccgccccttttctctcccgacttcgacgctcctctaattcccctctctactcgaaaaactaaatactcgaaaaaaacgcgaaaaaacaaaacttatacacccgaaaaaaaacgcgaaaccaacgatcgaacaaaaccgcattccccgcgcttaaaacctcgactt

SEQ ID NO: 39227 - DNA, 632 bp, Artificial Sequence
  chemically treated genomic DNA (Homo sapiens) CpG-island No: 39227
attttggagtttaggaaattaattggagaattagttcggaggcgagtttggtaggacgttgggagaaggcgtttaagagtatttattatttttcgcgcggtttttattttttttttgtttcggtcgggtttttttcggtgtttttttcggttttatttcgggcgtttagcgttgttttattgtgcgcgattgggagtcgattgtgttttcgttttagcgtttcgtcgcgtatacggaacgagcgacgcgtttcgtttcgcggtgttcggtttacgtttcgatttcgtttttcgcgtttttgttagtttggttttttttgttcggcgttttagcgtattcgttttaggtgtcgggcgtcgggtttggttatcgggcgtaatcgtcggagcgggttaattattggttcgtcgaatagtcggttcgtcggcgtttgggggttaggttcgaattttttattagagcggcgttcgttttttttttttttcggtttcgacgtttttttggtttttttttttgttcgggaggttaagtgttcgggagaggcgcgggaaaataagatttatgtattcggagagggacgcggagttagcggtcgggtaaagtcgtatttttcgcgtttggggtttcggttt

SEQ ID NO: 39228 - DNA, 632 bp, Artificial Sequence
  chemically treated genomic DNA (Homo sapiens) CpG-island No: 39228
aaaccgaaaccccaaacgcgaaaaatacgactttacccgaccgctaactccgcgtccctctccgaatacataaatcttattttcccgcgcctctcccgaacacttaacctcccgaacaaaaaaaaaaaccaaaaaaacgtcgaaaccgaaaaaaaaaaaaaacgaacgccgctctaataaaaaattcgaacctaacccccaaacgccgacgaaccgactattcgacgaaccaataattaacccgctccgacgattacgcccgataaccaaacccgacgcccgacacctaaaacgaatacgctaaaacgccgaacaaaaaaaaccaaactaacaaaaacgcgaaaaacgaaatcgaaacgtaaaccgaacaccgcgaaacgaaacgcgtcgctcgttccgtatacgcgacgaaacgctaaaacgaaaacacaatcgactcccaatcgcgcacaataaaacaacgctaaacgcccgaaataaaaccgaaaaaaacaccgaaaaaaacccgaccgaaacaaaaaaaaaataaaaaccgcgcgaaaaataataaatactcttaaacgccttctcccaacgtcctaccaaactcgcctccgaactaattctccaattaatttcctaaactccaaaat

SEQ ID NO: 39229 - DNA, 1178 bp, Artificial Sequence
  chemically treated genomic DNA (Homo sapiens) CpG-island No: 39229
tttcgcgcgttgaatggaagaaatttcgttcgggtatttcggaaggaaagtttcggagtttattcggttttggagtcggatattaatcgttaggggttttttaggttcgtttcgggaaatggtttttttaggcgagtgcgaggcgggtttttcggtttcgatgtaggcgtattagatgtcggtaaggcggggattaggtttaggggatttcggtcgtttcgaggtcgcggagattttaaggttacggaaggattcgcgttttcgtagttcgtacgtcgggaagcgtgtagagttttcggcggggtttcgagttcgttggttagagcgtggagcggcggggtgggagggacgtggtttttagagcgcggggttatcgtaggggtttttgatggggagggagggaagggtcggttcgacggggttttagtagtttttcgcgcgtagtcgttcggtttttttttcgtttagttgggagtcgttagttttgggcgttcgaagatagcgggtgttcggggtagtttttaggggtgcgggcgagggcgtagggcggtttagatagttttcgcgtggaaggcgttcgtttagattcgcgacgtttcggatttttaggttttcgtatttcgtgttcgaggtttcgggacgcgtaggatagtggagtcgtggtcgtcgtttgtttttagttatttgcgttcgggaggcgggggcgggggcgcggttcggggaggtgaaggaagggaagggaagttttaggacgcgagggcgatttcgtcgcgggagggcggggcggggcggatttttgtttattggataagagttcgaggtcgaggttgagatcgtttagcgttgcggagcgggaggggaggtttcgcggaacgttttcggcgttaggattcgcgtgtaaagtttaggttcgggcggttaggtgaggttagcgtcgttcgcggtatcggggcgtttcgtttttttcgtagatttcgaagtggggcgtaggggcgggggtcggggatcgggtatagtttggggttttcgcgtttcgtagatcgcgtcgtttttaaagtcgttaatagtcgcgggtgtcgagcgtttttcgatagcgttatatgggattttgaggtcgttcgaggcgcgaggagggtgtagggttgtttttggtttcgttttaggtttagaatcgggtg

SEQ ID NO: 39230 - DNA, 1178 bp, Artificial Sequence
  chemically treated genomic DNA (Homo sapiens) CpG-island No: 39230
cacccgattctaaacctaaaacgaaaccaaaaacaaccctacaccctcctcgcgcctcgaacgacctcaaaatcccatataacgctatcgaaaaacgctcgacacccgcgactattaacgactttaaaaacgacgcgatctacgaaacgcgaaaaccccaaactatacccgatccccgacccccgcccctacgccccacttcgaaatctacgaaaaaaacgaaacgccccgataccgcgaacgacgctaacctcacctaaccgcccgaacctaaactttacacgcgaatcctaacgccgaaaacgttccgcgaaacctcccctcccgctccgcaacgctaaacgatctcaacctcgacctcgaactcttatccaataaacaaaaatccgccccgccccgccctcccgcgacgaaatcgccctcgcgtcctaaaacttcccttcccttccttcacctccccgaaccgcgcccccgcccccgcctcccgaacgcaaataactaaaaacaaacgacgaccacgactccactatcctacgcgtcccgaaacctcgaacacgaaatacgaaaacctaaaaatccgaaacgtcgcgaatctaaacgaacgccttccacgcgaaaactatctaaaccgccctacgccctcgcccgcacccctaaaaactaccccgaacacccgctatcttcgaacgcccaaaactaacgactcccaactaaacgaaaaaaaaaccgaacgactacgcgcgaaaaactactaaaaccccgtcgaaccgacccttccctccctccccatcaaaaacccctacgataaccccgcgctctaaaaaccacgtccctcccaccccgccgctccacgctctaaccaacgaactcgaaaccccgccgaaaactctacacgcttcccgacgtacgaactacgaaaacgcgaatccttccgtaaccttaaaatctccgcgacctcgaaacgaccgaaatcccctaaacctaatccccgccttaccgacatctaatacgcctacatcgaaaccgaaaaacccgcctcgcactcgcctaaaaaaaccatttcccgaaacgaacctaaaaaacccctaacgattaatatccgactccaaaaccgaataaactccgaaactttccttccgaaatacccgaacgaaatttcttccattcaacgcgcgaaa

SEQ ID NO: 39231 - DNA, 1178 bp, Artificial Sequence
  chemically treated genomic DNA (Homo sapiens) CpG-island No: 39231
tattcggttttgagtttggagcggggttaggggtagttttgtatttttttcgcgtttcggacggttttagggttttatgtggcgttatcggggggcgttcggtattcgcgattgttggcgattttggagacggcgcggtttgcgggacgcggggattttagattgtgttcggttttcggttttcgtttttgcgttttatttcggggtttgcggaaggagcggggcgtttcgatgtcgcgagcgacgttggttttatttggtcgttcgggtttgggttttgtacgcgagttttggcgtcgagagcgtttcgcgaagttttttttttcgtttcgtagcgttgggcggttttagtttcggtttcgggtttttatttagtagataggggttcgtttcgtttcgttttttcgcgacggggtcgttttcgcgttttggggttttttttttttttttttattttttcgggtcgcgttttcgttttcgtttttcggacgtagatggttgggagtaagcggcggttacggttttattgttttgcgcgtttcggagtttcggatacggggtgcgggggtttgggggttcgagacgtcgcggatttagacgggcgttttttacgcgggaattgtttgggtcgttttgcgttttcgttcgtatttttgggggttgtttcgggtattcgttattttcggacgtttagggttggcggtttttagttggacggggagggagtcgagcggttgcgcgcggggaattgttgggatttcgtcgggtcgatttttttttttttttttattaggggtttttacggtggtttcgcgttttggggattacgttttttttatttcgtcgttttacgttttgattagcgggttcgggatttcgtcgaggattttgtacgtttttcggcgtgcgggttgcggagacgcgggttttttcgtggttttggggttttcgcgatttcgaggcgatcgaggttttttaggtttagttttcgttttgtcggtatttagtgcgtttgtatcggaatcgaggggttcgtttcgtattcgtttaagaaaattatttttcgggacgggtttggaaagtttttggcggttggtattcggttttagggtcgaatggatttcgaggtttttttttcgagatgttcgggcgggattttttttatttagcgcgcggag

SEQ ID NO: 39232 - DNA, 1178 bp, Artificial Sequence
  chemically treated genomic DNA (Homo sapiens) CpG-island No: 39232
ctccgcgcgctaaataaaaaaaatcccgcccgaacatctcgaaaaaaaaacctcgaaatccattcgaccctaaaaccgaataccaaccgccaaaaactttccaaacccgtcccgaaaaataattttcttaaacgaatacgaaacgaacccctcgattccgatacaaacgcactaaataccgacaaaacgaaaactaaacctaaaaaacctcgatcgcctcgaaatcgcgaaaaccccaaaaccacgaaaaaacccgcgtctccgcaacccgcacgccgaaaaacgtacaaaatcctcgacgaaatcccgaacccgctaatcaaaacgtaaaacgacgaaataaaaaaaacgtaatccccaaaacgcgaaaccaccgtaaaaacccctaataaaaaaaaaaaaaaaaatcgacccgacgaaatcccaacaattccccgcgcgcaaccgctcgactccctccccgtccaactaaaaaccgccaaccctaaacgtccgaaaataacgaatacccgaaacaacccccaaaaatacgaacgaaaacgcaaaacgacccaaacaattcccgcgtaaaaaacgcccgtctaaatccgcgacgtctcgaacccccaaacccccgcaccccgtatccgaaactccgaaacgcgcaaaacaataaaaccgtaaccgccgcttactcccaaccatctacgtccgaaaaacgaaaacgaaaacgcgacccgaaaaaataaaaaaaaaaaaaaaaaaccccaaaacgcgaaaacgaccccgtcgcgaaaaaacgaaacgaaacgaacccctatctactaaataaaaacccgaaaccgaaactaaaaccgcccaacgctacgaaacgaaaaaaaaaacttcgcgaaacgctctcgacgccaaaactcgcgtacaaaacccaaacccgaacgaccaaataaaaccaacgtcgctcgcgacatcgaaacgccccgctccttccgcaaaccccgaaataaaacgcaaaaacgaaaaccgaaaaccgaacacaatctaaaatccccgcgtcccgcaaaccgcgccgtctccaaaatcgccaacaatcgcgaataccgaacgccccccgataacgccacataaaaccctaaaaccgtccgaaacgcgaaaaaaatacaaaactacccctaaccccgctccaaactcaaaaccgaata

SEQ ID NO: 39233 - DNA, 686 bp, Artificial Sequence
  chemically treated genomic DNA (Homo sapiens) CpG-island No: 39233
gtagttggcgtcgtcggagtacgggcgggtgtagacgatgtcgtatatgatttagtaggtgtgtattacgtagattacgaatacgtttattattaagttggtgaaggagttgcggtcgttttatatggcggtttcgcgttcggcgttttcggttcgttcgttttttagtcgcgagtttcgttcgttcggcgtttagttcgtcgtttcgggtttcgtcgtttattggagagtcgtcgcgcgttatcgttatcgtcgcgggggaacgaatgcgtcgcgcgtcgtagatcgtcggtcgtttcgtatgtttcggtttcgtttttatttggcgtcgcgggattcgtcggtttcgcgcgtcgttttcgggtttcgtcgtttgtcggaagtggacgcgtcgcgcggttttttgggaaacggagtttcggtcgttgtcgcgtacgcgtatttaggatgcggcgcgtgtgtgacgttattcgttcgcgtcgtttttttggggtgttttttagggatttaggcgtttagttgttggggtcgcggagggcgttcgcggggcgtcggggaaggttagggtcgcggggttttcggggcgtcgtttttaatcgtcgacgtttgttagattattaagtgggggttatgtcgacgtgtgaggagtttggtggaaggtgatattggaatttcggtattgggtt

SEQ ID NO: 39234 - DNA, 686 bp, Artificial Sequence
  chemically treated genomic DNA (Homo sapiens) CpG-island No: 39234
aacccaataccgaaattccaatatcaccttccaccaaactcctcacacgtcgacataacccccacttaataatctaacaaacgtcgacgattaaaaacgacgccccgaaaaccccgcgaccctaaccttccccgacgccccgcgaacgccctccgcgaccccaacaactaaacgcctaaatccctaaaaaacaccccaaaaaaacgacgcgaacgaataacgtcacacacgcgccgcatcctaaatacgcgtacgcgacaacgaccgaaactccgtttcccaaaaaaccgcgcgacgcgtccacttccgacaaacgacgaaacccgaaaacgacgcgcgaaaccgacgaatcccgcgacgccaaataaaaacgaaaccgaaacatacgaaacgaccgacgatctacgacgcgcgacgcattcgttcccccgcgacgataacgataacgcgcgacgactctccaataaacgacgaaacccgaaacgacgaactaaacgccgaacgaacgaaactcgcgactaaaaaacgaacgaaccgaaaacgccgaacgcgaaaccgccatataaaacgaccgcaactccttcaccaacttaataataaacgtattcgtaatctacgtaatacacacctactaaatcatatacgacatcgtctacacccgcccgtactccgacgacgccaactac

SEQ ID NO: 39235 - DNA, 686 bp, Artificial Sequence
  chemically treated genomic DNA (Homo sapiens) CpG-island No: 39235
ggtttagtgtcggaattttagtattattttttattaggttttttatacgtcgatatggtttttatttggtggtttggtaggcgtcggcggttggggacggcgtttcggggatttcgcggttttagtttttttcggcgtttcgcgaacgtttttcgcggttttagtagttgagcgtttgggtttttgagaggtattttaggagggcggcgcgggcgggtaacgttatatacgcgtcgtattttggatgcgcgtgcgcggtagcggtcgagatttcgttttttagggagtcgcgcggcgcgtttattttcggtaggcggcggggttcggaagcggcgcgcggggtcggcgaatttcgcggcgttaggtgggagcggggtcggagtatgcggggcggtcggcggtttgcggcgcgcggcgtattcgttttttcgcggcggtggcggtggcgcgcggcggttttttagtgagcggcggagttcggagcggcgggttgggcgtcgggcgggcggggttcgcggttgagaggcgggcgggtcgggggcgtcgggcgcggggtcgttatgtggagcggtcgtagtttttttattagtttggtggtgggcgtgttcgtggtttacgtggtgtatatttgttgggttatgtacggtatcgtttatattcgttcgtgtttcggcgacgttaattgt

SEQ ID NO: 39236 - DNA, 686 bp, Artificial Sequence
  chemically treated genomic DNA (Homo sapiens) CpG-island No: 39236
acaattaacgtcgccgaaacacgaacgaatataaacgataccgtacataacccaacaaatatacaccacgtaaaccacgaacacgcccaccaccaaactaataaaaaaactacgaccgctccacataacgaccccgcgcccgacgcccccgacccgcccgcctctcaaccgcgaaccccgcccgcccgacgcccaacccgccgctccgaactccgccgctcactaaaaaaccgccgcgcgccaccgccaccgccgcgaaaaaacgaatacgccgcgcgccgcaaaccgccgaccgccccgcatactccgaccccgctcccacctaacgccgcgaaattcgccgaccccgcgcgccgcttccgaaccccgccgcctaccgaaaataaacgcgccgcgcgactccctaaaaaacgaaatctcgaccgctaccgcgcacgcgcatccaaaatacgacgcgtatataacgttacccgcccgcgccgccctcctaaaatacctctcaaaaacccaaacgctcaactactaaaaccgcgaaaaacgttcgcgaaacgccgaaaaaaactaaaaccgcgaaatccccgaaacgccgtccccaaccgccgacgcctaccaaaccaccaaataaaaaccatatcgacgtataaaaaacctaataaaaaataatactaaaattccgacactaaacc

SEQ ID NO: 39237 - DNA, 639 bp, Artificial Sequence
  chemically treated genomic DNA (Homo sapiens) CpG-island No: 39237
  unsure (581)
ggggttttcgcgtttggagtcgggggttttttaagattttttagttttttttacggggcgcgcggaagtacgacgttttgggtttcggggattattttatttttcgggttagggtattgggcgttcgtacgtattaattcggggagggacggtgtttttggttgcgaaagtagtaggatttcggttagaggggtcgcggtcgtttttcgggttcggttttttgttttattttttcgatatatagggttatataggttttagaagtagttaagttcgtcgcggtgtttcggtgcgcgttttttatcgttcgaggggagcgcgcgggtcgtcgcggcgtattcgggtatttgtgcgcgcgtatataatcggtttcgttttcgttaattgggttcggggttcggtcgtattattttcgggatgatggagtggggggtgtcgtttcgcgggcgcggcgggttgtgaggcggggtgggggtgttggtcgcgagttgagagggtggggttcggtttggcgcggagttagtaaggtttggcgttgtgatatttttttagacgttgcgttatgtttgtattttgtgttnatatttttcgttcgcggtggaaattgcgataaatgcggattttcgtgtcgttgttatt

SEQ ID NO: 39238 - DNA, 639 bp, Artificial Sequence
  chemically treated genomic DNA (Homo sapiens) CpG-island No: 39238
  unsure (59)
aataacaacgacacgaaaatccgcatttatcgcaatttccaccgcgaacgaaaaatatnaacacaaaatacaaacataacgcaacgtctaaaaaaatatcacaacgccaaaccttactaactccgcgccaaaccgaaccccaccctctcaactcgcgaccaacacccccaccccgcctcacaacccgccgcgcccgcgaaacgacaccccccactccatcatcccgaaaataatacgaccgaaccccgaacccaattaacgaaaacgaaaccgattatatacgcgcgcacaaatacccgaatacgccgcgacgacccgcgcgctcccctcgaacgataaaaaacgcgcaccgaaacaccgcgacgaacttaactacttctaaaacctatataaccctatatatcgaaaaaataaaacaaaaaaccgaacccgaaaaacgaccgcgacccctctaaccgaaatcctactactttcgcaaccaaaaacaccgtccctccccgaattaatacgtacgaacgcccaataccctaacccgaaaaataaaataatccccgaaacccaaaacgtcgtacttccgcgcgccccgtaaaaaaaactaaaaaatcttaaaaaacccccgactccaaacgcgaaaacccc

SEQ ID NO: 39239 - DNA, 639 bp, Artificial Sequence
  chemically treated genomic DNA (Homo sapiens) CpG-island No: 39239
  unsure (59)
ggtaatagcgatacggagattcgtatttgtcgtagtttttatcgcgggcgggaagtgtnaatatagaatataaatatagcgtaacgtttaaaggagtgttatagcgttaaattttgttggtttcgcgttaggtcgagttttatttttttagttcgcggttaatatttttatttcgttttatagttcgtcgcgttcgcggggcgatattttttattttattatttcggaggtggtgcggtcgagtttcggatttaattggcggaagcggggtcggttgtgtgcgcgcgtataaatgttcggatgcgtcgcgacgattcgcgcgtttttttcgggcggtagggggcgcgtatcgaggtatcgcggcgagtttggttgtttttggggtttgtgtggttttgtgtgtcggaaagatggagtaagaagtcgagttcgaggggcggtcgcgatttttttgatcgagattttgttgttttcgtagttaggagtatcgttttttttcggattagtgcgtacgagcgtttagtgttttggttcggagagtggaatgattttcgaggtttagggcgtcgtgttttcgcgcgtttcgtgaaggaaattggggagttttgagggattttcgattttaagcgcgaaaatttt

SEQ ID NO: 39240 - DNA, 639 bp, Artificial Sequence
  chemically treated genomic DNA (Homo sapiens) CpG-island No: 39240
  unsure (581)
aaaattttcgcgcttaaaatcgaaaatccctcaaaactccccaatttccttcacgaaacgcgcgaaaacacgacgccctaaacctcgaaaatcattccactctccgaaccaaaacactaaacgctcgtacgcactaatccgaaaaaaaacgatactcctaactacgaaaacaacaaaatctcgatcaaaaaaatcgcgaccgcccctcgaactcgacttcttactccatctttccgacacacaaaaccacacaaaccccaaaaacaaccaaactcgccgcgatacctcgatacgcgccccctaccgcccgaaaaaaacgcgcgaatcgtcgcgacgcatccgaacatttatacgcgcgcacacaaccgaccccgcttccgccaattaaatccgaaactcgaccgcaccacctccgaaataataaaataaaaaatatcgccccgcgaacgcgacgaactataaaacgaaataaaaatattaaccgcgaactaaaaaaataaaactcgacctaacgcgaaaccaacaaaatttaacgctataacactcctttaaacgttacgctatatttatattctatattnacacttcccgcccgcgataaaaactacgacaaatacgaatctccgtatcgctattacc

SEQ ID NO: 39241 - DNA, 766 bp, Artificial Sequence
  chemically treated genomic DNA (Homo sapiens) CpG-island No: 39241
aggagcgcggatggtttatttcgggggcggatcgtaggtagtttcgcggttagggaggcggttcggtagaggaagttttcggatagcggcgttagtttttttcggaggtttgtgttaggttcggtttttcggttatcgtattgggtcgtgttaggggcgcgtgcggggggtacgaggcgtagcggggcgcggacggtatcgaggggcgggcggcgtttgggcgcgcgaggttgggttttgtaggcggcggggggttggcgtttgtgttttcggtgttttcgcgcgcggtcgggtcgtggtattttaggtgttcgtagggttcgcggggcgcggggttggcgcgtaggattagggagagcgcggcgatgcggtggatggttttgcgtagcgtggcgattttggagagttttttgtcgtttaggtcgtgtcgtagcgttcggcgtagcgcgttgaaggtttcgttgtagtttaggatgcgtttgcgttttcgtacgttggcggttatgcgtcgcgttttggatcgtatcggtcgcgcgcgttttttgttcgtcggttttttcgtttcgtttcggttgtaggaagcgtcgttcgtttttagtattttcgaatcgttttcgggttcggggtaggggttttttaagtttttcgtagagttttcggttttttttcgcgtcgtgaggtttagttttggcgcgtttcgtagtatggttttttcgggtattcgttttttgttttagtttcggttttttgttttttgttttttgtt

SEQ ID NO: 39242 - DNA, 766 bp, Artificial Sequence
  chemically treated genomic DNA (Homo sapiens) CpG-island No: 39242
aacaaaaaacaaaaaacaaaaaaccgaaactaaaacaaaaaacgaatacccgaaaaaaccatactacgaaacgcgccaaaactaaacctcacgacgcgaaaaaaaaccgaaaactctacgaaaaacttaaaaaacccctaccccgaacccgaaaacgattcgaaaatactaaaaacgaacgacgcttcctacaaccgaaacgaaacgaaaaaaccgacgaacaaaaaacgcgcgcgaccgatacgatccaaaacgcgacgcataaccgccaacgtacgaaaacgcaaacgcatcctaaactacaacgaaaccttcaacgcgctacgccgaacgctacgacacgacctaaacgacaaaaaactctccaaaatcgccacgctacgcaaaaccatccaccgcatcgccgcgctctccctaatcctacgcgccaaccccgcgccccgcgaaccctacgaacacctaaaataccacgacccgaccgcgcgcgaaaacaccgaaaacacaaacgccaaccccccgccgcctacaaaacccaacctcgcgcgcccaaacgccgcccgcccctcgataccgtccgcgccccgctacgcctcgtaccccccgcacgcgcccctaacacgacccaatacgataaccgaaaaaccgaacctaacacaaacctccgaaaaaaactaacgccgctatccgaaaacttcctctaccgaaccgcctccctaaccgcgaaactacctacgatccgcccccgaaataaaccatccgcgctcct

SEQ ID NO: 39243 - DNA, 766 bp, Artificial Sequence
  chemically treated genomic DNA (Homo sapiens) CpG-island No: 39243
ggtagagggtagagggtagagggtcggggttggggtagagggcgagtgttcgggaaggttatgttgcggggcgcgttaggattaggttttacggcgcggaagggggtcgaggattttgcggaggatttggggggtttttgtttcgagttcgggggcgattcgggggtgttgggggcgaacggcgttttttgtagtcggggcgaggcggaggagtcggcgggtaggaggcgcgcgcggtcggtgcggtttaaggcgcggcgtatggtcgttaacgtgcgggagcgtaagcgtattttagattataacgaggtttttaacgcgttgcgtcgggcgttgcggtacgatttgggcggtaagaggttttttaagatcgttacgttgcgtagggttatttatcgtatcgtcgcgttttttttggttttgcgcgttagtttcgcgtttcgcgggttttgcggatatttggagtgttacggttcggtcgcgcgcggggatatcggggatataggcgttagtttttcgtcgtttgtagggtttagtttcgcgcgtttagacgtcgttcgtttttcggtgtcgttcgcgtttcgttgcgtttcgtgtttttcgtacgcgtttttggtacggtttagtgcggtggtcgaggggtcgggtttagtataggttttcgggggaagttggcgtcgttgttcgggggttttttttgtcgggtcgtttttttggtcgcggggttatttgcgattcgttttcgggatgggttattcgcgttttt

SEQ ID NO: 39244 - DNA, 766 bp, Artificial Sequence
  chemically treated genomic DNA (Homo sapiens) CpG-island No: 39244
aaaaacgcgaataacccatcccgaaaacgaatcgcaaataaccccgcgaccaaaaaaacgacccgacaaaaaaaacccccgaacaacgacgccaacttcccccgaaaacctatactaaacccgacccctcgaccaccgcactaaaccgtaccaaaaacgcgtacgaaaaacacgaaacgcaacgaaacgcgaacgacaccgaaaaacgaacgacgtctaaacgcgcgaaactaaaccctacaaacgacgaaaaactaacgcctatatccccgatatccccgcgcgcgaccgaaccgtaacactccaaatatccgcaaaacccgcgaaacgcgaaactaacgcgcaaaaccaaaaaaaacgcgacgatacgataaataaccctacgcaacgtaacgatcttaaaaaacctcttaccgcccaaatcgtaccgcaacgcccgacgcaacgcgttaaaaacctcgttataatctaaaatacgcttacgctcccgcacgttaacgaccatacgccgcgccttaaaccgcaccgaccgcgcgcgcctcctacccgccgactcctccgcctcgccccgactacaaaaaacgccgttcgcccccaacacccccgaatcgcccccgaactcgaaacaaaaaccccccaaatcctccgcaaaatcctcgacccccttccgcgccgtaaaacctaatcctaacgcgccccgcaacataaccttcccgaacactcgccctctaccccaaccccgaccctctaccctctaccctctacc

SEQ ID NO: 39245 - DNA, 544 bp, Artificial Sequence
  chemically treated genomic DNA (Homo sapiens) CpG-island No: 39245
tttcgcgtacgttaggaaacggttttacgcgaagaatttcgaggattcgggagaggcgtttttttttggaattcgggattttcgggcgttgcggggcgcggtcgattttaaagcgagcggcgggttcggtattttcgcggtatttgttcgtgttcgggagcgcgagttttcggttcgggcgggggcgggcgggggcgggcggggcgtcgtgatttagggtttggcggtttcgtcggcggtcgcgtaggtgtttattagcgtcgggcggggtttgggttttaaaagtttcggtttttttttcggaagtttcggcgtcgtttttcgagggaggacggaacgttcgttcgggagagaaagttcgggagtcgtttacgggggtttcgattttatttttttcggagagcgggtttcgggaagttttgagttttttttttttttaggcgagattttggcgttttaatttatacgttcggtgtggaagacgtaggggcgtaattgtagtttttgtttttttatgcgtttatttaataaaaatttttttttt

SEQ ID NO: 39246 - DNA, 544 bp, Artificial Sequence
  chemically treated genomic DNA (Homo sapiens) CpG-island No: 39246
aaaaaaaaaatttttattaaataaacgcataaaaaaacaaaaactacaattacgcccctacgtcttccacaccgaacgtataaattaaaacgccaaaatctcgcctaaaaaaaaaaaaaactcaaaacttcccgaaacccgctctccgaaaaaaataaaatcgaaacccccgtaaacgactcccgaactttctctcccgaacgaacgttccgtcctccctcgaaaaacgacgccgaaacttccgaaaaaaaaaccgaaacttttaaaacccaaaccccgcccgacgctaataaacacctacgcgaccgccgacgaaaccgccaaaccctaaatcacgacgccccgcccgcccccgcccgcccccgcccgaaccgaaaactcgcgctcccgaacacgaacaaataccgcgaaaataccgaacccgccgctcgctttaaaatcgaccgcgccccgcaacgcccgaaaatcccgaattccaaaaaaaaacgcctctcccgaatcctcgaaattcttcgcgtaaaaccgtttcctaacgtacgcgaaa

SEQ ID NO: 39247 - DNA, 544 bp, Artificial Sequence
  chemically treated genomic DNA (Homo sapiens) CpG-island No: 39247
aaaaaaaaagtttttgttgaatgagcgtatgaaggggtagaggttgtaattgcgtttttacgttttttatatcgggcgtgtgggttgaaacgttagggtttcgtttgggagagaaggaggtttagggtttttcgggattcgtttttcggagggggtggggtcgaggttttcgtgagcggttttcggattttttttttcgggcgggcgtttcgttttttttcggggagcggcgtcggaattttcggaggaagagtcggaatttttgaagtttaggtttcgttcggcgttaataggtatttacgcggtcgtcggcggaatcgttagattttaaattacggcgtttcgttcgttttcgttcgttttcgttcgggtcgagaattcgcgttttcgggtacgggtaggtgtcgcggaaatgtcgggttcgtcgttcgttttgaagtcggtcgcgtttcgtagcgttcgggagtttcgggttttaggagggggcgtttttttcgggttttcggggtttttcgcgtggggtcgttttttgacgtgcgcgggg

SEQ ID NO: 39248 - DNA, 544 bp, Artificial Sequence
  chemically treated genomic DNA (Homo sapiens) CpG-island No: 39248
ccccgcgcacgtcaaaaaacgaccccacgcgaaaaaccccgaaaacccgaaaaaaacgccccctcctaaaacccgaaactcccgaacgctacgaaacgcgaccgacttcaaaacgaacgacgaacccgacatttccgcgacacctacccgtacccgaaaacgcgaattctcgacccgaacgaaaacgaacgaaaacgaacgaaacgccgtaatttaaaatctaacgattccgccgacgaccgcgtaaatacctattaacgccgaacgaaacctaaacttcaaaaattccgactcttcctccgaaaattccgacgccgctccccgaaaaaaaacgaaacgcccgcccgaaaaaaaaaatccgaaaaccgctcacgaaaacctcgaccccaccccctccgaaaaacgaatcccgaaaaaccctaaacctccttctctcccaaacgaaaccctaacgtttcaacccacacgcccgatataaaaaacgtaaaaacgcaattacaacctctaccccttcatacgctcattcaacaaaaacttttttttt

SEQ ID NO: 39249 - DNA, 531 bp, Artificial Sequence
  chemically treated genomic DNA (Homo sapiens) CpG-island No: 39249
cgtaggtcgggtttcgggtttcggtttgatttaggtttttcgttggttttttttaggagtagtttcggtcggtttcgttttagtttttttcgtttttcgggggtcgttttttttcggtagtcgtagttttcgtttttgggtttcggcgttcgttgagtcgatagaggagaggcgtttcgtgcgttcgttttagtcgtttcgggcgtcgagttttaggattcgtttttcgcgttagttgttagggagcggttgttatagagttgagtagttgttcgcgtgcgtaggcggaagtttcggattgaggcgtcgttatttttgttgttcggacgcggagcgagaggttgagagagtcggagatattattcgtttttattcgtcgcgtagattttgtcggagtcgttgtcgttatggatgatcgagaggatttggtgtattaggcgaagttggtcgagtaggttgagcgatacgacggtgagttgggggggtaacggggggttggaattttcggattttttgtcgtcgtttatagag

SEQ ID NO: 39250 - DNA, 531 bp, Artificial Sequence
  chemically treated genomic DNA (Homo sapiens) CpG-island No: 39250
ctctataaacgacgacaaaaaatccgaaaattccaaccccccgttacccccccaactcaccgtcgtatcgctcaacctactcgaccaacttcgcctaatacaccaaatcctctcgatcatccataacgacaacgactccgacaaaatctacgcgacgaataaaaacgaataatatctccgactctctcaacctctcgctccgcgtccgaacaacaaaaataacgacgcctcaatccgaaacttccgcctacgcacgcgaacaactactcaactctataacaaccgctccctaacaactaacgcgaaaaacgaatcctaaaactcgacgcccgaaacgactaaaacgaacgcacgaaacgcctctcctctatcgactcaacgaacgccgaaacccaaaaacgaaaactacgactaccgaaaaaaaacgacccccgaaaaacgaaaaaaactaaaacgaaaccgaccgaaactactcctaaaaaaaaccaacgaaaaacctaaatcaaaccgaaacccgaaacccgacctacg

SEQ ID NO: 39251 - DNA, 531 bp, Artificial Sequence
  chemically treated genomic DNA (Homo sapiens) CpG-island No: 39251
ttttgtgggcggcggtagagggttcgagaattttagtttttcgttgtttttttaatttatcgtcgtatcgtttagtttgttcggttagtttcgtttggtatattagattttttcgattatttatagcggtagcggtttcggtagggtttgcgcgacggatggaagcggatagtgttttcgatttttttagtttttcgtttcgcgttcgggtagtaaaaatggcggcgttttaattcgggattttcgtttgcgtacgcggataattgtttagttttatggtaatcgttttttggtaattggcgcggggggcgggttttggaattcggcgttcgaagcggttggaacgagcgtacgagacgttttttttttgtcggtttagcgggcgtcggagtttagaggcgggaattgcgattgtcgaaagggagcggttttcggggaacgagaagggttgaggcggggtcggtcgggattgtttttgaaaaaagttagcgagagatttgggttagatcggggttcgaggttcgatttgcg

SEQ ID NO: 39252 - DNA, 531 bp, Artificial Sequence
  chemically treated genomic DNA (Homo sapiens) CpG-island No: 39252
cgcaaatcgaacctcgaaccccgatctaacccaaatctctcgctaacttttttcaaaaacaatcccgaccgaccccgcctcaacccttctcgttccccgaaaaccgctccctttcgacaatcgcaattcccgcctctaaactccgacgcccgctaaaccgacaaaaaaaaaacgtctcgtacgctcgttccaaccgcttcgaacgccgaattccaaaacccgccccccgcgccaattaccaaaaaacgattaccataaaactaaacaattatccgcgtacgcaaacgaaaatcccgaattaaaacgccgccatttttactacccgaacgcgaaacgaaaaactaaaaaaatcgaaaacactatccgcttccatccgtcgcgcaaaccctaccgaaaccgctaccgctataaataatcgaaaaaatctaatataccaaacgaaactaaccgaacaaactaaacgatacgacgataaattaaaaaaacaacgaaaaactaaaattctcgaaccctctaccgccgcccacaaaa

SEQ ID NO: 39253 - DNA, 860 bp, Artificial Sequence
  chemically treated genomic DNA (Homo sapiens) CpG-island No: 39253
gacgcggggcgcgtcgcggtttttcgtttaatcggcgggggttttaggttttgttcggtaaggtttgcgtgttttggggcggatttttttttcgggcggttcgtcgggcggacgcgcgtggtttcgcgtagggcggggagaggcggtggtttgtgggcgttcggtttcgaatttgttagatttgcggagtcggtttttagtagcgggcgcggcgggcgcgagtacgattttatttttttgcggtcgcgggtggagtagcggagttcgtttcgttgagtcggtcgtgggcggggatatgagttgcggtttcgcggtaggttttaggtattaaatagatgtgtcgttttttcgcggagtttcggcggagcgtcggggtcggttttgcgattcgtcgttagcggtttcggaatttgaggatagggttgggcgtttttaatttataacgtgtttcgttttttataggatggggagggacgcgcggtattgttttcgagaattggcgtttcggtgaagtaggcgtcgtcggtcgttcgttttttttaagtcgtttcgtatcgcggtcgtttagtttttgttatggtcggttttggcgcgtggaagcgttttaaatttatgttaaggaaggatgatgcgtcgttgtttttaaatgatattagcgtttttgatttttcggatgaggcgggggacgaggggttttttcggtttaataaatttcgagttgtggtggtcgatgacggtttcgaagtttcggaaaggtttgttaacggggcgtattcgattttttaggtcgacgatgattttttattggattaagatttatttttgattaatagttagttgagtttgaaggtggatttttg

SEQ ID NO: 39254 - DNA, 860 bp, Artificial Sequence
  chemically treated genomic DNA (Homo sapiens) CpG-island No: 39254
caaaaatccaccttcaaactcaactaactattaatcaaaaataaatcttaatccaataaaaaatcatcgtcgacctaaaaaatcgaatacgccccgttaacaaacctttccgaaacttcgaaaccgtcatcgaccaccacaactcgaaatttattaaaccgaaaaaacccctcgtcccccgcctcatccgaaaaatcaaaaacgctaatatcatttaaaaacaacgacgcatcatccttccttaacataaatttaaaacgcttccacgcgccaaaaccgaccataacaaaaactaaacgaccgcgatacgaaacgacttaaaaaaaacgaacgaccgacgacgcctacttcaccgaaacgccaattctcgaaaacaataccgcgcgtccctccccatcctataaaaaacgaaacacgttataaattaaaaacgcccaaccctatcctcaaattccgaaaccgctaacgacgaatcgcaaaaccgaccccgacgctccgccgaaactccgcgaaaaaacgacacatctatttaatacctaaaacctaccgcgaaaccgcaactcatatccccgcccacgaccgactcaacgaaacgaactccgctactccacccgcgaccgcaaaaaaataaaatcgtactcgcgcccgccgcgcccgctactaaaaaccgactccgcaaatctaacaaattcgaaaccgaacgcccacaaaccaccgcctctccccgccctacgcgaaaccacgcgcgtccgcccgacgaaccgcccgaaaaaaaaatccgccccaaaacacgcaaaccttaccgaacaaaacctaaaacccccgccgattaaacgaaaaaccgcgacgcgccccgcgtc

SEQ ID NO: 39255 - DNA, 860 bp, Artificial Sequence
  chemically treated genomic DNA (Homo sapiens) CpG-island No: 39255
taggagtttatttttaaatttagttgattgttggttaaaggtaagttttggtttagtaaggaattatcgtcggtttggagggtcgggtgcgtttcgttaataggttttttcggggtttcggaatcgttatcggttattataattcgaagtttgttgaatcgagaaagtttttcgtttttcgttttattcgagaagttaaaggcgttggtgttatttaaaaatagcggcgtattatttttttttagtatagatttgaggcgtttttacgcgttagagtcggttatggtagaggttgagcggtcgcggtgcggaacggtttgggggaggcggacggtcggcggcgtttattttatcggagcgttagttttcgagggtagtgtcgcgcgtttttttttattttgtggaaaacgaaatacgttataaattaaaggcgtttaattttgtttttaagtttcgaagtcgttggcggcgggtcgtagggtcgatttcgacgtttcgtcggggtttcgcgagggggcggtatatttatttaatatttggggtttgtcgcggggtcgtaatttatattttcgtttacggtcggtttagcgaggcgggtttcgttgttttattcgcggtcgtaggagagtggggtcgtgttcgcgttcgtcgcgttcgttgttggaggtcggtttcgtaggtttgataggttcgggatcggacgtttataagttatcgttttttttcgttttgcgcgaggttacgcgcgttcgttcggcgagtcgttcgaagggagggttcgttttaagatacgtaggttttgtcgggtaaggtttggggttttcgtcgattgggcgaggggtcgcggcgcgtttcgcgtt

SEQ ID NO: 39256 - DNA, 860 bp, Artificial Sequence
  chemically treated genomic DNA (Homo sapiens) CpG-island No: 39256
aacgcgaaacgcgccgcgacccctcgcccaatcgacgaaaaccccaaaccttacccgacaaaacctacgtatcttaaaacgaaccctcccttcgaacgactcgccgaacgaacgcgcgtaacctcgcgcaaaacgaaaaaaaacgataacttataaacgtccgatcccgaacctatcaaacctacgaaaccgacctccaacaacgaacgcgacgaacgcgaacacgaccccactctcctacgaccgcgaataaaacaacgaaacccgcctcgctaaaccgaccgtaaacgaaaatataaattacgaccccgcgacaaaccccaaatattaaataaatataccgccccctcgcgaaaccccgacgaaacgtcgaaatcgaccctacgacccgccgccaacgacttcgaaacttaaaaacaaaattaaacgcctttaatttataacgtatttcgttttccacaaaataaaaaaaaacgcgcgacactaccctcgaaaactaacgctccgataaaataaacgccgccgaccgtccgcctcccccaaaccgttccgcaccgcgaccgctcaacctctaccataaccgactctaacgcgtaaaaacgcctcaaatctatactaaaaaaaaataatacgccgctatttttaaataacaccaacgcctttaacttctcgaataaaacgaaaaacgaaaaactttctcgattcaacaaacttcgaattataataaccgataacgattccgaaaccccgaaaaaacctattaacgaaacgcacccgaccctccaaaccgacgataattccttactaaaccaaaacttacctttaaccaacaatcaactaaatttaaaaataaactccta

SEQ ID NO: 39257 - DNA, 790 bp, Artificial Sequence
  chemically treated genomic DNA (Homo sapiens) CpG-island No: 39257
gtttcgtttcggtcgcgcgtattttgggcgtgagtacgagcgcggcgtcgtcgtgtacggttacgatgggtagcgaggtttgcgtcgataggaagtcgaggatgggcgcgacggcgggcgcgcgcgagtcgttttcgaagattacgtcgtgtacgcgtaatttcgatagtaggtcgtagagttgtagtacgaggttgcgcgggttcgagtcgttgagtattagcgttacgggtcgtacgtttaggttcgggttgcgtatcgtcgtcgttacggtcgggtttaggcgtgtcgtttcggtcgcgtacgcgggtttcgagaatacgagcgttacgttgagcggtcgcgtttcgtcgaggtcgtcgtcgggtttatcggtttcgttcggtttcggcgtttttttcgggaacgggttggcgtaggttagcgttagtagtagtagtattttagcggggtttcgagggtcgcgggggttatcggcgtcgcgtatcgtttgcgggtttcgtcgggcggtttttgagcgttcgggtcgggagagacggggaggagagggaggtatagacgggagacgtagggatagggagacgagataaagagacgtatagaggaggagatgtagcgagggataggcgtcgagatggggaggatagggagcggtcggggtgatggaatagagggagagataggaacggaggacgagagagatggaagggagagagatagagggagagagaaatggaggagagatagagggagagacgggtagaggtagagagagatggaggggagagag

SEQ ID NO: 39258 - DNA, 790 bp, Artificial Sequence
  chemically treated genomic DNA (Homo sapiens) CpG-island No: 39258
ctctctcccctccatctctctctacctctacccgtctctccctctatctctcctccatttctctctccctctatctctctcccttccatctctctcgtcctccgttcctatctctccctctattccatcaccccgaccgctccctatcctccccatctcgacgcctatccctcgctacatctcctcctctatacgtctctttatctcgtctccctatccctacgtctcccgtctatacctccctctcctccccgtctctcccgacccgaacgctcaaaaaccgcccgacgaaacccgcaaacgatacgcgacgccgataacccccgcgaccctcgaaaccccgctaaaatactactactactaacgctaacctacgccaacccgttcccgaaaaaaacgccgaaaccgaacgaaaccgataaacccgacgacgacctcgacgaaacgcgaccgctcaacgtaacgctcgtattctcgaaacccgcgtacgcgaccgaaacgacacgcctaaacccgaccgtaacgacgacgatacgcaacccgaacctaaacgtacgacccgtaacgctaatactcaacgactcgaacccgcgcaacctcgtactacaactctacgacctactatcgaaattacgcgtacacgacgtaatcttcgaaaacgactcgcgcgcgcccgccgtcgcgcccatcctcgacttcctatcgacgcaaacctcgctacccatcgtaaccgtacacgacgacgccgcgctcgtactcacgcccaaaatacgcgcgaccgaaacgaaac

SEQ ID NO: 39259 - DNA, 790 bp, Artificial Sequence
  chemically treated genomic DNA (Homo sapiens) CpG-island No: 39259
tttttttttttttatttttttttatttttgttcgtttttttttttgttttttttttatttttttttttttttgttttttttttttttatttttttcgtttttcgtttttgtttttttttttgttttattatttcgatcgttttttgttttttttatttcggcgtttgtttttcgttgtatttttttttttgtgcgtttttttatttcgtttttttgtttttgcgtttttcgtttgtgtttttttttttttttcgtttttttcggttcgggcgtttagaggtcgttcggcggggttcgtaggcgatgcgcggcgtcggtggttttcgcggttttcggggtttcgttaagatgttgttgttgttggcgttggtttgcgttagttcgttttcggaggaggcgtcggggtcgggcggggtcggtgggttcggcggcggtttcggcggggcgcggtcgtttaacgtggcgttcgtgttttcggggttcgcgtacgcggtcgaggcggtacgtttgggttcggtcgtggcggcggcggtgcgtagttcgggtttagacgtgcggttcgtggcgttggtgtttaacggttcggattcgcgtagtttcgtgttgtagttttgcgatttgttgtcggggttgcgcgtgtacggcgtggttttcgaagacgattcgcgcgcgttcgtcgtcgcgtttattttcgattttttgtcggcgtagatttcgttgtttatcgtggtcgtgtacggcggcgtcgcgttcgtgtttacgtttaaggtgcgcgcgatcggggcggggt

SEQ ID NO: 39260 - DNA, 790 bp, Artificial Sequence
  chemically treated genomic DNA (Homo sapiens) CpG-island No: 39260
accccgccccgatcgcgcgcaccttaaacgtaaacacgaacgcgacgccgccgtacacgaccacgataaacaacgaaatctacgccgacaaaaaatcgaaaataaacgcgacgacgaacgcgcgcgaatcgtcttcgaaaaccacgccgtacacgcgcaaccccgacaacaaatcgcaaaactacaacacgaaactacgcgaatccgaaccgttaaacaccaacgccacgaaccgcacgtctaaacccgaactacgcaccgccgccgccacgaccgaacccaaacgtaccgcctcgaccgcgtacgcgaaccccgaaaacacgaacgccacgttaaacgaccgcgccccgccgaaaccgccgccgaacccaccgaccccgcccgaccccgacgcctcctccgaaaacgaactaacgcaaaccaacgccaacaacaacaacatcttaacgaaaccccgaaaaccgcgaaaaccaccgacgccgcgcatcgcctacgaaccccgccgaacgacctctaaacgcccgaaccgaaaaaaacgaaaaaaaaaaaaaaacacaaacgaaaaacgcaaaaacaaaaaaacgaaataaaaaaacgcacaaaaaaaaaaatacaacgaaaaacaaacgccgaaataaaaaaaacaaaaaacgatcgaaataataaaacaaaaaaaaaaacaaaaacgaaaaacgaaaaaaataaaaaaaaaaaaaacaaaaaaaaaaaaaaataaaaaaaaaacaaaaaaaaaaacgaacaaaaataaaaaaaaataaaaaaaaaaaaa

SEQ ID NO: 39261 - DNA, 611 bp, Artificial Sequence
  chemically treated genomic DNA (Homo sapiens) CpG-island No: 39261
gcggttgcggcgttgcgttttaggggtcgataaggacgaggtttgggattcggagggcgtggattcgtttcgtaggcggggattttacgtggcgcggggttggcggaggggttattgaagggttttaagtaggaaaacggcgcgaaagtagttgtttacgcggttttacggtagaacgatcggagatagaattagttttaaggcgattttaatattttgacgggatatatgaatttattcggggtggagagagcggtgcggggattttaaggtttgtatcgttttttatatttcgggtatagaagcgtgagggtatcgttaagcgaatatttaatttaaataaaggaaaatttacgcgtcgtagttgcgttatatttttacgttatttattttcgggtttgtaggcggttgcgcgcgaacggagaggtcgggtcggggcgtggttagcgacgtggcgggcggggtttgaatgtttattggacggggtttgtatttttttttttttatttttgggcgtgtttcggtttttcgcgttttgtaagttatatttgttagttaggttggagtcgttttacggtttgtgatttgggattttattaggagggttaacg

SEQ ID NO: 39262 - DNA, 611 bp, Artificial Sequence
  chemically treated genomic DNA (Homo sapiens) CpG-island No: 39262
cgttaaccctcctaataaaatcccaaatcacaaaccgtaaaacgactccaacctaactaacaaatataacttacaaaacgcgaaaaaccgaaacacgcccaaaaataaaaaaaaaaaaatacaaaccccgtccaataaacattcaaaccccgcccgccacgtcgctaaccacgccccgacccgacctctccgttcgcgcgcaaccgcctacaaacccgaaaataaataacgtaaaaatataacgcaactacgacgcgtaaattttcctttatttaaattaaatattcgcttaacgataccctcacgcttctatacccgaaatataaaaaacgatacaaaccttaaaatccccgcaccgctctctccaccccgaataaattcatatatcccgtcaaaatattaaaatcgccttaaaactaattctatctccgatcgttctaccgtaaaaccgcgtaaacaactactttcgcgccgttttcctacttaaaacccttcaataacccctccgccaaccccgcgccacgtaaaatccccgcctacgaaacgaatccacgccctccgaatcccaaacctcgtccttatcgacccctaaaacgcaacgccgcaaccgc

SEQ ID NO: 39263 - DNA, 611 bp, Artificial Sequence
  chemically treated genomic DNA (Homo sapiens) CpG-island No: 39263
cgttgatttttttagtgagattttaggttataaatcgtggagcggttttagtttgattggtaagtgtggtttgtaaaacgcggaaaatcgagatacgtttagagataggaggagggaagtgtaggtttcgtttaataagtatttaggtttcgttcgttacgtcgttggttacgtttcggttcggttttttcgttcgcgcgtagtcgtttgtagattcggaagtggatggcgtggagatatggcgtaattgcggcgcgtgagtttttttttgtttagattaagtgttcgtttagcggtgtttttacgtttttgtattcgggatgtggggggcggtatagattttgaaattttcgtatcgttttttttatttcgagtaaatttatgtgtttcgttagagtgttaaaatcgttttagggttggttttgttttcggtcgttttgtcgtagggtcgcgtaggtagttgttttcgcgtcgtttttttgtttaaaattttttagtgattttttcgttagtttcgcgttacgtaaagttttcgtttgcgaggcggatttacgtttttcgggttttaagtttcgtttttgtcggtttttggggcgtagcgtcgtagtcgt

SEQ ID NO: 39264 - DNA, 611 bp, Artificial Sequence
  chemically treated genomic DNA (Homo sapiens) CpG-island No: 39264
acgactacgacgctacgccccaaaaaccgacaaaaacgaaacttaaaacccgaaaaacgtaaatccgcctcgcaaacgaaaactttacgtaacgcgaaactaacgaaaaaatcactaaaaaattttaaacaaaaaaacgacgcgaaaacaactacctacgcgaccctacgacaaaacgaccgaaaacaaaaccaaccctaaaacgattttaacactctaacgaaacacataaatttactcgaaataaaaaaaacgatacgaaaatttcaaaatctataccgccccccacatcccgaatacaaaaacgtaaaaacaccgctaaacgaacacttaatctaaacaaaaaaaaactcacgcgccgcaattacgccatatctccacgccatccacttccgaatctacaaacgactacgcgcgaacgaaaaaaccgaaccgaaacgtaaccaacgacgtaacgaacgaaacctaaatacttattaaacgaaacctacacttccctcctcctatctctaaacgtatctcgattttccgcgttttacaaaccacacttaccaatcaaactaaaaccgctccacgatttataacctaaaatctcactaaaaaaatcaacg

SEQ ID NO: 39265 - DNA, 1220 bp, Artificial Sequence
  chemically treated genomic DNA (Homo sapiens) CpG-island No: 39265
ggtaaaaagttaaggcggcgagtgtgtaaaaagttgtgtcggcggtggggtaaaaagtcgcggcggcgggtgtgtggtagaaagtcgcggcgggtaaaaagtcgcggcggcgaggggggtaaaaattcgcggcgggtaaaaagtcgcggcggcgcggggtaaaaagtcgcggtgggtaagaagtcgaggcggggtggaggtaaaaagtcgcggcggcgggtggtaaaaagttgcggcgggtaaaaggtcgcgggggtaggggggaaaagttacggcggggaaaaagtcgcggcggcggggtgcgaaaagcggcggggggtaaaacgtttcggcgggtaaaaagtcgaggtagggtgggggtaaaaagttgcggcggcgggtgggtggtagaaagtcgcggcggtgaggggggtataaagtcgcggcgggtaaaaagtcgaggaggggtgggggtaaaaagtcgcggcgggtaaaaagtcgaggaggggtgggggtaaaaagttgcggcgggtgaaaagtcgcgggggtaggggggaaaaatttacggcgggaaaaagcggcggcggcgagggggtaaaaagtcgcggggtgttaaaagcggcggggtgtaaaaggcggcggggggtaaaaagtcgtagcggcggggggcgggtaaaaagtcgcggcgataaaattcgtaacggcgaggggttaaaaagtcggggcggattaaaagttttggcgtcggggcggcgggggcgtaaaaagtcgtagcggcgggtgggggtagaaagtcgtagcggcgatggggtaaaaagttacggcggcgggggtaaaaagtcgttgcgggtaaaaagtcgcggcggcggggataaaaaggcgcggcgggtaaaaagtcgtggcgtaggggggataaaaagtcgcggcgggggggtgggggaagttacggcgggtaaaaagtcgcggcggcgaggggtataaagtttcggcgggtaaaaattcgaggcggggtggggtttaaaagtcgcggcggttgggggtaaaaagtcgaggcgggtaaaaagtcgtgggggtaggggggaaaaagttacggcggcgggggggtaaaaagcggaggggggtaaaatgtcgtagtagcgggggataaaaagtcgcggcggtaaaattcgtagcggcgaggggttaaaaagtcgcgggcgggttaaaagttttggcgtcggggggtataaagtagcggcggg

SEQ ID NO: 39266 - DNA, 1220 bp, Artificial Sequence
  chemically treated genomic DNA (Homo sapiens) CpG-island No: 39266
cccgccgctactttataccccccgacgccaaaacttttaacccgcccgcgactttttaacccctcgccgctacgaattttaccgccgcgactttttatcccccgctactacgacattttacccccctccgctttttacccccccgccgccgtaactttttcccccctacccccacgactttttacccgcctcgactttttacccccaaccgccgcgacttttaaaccccaccccgcctcgaatttttacccgccgaaactttatacccctcgccgccgcgactttttacccgccgtaacttcccccacccccccgccgcgactttttatcccccctacgccacgactttttacccgccgcgcctttttatccccgccgccgcgactttttacccgcaacgactttttacccccgccgccgtaactttttaccccatcgccgctacgactttctacccccacccgccgctacgactttttacgcccccgccgccccgacgccaaaacttttaatccgccccgactttttaacccctcgccgttacgaattttatcgccgcgactttttacccgccccccgccgctacgactttttaccccccgccgccttttacaccccgccgcttttaacaccccgcgactttttaccccctcgccgccgccgctttttcccgccgtaaatttttcccccctacccccgcgacttttcacccgccgcaactttttacccccacccctcctcgactttttacccgccgcgactttttacccccacccctcctcgactttttacccgccgcgactttatacccccctcaccgccgcgactttctaccacccacccgccgccgcaactttttacccccaccctacctcgactttttacccgccgaaacgttttaccccccgccgcttttcgcaccccgccgccgcgactttttccccgccgtaacttttcccccctacccccgcgaccttttacccgccgcaactttttaccacccgccgccgcgactttttacctccaccccgcctcgacttcttacccaccgcgactttttaccccgcgccgccgcgactttttacccgccgcgaatttttacccccctcgccgccgcgactttttacccgccgcgactttctaccacacacccgccgccgcgactttttaccccaccgccgacacaactttttacacactcgccgccttaactttttacc

SEQ ID NO: 39267 - DNA, 1220 bp, Artificial Sequence
  chemically treated genomic DNA (Homo sapiens) CpG-island No: 39267
ttcgtcgttgttttgtgtttttcggcgttagggtttttagttcgttcgcggttttttgatttttcgtcgttgcgaattttgtcgtcgcggttttttgtttttcgttgttgcggtattttgttttttttcgttttttgttttttcgtcgtcgtggtttttttttttttgtttttacggttttttattcgtttcggttttttatttttagtcgtcgcggtttttagattttatttcgtttcgggtttttgttcgtcggggttttgtgtttttcgtcgtcgcggttttttgttcgtcgtggttttttttattttttcgtcgcggttttttgttttttttgcgttacggttttttgttcgtcgcgtttttttgttttcgtcgtcgcgattttttgttcgtagcgattttttattttcgtcgtcgtggttttttgttttatcgtcgttgcggttttttgtttttattcgtcgttgcggttttttgcgttttcgtcgtttcggcgttagggtttttagttcgtttcggttttttgatttttcgtcgttgcgagttttgtcgtcgcggttttttgttcgtttttcgtcgttgcggttttttgtttttcgtcgttttttgtatttcgtcgtttttggtatttcgcggttttttgttttttcgtcgtcgtcgttttttttcgtcgtggattttttttttttgttttcgcgattttttattcgtcgtagttttttgtttttattttttttcggttttttgttcgtcgcggttttttgtttttattttttttcggttttttgttcgtcgcggttttgtgttttttttatcgtcgcggttttttgttatttattcgtcgtcgtagttttttgtttttattttgtttcggttttttgttcgtcgaggcgttttgtttttcgtcgtttttcgtatttcgtcgtcgcggtttttttttcgtcgtggttttttttttttgttttcgcggttttttattcgtcgtagttttttgttattcgtcgtcgcggttttttgtttttatttcgtttcggttttttgtttatcgcggttttttatttcgcgtcgtcgcggttttttgttcgtcgcggatttttgtttttttcgtcgtcgcggttttttgttcgtcgcggttttttgttatatattcgtcgtcgcggttttttgttttatcgtcgatatagttttttgtatattcgtcgttttggttttttgtt

SEQ ID NO: 39268 - DNA, 1220 bp, Artificial Sequence
  chemically treated genomic DNA (Homo sapiens) CpG-island No: 39268
aacaaaaaaccaaaacgacgaatatacaaaaaactatatcgacgataaaacaaaaaaccgcgacgacgaatatataacaaaaaaccgcgacgaacaaaaaaccgcgacgacgaaaaaaacaaaaatccgcgacgaacaaaaaaccgcgacgacgcgaaataaaaaaccgcgataaacaaaaaaccgaaacgaaataaaaacaaaaaaccgcgacgacgaataacaaaaaactacgacgaataaaaaaccgcgaaaacaaaaaaaaaaaaccacgacgaaaaaaaaaccgcgacgacgaaatacgaaaaacgacgaaaaacaaaacgcctcgacgaacaaaaaaccgaaacaaaataaaaacaaaaaactacgacgacgaataaataacaaaaaaccgcgacgataaaaaaaacacaaaaccgcgacgaacaaaaaaccgaaaaaaaataaaaacaaaaaaccgcgacgaacaaaaaaccgaaaaaaaataaaaacaaaaaactacgacgaataaaaaatcgcgaaaacaaaaaaaaaaaatccacgacgaaaaaaaacgacgacgacgaaaaaacaaaaaaccgcgaaataccaaaaacgacgaaatacaaaaaacgacgaaaaacaaaaaaccgcaacgacgaaaaacgaacaaaaaaccgcgacgacaaaactcgcaacgacgaaaaatcaaaaaaccgaaacgaactaaaaaccctaacgccgaaacgacgaaaacgcaaaaaaccgcaacgacgaataaaaacaaaaaaccgcaacgacgataaaacaaaaaaccacgacgacgaaaataaaaaatcgctacgaacaaaaaatcgcgacgacgaaaacaaaaaaacgcgacgaacaaaaaaccgtaacgcaaaaaaaacaaaaaaccgcgacgaaaaaataaaaaaaaccacgacgaacaaaaaaccgcgacgacgaaaaacacaaaaccccgacgaacaaaaacccgaaacgaaataaaatctaaaaaccgcgacgactaaaaataaaaaaccgaaacgaataaaaaaccgtaaaaacaaaaaaaaaaaaaccacgacgacgaaaaaacaaaaaacgaaaaaaaacaaaataccgcaacaacgaaaaacaaaaaaccgcgacgacaaaattcgcaacgacgaaaaatcaaaaaaccgcgaacgaactaaaaaccctaacgccgaaaaacacaaaacaacgacgaa

SEQ ID NO: 39269 - DNA, 649 bp, Artificial Sequence
  chemically treated genomic DNA (Homo sapiens) CpG-island No: 39269
tattcgcgttttttgtcgtttcgggacgcgtatggttcggcggttatggcgaggaggtcggagaaagcggtcggtcggtcgcgggttgtaaaaggtttggcggcgtggtttgatttagtggtcggggttgtagtataggttgttttcggtagtcggcggagttagcgcgtttacgtgacggtttcggtttttcggtgagttttttaaatagacgtatatttagttatacgcgcgcgttcgcgcgcgcgtatatataatatatatatatatatatatacgtacgtattttcgcgcgtatacgttcgttcgttcgcgttgtttttgcgtttttatttcggttcgtttattatttcgttttttcgttttttttgcggtttttcgttttgcgcgtatatattatatatacgtatacgtatatatacgcgcgtatatacgtagtcggtataggcggcggcggcggttgtttaagttaggacgaatttatttaggtatcgttttgagaaggcggtagcggcggcggcggcggcggcggcggtagttcgagtattttttttttttcggagagggagtatcgtcgagagttttcgttttttttgttattttttttttttttttttttttttattttcgagagaatttttttttggtt

SEQ ID NO: 39270 - DNA, 649 bp, Artificial Sequence
  chemically treated genomic DNA (Homo sapiens) CpG-island No: 39270
aaccaaaaaaaaattctctcgaaaataaaaaaaaaaaaaaaaaaaaaaaataacaaaaaaaacgaaaactctcgacgatactccctctccgaaaaaaaaaaaatactcgaactaccgccgccgccgccgccgccgccgctaccgccttctcaaaacgatacctaaataaattcgtcctaacttaaacaaccgccgccgccgcctataccgactacgtatatacgcgcgtatatatacgtatacgtatatataatatatacgcgcaaaacgaaaaaccgcaaaaaaaacgaaaaaacgaaataataaacgaaccgaaataaaaacgcaaaaacaacgcgaacgaacgaacgtatacgcgcgaaaatacgtacgtatatatatatatatatatattatatatacgcgcgcgcgaacgcgcgcgtataactaaatatacgtctatttaaaaaactcaccgaaaaaccgaaaccgtcacgtaaacgcgctaactccgccgactaccgaaaacaacctatactacaaccccgaccactaaatcaaaccacgccgccaaaccttttacaacccgcgaccgaccgaccgctttctccgacctcctcgccataaccgccgaaccatacgcgtcccgaaacgacaaaaaacgcgaata

SEQ ID NO: 39271 - DNA, 649 bp, Artificial Sequence
  chemically treated genomic DNA (Homo sapiens) CpG-island No: 39271
agttaagaagaaattttttcgaaaataaaagaaaaggagggggaagggaatggtaaagggaacggaaattttcggcggtgtttttttttcgggagaggagggatgttcgggttgtcgtcgtcgtcgtcgtcgtcgtcgttgtcgtttttttaagacggtatttagataggttcgttttgatttgggtagtcgtcgtcgtcgtttgtgtcggttgcgtgtgtgcgcgcgtgtgtgtgcgtgtgcgtgtgtgtggtgtgtgcgcgtagagcgagagatcgtaggggaagcgagagggcgagataatgagcgagtcgggatggaggcgtagaggtagcgcgagcgggcgggcgtgtgcgcgcgggggtgcgtgcgtgtgtgtgtgtgtgtgtgtgttgtgtgtgcgcgcgcgcgagcgcgcgcgtgtggttgggtgtgcgtttgtttggggagtttatcggagagtcggggtcgttacgtgggcgcgttgatttcgtcggttgtcggggatagtttgtattatagtttcggttattaaattagattacgtcgttagattttttgtagttcgcggtcggtcggtcgtttttttcgattttttcgttatagtcgtcgggttatgcgcgtttcgggacggtagggggcgcgggtg

SEQ ID NO: 39272 - DNA, 649 bp, Artificial Sequence
  chemically treated genomic DNA (Homo sapiens) CpG-island No: 39272
cacccgcgccccctaccgtcccgaaacgcgcataacccgacgactataacgaaaaaatcgaaaaaaacgaccgaccgaccgcgaactacaaaaaatctaacgacgtaatctaatttaataaccgaaactataatacaaactatccccgacaaccgacgaaatcaacgcgcccacgtaacgaccccgactctccgataaactccccaaacaaacgcacacccaaccacacgcgcgcgctcgcgcgcgcgcacacacaacacacacacacacacacacacgcacgcacccccgcgcgcacacgcccgcccgctcgcgctacctctacgcctccatcccgactcgctcattatctcgccctctcgcttcccctacgatctctcgctctacgcgcacacaccacacacacgcacacgcacacacacgcgcgcacacacgcaaccgacacaaacgacgacgacgactacccaaatcaaaacgaacctatctaaataccgtcttaaaaaaacgacaacgacgacgacgacgacgacgacgacaacccgaacatccctcctctcccgaaaaaaaaacaccgccgaaaatttccgttccctttaccattcccttccccctccttttcttttattttcgaaaaaatttcttcttaact

SEQ ID NO: 39273 - DNA, 1088 bp, Artificial Sequence
  chemically treated genomic DNA (Homo sapiens) CpG-island No: 39273
tacgtgtatgcgtgtgtgtgtgtgtgtacgcgggtgtgtgtttgtgtgtgggtgtgcgcgcgcgttcgcgtgtttgggttggggaaagttggggttagaggagcggtggaggagtaatggtgaaaggtattagttattcggtgggcggtttagggcgtcggggattttcgggtttcgcggagcgcgtatcgcggggggagttggttcgttaggggtggggggtgtcgaggaaaagagtttcgtttagttcggttcgtttggttttcgcggcgtttttttttcggagttcgttagttagtttcggtcgtttgcggggttgttcgtcgcgttcgtcggcgttggcgcgttttttttcgggttcggggcgtagcgcgtttttgcgagttttcggtagagaagataaatttcgaaagtaatcgaaaaatgttcgtcgtcgtcgttttcgtattattttaagtttttaagaaataaatcgttaaattattagttgttaggtgaagattttttcggcgtgggttttttagaaagcgttgcggttattcgagtgaataatatataagggtcgttcggagttttggagaggttttcgtcgtcgcggtagtagtagcgggaggcggcggcgagttttgggtagatcgtcgggtcgtcgtcgcgggtgggggcgtttgggttgttttcgggaagtacgtcggtcgttcgggcggggcgggagggtagtttaggcgcgcggagtgaggattcgcggtgaggtagtcgggagatacgaggtttcgttgcgagtagaaatttgtaggagttattgaggtggtcgggtcggcgttggagttgggggtttggagaagtacgatcggggttcggagggtgttcggttgttcgtggtcggcgtcggtggttttttttaggttattttgtttcgtttggcgggttttgggtgttttttacgtttttttgtattcgtttaggattgtcgagagttaacgattttttcggtttcgtaaattttagttttttaggagcgggcgttcgcgtgtttgtttgtgtgagagtgtgtgtgtgtgtgtgtgtgtgtgtgtgtgtgtgtgtgtgtg

SEQ ID NO: 39274 - DNA, 1088 bp, Artificial Sequence
  chemically treated genomic DNA (Homo sapiens) CpG-island No: 39274
cacacacacacacacacacacacacacacacacacacacacactctcacacaaacaaacacgcgaacgcccgctcctaaaaaactaaaatttacgaaaccgaaaaaatcgttaactctcgacaatcctaaacgaatacaaaaaaacgtaaaaaacacccaaaacccgccaaacgaaacaaaataacctaaaaaaaaccaccgacgccgaccacgaacaaccgaacaccctccgaaccccgatcgtacttctccaaacccccaactccaacgccgacccgaccacctcaataactcctacaaatttctactcgcaacgaaacctcgtatctcccgactacctcaccgcgaatcctcactccgcgcgcctaaactaccctcccgccccgcccgaacgaccgacgtacttcccgaaaacaacccaaacgcccccacccgcgacgacgacccgacgatctacccaaaactcgccgccgcctcccgctactactaccgcgacgacgaaaacctctccaaaactccgaacgacccttatatattattcactcgaataaccgcaacgctttctaaaaaacccacgccgaaaaaatcttcacctaacaactaataatttaacgatttatttcttaaaaacttaaaataatacgaaaacgacgacgacgaacatttttcgattactttcgaaatttatcttctctaccgaaaactcgcaaaaacgcgctacgccccgaacccgaaaaaaaacgcgccaacgccgacgaacgcgacgaacaaccccgcaaacgaccgaaactaactaacgaactccgaaaaaaaaacgccgcgaaaaccaaacgaaccgaactaaacgaaactcttttcctcgacaccccccacccctaacgaaccaactccccccgcgatacgcgctccgcgaaacccgaaaatccccgacgccctaaaccgcccaccgaataactaatacctttcaccattactcctccaccgctcctctaaccccaactttccccaacccaaacacgcgaacgcgcgcgcacacccacacacaaacacacacccgcgtacacacacacacacacgcatacacgta

SEQ ID NO: 39275 - DNA, 1088 bp, Artificial Sequence
  chemically treated genomic DNA (Homo sapiens) CpG-island No: 39275
tatatatatatatatatatatatatatatatatatatatatatttttatataggtaggtacgcggacgttcgtttttggagagttggagtttgcggagtcggaggggtcgttggttttcggtaattttgggcggatgtaaggaagcgtggagagtatttaaggttcgttaggcggggtaggatagtttgaaggaagttatcggcgtcggttacgggtagtcgggtatttttcgggtttcgatcgtgtttttttaggtttttagttttagcgtcggttcgattattttagtagtttttgtaagtttttattcgtagcgaggtttcgtgtttttcggttgttttatcgcgaatttttatttcgcgcgtttgggttgttttttcgtttcgttcgaacggtcggcgtatttttcgggggtagtttagacgtttttattcgcggcggcggttcgacggtttgtttagagttcgtcgtcgtttttcgttgttgttgtcgcggcggcgggagtttttttaaggtttcgggcggtttttatgtattatttattcggatggtcgtagcgttttttggagagtttacgtcggagaggtttttatttggtagttagtagtttggcgatttgttttttggaaatttggggtgatgcggaggcggcggcggcgaatatttttcggttgttttcggggtttgttttttttgtcgggagttcgtaggaacgcgttgcgtttcgggttcgggagggagcgcgttagcgtcggcgagcgcggcgggtagtttcgtaagcggtcgaggttggttggcgggtttcggaggagaggcgtcgcggaggttaggcgagtcgggttgaacggagttttttttttcgatattttttatttttagcgggttagtttttttcgcggtgcgcgtttcgcggggttcgggaattttcggcgttttggatcgtttatcgagtagttaatgttttttattattgtttttttatcgtttttttggttttaattttttttagtttagatacgcgagcgcgcgcgtatatttatatatagatatatattcgcgtgtatatatatatatacgtatatacgta

SEQ ID NO: 39276 - DNA, 1088 bp, Artificial Sequence
  chemically treated genomic DNA (Homo sapiens) CpG-island No: 39276
tacgtatatacgtatatatatatatacacgcgaatatatatctatatataaatatacgcgcgcgctcgcgtatctaaactaaaaaaaattaaaaccaaaaaaacgataaaaaaacaataataaaaaacattaactactcgataaacgatccaaaacgccgaaaattcccgaaccccgcgaaacgcgcaccgcgaaaaaaactaacccgctaaaaataaaaaatatcgaaaaaaaaaactccgttcaacccgactcgcctaacctccgcgacgcctctcctccgaaacccgccaaccaacctcgaccgcttacgaaactacccgccgcgctcgccgacgctaacgcgctccctcccgaacccgaaacgcaacgcgttcctacgaactcccgacaaaaaaaacaaaccccgaaaacaaccgaaaaatattcgccgccgccgcctccgcatcaccccaaatttccaaaaaacaaatcgccaaactactaactaccaaataaaaacctctccgacgtaaactctccaaaaaacgctacgaccatccgaataaataatacataaaaaccgcccgaaaccttaaaaaaactcccgccgccgcgacaacaacaacgaaaaacgacgacgaactctaaacaaaccgtcgaaccgccgccgcgaataaaaacgtctaaactacccccgaaaaatacgccgaccgttcgaacgaaacgaaaaaacaacccaaacgcgcgaaataaaaattcgcgataaaacaaccgaaaaacacgaaacctcgctacgaataaaaacttacaaaaactactaaaataatcgaaccgacgctaaaactaaaaacctaaaaaaacacgatcgaaacccgaaaaatacccgactacccgtaaccgacgccgataacttccttcaaactatcctaccccgcctaacgaaccttaaatactctccacgcttccttacatccgcccaaaattaccgaaaaccaacgacccctccgactccgcaaactccaactctccaaaaacgaacgtccgcgtacctacctatataaaaatatatatatatatatatatatatatatatatatatatatata

SEQ ID NO: 39277 - DNA, 572 bp, Artificial Sequence
  chemically treated genomic DNA (Homo sapiens) CpG-island No: 39277
atttttgttacggtcgtcgcgtttcgtcgcgtttcgcgttcgtttttattttagtcggtaggcgagcgttcgttcgtagcggtcgcggcgtcgataattttttttcggtcgtcgaaatttcgtatttagcgttaattataatatcgagcgggttgtcggtcgcggggagggggtgtcgggtagttgcgtttgcgcgggttgcgcgttattgtgacgttagcgttggggcggggtcgcgggaagggtagggcggggcggcgcgtatttgcggtcggcgcgcgggttgttggagggtattttggcggttttttgatttcggcgagtcggggttgaggcggttggcgggataaagcgggtaaggcgtttaaggaggatggaggacgggggaggaggaagtattagggatacggaataatggtcgggaaaaagtagcgcgagttgttaggggaaatcggagggaagggatcgcgtttgtataggattgcgttttggcggtagggggtagggagtcgtacgcgttttattttttggttttcgtttaggtttaaataaggataaaaaaattgtaaaaa

SEQ ID NO: 39278 - DNA, 572 bp, Artificial Sequence
  chemically treated genomic DNA (Homo sapiens) CpG-island No: 39278
tttttacaatttttttatccttatttaaacctaaacgaaaaccaaaaaataaaacgcgtacgactccctaccccctaccgccaaaacgcaatcctatacaaacgcgatcccttccctccgatttcccctaacaactcgcgctactttttcccgaccattattccgtatccctaatacttcctcctcccccgtcctccatcctccttaaacgccttacccgctttatcccgccaaccgcctcaaccccgactcgccgaaatcaaaaaaccgccaaaataccctccaacaacccgcgcgccgaccgcaaatacgcgccgccccgccctacccttcccgcgaccccgccccaacgctaacgtcacaataacgcgcaacccgcgcaaacgcaactacccgacaccccctccccgcgaccgacaacccgctcgatattataattaacgctaaatacgaaatttcgacgaccgaaaaaaaattatcgacgccgcgaccgctacgaacgaacgctcgcctaccgactaaaataaaaacgaacgcgaaacgcgacgaaacgcgacgaccgtaacaaaaat

SEQ ID NO: 39279 - DNA, 572 bp, Artificial Sequence
  chemically treated genomic DNA (Homo sapiens) CpG-island No: 39279
tttttataatttttttatttttgtttaaatttgggcgggaattaaagagtaaagcgcgtgcggttttttgttttttgtcgttaagacgtagttttgtatagacgcggtttttttttttcgattttttttgatagttcgcgttattttttttcggttattgtttcgtgtttttggtgtttttttttttttcgttttttattttttttgggcgttttgttcgttttgtttcgttagtcgttttagtttcgattcgtcggggttagaaagtcgttaggatgttttttagtagttcgcgcgtcggtcgtaggtgcgcgtcgtttcgttttgtttttttcgcggtttcgttttagcgttgacgttatagtgacgcgtagttcgcgtaggcgtagttattcggtatttttttttcgcggtcggtagttcgttcggtattatgattagcgttgggtgcggggtttcggcggtcgggagggagttgtcggcgtcgcggtcgttgcggacggacgttcgtttgtcggttgaggtaggggcgagcgcggagcgcggcggggcgcggcggtcgtagtaggggt

SEQ ID NO: 39280 - DNA, 572 bp, Artificial Sequence
  chemically treated genomic DNA (Homo sapiens) CpG-island No: 39280
acccctactacgaccgccgcgccccgccgcgctccgcgctcgcccctacctcaaccgacaaacgaacgtccgtccgcaacgaccgcgacgccgacaactccctcccgaccgccgaaaccccgcacccaacgctaatcataataccgaacgaactaccgaccgcgaaaaaaaaataccgaataactacgcctacgcgaactacgcgtcactataacgtcaacgctaaaacgaaaccgcgaaaaaaacaaaacgaaacgacgcgcacctacgaccgacgcgcgaactactaaaaaacatcctaacgactttctaaccccgacgaatcgaaactaaaacgactaacgaaacaaaacgaacaaaacgcccaaaaaaaataaaaaacgaaaaaaaaaaaaacaccaaaaacacgaaacaataaccgaaaaaaaataacgcgaactatcaaaaaaaatcgaaaaaaaaaaaccgcgtctatacaaaactacgtcttaacgacaaaaaacaaaaaaccgcacgcgctttactctttaattcccgcccaaatttaaacaaaaataaaaaaattataaaaa

SEQ ID NO: 39281 - DNA, 666 bp, Artificial Sequence
  chemically treated genomic DNA (Homo sapiens) CpG-island No: 39281
agtgcgcgtgcgttttcgaaaatgtcgttattgcggcggtcgtcgtcgcgattgagcgcgaggcgatttgtaaacgagtagagggagcgggatgggcgagcgcgcgtgcgcggggggttgttagtcggcgtagttgttggcgtagggcggagggagtggttcgtaggagttgcgcgcgcgttttaagtagtcgatttattgtttcgcgttggtttttggagaaagtcgaaggagagaggtatggttcggttttgggggtggggggcgaagggcgcgatttcgttcgcgcgggatttgattagttaatgggaagtaatgggaggtgggtttgtcgcgcgagtcgtagtcgtcgggttaacggaggaggttagaaggagcgacgtaacgtggggcggtggggcggggttgagaaggagggagcgtattagagagggagttgattggaggatatgaggaggcgtggttcgttttagtttaattcgagtttcgtaattcgtcgtttcggaagaagaggcggggttggagagcgcgtgttttttttttcggttgtgaagaaaatttgtagttaacgcgcgcgtttatgtaatttgtttttggttttgtgaacgattgatttttaggagagggaagacggtttggttttgtgtgtagtttaagtttgttatt

SEQ ID NO: 39282 - DNA, 666 bp, Artificial Sequence
  chemically treated genomic DNA (Homo sapiens) CpG-island No: 39282
aataacaaacttaaactacacacaaaaccaaaccgtcttccctctcctaaaaatcaatcgttcacaaaaccaaaaacaaattacataaacgcgcgcgttaactacaaattttcttcacaaccgaaaaaaaaaacacgcgctctccaaccccgcctcttcttccgaaacgacgaattacgaaactcgaattaaactaaaacgaaccacgcctcctcatatcctccaatcaactccctctctaatacgctccctccttctcaaccccgccccaccgccccacgttacgtcgctccttctaacctcctccgttaacccgacgactacgactcgcgcgacaaacccacctcccattacttcccattaactaatcaaatcccgcgcgaacgaaatcgcgcccttcgccccccacccccaaaaccgaaccatacctctctccttcgactttctccaaaaaccaacgcgaaacaataaatcgactacttaaaacgcgcgcgcaactcctacgaaccactccctccgccctacgccaacaactacgccgactaacaaccccccgcgcacgcgcgctcgcccatcccgctccctctactcgtttacaaatcgcctcgcgctcaatcgcgacgacgaccgccgcaataacgacattttcgaaaacgcacgcgcact

SEQ ID NO: 39283 - DNA, 666 bp, Artificial Sequence
  chemically treated genomic DNA (Homo sapiens) CpG-island No: 39283
agtgataggtttgggttgtatataggattaggtcgtttttttttttttggggattagtcgtttatagaattaaaaataagttgtatggacgcgcgcgttggttgtagattttttttatagtcgggagaaagagtacgcgttttttagtttcgttttttttttcgggacgacgaattgcggggttcggattgggttgaggcgggttacgtttttttatattttttaattaattttttttttggtgcgtttttttttttttagtttcgttttatcgttttacgttacgtcgttttttttggtttttttcgttaattcggcggttgcggttcgcgcggtaaatttattttttattgttttttattggttggttaggtttcgcgcgagcgggatcgcgtttttcgttttttatttttaaaatcgggttatgtttttttttttcggttttttttaggagttagcgcgaggtagtagatcggttgtttgagacgcgcgcgtagtttttgcggattatttttttcgttttgcgttagtagttgcgtcggttggtagtttttcgcgtacgcgcgttcgtttatttcgttttttttgttcgtttgtaagtcgtttcgcgtttagtcgcgacggcggtcgtcgtaatagcggtattttcgggggcgtacgcgtatt

SEQ ID NO: 39284 - DNA, 666 bp, Artificial Sequence
  chemically treated genomic DNA (Homo sapiens) CpG-island No: 39284
aatacgcgtacgcccccgaaaataccgctattacgacgaccgccgtcgcgactaaacgcgaaacgacttacaaacgaacaaaaaaaacgaaataaacgaacgcgcgtacgcgaaaaactaccaaccgacgcaactactaacgcaaaacgaaaaaaataatccgcaaaaactacgcgcgcgtctcaaacaaccgatctactacctcgcgctaactcctaaaaaaaaccgaaaaaaaaaaacataacccgattttaaaaataaaaaacgaaaaacgcgatcccgctcgcgcgaaacctaaccaaccaataaaaaacaataaaaaataaatttaccgcgcgaaccgcaaccgccgaattaacgaaaaaaaccaaaaaaaacgacgtaacgtaaaacgataaaacgaaactaaaaaaaaaaaaacgcaccaaaaaaaaaattaattaaaaaatataaaaaaacgtaacccgcctcaacccaatccgaaccccgcaattcgtcgtcccgaaaaaaaaaacgaaactaaaaaacgcgtactctttctcccgactataaaaaaaatctacaaccaacgcgcgcgtccatacaacttatttttaattctataaacgactaatccccaaaaaaaaaaaaacgacctaatcctatatacaacccaaacctatcact

SEQ ID NO: 39285 - DNA, 643 bp, Artificial Sequence
  chemically treated genomic DNA (Homo sapiens) CpG-island No: 39285
aagcggcgttatgttaagtttttcggtagttttttttttatttaatatagttaatttttttttttttgtaaattttttaagtgacgcggagtaaaatttaatcggtttagggaatttagatacgtttttcgcgtcgtacggattttttagaaggagtttggaggtaggcgttggatttttttaggtattttcgttttcgtcggtttttttttttcgcgttcgttgggttatttattcgcgtggggtatggtgatggtttcgttggtgttggagtttacgttgaagatgattacggttgaggcgttttgtaggaacgcgtttcggattttatttttgtacgtgtagttgtttttggggatgagggttatttagtttttgtcgcgggtcggggcggcgaatttggtgttggggtcgtaggttaggcggtcgtgggtcgagttggttatgattattttttcgcgggcgttttgtttgggcgagtgtttttcgtagcgttcgtatttcgtttttttcgtgtgtagtttcgcgtcgtcgtcgttcgtcgtttcggtttcggggttcggcgcgggttcggcgtaggtgatgtttacgaaggcggtgtattatttttttttttcggttacggtaaagtttaggtagagta

SEQ ID NO: 39286 - DNA, 643 bp, Artificial Sequence
  chemically treated genomic DNA (Homo sapiens) CpG-island No: 39286
tactctacctaaactttaccgtaaccgaaaaaaaaaaataatacaccgccttcgtaaacatcacctacgccgaacccgcgccgaaccccgaaaccgaaacgacgaacgacgacgacgcgaaactacacacgaaaaaaacgaaatacgaacgctacgaaaaacactcgcccaaacaaaacgcccgcgaaaaaataatcataaccaactcgacccacgaccgcctaacctacgaccccaacaccaaattcgccgccccgacccgcgacaaaaactaaataaccctcatccccaaaaacaactacacgtacaaaaataaaatccgaaacgcgttcctacaaaacgcctcaaccgtaatcatcttcaacgtaaactccaacaccaacgaaaccatcaccataccccacgcgaataaataacccaacgaacgcgaaaaaaaaaaaccgacgaaaacgaaaatacctaaaaaaatccaacgcctacctccaaactccttctaaaaaatccgtacgacgcgaaaaacgtatctaaattccctaaaccgattaaattttactccgcgtcacttaaaaaatttacaaaaaaaaaaaaattaactatattaaataaaaaaaaaactaccgaaaaacttaacataacgccgctt

SEQ ID NO: 39287 - DNA, 643 bp, Artificial Sequence
  chemically treated genomic DNA (Homo sapiens) CpG-island No: 39287
tgttttgtttggattttatcgtggtcgagaaggaggaatggtatatcgttttcgtgaatattatttacgtcgagttcgcgtcggatttcggggtcggggcggcgggcggcggcggcgcggagttgtatacggagaagacggagtgcgggcgttacggagagtattcgtttaagtaggacgttcgcggggaggtggttatggttagttcggtttacgatcgtttggtttgcgattttaatattaagttcgtcgtttcgattcgcggtaagaattggatagtttttatttttaagggtaattgtacgtatagggataagattcggaacgcgtttttgtagaacgttttagtcgtggttatttttaacgtgggttttaatattaacgagattattattatgttttacgcgggtgagtggtttagcgggcgcgggggaggggagtcggcggggacggaggtgtttagagggatttagcgtttgtttttaggttttttttgggaagttcgtgcggcgcggaagacgtgtttgggttttttggatcgattaagttttgtttcgcgttatttggggggtttataaagaggagaagattaattgtattgggtaggggagaggttgtcggagagtttggtatagcgtcgttt

SEQ ID NO: 39288 - DNA, 643 bp, Artificial Sequence
  chemically treated genomic DNA (Homo sapiens) CpG-island No: 39288
aaacgacgctataccaaactctccgacaacctctcccctacccaatacaattaatcttctcctctttataaaccccccaaataacgcgaaacaaaacttaatcgatccaaaaaacccaaacacgtcttccgcgccgcacgaacttcccaaaaaaaacctaaaaacaaacgctaaatccctctaaacacctccgtccccgccgactcccctcccccgcgcccgctaaaccactcacccgcgtaaaacataataataatctcgttaatattaaaacccacgttaaaaataaccacgactaaaacgttctacaaaaacgcgttccgaatcttatccctatacgtacaattacccttaaaaataaaaactatccaattcttaccgcgaatcgaaacgacgaacttaatattaaaatcgcaaaccaaacgatcgtaaaccgaactaaccataaccacctccccgcgaacgtcctacttaaacgaatactctccgtaacgcccgcactccgtcttctccgtatacaactccgcgccgccgccgcccgccgccccgaccccgaaatccgacgcgaactcgacgtaaataatattcacgaaaacgatataccattcctccttctcgaccacgataaaatccaaacaaaaca

SEQ ID NO: 39289 - DNA, 690 bp, Artificial Sequence
  chemically treated genomic DNA (Homo sapiens) CpG-island No: 39289
gttcgttttcgtcgatttgtttaagtcgtaatttagtcgttagtttgtagggtattttttcgattacgaggggataatgtaaagtttcgcgttttttatattaaggcgagtatcgttttttgcgttttggaagcgtttgtgcgtgcgtggggcgtagtaagggacggaagttttgtttgtgcgatcgtcgtttattcgagtttatttgggttgcgttttttcgtcgttgtttttcgtggtttaacgttttaatttttgcgtgtgtttgtagttttattttatatttagttttgtgtttttcgatttagttttcgatttttattttttattttaaatcgtttattcggtgtttgtttttcgttcggttgttttcgttttgttgcgttgagtgttttttgttagtttcgattttatggcgttgtagacgttgtagagttcgtgggtgatttttcgtaagattttgttttattttttcgaggagttgagtttggttttcgtttacggtttcggggtgtatcgttaggtagggtcgagtttagattagaaggtgagttcgggtagttttacgacggggaattgtttgtttttacgagtttcgttttgttttcgatttttttagagtcggagagttgtttgttcgttttgtatattttacgtgtttattagtagagtgaattataggtttgtttt

SEQ ID NO: 39290 - DNA, 690 bp, Artificial Sequence
  chemically treated genomic DNA (Homo sapiens) CpG-island No: 39290
aaaacaaacctataattcactctactaataaacacgtaaaatatacaaaacgaacaaacaactctccgactctaaaaaaatcgaaaacaaaacgaaactcgtaaaaacaaacaattccccgtcgtaaaactacccgaactcaccttctaatctaaactcgaccctacctaacgatacaccccgaaaccgtaaacgaaaaccaaactcaactcctcgaaaaaataaaacaaaatcttacgaaaaatcacccacgaactctacaacgtctacaacgccataaaatcgaaactaacaaaaaacactcaacgcaacaaaacgaaaacaaccgaacgaaaaacaaacaccgaataaacgatttaaaataaaaaataaaaatcgaaaactaaatcgaaaaacacaaaactaaatataaaataaaactacaaacacacgcaaaaattaaaacgttaaaccacgaaaaacaacgacgaaaaaacgcaacccaaataaactcgaataaacgacgatcgcacaaacaaaacttccgtcccttactacgccccacgcacgcacaaacgcttccaaaacgcaaaaaacgatactcgccttaatataaaaaacgcgaaactttacattatcccctcgtaatcgaaaaaataccctacaaactaacgactaaattacgacttaaacaaatcgacgaaaacgaac

SEQ ID NO: 39291 - DNA, 690 bp, Artificial Sequence
  chemically treated genomic DNA (Homo sapiens) CpG-island No: 39291
aaggtaggtttatggtttattttgttagtggatacgtggagtgtgtagagcggataggtagtttttcgattttgaaggaatcgagggtaaaacgggattcgtgagaatagatagtttttcgtcgtggggttgttcgggtttattttttggtttgaattcggttttgtttggcggtatatttcggagtcgtagacgaaagttagatttagtttttcggggaagtgagataggattttgcggaaggttatttacgagttttgtagcgtttgtagcgttatggggtcgaggttaataggggatatttagcgtagtagggcgaggataatcgggcggggaatagatatcgggtaggcggtttagggtgggaaatggaagtcggagattggatcgagggatataaggttgagtgtggggtgggattgtaagtatacgtaaggattggggcgttgggttacgaagagtagcggcgagaagacgtagtttagataggttcgggtgggcggcggtcgtataggtagagttttcgttttttgttacgttttacgtacgtataggcgtttttaagacgtaagaggcggtgttcgttttagtgtggggaacgcgaggttttgtattgttttttcgtggtcggaggagtgttttataggttggcggttaggttgcgatttggataaatcggcggaggcgagt

SEQ ID NO: 39292 - DNA, 690 bp, Artificial Sequence
  chemically treated genomic DNA (Homo sapiens) CpG-island No: 39292
actcgcctccgccgatttatccaaatcgcaacctaaccgccaacctataaaacactcctccgaccacgaaaaaacaatacaaaacctcgcgttccccacactaaaacgaacaccgcctcttacgtcttaaaaacgcctatacgtacgtaaaacgtaacaaaaaacgaaaactctacctatacgaccgccgcccacccgaacctatctaaactacgtcttctcgccgctactcttcgtaacccaacgccccaatccttacgtatacttacaatcccaccccacactcaaccttatatccctcgatccaatctccgacttccatttcccaccctaaaccgcctacccgatatctattccccgcccgattatcctcgccctactacgctaaatatcccctattaacctcgaccccataacgctacaaacgctacaaaactcgtaaataaccttccgcaaaatcctatctcacttccccgaaaaactaaatctaactttcgtctacgactccgaaatataccgccaaacaaaaccgaattcaaaccaaaaaataaacccgaacaaccccacgacgaaaaactatctattctcacgaatcccgttttaccctcgattccttcaaaatcgaaaaactacctatccgctctacacactccacgtatccactaacaaaataaaccataaacctacctt

SEQ ID NO: 39293 - DNA, 578 bp, Artificial Sequence
  chemically treated genomic DNA (Homo sapiens) CpG-island No: 39293
ggacgatgtatagagaatgaatatatttatacgtttattcgagtgtgtatatatagaatttatacgttcgttagagtgtgtatatatatagagaatttatacgtttattcgagtgtgtatatatagagaatttatacgttcgttagagtgtgtatatagagaatttatacgttcgttagagtgtgtatatatatagagaatttatacgtttattcgagtgtgtatatatagaatttatacgtttattcgagtgtgtatatatagagaatttatacgtttattcgagtgtgtatatatagaatttatacgtttattcgagtgtgtatatatagagaatttatacgtttattcgagtgtgtatatatagaatttatacgtttattcgagtgtgtatatatagagaatttatacgtttattcgagtgtgtatatatagaatttatacgtttattcgagtgtgtatatatagagaatttatacgttcgttagagtgtgtatatatatagagaatttatacgtttattcgagtgtgtatatatagagaatttatacgttcgttagagtgtgtatatatataga

SEQ ID NO: 39294 - DNA, 578 bp, Artificial Sequence
  chemically treated genomic DNA (Homo sapiens) CpG-island No: 39294
tctatatatatacacactctaacgaacgtataaattctctatatatacacactcgaataaacgtataaattctctatatatatacacactctaacgaacgtataaattctctatatatacacactcgaataaacgtataaattctatatatacacactcgaataaacgtataaattctctatatatacacactcgaataaacgtataaattctatatatacacactcgaataaacgtataaattctctatatatacacactcgaataaacgtataaattctatatatacacactcgaataaacgtataaattctctatatatacacactcgaataaacgtataaattctatatatacacactcgaataaacgtataaattctctatatatatacacactctaacgaacgtataaattctctatatacacactctaacgaacgtataaattctctatatatacacactcgaataaacgtataaattctctatatatatacacactctaacgaacgtataaattctatatatacacactcgaataaacgtataaatatattcattctctatacatcgtcc

SEQ ID NO: 39295 - DNA, 578 bp, Artificial Sequence
  chemically treated genomic DNA (Homo sapiens) CpG-island No: 39295
tttgtgtgtgtgtatattttggcgagcgtgtgggttttttgtgtgtgtatattcgggtgagcgtgtgggttttttgtgtgtgtgtatattttggcgagcgtgtgggttttttgtgtgtgtatattcgggtgagcgtgtgggttttgtgtgtgtatattcgggtgagcgtgtgggttttttgtgtgtgtatattcgggtgagcgtgtgggttttgtgtgtgtatattcgggtgagcgtgtgggttttttgtgtgtgtatattcgggtgagcgtgtgggttttgtgtgtgtatattcgggtgagcgtgtgggttttttgtgtgtgtatattcgggtgagcgtgtgggttttgtgtgtgtatattcgggtgagcgtgtgggttttttgtgtgtgtgtatattttggcgagcgtgtgggttttttgtgtgtatattttggcgagcgtgtgggttttttgtgtgtgtatattcgggtgagcgtgtgggttttttgtgtgtgtgtatattttggcgagcgtgtgggttttgtgtgtgtatattcgggtgagcgtgtgggtgtgtttattttttatgtatcgttt

SEQ ID NO: 39296 - DNA, 578 bp, Artificial Sequence
  chemically treated genomic DNA (Homo sapiens) CpG-island No: 39296
aaacgatacataaaaaataaacacacccacacgctcacccgaatatacacacacaaaacccacacgctcgccaaaatatacacacacacaaaaaacccacacgctcacccgaatatacacacacaaaaaacccacacgctcgccaaaatatacacacaaaaaacccacacgctcgccaaaatatacacacacacaaaaaacccacacgctcacccgaatatacacacacaaaacccacacgctcacccgaatatacacacacaaaaaacccacacgctcacccgaatatacacacacaaaacccacacgctcacccgaatatacacacacaaaaaacccacacgctcacccgaatatacacacacaaaacccacacgctcacccgaatatacacacacaaaaaacccacacgctcacccgaatatacacacacaaaacccacacgctcacccgaatatacacacacaaaaaacccacacgctcgccaaaatatacacacacacaaaaaacccacacgctcacccgaatatacacacacaaaaaacccacacgctcgccaaaatatacacacacacaaa

SEQ ID NO: 39297 - DNA, 647 bp, Artificial Sequence
  chemically treated genomic DNA (Homo sapiens) CpG-island No: 39297
cgatgcgtatttggtcgtacgtagttttattaggtagggtgtatttgttaagtttttaggttcgagtgttcgcggttttatttgttttggtatcgtcgttcgtatttcggttagtgcgttttcggtaggtgcgtgtatttgatttagttcgtgtttattttgcgtatacgggtcgtttagtgtttcgttcggagttcgtcgtcgtcgtagttttgaggtttcgattttcgtttgggtttcgttcggcgcgtagcggtcgcgggggcgggggtcgcgacgcgaggagcggagtaggaaggggcgaggtagtttcgttttcgggggcggtttttcgggacggtttcgttttttgttcgttttcgcgttagtgttttattattatttgttcgcgcgtcgttttatataaaggcgtcgtcgtttttgtttttaggattcggttttatggagacgtcgtcggtcgtcgttggcgtatggcggggtgaggcgcggcggggagggtgcgggtttcggcggggaagcggtagggagcgtttcggcggggttcgagtcgagtcgaggggaggggacgggaggggacgggaggggtggagaggggaggggacgggagggtcggggttttgtttttcggttcgtcgggtttttaggat

SEQ ID NO: 39298 - DNA, 647 bp, Artificial Sequence
  chemically treated genomic DNA (Homo sapiens) CpG-island No: 39298
atcctaaaaacccgacgaaccgaaaaacaaaaccccgaccctcccgtcccctcccctctccacccctcccgtcccctcccgtcccctcccctcgactcgactcgaaccccgccgaaacgctccctaccgcttccccgccgaaacccgcaccctccccgccgcgcctcaccccgccatacgccaacgacgaccgacgacgtctccataaaaccgaatcctaaaaacaaaaacgacgacgcctttatataaaacgacgcgcgaacaaataataataaaacactaacgcgaaaacgaacaaaaaacgaaaccgtcccgaaaaaccgcccccgaaaacgaaactacctcgccccttcctactccgctcctcgcgtcgcgacccccgcccccgcgaccgctacgcgccgaacgaaacccaaacgaaaatcgaaacctcaaaactacgacgacgacgaactccgaacgaaacactaaacgacccgtatacgcaaaataaacacgaactaaatcaaatacacgcacctaccgaaaacgcactaaccgaaatacgaacgacgataccaaaacaaataaaaccgcgaacactcgaacctaaaaacttaacaaatacaccctacctaataaaactacgtacgaccaaatacgcatcg

SEQ ID NO: 39299 - DNA, 647 bp, Artificial Sequence
  chemically treated genomic DNA (Homo sapiens) CpG-island No: 39299
gttttgagggttcggcgggtcggggaataggatttcgattttttcgtttttttttttttttatttttttcgttttttttcgtttttttttttcggttcggttcggatttcgtcggagcgttttttgtcgttttttcgtcgaggttcgtatttttttcgtcgcgttttatttcgttatgcgttagcggcggtcggcggcgtttttatggggtcgagttttgggggtaaggacggcggcgtttttatatggggcggcgcgcgggtaggtggtggtgaggtattgacgcggaagcgggtaaggggcggggtcgtttcgggagatcgttttcgggggcggggttgtttcgtttttttttgtttcgtttttcgcgtcgcggttttcgttttcgcggtcgttgcgcgtcggacggggtttaagcgggggtcggagttttaaggttgcggcggcgacgagtttcgagcgggatattgaacggttcgtatgcgtaagataagtacggattgaattaggtatacgtatttgtcggggacgtattgatcgaggtgcggacggcggtattaggataggtaaagtcgcgaatattcggatttaagaatttgataggtatattttgtttgatgaagttacgtacggttaggtgcgtatcg

SEQ ID NO: 39300 - DNA, 647 bp, Artificial Sequence
  chemically treated genomic DNA (Homo sapiens) CpG-island No: 39300
cgatacgcacctaaccgtacgtaacttcatcaaacaaaatatacctatcaaattcttaaatccgaatattcgcgactttacctatcctaataccgccgtccgcacctcgatcaatacgtccccgacaaatacgtatacctaattcaatccgtacttatcttacgcatacgaaccgttcaatatcccgctcgaaactcgtcgccgccgcaaccttaaaactccgacccccgcttaaaccccgtccgacgcgcaacgaccgcgaaaacgaaaaccgcgacgcgaaaaacgaaacaaaaaaaaacgaaacaaccccgcccccgaaaacgatctcccgaaacgaccccgccccttacccgcttccgcgtcaatacctcaccaccacctacccgcgcgccgccccatataaaaacgccgccgtccttacccccaaaactcgaccccataaaaacgccgccgaccgccgctaacgcataacgaaataaaacgcgacgaaaaaaatacgaacctcgacgaaaaaacgacaaaaaacgctccgacgaaatccgaaccgaaccgaaaaaaaaaaacgaaaaaaaacgaaaaaaataaaaaaaaaaaaaaacgaaaaaatcgaaatcctattccccgacccgccgaaccctcaaaac

SEQ ID NO: 39301 - DNA, 849 bp, Artificial Sequence
  chemically treated genomic DNA (Homo sapiens) CpG-island No: 39301
ttttttcgaagtaacgggattaatcgtatcgtcggtaggatattttgtgcggggcgcgaagtgataaaagttaggatttgtagaagtttttattcggtaacgatttttatttcggtaaggagtatagtaggcgtttcggaaacgttttttacgaggagggtcgggttattttttgttttcgagcgggtttttttcggcggaggtttttatcgtcgttatgggtaggttatgtagtatttttgagggcggggtgggcgtaagaagaaggtgttcgcgggttcgttttttttcgggcgcgttgggcggggcgaagtttttcggcgtcgacggttcgtttcgcggggggtgggcgtagttcgtcgcgtttcgtataaagtttgtttttttttttcgggcgggtgggggagggcgtagagggcgcgggggaaggagaggggatttgacgttaggtcgcgaggtgttttttagtcgcgagttgttaggtcgagtgttaggtcgggtaggtacgcggcgcgcgttttcggcgtttttcgtttttcgtcgggacgtttcgcgtcgagtcggaggtcgcgtggattcgaaagtcgttgggaaaagttagtgtagggagtagtagagggttagatgggggtgggggcgcgcggataatttggaaagtttttttttttcggtcggacggggagggggcgtcgttttggcgcgtgcggtagggggtgtgtgagttcgggggtgtttgtgagtttcgacggttttcggggggtgtttgtgagtttcgacggcgttgcgtttcgggggtcggtgggggatttgttttagtttttcgggaggaagttcgtttggggttttggt

SEQ ID NO: 39302 - DNA, 849 bp, Artificial Sequence
  chemically treated genomic DNA (Homo sapiens) CpG-island No: 39302
accaaaaccccaaacgaacttcctcccgaaaaactaaaacaaatcccccaccgacccccgaaacgcaacgccgtcgaaactcacaaacaccccccgaaaaccgtcgaaactcacaaacacccccgaactcacacaccccctaccgcacgcgccaaaacgacgccccctccccgtccgaccgaaaaaaaaaaactttccaaattatccgcgcgcccccacccccatctaaccctctactactccctacactaacttttcccaacgactttcgaatccacgcgacctccgactcgacgcgaaacgtcccgacgaaaaacgaaaaacgccgaaaacgcgcgccgcgtacctacccgacctaacactcgacctaacaactcgcgactaaaaaacacctcgcgacctaacgtcaaatcccctctccttcccccgcgccctctacgccctcccccacccgcccgaaaaaaaaaaacaaactttatacgaaacgcgacgaactacgcccaccccccgcgaaacgaaccgtcgacgccgaaaaacttcgccccgcccaacgcgcccgaaaaaaaacgaacccgcgaacaccttcttcttacgcccaccccgccctcaaaaatactacataacctacccataacgacgataaaaacctccgccgaaaaaaacccgctcgaaaacaaaaaataacccgaccctcctcgtaaaaaacgtttccgaaacgcctactatactccttaccgaaataaaaatcgttaccgaataaaaacttctacaaatcctaacttttatcacttcgcgccccgcacaaaatatcctaccgacgatacgattaatcccgttacttcgaaaaaa

SEQ ID NO: 39303 - DNA, 849 bp, Artificial Sequence
  chemically treated genomic DNA (Homo sapiens) CpG-island No: 39303
attagggttttaagcgggttttttttcggggggttggaataggttttttatcggttttcggagcgtagcgtcgtcgggatttataaatatttttcgggggtcgtcgggatttataaatattttcgagtttatatattttttatcgtacgcgttaggacgacgtttttttttcgttcggtcgagaaaaagaaattttttaagttgttcgcgcgtttttatttttatttggttttttgttgttttttgtattgattttttttagcggttttcgggtttacgcggttttcggttcggcgcggggcgtttcggcggggagcggggggcgtcgggggcgcgcgtcgcgtatttgttcggtttgatattcggtttgatagttcgcggttggaaagtatttcgcggtttgacgttagattttttttttttttttcgcgttttttgcgtttttttttattcgttcggagggagaaaataaattttgtgcggagcgcgacgagttgcgtttatttttcgcggggcgggtcgtcggcgtcgaggggtttcgtttcgtttagcgcgttcggaggggggcgggttcgcgggtattttttttttgcgtttatttcgtttttaggaatgttgtatggtttatttatagcggcggtgggagttttcgtcggggagagttcgttcgggggtaggaagtggttcggtttttttcgtggagggcgttttcggagcgtttattgtgttttttgtcggggtgggggtcgttatcgagtgggaatttttgtaaattttgatttttgttatttcgcgtttcgtataagatgttttgtcggcggtgcgattggtttcgttgtttcgagggga

SEQ ID NO: 39304 - DNA, 849 bp, Artificial Sequence
  chemically treated genomic DNA (Homo sapiens) CpG-island No: 39304
tcccctcgaaacaacgaaaccaatcgcaccgccgacaaaacatcttatacgaaacgcgaaataacaaaaatcaaaatttacaaaaattcccactcgataacgacccccaccccgacaaaaaacacaataaacgctccgaaaacgccctccacgaaaaaaaccgaaccacttcctacccccgaacgaactctccccgacgaaaactcccaccgccgctataaataaaccatacaacattcctaaaaacgaaataaacgcaaaaaaaaaatacccgcgaacccgcccccctccgaacgcgctaaacgaaacgaaacccctcgacgccgacgacccgccccgcgaaaaataaacgcaactcgtcgcgctccgcacaaaatttattttctccctccgaacgaataaaaaaaaacgcaaaaaacgcgaaaaaaaaaaaaaaaatctaacgtcaaaccgcgaaatactttccaaccgcgaactatcaaaccgaatatcaaaccgaacaaatacgcgacgcgcgcccccgacgccccccgctccccgccgaaacgccccgcgccgaaccgaaaaccgcgtaaacccgaaaaccgctaaaaaaaatcaatacaaaaaacaacaaaaaaccaaataaaaataaaaacgcgcgaacaacttaaaaaatttctttttctcgaccgaacgaaaaaaaaacgtcgtcctaacgcgtacgataaaaaatatataaactcgaaaatatttataaatcccgacgacccccgaaaaatatttataaatcccgacgacgctacgctccgaaaaccgataaaaaacctattccaaccccccgaaaaaaaacccgcttaaaaccctaat

SEQ ID NO: 39305 - DNA, 673 bp, Artificial Sequence
  chemically treated genomic DNA (Homo sapiens) CpG-island No: 39305
tttcgcgttattttttatttttgtttcggcgcgtatttatttggcggcggcgaatatcggtcgggtttttgtatttacgtcgttttattttttgaatttttcgatttgatcgaggcggtttcgaagggttttattagcggttcggggttgtgcgtttttcgagcgtcgtgtttcgatagtagtagtggtcgtagggtggtttcggtcgaggcgttttcggtcggtagcggggacgtttttttgggcggttttttgtcggatatgagcgtttttacgttgaagggtaggttggagattttgacgcggcgttttttcgcggttttttcggcgtttttaggtttcgggtttggttcggttattattgttgggtttttttcgtcgggcgaaaataagttattgtttttggacggagaagttatgatttttttgttttacgtagttttcgacgcgcgatttcgttggtaattcggtagcggcgatttaaatttttttgttgcggaaacgggaggggcgcgttgggagttgagtttttttttcgaggggaagtgggagacgcgcgtcgttaattcgcgtcgggtttggcgttgacgttaaaaacgttcgtttttgattggtttttttcgaaggggttgttttttttttttttttttttttttttttttttttttgtttg

SEQ ID NO: 39306 - DNA, 673 bp, Artificial Sequence
  chemically treated genomic DNA (Homo sapiens) CpG-island No: 39306
caaacaaaaaaaaaaaaaaaaaaaaaaaaaaaaaaaaaaaacaaccccttcgaaaaaaaccaatcaaaaacgaacgtttttaacgtcaacgccaaacccgacgcgaattaacgacgcgcgtctcccacttcccctcgaaaaaaaaactcaactcccaacgcgcccctcccgtttccgcaacaaaaaaatttaaatcgccgctaccgaattaccaacgaaatcgcgcgtcgaaaactacgtaaaacaaaaaaatcataacttctccgtccaaaaacaataacttattttcgcccgacgaaaaaaacccaacaataataaccgaaccaaacccgaaacctaaaaacgccgaaaaaaccgcgaaaaaacgccgcgtcaaaatctccaacctacccttcaacgtaaaaacgctcatatccgacaaaaaaccgcccaaaaaaacgtccccgctaccgaccgaaaacgcctcgaccgaaaccaccctacgaccactactactatcgaaacacgacgctcgaaaaacgcacaaccccgaaccgctaataaaacccttcgaaaccgcctcgatcaaatcgaaaaattcaaaaaataaaacgacgtaaatacaaaaacccgaccgatattcgccgccgccaaataaatacgcgccgaaacaaaaataaaaaataacgcgaaa

SEQ ID NO: 39307 - DNA, 673 bp, Artificial Sequence
  chemically treated genomic DNA (Homo sapiens) CpG-island No: 39307
taaataggaaaaaaaaaaaaaaaaaaaaaagggggggggggtagttttttcgggaaaagttaattaggggcgagcgtttttggcgttagcgttaggttcggcgcggattggcggcgcgcgttttttattttttttcggaggaaaggtttagtttttagcgcgtttttttcgttttcgtagtaaaaaagtttgagtcgtcgttgtcgggttgttagcggagtcgcgcgtcgggagttacgtagggtagagaagttatggttttttcgtttaaaggtaatgatttgttttcgttcgacgaggagggtttagtagtggtggtcggattaggttcggggtttgggggcgtcgagggggtcgcggaggagcgtcgcgttaaggtttttagtttgttttttagcgtggaggcgtttatgttcgataagaagtcgtttaaggaggcgttttcgttgtcggtcgaaagcgtttcggtcggggttattttgcggttattgttgttgtcggggtacggcgttcgggaagcgtatagtttcgggtcgttggtgaagtttttcgagatcgtttcggttaagtcggaaaatttagaagatggagcggcgtggatgtaggaattcggtcgatattcgtcgtcgttaagtgagtgcgcgtcggggtaggagtaggaggtagcgcgggg

SEQ ID NO: 39308 - DNA, 673 bp, Artificial Sequence
  chemically treated genomic DNA (Homo sapiens) CpG-island No: 39308
ccccgcgctacctcctactcctaccccgacgcgcactcacttaacgacgacgaatatcgaccgaattcctacatccacgccgctccatcttctaaattttccgacttaaccgaaacgatctcgaaaaacttcaccaacgacccgaaactatacgcttcccgaacgccgtaccccgacaacaacaataaccgcaaaataaccccgaccgaaacgctttcgaccgacaacgaaaacgcctccttaaacgacttcttatcgaacataaacgcctccacgctaaaaaacaaactaaaaaccttaacgcgacgctcctccgcgaccccctcgacgcccccaaaccccgaacctaatccgaccaccactactaaaccctcctcgtcgaacgaaaacaaatcattacctttaaacgaaaaaaccataacttctctaccctacgtaactcccgacgcgcgactccgctaacaacccgacaacgacgactcaaacttttttactacgaaaacgaaaaaaacgcgctaaaaactaaacctttcctccgaaaaaaaataaaaaacgcgcgccgccaatccgcgccgaacctaacgctaacgccaaaaacgctcgcccctaattaacttttcccgaaaaaactacccccccccccttttttttttttttttttttttcctattta

SEQ ID NO: 39309 - DNA, 649 bp, Artificial Sequence
  chemically treated genomic DNA (Homo sapiens) CpG-island No: 39309
gcgcgttatattcgttaggtttttttttgaagtaatcgcgtacgcgcgttgcgagttttaaggagaaaatattttttgtaaattgtggagtattgcgcgtagaacgtagcgtttgtaatttcgagggtcgaaggttagtttgtaattttagcggttagaagggggcgggggagggggtagcgaagggggttgtagacgggtttgggtttcgggtaggcgttaggcgcggggagatgaaaggcgggtttcgggggaaggggttgcgtcgggtgatcggttttagtcgcgtcgggcgtttcgttttcgttttgtttcgttttcgttgttcggggtagaggcggttgttcgcgtcggagtcgcgttaattgttttcggttttagtatttagtttgcgcggagtcgggataatttcgttttaggaggaatgataattcgttttaatgggataagttcgtttttagaggagtgataattttttttaatgggagttcgttagcggtttattttatcgagttcgggtattagaagtaggtagattcgcgggcgttaatattcgttaggaattttataatatcgtttatttattttttaaaatattggttgtgtgatttcgggtaaaaggttattcgtttttgagtttatttttttt

SEQ ID NO: 39310 - DNA, 649 bp, Artificial Sequence
  chemically treated genomic DNA (Homo sapiens) CpG-island No: 39310
aaaaaaaataaactcaaaaacgaataaccttttacccgaaatcacacaaccaatattttaaaaaataaataaacgatattataaaattcctaacgaatattaacgcccgcgaatctacctacttctaatacccgaactcgataaaataaaccgctaacgaactcccattaaaaaaaattatcactcctctaaaaacgaacttatcccattaaaacgaattatcattcctcctaaaacgaaattatcccgactccgcgcaaactaaatactaaaaccgaaaacaattaacgcgactccgacgcgaacaaccgcctctaccccgaacaacgaaaacgaaacaaaacgaaaacgaaacgcccgacgcgactaaaaccgatcacccgacgcaaccccttcccccgaaacccgcctttcatctccccgcgcctaacgcctacccgaaacccaaacccgtctacaacccccttcgctaccccctcccccgcccccttctaaccgctaaaattacaaactaaccttcgaccctcgaaattacaaacgctacgttctacgcgcaatactccacaatttacaaaaaatattttctccttaaaactcgcaacgcgcgtacgcgattacttcaaaaaaaaacctaacgaatataacgcgc

SEQ ID NO: 39311 - DNA, 649 bp, Artificial Sequence
  chemically treated genomic DNA (Homo sapiens) CpG-island No: 39311
aagaaaaatgagtttagagacgagtagttttttgttcgaagttatatagttaatgttttggggggtgggtgagcggtgttgtggaatttttggcggatgttggcgttcgcgggtttgtttgtttttgatattcgggttcggtagaataggtcgttaacgagtttttattaggaggaattgttatttttttgggagcgagtttgttttattagggcgaattgttattttttttggagcgaggttgtttcggtttcgcgtaggttgagtgttggggtcgagagtaattaacgcggtttcggcgcgggtagtcgtttttgtttcgggtagcgggggcggggtagggcgggggcggggcgttcggcgcggttggagtcggttattcggcgtagttttttttttcggagttcgttttttattttttcgcgtttggcgtttgttcgaagtttaggttcgtttatagtttttttcgttgttttttttttcgtttttttttagtcgttggggttataaattagttttcggttttcggggttataaacgttgcgttttgcgcgtagtgttttatagtttgtaaggagtgttttttttttgggattcgtagcgcgcgtacgcggttgttttaagaaggggtttggcgggtgtaacgcgt

SEQ ID NO: 39312 - DNA, 649 bp, Artificial Sequence
  chemically treated genomic DNA (Homo sapiens) CpG-island No: 39312
acgcgttacacccgccaaaccccttcttaaaacaaccgcgtacgcgcgctacgaatcccaaaaaaaaaacactccttacaaactataaaacactacgcgcaaaacgcaacgtttataaccccgaaaaccgaaaactaatttataaccccaacgactaaaaaaaaacgaaaaaaaaaacaacgaaaaaaactataaacgaacctaaacttcgaacaaacgccaaacgcgaaaaaataaaaaacgaactccgaaaaaaaaaactacgccgaataaccgactccaaccgcgccgaacgccccgcccccgccctaccccgcccccgctacccgaaacaaaaacgactacccgcgccgaaaccgcgttaattactctcgaccccaacactcaacctacgcgaaaccgaaacaacctcgctccaaaaaaaataacaattcgccctaataaaacaaactcgctcccaaaaaaataacaattcctcctaataaaaactcgttaacgacctattctaccgaacccgaatatcaaaaacaaacaaacccgcgaacgccaacatccgccaaaaattccacaacaccgctcacccaccccccaaaacattaactatataacttcgaacaaaaaactactcgtctctaaactcatttttctt

SEQ ID NO: 39313 - DNA, 820 bp, Artificial Sequence
  chemically treated genomic DNA (Homo sapiens) CpG-island No: 39313
tcgtttagacgtagggagcgtagcgcgggtagcgcggttagggcggttacgttgaggttgcgtaggttgttgtcgttgagttttagtatttgtagcgattttagggtttcgaaggcgttttcgtgtacgtttattaggttgttgttagttaggttaagttttattagtttttcggtcgagcggaaggcgtcggcgtttagttgggttaagttgttgtagttgaggtcgaggaatacgagtttggtcgagtcgttgaacgtgtttttttttagcgagcgtagcgagttgtttttgaagtttaggtagattaggtcgtcgtagaagatgaagaagttttcggggattcgttggatgcggttgtcggttattagtagtttgcgtacgtttagggggaaagggtttggtacgttgggtagttcgcggtcgcggtagtttacggtgtgcgggtcggtgtaggcgtagttcgcggggtacgcgtgttcgggcgcgagtagtagtagaaggttgtagagttcgagcgtcgcggcggcgtaggttggggttcgggggcgtatggtcggggggttcgcgtcggtcgcggcgagaaggaagcggttttcggagcgagttttggcgcgggacggcgcggtgaggtattggttgtcgggcgcggggagttagagggcggttcgggcggggagggcgtgcgttcgggcgtgcgggggcgatggagcgcggcgcggacggattggggagtcgggatagtagggatggagaggggaggggcggggagggaggggcgagggatttattaaagggtttattcggataggaaattaat

SEQ ID NO: 39314 - DNA, 820 bp, Artificial Sequence
  chemically treated genomic DNA (Homo sapiens) CpG-island No: 39314
attaatttcctatccgaataaaccctttaataaatccctcgcccctccctccccgcccctcccctctccatccctactatcccgactccccaatccgtccgcgccgcgctccatcgcccccgcacgcccgaacgcacgccctccccgcccgaaccgccctctaactccccgcgcccgacaaccaatacctcaccgcgccgtcccgcgccaaaactcgctccgaaaaccgcttccttctcgccgcgaccgacgcgaaccccccgaccatacgcccccgaaccccaacctacgccgccgcgacgctcgaactctacaaccttctactactactcgcgcccgaacacgcgtaccccgcgaactacgcctacaccgacccgcacaccgtaaactaccgcgaccgcgaactacccaacgtaccaaaccctttccccctaaacgtacgcaaactactaataaccgacaaccgcatccaacgaatccccgaaaacttcttcatcttctacgacgacctaatctacctaaacttcaaaaacaactcgctacgctcgctaaaaaaaaacacgttcaacgactcgaccaaactcgtattcctcgacctcaactacaacaacttaacccaactaaacgccgacgccttccgctcgaccgaaaaactaataaaacttaacctaactaacaacaacctaataaacgtacacgaaaacgccttcgaaaccctaaaatcgctacaaatactaaaactcaacgacaacaacctacgcaacctcaacgtaaccgccctaaccgcgctacccgcgctacgctccctacgtctaaacga

SEQ ID NO: 39315 - DNA, 820 bp, Artificial Sequence
  chemically treated genomic DNA (Homo sapiens) CpG-island No: 39315
gttaattttttgttcgggtaaattttttggtgagtttttcgttttttttttttcgttttttttttttttatttttgttgtttcggttttttagttcgttcgcgtcgcgttttatcgttttcgtacgttcgggcgtacgtttttttcgttcgggtcgttttttggtttttcgcgttcggtagttagtgttttatcgcgtcgtttcgcgttagggttcgtttcgagagtcgtttttttttcgtcgcggtcggcgcgggtttttcggttatgcgttttcgagttttagtttgcgtcgtcgcggcgttcgggttttgtagttttttgttgttgttcgcgttcgggtacgcgtgtttcgcgggttgcgtttgtatcgattcgtatatcgtggattgtcgcgatcgcgggttgtttagcgtgttagattttttttttttggacgtgcgtaagttgttggtggtcggtaatcgtatttagcggattttcgaggatttttttattttttacggcgatttggtttatttggattttaggaataattcgttgcgttcgttggaggagggtacgtttagcggttcggttaagttcgtgtttttcgattttagttataataatttgatttagttgggcgtcggcgtttttcgttcggtcgggaggttggtgaagtttagtttggttaataataatttggtgggcgtgtacgaggacgttttcgagattttggagtcgttgtaggtgttggagtttaacgataataatttgcgtagttttagcgtggtcgttttggtcgcgttgttcgcgttgcgttttttgcgtttggacgg

SEQ ID NO: 39316 - DNA, 820 bp, Artificial Sequence
  chemically treated genomic DNA (Homo sapiens) CpG-island No: 39316
ccgtccaaacgcaaaaaacgcaacgcgaacaacgcgaccaaaacgaccacgctaaaactacgcaaattattatcgttaaactccaacacctacaacgactccaaaatctcgaaaacgtcctcgtacacgcccaccaaattattattaaccaaactaaacttcaccaacctcccgaccgaacgaaaaacgccgacgcccaactaaatcaaattattataactaaaatcgaaaaacacgaacttaaccgaaccgctaaacgtaccctcctccaacgaacgcaacgaattattcctaaaatccaaataaaccaaatcgccgtaaaaaataaaaaaatcctcgaaaatccgctaaatacgattaccgaccaccaacaacttacgcacgtccaaaaaaaaaaaatctaacacgctaaacaacccgcgatcgcgacaatccacgatatacgaatcgatacaaacgcaacccgcgaaacacgcgtacccgaacgcgaacaacaacaaaaaactacaaaacccgaacgccgcgacgacgcaaactaaaactcgaaaacgcataaccgaaaaacccgcgccgaccgcgacgaaaaaaaaacgactctcgaaacgaaccctaacgcgaaacgacgcgataaaacactaactaccgaacgcgaaaaaccaaaaaacgacccgaacgaaaaaaacgtacgcccgaacgtacgaaaacgataaaacgcgacgcgaacgaactaaaaaaccgaaacaacaaaaataaaaaaaaaaaaaacgaaaaaaaaaaaacgaaaaactcaccaaaaaatttacccgaacaaaaaattaac

SEQ ID NO: 39317 - DNA, 508 bp, Artificial Sequence
  chemically treated genomic DNA (Homo sapiens) CpG-island No: 39317
tatcgtacgagtaagggtttgtatagtttttttcggggttcgatatatagtgatagagtatgttgttcgcgtattatatgtagtttattcggcggatgtaagtttttacggagtcgggcgcgttttggtagtggtttcggcggtttttttcgtggttgaatatgtttttgtagtatacgtatcgcgagcgtttttcgtttttttttcgtcgtcgcgatttgtttcgggagggttgcgttttgattacgttgttttcgcggtttttggggttttcgtttaggttaaagtttgaggagtttacgtaggggtagttgtagttatgtttggggatttcgtttttggcgaagcgtacgtaggaggagttcgcgtttttcgaggggttcgggtatttgtttttgacgggtgcgtgtcggtaattttcgtatttcgttatttagattttttttcggggggttgatgcgtacgattttttcgtcgtcgttcgggaagtttatttggcggtagggtt

SEQ ID NO: 39318 - DNA, 508 bp, Artificial Sequence
  chemically treated genomic DNA (Homo sapiens) CpG-island No: 39318
aaccctaccgccaaataaacttcccgaacgacgacgaaaaaatcgtacgcatcaaccccccgaaaaaaaatctaaataacgaaatacgaaaattaccgacacgcacccgtcaaaaacaaatacccgaacccctcgaaaaacgcgaactcctcctacgtacgcttcgccaaaaacgaaatccccaaacataactacaactacccctacgtaaactcctcaaactttaacctaaacgaaaaccccaaaaaccgcgaaaacaacgtaatcaaaacgcaaccctcccgaaacaaatcgcgacgacgaaaaaaaaacgaaaaacgctcgcgatacgtatactacaaaaacatattcaaccacgaaaaaaaccgccgaaaccactaccaaaacgcgcccgactccgtaaaaacttacatccgccgaataaactacatataatacgcgaacaacatactctatcactatatatcgaaccccgaaaaaaactatacaaacccttactcgtacgata

SEQ ID NO: 39319 - DNA, 508 bp, Artificial Sequence
  chemically treated genomic DNA (Homo sapiens) CpG-island No: 39319
ggttttatcgttaggtgagtttttcggacgacgacgaggagatcgtgcgtattaatttttcgggagaagatttggatgacggggtacgaggattatcggtacgtattcgttaggggtaagtattcggatttttcggaggacgcggattttttttacgtgcgtttcgttaagggcgaggtttttaagtatgattataattatttttacgtggattttttagattttggtttaggcgaggattttaaaggtcgcgggggtagcgtgattaagacgtagttttttcggggtaagtcgcggcggcggaaggaggacggagagcgttcgcggtgcgtgtattgtagggatatgtttaattacgaggagaatcgtcggggttattgttaggacgcgttcgatttcgtgagaatttgtattcgtcgggtgagttgtatgtggtgcgcggatagtatgttttattattgtatgtcggatttcgagggagattatatagatttttgttcgtgcgata

SEQ ID NO: 39320 - DNA, 508 bp, Artificial Sequence
  chemically treated genomic DNA (Homo sapiens) CpG-island No: 39320
tatcgcacgaacaaaaatctatataatctccctcgaaatccgacatacaataataaaacatactatccgcgcaccacatacaactcacccgacgaatacaaattctcacgaaatcgaacgcgtcctaacaataaccccgacgattctcctcgtaattaaacatatccctacaatacacgcaccgcgaacgctctccgtcctccttccgccgccgcgacttaccccgaaaaaactacgtcttaatcacgctacccccgcgacctttaaaatcctcgcctaaaccaaaatctaaaaaatccacgtaaaaataattataatcatacttaaaaacctcgcccttaacgaaacgcacgtaaaaaaaatccgcgtcctccgaaaaatccgaatacttacccctaacgaatacgtaccgataatcctcgtaccccgtcatccaaatcttctcccgaaaaattaatacgcacgatctcctcgtcgtcgtccgaaaaactcacctaacgataaaacc

SEQ ID NO: 39321 - DNA, 550 bp, Artificial Sequence
  chemically treated genomic DNA (Homo sapiens) CpG-island No: 39321
ggatgaacgttttatattcggcgtttagtttcgggacgtcgtttagcgtacggtttcggttgagtattcgggtaggcggtagttgcggggaagaggggtttgttttttgagtttcggagttttaaggtcgggtttaggcgggatagaggaaggcgtaagtttagtacgttgttcgtgacggcggttttcgtttttaaacgtttcggttggcgtggcgacggttgtagttcgcgcgttttgcggggatagtagtcgtgcgcgttttgtgcggttttttgcgtttgtttcggcgcgtaaattttttcggcgataatcgattaggttttttcgattggggcgcggggtttttttcgggatttagaaattgttcgttttttttttttcgtagttaagatttattgaaaatatggcgttttcgaaagtcgtttttcggttttttagggatttcgaaatattcgtttttaggtttttttagtttttaatgggcgtaaaattttagttcgtgggatcgaggaaggagagggagtcgttgagtttgtgtgaggttagt

SEQ ID NO: 39322 - DNA, 550 bp, Artificial Sequence
  chemically treated genomic DNA (Homo sapiens) CpG-island No: 39322
actaacctcacacaaactcaacgactccctctccttcctcgatcccacgaactaaaattttacgcccattaaaaactaaaaaaacctaaaaacgaatatttcgaaatccctaaaaaaccgaaaaacgactttcgaaaacgccatattttcaataaatcttaactacgaaaaaaaaaaaacgaacaatttctaaatcccgaaaaaaaccccgcgccccaatcgaaaaaacctaatcgattatcgccgaaaaaatttacgcgccgaaacaaacgcaaaaaaccgcacaaaacgcgcacgactactatccccgcaaaacgcgcgaactacaaccgtcgccacgccaaccgaaacgtttaaaaacgaaaaccgccgtcacgaacaacgtactaaacttacgccttcctctatcccgcctaaacccgaccttaaaactccgaaactcaaaaaacaaacccctcttccccgcaactaccgcctacccgaatactcaaccgaaaccgtacgctaaacgacgtcccgaaactaaacgccgaatataaaacgttcatcc

SEQ ID NO: 39323 - DNA, 550 bp, Artificial Sequence
  chemically treated genomic DNA (Homo sapiens) CpG-island No: 39323
gttggttttatatagatttagcggtttttttttttttttcggttttacgagttgaaattttgcgtttattggaagttggagggatttggagacgagtatttcgggatttttgagggatcgaggaacgattttcgagggcgttatatttttagtgggttttgattgcggaggggagggggcgagtagtttttgggtttcggggagagtttcgcgttttagtcggagaggtttgatcggttgtcgtcgggaaagtttgcgcgtcgaggtaggcgtaaggggtcgtataaggcgcgtacgattgttgttttcgtaaggcgcgcggattatagtcgtcgttacgttagtcggggcgtttgggaacgagagtcgtcgttacggatagcgtgttgggtttgcgtttttttttgtttcgtttggattcggttttggggtttcgaagtttaaggaataagtttttttttttcgtagttatcgtttgttcgggtgtttagtcggagtcgtgcgttgggcggcgtttcggggttgggcgtcgaatgtagagcgtttattt

SEQ ID NO: 39324 - DNA, 550 bp, Artificial Sequence
  chemically treated genomic DNA (Homo sapiens) CpG-island No: 39324
aaataaacgctctacattcgacgcccaaccccgaaacgccgcccaacgcacgactccgactaaacacccgaacaaacgataactacgaaaaaaaaaaacttattccttaaacttcgaaaccccaaaaccgaatccaaacgaaacaaaaaaaaacgcaaacccaacacgctatccgtaacgacgactctcgttcccaaacgccccgactaacgtaacgacgactataatccgcgcgccttacgaaaacaacaatcgtacgcgccttatacgaccccttacgcctacctcgacgcgcaaactttcccgacgacaaccgatcaaacctctccgactaaaacgcgaaactctccccgaaacccaaaaactactcgccccctcccctccgcaatcaaaacccactaaaaatataacgccctcgaaaatcgttcctcgatccctcaaaaatcccgaaatactcgtctccaaatccctccaacttccaataaacgcaaaatttcaactcgtaaaaccgaaaaaaaaaaaaaaaccgctaaatctatataaaaccaac

SEQ ID NO: 39325 - DNA, 628 bp, Artificial Sequence
  chemically treated genomic DNA (Homo sapiens) CpG-island No: 39325
  unsure (8, 87, 131, 170, 190, 207, 221, 311, 402, 451, 460, 480..481)
  unsure (508, 512, 519, 540)
cggcgttnttttttcgcgcgtgttttttgtggttttggcgtcgcgcgtgggtcgttcgtgtgtggcggtgggttttgcgtttggtgntttcgcgtggtcggtggtagttggcggttgcgcgcggggttttngtggtgggcgttttttgcggtttcgcgcgtcgggtgttntcgatgtttgtgtggttttncgtttttttgattgttngttcgacgttgtgnagagagcgtgtcgcgcgcgtggatagttcggatattggttagattggtttcggttatttgtaatatattatgttattgttttttcgtttnacggggttttcgttggtatattatgtattgtcgtgagatgtggtgaggtagtcgttgtagtgagcgttagcgtagttggacggaggtatgntgcgaggtacgagacgtcgcggcgtcgtgcgaacgtacgcgattcgggntacgtggtntagacgtcgcgcgttttttnntttgtcgagtttgttcgttttatcgtnatgnaagattntttcgcgggtgtatgcgtcgngcgttgcgtggttggtttagagagacgtgtatcgagttttttttcgtattgagtttttattagttttgttgaattttttttttgtatg

SEQ ID NO: 39326 - DNA, 628 bp, Artificial Sequence
  chemically treated genomic DNA (Homo sapiens) CpG-island No: 39326
  unsure (89, 110, 117, 121, 148..149, 169, 178, 227, 318, 408, 422)
  unsure (439, 459, 498, 542, 621)
catacaaaaaaaaaattcaacaaaactaataaaaactcaatacgaaaaaaaactcgatacacgtctctctaaaccaaccacgcaacgcncgacgcatacacccgcgaaanaatcttncatnacgataaaacgaacaaactcgacaaannaaaaaacgcgcgacgtctanaccacgtancccgaatcgcgtacgttcgcacgacgccgcgacgtctcgtacctcgcancatacctccgtccaactacgctaacgctcactacaacgactacctcaccacatctcacgacaatacataatataccaacgaaaaccccgtnaaacgaaaaaacaataacataatatattacaaataaccgaaaccaatctaaccaatatccgaactatccacgcgcgcgacacgctctctncacaacgtcgaacnaacaatcaaaaaaacgnaaaaccacacaaacatcganaacacccgacgcgcgaaaccgcaaaaaacgcccaccacnaaaaccccgcgcgcaaccgccaactaccaccgaccacgcgaaancaccaaacgcaaaacccaccgccacacacgaacgacccacgcgcgacgccaaaaccacaaaaaacacgcgcgaaaaaanaacgccg

SEQ ID NO: 39327 - DNA, 628 bp, Artificial Sequence
  chemically treated genomic DNA (Homo sapiens) CpG-island No: 39327
  unsure (89, 110, 117, 121, 148..149, 169, 178, 227, 318, 408, 422)
  unsure (439, 459, 498, 542, 621)
tatataaagaaggaatttaatagaattaatgagaatttagtacggagaaaggttcgatatacgtttttttgagttagttacgtagcgtncggcgtatgtattcgcgaagngattttntatnacggtggagcgagtagattcgatagannggagggcgcgcgacgtttgnattacgtgnttcgagtcgcgtacgttcgtacgacgtcgcggcgtttcgtatttcgtantatgttttcgtttagttacgttagcgtttattataacggttattttattatattttacggtaatatatggtgtattagcggagatttcgtngagcggagaggtaatgatatgatgtattataagtggtcgagattaatttaattaatgttcggattatttacgcgcgcgatacgttttttntataacgtcgaatnaatagttaaggggacgngagattatataaatatcgangatattcgacgcgcggggtcgtagaagacgtttattatnaaagtttcgcgcgtagtcgttagttgttatcggttacgcggagntattaggcgtaagatttatcgttatatacgggcgatttacgcgcggcgttagaattataaaaaatacgcgcgggggganggcgtcg

SEQ ID NO: 39328 - DNA, 628 bp, Artificial Sequence
  chemically treated genomic DNA (Homo sapiens) CpG-island No: 39328
  unsure (8, 87, 131, 170, 190, 207, 221, 311, 402, 451, 460, 480..481)
  unsure (508, 512, 519, 540)
cgacgccntccccccgcgcgtattttttataattctaacgccgcgcgtaaatcgcccgtatataacgataaatcttacgcctaatanctccgcgtaaccgataacaactaacgactacgcgcgaaactttnataataaacgtcttctacgaccccgcgcgtcgaatatcntcgatatttatataatctcncgtccccttaactattnattcgacgttatanaaaaaacgtatcgcgcgcgtaaataatccgaacattaattaaattaatctcgaccacttataatacatcatatcattacctctccgctcnacgaaatctccgctaatacaccatatattaccgtaaaatataataaaataaccgttataataaacgctaacgtaactaaacgaaaacatantacgaaatacgaaacgccgcgacgtcgtacgaacgtacgcgactcgaancacgtaatncaaacgtcgcgcgccctccnntctatcgaatctactcgctccaccgtnatanaaaatcncttcgcgaatacatacgccgnacgctacgtaactaactcaaaaaaacgtatatcgaacctttctccgtactaaattctcattaattctattaaattccttctttatata

SEQ ID NO: 39329 - DNA, 639 bp, Artificial Sequence
  chemically treated genomic DNA (Homo sapiens) CpG-island No: 39329
tttagtcgtatcgggtcggtgttgtcggggtttttttttatgtcgttcgatcgttttttcgagcgttgcgagttcgtattggaaggcgagattttttcgtgtttcgtggtgggaggcgagaagcgttttgtgtttgtcgtagatttttaattcggtgttgcgcgatttttcgttgtagtagattaacgcggtgtgcgacgagttttatatttattgttcgcgttgtacggtcgattagttggagatttttaaagttatgggtattttgtttttttcggcgttttcgtgcgggtttattattaagacggacgtcgagcgtttgtgtaacgcgttgttttacggcggcgtttattcgtcgttttgtaagaaggagttggtcgttagtttggcgttgggtttggagtttagcgagcgtagcgttcgcgtgtattacgagtgtttcggtaagtgtaaggggttgttggtgttcgagttttatagtagttcgagcgtcgtttgtatttagtgtttggattgtcgttttatgtattcgtcgtataagttcgtggtgtattcgtataaggttttggagaatcggatttgttattggggtttcgattcggttaattggcgggtttatattttgttgagttaggatta

SEQ ID NO: 39330 - DNA, 639 bp, Artificial Sequence
  chemically treated genomic DNA (Homo sapiens) CpG-island No: 39330
taatcctaactcaacaaaatataaacccgccaattaaccgaatcgaaaccccaataacaaatccgattctccaaaaccttatacgaatacaccacgaacttatacgacgaatacataaaacgacaatccaaacactaaatacaaacgacgctcgaactactataaaactcgaacaccaacaaccccttacacttaccgaaacactcgtaatacacgcgaacgctacgctcgctaaactccaaacccaacgccaaactaacgaccaactccttcttacaaaacgacgaataaacgccgccgtaaaacaacgcgttacacaaacgctcgacgtccgtcttaataataaacccgcacgaaaacgccgaaaaaaacaaaatacccataactttaaaaatctccaactaatcgaccgtacaacgcgaacaataaatataaaactcgtcgcacaccgcgttaatctactacaacgaaaaatcgcgcaacaccgaattaaaaatctacgacaaacacaaaacgcttctcgcctcccaccacgaaacacgaaaaaatctcgccttccaatacgaactcgcaacgctcgaaaaaacgatcgaacgacataaaaaaaaaccccgacaacaccgacccgatacgactaaa

SEQ ID NO: 39331 - DNA, 639 bp, Artificial Sequence
  chemically treated genomic DNA (Homo sapiens) CpG-island No: 39331
taattttggtttagtaggatgtaggttcgttagttggtcgagtcgaagttttagtggtaggttcggttttttagggttttgtgcgagtgtattacgaatttgtgcggcgggtatatgaggcggtagtttaggtattggatgtaggcggcgttcgggttgttgtagagttcgggtattagtagttttttatatttgtcgaagtattcgtggtatacgcggacgttgcgttcgttgagttttaggtttagcgttaggttggcggttagtttttttttgtagggcggcgggtaggcgtcgtcgtagagtagcgcgttgtataggcgttcggcgttcgttttggtgatgagttcgtacgagggcgtcgagaagggtaggatgtttatgattttgaggatttttagttggtcggtcgtgtagcgcgagtagtagatgtggagttcgtcgtatatcgcgttgatttgttgtagcgagaagtcgcgtagtatcgagttgagaatttgcggtagatatagggcgtttttcgttttttattacgaagtacgagaaggtttcgttttttagtacgggttcgtagcgttcgggggagcggtcggacggtatgaagaagggtttcggtagtatcggttcggtgcggttgga

SEQ ID NO: 39332 - DNA, 639 bp, Artificial Sequence
  chemically treated genomic DNA (Homo sapiens) CpG-island No: 39332
tccaaccgcaccgaaccgatactaccgaaacccttcttcataccgtccgaccgctcccccgaacgctacgaacccgtactaaaaaacgaaaccttctcgtacttcgtaataaaaaacgaaaaacgccctatatctaccgcaaattctcaactcgatactacgcgacttctcgctacaacaaatcaacgcgatatacgacgaactccacatctactactcgcgctacacgaccgaccaactaaaaatcctcaaaatcataaacatcctacccttctcgacgccctcgtacgaactcatcaccaaaacgaacgccgaacgcctatacaacgcgctactctacgacgacgcctacccgccgccctacaaaaaaaaactaaccgccaacctaacgctaaacctaaaactcaacgaacgcaacgtccgcgtataccacgaatacttcgacaaatataaaaaactactaatacccgaactctacaacaacccgaacgccgcctacatccaatacctaaactaccgcctcatatacccgccgcacaaattcgtaatacactcgcacaaaaccctaaaaaaccgaacctaccactaaaacttcgactcgaccaactaacgaacctacatcctactaaaccaaaatta

SEQ ID NO: 39333 - DNA, 685 bp, Artificial Sequence
  chemically treated genomic DNA (Homo sapiens) CpG-island No: 39333
ataagcggtgaggtagggtttttttcgatgcgtcgtttttgttttttttttttgttagagttcgagcgttaggattttgttcgtagttcgttcgttagtcggggtcgtggttcggggttgtttcgcggttgcggcggaggggttgggtcgggcggggagagttcggcggtcgttcgtttcgcggcgtttagcggtgcgagtgcgcgtagtttcgttcgtagttcgagttttcgttttgcgggagtcggggcgtcgtcgtcgcgttagtttttttttttgaatgttattattattatagtaaagggaagggtttcgtcgagggggtggcgggagggttaacggcgttttaggatgggcgttaagcgtgagtaagggtagtcggcgggcgtagcgttttggcgtagatatcggttcgatttacgtttgggtagggttatttttgtaatattgtcgggcgggagtagacgttttaagtttcgagggagagcgggcggtcggggcgggggagggtttgtggatggaagtcgtcgggttgatttatttttttagtttttttttcggtagtatttacggaggtggaaaggcgggcgtttcgttttgttgattgattcgggagagtcgttgttgttagatgttagtggttcgtaggagtttttgtattggtcggcgtcgttttatttttttt

SEQ ID NO: 39334 - DNA, 685 bp, Artificial Sequence
  chemically treated genomic DNA (Homo sapiens) CpG-island No: 39334
aaaaaaaataaaacgacgccgaccaatacaaaaactcctacgaaccactaacatctaacaacaacgactctcccgaatcaatcaacaaaacgaaacgcccgcctttccacctccgtaaatactaccgaaaaaaaaactaaaaaaataaatcaacccgacgacttccatccacaaaccctcccccgccccgaccgcccgctctccctcgaaacttaaaacgtctactcccgcccgacaatattacaaaaataaccctacccaaacgtaaatcgaaccgatatctacgccaaaacgctacgcccgccgactacccttactcacgcttaacgcccatcctaaaacgccgttaaccctcccgccaccccctcgacgaaacccttccctttactataataataataacattcaaaaaaaaaaactaacgcgacgacgacgccccgactcccgcaaaacgaaaactcgaactacgaacgaaactacgcgcactcgcaccgctaaacgccgcgaaacgaacgaccgccgaactctccccgcccgacccaacccctccgccgcaaccgcgaaacaaccccgaaccacgaccccgactaacgaacgaactacgaacaaaatcctaacgctcgaactctaacaaaaaaaaaaaacaaaaacgacgcatcgaaaaaaaccctacctcaccgcttat

SEQ ID NO: 39335 - DNA, 685 bp, Artificial Sequence
  chemically treated genomic DNA (Homo sapiens) CpG-island No: 39335
aggaagggtggggcggcgtcggttagtgtaggagtttttgcgggttattggtatttggtagtagcgattttttcgggttagttagtagagcgaggcgttcgtttttttattttcgtgagtgttgtcgaggggaaaattggggaagtgggttagttcggcggtttttatttatagattttttttcgtttcggtcgttcgttttttttcggagtttaaggcgtttgttttcgttcggtagtgttgtaagagtggttttgtttaggcgtgggtcgggtcggtgtttgcgttaaggcgttgcgttcgtcggttgtttttgtttacgtttggcgtttattttgaggcgtcgttggttttttcgttattttttcggcggggtttttttttttattatggtaatagtgatatttagaggaaaaggttagcgcggcgacggcgtttcggttttcgtagagcggaggttcgggttgcggacggggttgcgcgtattcgtatcgttggacgtcgcggggcgggcggtcgtcgagtttttttcgttcggtttagttttttcgtcgtagtcgcggggtagtttcgagttacggtttcggttggcgggcgggttgcgggtaggattttggcgttcgggttttggtaaggggaaaggatagaaacggcgtatcgggagggattttgttttatcgtttgt

SEQ ID NO: 39336 - DNA, 685 bp, Artificial Sequence
  chemically treated genomic DNA (Homo sapiens) CpG-island No: 39336
acaaacgataaaacaaaatccctcccgatacgccgtttctatcctttccccttaccaaaacccgaacgccaaaatcctacccgcaacccgcccgccaaccgaaaccgtaactcgaaactaccccgcgactacgacgaaaaaactaaaccgaacgaaaaaaactcgacgaccgcccgccccgcgacgtccaacgatacgaatacgcgcaaccccgtccgcaacccgaacctccgctctacgaaaaccgaaacgccgtcgccgcgctaaccttttcctctaaatatcactattaccataataaaaaaaaaaaccccgccgaaaaaataacgaaaaaaccaacgacgcctcaaaataaacgccaaacgtaaacaaaaacaaccgacgaacgcaacgccttaacgcaaacaccgacccgacccacgcctaaacaaaaccactcttacaacactaccgaacgaaaacaaacgccttaaactccgaaaaaaaacgaacgaccgaaacgaaaaaaaatctataaataaaaaccgccgaactaacccacttccccaattttcccctcgacaacactcacgaaaataaaaaaacgaacgcctcgctctactaactaacccgaaaaaatcgctactaccaaataccaataacccgcaaaaactcctacactaaccgacgccgccccacccttcct

SEQ ID NO: 39337 - DNA, 597 bp, Artificial Sequence
  chemically treated genomic DNA (Homo sapiens) CpG-island No: 39337
acgcggattttagttcgtttgggaaacggtttttattagtagaagggagattgcggtttagtttcgaggtcgttttagtagttcggttttacgcgatttattattttcgtcgtttttttacggtgttcgtcgttttcgtcgttcggttttttaatcgggtttttagtttttcgtttcgtgttttttggagatttgtagtttttgtcgttttgcgttcgtttttagggttcgtcgtttcgtcgttttatttttttttaaggggtttttagttgttttttcgcgatttttttcggattcggtttgtttatttttgttcgttaattcgtttggttttcgggcgagagttttcgcgcggttttggtttttgtttttttaacgtcgtcggggttgcgggatgtcgatttcgcggatcgtttagattcggaattgttgaggtagtagcgggttcgcggcgtttggtttatttcgggattttttagttttcgcgttgggttcgtcgcgttcgtattaagtacgttaggcggttttggtttatttttttttcgtttttcggtagttggtacgagggaatttggtcgttaggttttttttgggatt

SEQ ID NO: 39338 - DNA, 597 bp, Artificial Sequence
  chemically treated genomic DNA (Homo sapiens) CpG-island No: 39338
aatcccaaaaaaaacctaacgaccaaattccctcgtaccaactaccgaaaaacgaaaaaaaaataaaccaaaaccgcctaacgtacttaatacgaacgcgacgaacccaacgcgaaaactaaaaaatcccgaaataaaccaaacgccgcgaacccgctactacctcaacaattccgaatctaaacgatccgcgaaatcgacatcccgcaaccccgacgacgttaaaaaaacaaaaaccaaaaccgcgcgaaaactctcgcccgaaaaccaaacgaattaacgaacaaaaataaacaaaccgaatccgaaaaaaatcgcgaaaaaacaactaaaaaccccttaaaaaaaaataaaacgacgaaacgacgaaccctaaaaacgaacgcaaaacgacaaaaactacaaatctccaaaaaacacgaaacgaaaaactaaaaacccgattaaaaaaccgaacgacgaaaacgacgaacaccgtaaaaaaacgacgaaaataataaatcgcgtaaaaccgaactactaaaacgacctcgaaactaaaccgcaatctcccttctactaataaaaaccgtttcccaaacgaactaaaatccgcgt

SEQ ID NO: 39339 - DNA, 597 bp, Artificial Sequence
  chemically treated genomic DNA (Homo sapiens) CpG-island No: 39339
gattttaggggaaatttgacggttaggttttttcgtgttagttgtcgggaggcgggagggaggtaggttagggtcgtttggcgtgtttggtgcgaacgcggcgggtttagcgcgagagttggggaatttcgggatgagttaagcgtcgcgagttcgttgttgttttagtagtttcgggtttgggcggttcgcggagtcggtatttcgtagtttcggcggcgttagaggaataggaattagagtcgcgcgagggttttcgttcgggagttaggcgggttagcgggtaggagtgggtaggtcgagttcggaaagggtcgcgaggaggtagttaggggttttttgaggagggatagggcggcggaacgacgggttttgggagcgggcgtagggcggtaggagttgtaggtttttagagggtacggggcggggaattaggggttcggttagaaagtcgggcggcgggaacggcgggtatcgtgagggggcggcgggaatggtgggtcgcgtgaggtcgggttgttggagcgatttcgggattaaatcgtagttttttttttgttaatggaagtcgttttttaagcgagttgaagttcgcgt

SEQ ID NO: 39340 - DNA, 597 bp, Artificial Sequence
  chemically treated genomic DNA (Homo sapiens) CpG-island No: 39340
acgcgaacttcaactcgcttaaaaaacgacttccattaacaaaaaaaaaactacgatttaatcccgaaatcgctccaacaacccgacctcacgcgacccaccattcccgccgccccctcacgatacccgccgttcccgccgcccgactttctaaccgaacccctaattccccgccccgtaccctctaaaaacctacaactcctaccgccctacgcccgctcccaaaacccgtcgttccgccgccctatccctcctcaaaaaacccctaactacctcctcgcgaccctttccgaactcgacctacccactcctacccgctaacccgcctaactcccgaacgaaaaccctcgcgcgactctaattcctattcctctaacgccgccgaaactacgaaataccgactccgcgaaccgcccaaacccgaaactactaaaacaacaacgaactcgcgacgcttaactcatcccgaaattccccaactctcgcgctaaacccgccgcgttcgcaccaaacacgccaaacgaccctaacctacctccctcccgcctcccgacaactaacacgaaaaaacctaaccgtcaaatttcccctaaaatc

SEQ ID NO: 39341 - DNA, 520 bp, Artificial Sequence
  chemically treated genomic DNA (Homo sapiens) CpG-island No: 39341
gcggtcgcggcgaggtaggtgaggtgaggcggggcgaggtgggcgaggggggcgaggtgaggcggggcgaggcggggcgaggcgaggcggggcgaggtgggcgaggtgggcgaggtgaggcggggcgggtgtcgtcgcgttgggtcgagtttacgattttagttgattcgttcgcggttgtttaatttcgttgaggtttaggacgagggacggggcggtaaattgttatagaggtcgtcgtagatcggtgtgtaatcgaaggtgaagagcgggaaggcgaggatcgaatcgtttttggtgtgcgttgttcgataggaagtttcgaatgggttgtgagtcgtcggtggaggtgttcgggtaggtgtagagttatagtttgcgtttcgtgagtcgaggcgggtaggaggaatagggatttggcggcgatatacgttgggcggaaatttataatgaatagggaaggggggacggttatttatttaaaattggttaaatgaattttagagggagtttcgagaga

SEQ ID NO: 39342 - DNA, 520 bp, Artificial Sequence
  chemically treated genomic DNA (Homo sapiens) CpG-island No: 39342
tctctcgaaactccctctaaaattcatttaaccaattttaaataaataaccgtccccccttccctattcattataaatttccgcccaacgtatatcgccgccaaatccctattcctcctacccgcctcgactcacgaaacgcaaactataactctacacctacccgaacacctccaccgacgactcacaacccattcgaaacttcctatcgaacaacgcacaccaaaaacgattcgatcctcgccttcccgctcttcaccttcgattacacaccgatctacgacgacctctataacaatttaccgccccgtccctcgtcctaaacctcaacgaaattaaacaaccgcgaacgaatcaactaaaatcgtaaactcgacccaacgcgacgacacccgccccgcctcacctcgcccacctcgcccacctcgccccgcctcgcctcgccccgcctcgccccgcctcacctcgcccccctcgcccacctcgccccgcctcacctcacctacctcgccgcgaccgc

SEQ ID NO: 39343 - DNA, 520 bp, Artificial Sequence
  chemically treated genomic DNA (Homo sapiens) CpG-island No: 39343
tttttcggggttttttttgaggtttatttagttagttttgagtgggtgatcgtttttttttttttgtttattgtgaattttcgtttaacgtgtgtcgtcgttaggtttttgttttttttattcgtttcggtttacggggcgtaggttgtggttttgtatttgttcgggtatttttatcggcggtttatagtttattcgggattttttgtcggataacgtatattagaggcgattcggttttcgttttttcgttttttattttcggttgtatatcggtttacggcgatttttgtgataatttgtcgtttcgtttttcgttttgagttttaacgaaattgggtagtcgcgagcgggttagttggagtcgtaagttcggtttagcgcgacgatattcgtttcgttttatttcgtttatttcgtttatttcgtttcgtttcgtttcgtttcgtttcgtttcgttttatttcgtttttttcgtttatttcgtttcgttttattttatttatttcgtcgcggtcgt

SEQ ID NO: 39344 - DNA, 520 bp, Artificial Sequence
  chemically treated genomic DNA (Homo sapiens) CpG-island No: 39344
acgaccgcgacgaaataaataaaataaaacgaaacgaaataaacgaaaaaaacgaaataaaacgaaacgaaacgaaacgaaacgaaacgaaacgaaataaacgaaataaacgaaataaaacgaaacgaatatcgtcgcgctaaaccgaacttacgactccaactaacccgctcgcgactacccaatttcgttaaaactcaaaacgaaaaacgaaacgacaaattatcacaaaaatcgccgtaaaccgatatacaaccgaaaataaaaaacgaaaaaacgaaaaccgaatcgcctctaatatacgttatccgacaaaaaatcccgaataaactataaaccgccgataaaaatacccgaacaaatacaaaaccacaacctacgccccgtaaaccgaaacgaataaaaaaaacaaaaacctaacgacgacacacgttaaacgaaaattcacaataaacaaaaaaaaaaaaacgatcacccactcaaaactaactaaataaacctcaaaaaaaaccccgaaaaa

SEQ ID NO: 39345 - DNA, 525 bp, Artificial Sequence
  chemically treated genomic DNA (Homo sapiens) CpG-island No: 39345
tggttatatgttagagcgtttcgggcgaatgttgaagttcgtattttcgaagacggttttttgagtgttagttggggtagttatcgttttcgagttgataatggcgtagaaaatcgttttaaatagttcggcggtcggttcgaaatcggtagttcggtatgtttagtcgaagatattgattcgaattagggcggaagggttgagttggggaaattcgacgtcgaaaagatgaagtattttcggtaatagggaggtgtacggaaaacgaagttttgcgtcgaaaaaggtaataaagattacggtttgatttttgtcgggtttcggtataatagttttggtagatgcgaagatttgatcgttcgttataattttggtcgaggtaagttttgttaaattcgttttattaatgagcgaggtatttaggtattcggagtggtttttatcgatttttttcgggttagggtcgttggttgaagaagagttatgaaaggatagcgtaggagtttagagtaatttaagggttgg

SEQ ID NO: 39346 - DNA, 525 bp, Artificial Sequence
  chemically treated genomic DNA (Homo sapiens) CpG-island No: 39346
ccaacccttaaattactctaaactcctacgctatcctttcataactcttcttcaaccaacgaccctaacccgaaaaaaatcgataaaaaccactccgaatacctaaatacctcgctcattaataaaacgaatttaacaaaacttacctcgaccaaaattataacgaacgatcaaatcttcgcatctaccaaaactattataccgaaacccgacaaaaatcaaaccgtaatctttattacctttttcgacgcaaaacttcgttttccgtacacctccctattaccgaaaatacttcatcttttcgacgtcgaatttccccaactcaacccttccgccctaattcgaatcaatatcttcgactaaacataccgaactaccgatttcgaaccgaccgccgaactatttaaaacgattttctacgccattatcaactcgaaaacgataactaccccaactaacactcaaaaaaccgtcttcgaaaatacgaacttcaacattcgcccgaaacgctctaacatataacca

SEQ ID NO: 39347 - DNA, 525 bp, Artificial Sequence
  chemically treated genomic DNA (Homo sapiens) CpG-island No: 39347
ttaatttttaggttattttaggtttttgcgttatttttttatggtttttttttaattaacggttttgattcgggaaaggtcggtgaagattatttcggatatttaggtgtttcgtttattgatgaggcggatttgataaagtttgtttcggttagggttgtggcgagcggttaggttttcgtatttgttaaggttgttgtgtcgaagttcggtaagaattagatcgtggtttttgttgtttttttcgacgtagggtttcgtttttcgtgtatttttttgttgtcggaaatattttattttttcgacgtcgagtttttttaatttagttttttcgttttggttcggattaatattttcgattgggtatgtcgaattgtcggtttcgagtcgatcgtcgagttgtttggggcgattttttacgttattgttaattcgaagacggtgattattttagttggtatttagaaaatcgttttcggaagtgcgaattttaatattcgttcggagcgttttgatatatggtta

SEQ ID NO: 39348 - DNA, 525 bp, Artificial Sequence
  chemically treated genomic DNA (Homo sapiens) CpG-island No: 39348
taaccatatatcaaaacgctccgaacgaatattaaaattcgcacttccgaaaacgattttctaaataccaactaaaataatcaccgtcttcgaattaacaataacgtaaaaaatcgccccaaacaactcgacgatcgactcgaaaccgacaattcgacatacccaatcgaaaatattaatccgaaccaaaacgaaaaaactaaattaaaaaaactcgacgtcgaaaaaataaaatatttccgacaacaaaaaaatacacgaaaaacgaaaccctacgtcgaaaaaaacaacaaaaaccacgatctaattcttaccgaacttcgacacaacaaccttaacaaatacgaaaacctaaccgctcgccacaaccctaaccgaaacaaactttatcaaatccgcctcatcaataaacgaaacacctaaatatccgaaataatcttcaccgacctttcccgaatcaaaaccgttaattaaaaaaaaaccataaaaaaataacgcaaaaacctaaaataacctaaaaattaa

SEQ ID NO: 39349 - DNA, 542 bp, Artificial Sequence
  chemically treated genomic DNA (Homo sapiens) CpG-island No: 39349
gtcgatagcggtaatcgtcgttttaatcgtcgcgtttacgacgttcgtttttttcgtttttttcgcgtttatttcgcgtttcgtattcggttttacgttatcgtttattattttgtttttttgttcgcgcgtatatgttcgtatggggcgggatttaatttgaattttttttattttttttttttattttttttacgtcgttatcgtcgagatagggtcgttttttttttatttataaaaatattttttcgagttttttgttttttttttttattttatcgttttttttagtgttttttatcgttatcgttatattgtgtaattattttcgttagtttcgtcgtcgtaagagttattttggttattatttcgcgtcgtcggaattttattaaaatattatttttttggtttttcggtgagtatttttatttttttttatttttagtcggttacgatagtcgtcgtggttgttttttttatttttaattttttttttttatttttttatgtgttatcgtttattatattttaaaaattttaaa

SEQ ID NO: 39350 - DNA, 542 bp, Artificial Sequence
  chemically treated genomic DNA (Homo sapiens) CpG-island No: 39350
tttaaaatttttaaaatataataaacgataacacataaaaaaataaaaaaaaaaaattaaaaataaaaaaaacaaccacgacgactatcgtaaccgactaaaaataaaaaaaaataaaaatactcaccgaaaaaccaaaaaaataatattttaataaaattccgacgacgcgaaataataaccaaaataactcttacgacgacgaaactaacgaaaataattacacaatataacgataacgataaaaaacactaaaaaaaacgataaaataaaaaaaaaaaacaaaaaactcgaaaaaatatttttataaataaaaaaaaaacgaccctatctcgacgataacgacgtaaaaaaaataaaaaaaaaaaataaaaaaaattcaaattaaatcccgccccatacgaacatatacgcgcgaacaaaaaaacaaaataataaacgataacgtaaaaccgaatacgaaacgcgaaataaacgcgaaaaaaacgaaaaaaacgaacgtcgtaaacgcgacgattaaaacgacgattaccgctatcgac

SEQ ID NO: 39351 - DNA, 542 bp, Artificial Sequence
  chemically treated genomic DNA (Homo sapiens) CpG-island No: 39351
tttaggatttttagggtgtgataggcggtgatatatagaggaatagaggagagggattaggggtggagaggataattacgacggttatcgtggtcggttggagatggagaaaaatggagatgtttatcggaggattaagggaatggtgttttggtgggatttcggcgacgcgaggtggtggttaaggtagtttttgcggcggcgaagttaacggaggtggttgtatagtgtggcggtggcggtagagggtattggaggaggcggtgaggtaggaaaaagagataggaggttcgggggagtgtttttataggtgagggggaggcggttttatttcggcggtgacgacgtgggggaggtggagagagagagtgagagggatttaaattaaatttcgttttatgcgggtatgtgcgcgcgggtaggaaggtagagtagtgggcggtgacgtggggtcgggtgcggggcgcgaagtgggcgcgggaggagcggggaaagcgggcgtcgtggacgcggcggttgggacggcggttgtcgttatcggt

SEQ ID NO: 39352 - DNA, 542 bp, Artificial Sequence
  chemically treated genomic DNA (Homo sapiens) CpG-island No: 39352
accgataacgacaaccgccgtcccaaccgccgcgtccacgacgcccgctttccccgctcctcccgcgcccacttcgcgccccgcacccgaccccacgtcaccgcccactactctaccttcctacccgcgcgcacatacccgcataaaacgaaatttaatttaaatccctctcactctctctctccacctcccccacgtcgtcaccgccgaaataaaaccgcctccccctcacctataaaaacactcccccgaacctcctatctctttttcctacctcaccgcctcctccaataccctctaccgccaccgccacactatacaaccacctccgttaacttcgccgccgcaaaaactaccttaaccaccacctcgcgtcgccgaaatcccaccaaaacaccattcccttaatcctccgataaacatctccatttttctccatctccaaccgaccacgataaccgtcgtaattatcctctccacccctaatccctctcctctattcctctatatatcaccgcctatcacaccctaaaaatcctaaa

SEQ ID NO: 39353 - DNA, 680 bp, Artificial Sequence
  chemically treated genomic DNA (Homo sapiens) CpG-island No: 39353
gtcgtcggtcgtcgtgggtttttgtcgtcgttttttagtttttttaaaaggattttcggtgttttttttattcgttcgtcgttattttcgttttcgtttttcgtcgtcggaagcgttttagcgttgtgtgatttagcgtcgtcgtcgtcgtcgtcgttttagtcgtgcgtcgtcgtcgttttagtcgtcgtcgtcgttcgggaaggacgttatcgtggtcgttaagtcgtcgtcgttttcgttcgttttttcgtagtcgttgttgatcgtcggagtatcgtcgtcgtcgtcgattcgatttttttcgtagttttaatttcgacgtcgtcgtcgttcgttgatttttcgtcgtcgttttggttatcggtgagttcgtcgcgtcgttttttattcgttggtgtttttcgttcgcgttttcgcgtcgtcgttcgtcgacgagtaagtgttttcgagtcgtcgagtcgtcgtcggtgttgacgttatcgttgacgttatcgttgacgttattgtcgttgttttcgtagattcgtcgtggattcgattgatttcggtcgttcgttttggataggatcgatttcggtcgttcgttttcgtgaatcgtcgtcgtgcgttcggtttatcgtaaattttagtcgttgacgtaataaattttttttttttttttaaaaataatttattat

SEQ ID NO: 39354 - DNA, 680 bp, Artificial Sequence
  chemically treated genomic DNA (Homo sapiens) CpG-island No: 39354
ataataaattatttttaaaaaaaaaaaaaaaatttattacgtcaacgactaaaatttacgataaaccgaacgcacgacgacgattcacgaaaacgaacgaccgaaatcgatcctatccaaaacgaacgaccgaaatcaatcgaatccacgacgaatctacgaaaacaacgacaataacgtcaacgataacgtcaacgataacgtcaacaccgacgacgactcgacgactcgaaaacacttactcgtcgacgaacgacgacgcgaaaacgcgaacgaaaaacaccaacgaataaaaaacgacgcgacgaactcaccgataaccaaaacgacgacgaaaaatcaacgaacgacgacgacgtcgaaattaaaactacgaaaaaaatcgaatcgacgacgacgacgatactccgacgatcaacaacgactacgaaaaaacgaacgaaaacgacgacgacttaacgaccacgataacgtccttcccgaacgacgacgacgactaaaacgacgacgacgcacgactaaaacgacgacgacgacgacgacgctaaatcacacaacgctaaaacgcttccgacgacgaaaaacgaaaacgaaaataacgacgaacgaataaaaaaaacaccgaaaatccttttaaaaaaactaaaaaacgacgacaaaaacccacgacgaccgacgac

SEQ ID NO: 39355 - DNA, 680 bp, Artificial Sequence
  chemically treated genomic DNA (Homo sapiens) CpG-island No: 39355
ataatgaattatttttgaaaaggaaaaagagatttattgcgttagcggttagggtttgcggtagatcgggcgtacggcggcggtttacgggaacggacggtcgagatcgattttatttaaaacggacggtcgagattaatcgggtttacggcgagtttacgggaatagcgataatgacgttagcgatgacgttagcgatgacgttagtatcggcggcggttcggcggttcgggagtatttgttcgtcggcgaacgacggcgcgaaggcgcgaacggagaatattaacgggtagaggacgacgcggcgaatttatcggtgattaaaacggcggcggaagattaacggacggcgacggcgtcgaagttgaagttgcggagaagatcgggtcgacggcggcgacggtgtttcggcggttaatagcgattgcgaaggggcggacgaggacggcgacgatttggcgattacgatgacgtttttttcgagcgacggcgacgattggaacggcggcggcgtacggttggagcggcggcgacgacggcggcgttaggttatatagcgttaggacgttttcggcgacgagaggcgaagacgagggtggcggcgggcgggtagaggagatatcggggatttttttaaaggggttaggaggcggcggtaaaggtttacggcgatcggcgat

SEQ ID NO: 39356 - DNA, 680 bp, Artificial Sequence
  chemically treated genomic DNA (Homo sapiens) CpG-island No: 39356
atcgccgatcgccgtaaacctttaccgccgcctcctaacccctttaaaaaaatccccgatatctcctctacccgcccgccgccaccctcgtcttcgcctctcgtcgccgaaaacgtcctaacgctatataacctaacgccgccgtcgtcgccgccgctccaaccgtacgccgccgccgttccaatcgtcgccgtcgctcgaaaaaaacgtcatcgtaatcgccaaatcgtcgccgtcctcgtccgccccttcgcaatcgctattaaccgccgaaacaccgtcgccgccgtcgacccgatcttctccgcaacttcaacttcgacgccgtcgccgtccgttaatcttccgccgccgttttaatcaccgataaattcgccgcgtcgtcctctacccgttaatattctccgttcgcgccttcgcgccgtcgttcgccgacgaacaaatactcccgaaccgccgaaccgccgccgatactaacgtcatcgctaacgtcatcgctaacgtcattatcgctattcccgtaaactcgccgtaaacccgattaatctcgaccgtccgttttaaataaaatcgatctcgaccgtccgttcccgtaaaccgccgccgtacgcccgatctaccgcaaaccctaaccgctaacgcaataaatctctttttccttttcaaaaataattcattat

SEQ ID NO: 39357 - DNA, 501 bp, Artificial Sequence
  chemically treated genomic DNA (Homo sapiens) CpG-island No: 39357
attagcgagtcgtgttttttaatcgtaaagagtatcggcgagtagttagtttatatttttttagtatcgtgcgtgggcgagtcgttgttttttttttttattatgaagaacgtcggcgagtcgttggttttttattttttagtattgtatcgattgcgcggtatagcggcgaattatatttttttttttagcgttacgagacgagcgagtcgttgttattttgtttttatttttagcgcgtgttgtcgcgatgatcgtcgttgtttttttttcgcgcgttgtaaacgttattttcgtttttcgagcgcgtcgtcgttttcgtttttcgtgcgcgttattatcgtcgtttttatttttcgttcgcgtcgtcgtggtcgtttttttttacgtacgttatagtcgtcgttatttttttcgcgtatgtagtaggtatcgtttttttcgtgtgtgtggtagtcgtttagataaggttggggataatgttgtagaattagggggtat

SEQ ID NO: 39358 - DNA, 501 bp, Artificial Sequence
  chemically treated genomic DNA (Homo sapiens) CpG-island No: 39358
ataccccctaattctacaacattatccccaaccttatctaaacgactaccacacacacgaaaaaaacgatacctactacatacgcgaaaaaaataacgacgactataacgtacgtaaaaaaaaacgaccacgacgacgcgaacgaaaaataaaaacgacgataataacgcgcacgaaaaacgaaaacgacgacgcgctcgaaaaacgaaaataacgtttacaacgcgcgaaaaaaaaacaacgacgatcatcgcgacaacacgcgctaaaaataaaaacaaaataacaacgactcgctcgtctcgtaacgctaaaaaaaaaaatataattcgccgctataccgcgcaatcgatacaatactaaaaaataaaaaaccaacgactcgccgacgttcttcataataaaaaaaaaaaacaacgactcgcccacgcacgatactaaaaaaatataaactaactactcgccgatactctttacgattaaaaaacacgactcgctaat

SEQ ID NO: 39359 - DNA, 501 bp, Artificial Sequence
  chemically treated genomic DNA (Homo sapiens) CpG-island No: 39359
atgttttttgattttataatattgtttttaattttatttaggcggttgttatatatacggagggggcgatgtttgttgtatgcgcgaagggggtggcggcggttgtggcgtgcgtgggagggagcggttacggcggcgcgagcggaaggtgggagcggcggtggtggcgcgtacgaaggacgggagcggcggcgcgttcggagggcgggagtggcgtttgtagcgcgcggagagagagtaacggcggttatcgcggtagtacgcgttgagggtgggagtagggtggtagcggttcgttcgtttcgtggcgttgagaagggaggtgtggttcgtcgttgtgtcgcgtagtcgatgtagtgttgagaagtgagaggttagcggttcgtcggcgttttttatgatggggaggagaggtagcggttcgtttacgtacggtgttgagaaagtataggttagttgttcgtcggtgttttttgcgattgaggagtacggttcgttggt

SEQ ID NO: 39360 - DNA, 501 bp, Artificial Sequence
  chemically treated genomic DNA (Homo sapiens) CpG-island No: 39360
accaacgaaccgtactcctcaatcgcaaaaaacaccgacgaacaactaacctatactttctcaacaccgtacgtaaacgaaccgctacctctcctccccatcataaaaaacgccgacgaaccgctaacctctcacttctcaacactacatcgactacgcgacacaacgacgaaccacacctcccttctcaacgccacgaaacgaacgaaccgctaccaccctactcccaccctcaacgcgtactaccgcgataaccgccgttactctctctccgcgcgctacaaacgccactcccgccctccgaacgcgccgccgctcccgtccttcgtacgcgccaccaccgccgctcccaccttccgctcgcgccgccgtaaccgctccctcccacgcacgccacaaccgccgccacccccttcgcgcatacaacaaacatcgccccctccgtatatataacaaccgcctaaataaaattaaaaacaatattataaaatcaaaaaacat

SEQ ID NO: 39361 - DNA, 950 bp, Artificial Sequence
  chemically treated genomic DNA (Homo sapiens) CpG-island No: 39361
gcggcgaacggcggtacgcggcggcgacggcggtacggtttcgaagcgaggcggtgcggtaataacggcggtggtagtatgggagagagaaagggatgggaggggagttttttatcgacggcgaacggcgcgacggacggcggttgtagacggcgagagtcggacgggtttcgagaggatttaaggaataaaatgggggaagttagagagggagagagagattatcgagggtaggaacgtcggtcgaaggaggtaattatggtcgaatttatcggcgtatgggacggacggggtttcggcgacggacggcgacgatcgggcgatggttagggtgttttacgcgatggcgaatgcggtggtgtagacggcgaggtttggcgtggcggttagcgatggttagcggcggttggagagcggaaaagttgtggcggtggtgggtgtacggtgttagagtaaaagagggttcgggcggagttcggtgaaatggggaaaaagagagagggagtggcggtggtgtttgaagaggggttcggacgtggttaagagcggttcgatttcgtcggtcgatatggggaggtggaggtgtagagagaggcgggatttaaaaattgaatttcggttatttcgaacgcgggcgcggcgggagagagaggggagtgggcgcggtagatgcggcgtacgcgcgggcgtggtcgatatggttcggaggaggcggaggtatgggcgcggcggcggttgcgggcgcggcggcgtcggttggaggaaggggacgggttcgataggtggggtttatttgtcggcgtttcgaggagagagggaggggcggtttgggtcggtttataaggaggagggcgcgcgcggcggggtggattgggtcgatggtttaagaagaggaaaaggaggggaaaggaaaaaaagaaaaagaaaaggaagaaaagaattttttggga

SEQ ID NO: 39362 - DNA, 950 bp, Artificial Sequence
  chemically treated genomic DNA (Homo sapiens) CpG-island No: 39362
tcccaaaaaattcttttcttccttttctttttctttttttcctttcccctccttttcctcttcttaaaccatcgacccaatccaccccgccgcgcgcgccctcctccttataaaccgacccaaaccgcccctccctctctcctcgaaacgccgacaaataaaccccacctatcgaacccgtccccttcctccaaccgacgccgccgcgcccgcaaccgccgccgcgcccatacctccgcctcctccgaaccatatcgaccacgcccgcgcgtacgccgcatctaccgcgcccactcccctctctctcccgccgcgcccgcgttcgaaataaccgaaattcaatttttaaatcccgcctctctctacacctccacctccccatatcgaccgacgaaatcgaaccgctcttaaccacgtccgaacccctcttcaaacaccaccgccactccctctctctttttccccatttcaccgaactccgcccgaaccctcttttactctaacaccgtacacccaccaccgccacaacttttccgctctccaaccgccgctaaccatcgctaaccgccacgccaaacctcgccgtctacaccaccgcattcgccatcgcgtaaaacaccctaaccatcgcccgatcgtcgccgtccgtcgccgaaaccccgtccgtcccatacgccgataaattcgaccataattacctccttcgaccgacgttcctaccctcgataatctctctctccctctctaacttcccccattttattccttaaatcctctcgaaacccgtccgactctcgccgtctacaaccgccgtccgtcgcgccgttcgccgtcgataaaaaactcccctcccatccctttctctctcccatactaccaccgccgttattaccgcaccgcctcgcttcgaaaccgtaccgccgtcgccgccgcgtaccgccgttcgccgc

SEQ ID NO: 39363 - DNA, 950 bp, Artificial Sequence
  chemically treated genomic DNA (Homo sapiens) CpG-island No: 39363
ttttagggaatttttttttttttttttttttttttttttttttttttttttttttttttttttttgggttatcggtttagtttatttcgtcgcgcgcgtttttttttttgtgggtcggtttaagtcgttttttttttttttttcgggacgtcgataggtgggttttatttgtcggattcgttttttttttttagtcggcgtcgtcgcgttcgtaatcgtcgtcgcgtttatgttttcgtttttttcgggttatgtcggttacgttcgcgcgtgcgtcgtatttatcgcgtttatttttttttttttttcgtcgcgttcgcgttcgagatggtcgggatttaatttttgaatttcgtttttttttgtatttttatttttttatgtcggtcggcgaaatcgggtcgtttttggttacgttcgaatttttttttaagtattatcgttattttttttttttttttttttattttatcgagtttcgttcgagtttttttttgttttagtatcgtgtatttattatcgttataattttttcgttttttagtcgtcgttagttatcgttagtcgttacgttaaatttcgtcgtttatattatcgtattcgttatcgcgtgaagtattttggttatcgttcgatcgtcgtcgttcgtcgtcggaatttcgttcgttttatgcgtcggtgagttcggttatggttgtttttttcggtcggcgtttttattttcgatgatttttttttttttttttaattttttttattttgttttttaggttttttcgaagttcgttcgattttcgtcgtttgtaatcgtcgttcgtcgcgtcgttcgtcgtcggtgaggaattttttttttattttttttttttttttatattgttatcgtcgttattgtcgtatcgtttcgtttcggggtcgtgtcgtcgtcgtcgtcgcgtatcgtcgttcgtcgt

SEQ ID NO: 39364 - DNA, 950 bp, Artificial Sequence
  chemically treated genomic DNA (Homo sapiens) CpG-island No: 39364
acgacgaacgacgatacgcgacgacgacgacgacacgaccccgaaacgaaacgatacgacaataacgacgataacaatataaaaaaaaaaaaaaaataaaaaaaaaattcctcaccgacgacgaacgacgcgacgaacgacgattacaaacgacgaaaatcgaacgaacttcgaaaaaacctaaaaaacaaaataaaaaaaattaaaaaaaaaaaaaaaaatcatcgaaaataaaaacgccgaccgaaaaaaacaaccataaccgaactcaccgacgcataaaacgaacgaaattccgacgacgaacgacgacgatcgaacgataaccaaaatacttcacgcgataacgaatacgataatataaacgacgaaatttaacgtaacgactaacgataactaacgacgactaaaaaacgaaaaaattataacgataataaatacacgatactaaaacaaaaaaaaactcgaacgaaactcgataaaataaaaaaaaaaaaaaaaaaaataacgataatacttaaaaaaaaattcgaacgtaaccaaaaacgacccgatttcgccgaccgacataaaaaaataaaaatacaaaaaaaaacgaaattcaaaaattaaatcccgaccatctcgaacgcgaacgcgacgaaaaaaaaaaaaaaataaacgcgataaatacgacgcacgcgcgaacgtaaccgacataacccgaaaaaaacgaaaacataaacgcgacgacgattacgaacgcgacgacgccgactaaaaaaaaaaaacgaatccgacaaataaaacccacctatcgacgtcccgaaaaaaaaaaaaaaaacgacttaaaccgacccacaaaaaaaaaaacgcgcgcgacgaaataaactaaaccgataacccaaaaaaaaaaaaaaaaaaaaaaaaaaaaaaaaaaaaaaaaaaaaaaaaaaaaaaattccctaaaa

SEQ ID NO: 39365 - DNA, 515 bp, Artificial Sequence
  chemically treated genomic DNA (Homo sapiens) CpG-island No: 39365
  unsure (210)
ggttagcggttcgggagaggggggaaaagggcgtcggtacgcgaggtttatcggttagcgatttaagggggagggcggtttattcgcggatcgggattacgcgggtggtttatcgtcggtttacgggacgacggtttagatcgttttcggggtcgatcggacgggcgacgacgattcggttcggtttggtttaaggtcggtttatcggtngagcgaatgacgacggcgcgcgtcgaacgcgttgtcggcgacggtattcggcggcggaggcgacggcgtaaaggcgacgcgaaggcggttgtattaagcggcggttaggaaggagagggaggggaatggatgggagaggaaattttatcgaggatggtcggcgcggaggaaaacgacggcgaacggcgacggtaagttatgggaggacgacggtaatcggcggacgggtttcggggtgttttaaggaaggaagagagagagattagagagagggagatgaattacggcgatcggtatttatgggt

SEQ ID NO: 39366 - DNA, 515 bp, Artificial Sequence
  chemically treated genomic DNA (Homo sapiens) CpG-island No: 39366
  unsure (306)
acccataaataccgatcgccgtaattcatctccctctctctaatctctctctcttccttccttaaaacaccccgaaacccgtccgccgattaccgtcgtcctcccataacttaccgtcgccgttcgccgtcgttttcctccgcgccgaccatcctcgataaaatttcctctcccatccattcccctccctctccttcctaaccgccgcttaatacaaccgccttcgcgtcgcctttacgccgtcgcctccgccgccgaataccgtcgccgacaacgcgttcgacgcgcgccgtcgtcattcgctcnaccgataaaccgaccttaaaccaaaccgaaccgaatcgtcgtcgcccgtccgatcgaccccgaaaacgatctaaaccgtcgtcccgtaaaccgacgataaaccacccgcgtaatcccgatccgcgaataaaccgccctcccccttaaatcgctaaccgataaacctcgcgtaccgacgcccttttcccccctctcccgaaccgctaacc

SEQ ID NO: 39367 - DNA, 515 bp, Artificial Sequence
  chemically treated genomic DNA (Homo sapiens) CpG-island No: 39367
  unsure (306)
gtttatgaatgtcggtcgtcgtggtttatttttttttttttaattttttttttttttttttttaggatatttcgaaattcgttcgtcggttgtcgtcgtttttttatggtttgtcgtcgtcgttcgtcgtcgttttttttcgcgtcggttattttcggtgaggtttttttttttatttattttttttttttttttttttagtcgtcgtttagtgtagtcgttttcgcgtcgtttttgcgtcgtcgttttcgtcgtcggatgtcgtcgtcggtaacgcgttcggcgcgcgtcgtcgttattcgtttnatcggtaggtcggttttgagttaagtcgagtcgggtcgtcgtcgttcgttcgatcgatttcgagggcgatttgggtcgtcgtttcgtggatcggcggtggattattcgcgtggtttcggttcgcgggtgaatcgtttttttttttgagtcgttgatcggtgggtttcgcgtgtcggcgttttttttttttttttttcgagtcgttgatt

SEQ ID NO: 39368 - DNA, 515 bp, Artificial Sequence
  chemically treated genomic DNA (Homo sapiens) CpG-island No: 39368
  unsure (210)
aatcaacgactcgaaaaaaaaaaaaaaaaaacgccgacacgcgaaacccaccgatcaacgactcaaaaaaaaaaacgattcacccgcgaaccgaaaccacgcgaataatccaccgccgatccacgaaacgacgacccaaatcgccctcgaaatcgatcgaacgaacgacgacgacccgactcgacttaactcaaaaccgacctaccgatnaaacgaataacgacgacgcgcgccgaacgcgttaccgacgacgacatccgacgacgaaaacgacgacgcaaaaacgacgcgaaaacgactacactaaacgacgactaaaaaaaaaaaaaaaaaaaataaataaaaaaaaaaacctcaccgaaaataaccgacgcgaaaaaaaacgacgacgaacgacgacgacaaaccataaaaaaacgacgacaaccgacgaacgaatttcgaaatatcctaaaaaaaaaaaaaaaaaaaattaaaaaaaaaaaaataaaccacgacgaccgacattcataaac

SEQ ID NO: 39369 - DNA, 1192 bp, Artificial Sequence
  chemically treated genomic DNA (Homo sapiens) CpG-island No: 39369
acgcgttagtttttcggtttacggtggatcgggagtacgtagttggcggcggtcggcgtcgtgggttttacgcgttagtcgtattcgcgggcgcgggcggttgacggtcgggttttatatggtagtcgcgagggcgcgttcgaaggcggtttcgtcggtacggtcgacgggaggcggtacgatcgcgtttcgatggttatcgtcggcgattatcggcgcggcggagcggcgttcgagagagcggagaggagagggaagcgaaagggacggtttacggtttatttcgggataacgacgacgacgagaacggcggtcggagcggaggaaacgcggcggcgcggttcgggatgacgatgacgacggtgtttcggcggtcggcgagcgaaacggaggcgcgggcgaggtcggcggtaatacggcgaagtcgagggaggtgtcgtcgagtcgggaggaagatcggagcgacgacggcggcgaatcggagcggaggaaggcgacggcgcggttcgggatgtcgagggcgacggtgtttcggtagtcggcggacgaagcggagcggcggacggggtcggcggtaatacggcgaagcggatggaggtgtcgtcgagtcgggcggaggatcggagcgacgtcggcggcgaatcgaaggtcggcggcgacggcggagagagaggagtacggcgcgagtacggattcgacggcgagagcgagcggcgagcggtggaaacggaagagcggagttcggggagtaattatatagtatcgagagggggagaacgcggtcggagaggaaggaaacgggcgcggggatttcgggttttatagatgtcgtcggcgaggattacgggatgaattcggacggattcgagggagagagagaggggaaatcgggggaaacgggggagggaaacgcggggaataatttttttttttttaaggcgcgcggggaaggcgggatgcggcgagattcgcggcggcggcggcgttagggtacgggcgagcggcgggagcggcgggaggaaggcgatgataggtgggttttattcgttagcgagggtggcgggcgggttcgtttgttagcggcgcgcgtgcgaggaggaggtcgatgggtcgtgggggaagagagagagagggagggattgggtcgagtcggtttaagaggggaaggggggggaaaagaattttttttaag

SEQ ID NO: 39370 - DNA, 1192 bp, Artificial Sequence
  chemically treated genomic DNA (Homo sapiens) CpG-island No: 39370
cttaaaaaaaattcttttccccccccttcccctcttaaaccgactcgacccaatccctccctctctctctcttcccccacgacccatcgacctcctcctcgcacgcgcgccgctaacaaacgaacccgcccgccaccctcgctaacgaataaaacccacctatcatcgccttcctcccgccgctcccgccgctcgcccgtaccctaacgccgccgccgccgcgaatctcgccgcatcccgccttccccgcgcgccttaaaaaaaaaaaaattattccccgcgtttccctcccccgtttcccccgatttcccctctctctctccctcgaatccgtccgaattcatcccgtaatcctcgccgacgacatctataaaacccgaaatccccgcgcccgtttccttcctctccgaccgcgttctccccctctcgatactatataattactccccgaactccgctcttccgtttccaccgctcgccgctcgctctcgccgtcgaatccgtactcgcgccgtactcctctctctccgccgtcgccgccgaccttcgattcgccgccgacgtcgctccgatcctccgcccgactcgacgacacctccatccgcttcgccgtattaccgccgaccccgtccgccgctccgcttcgtccgccgactaccgaaacaccgtcgccctcgacatcccgaaccgcgccgtcgccttcctccgctccgattcgccgccgtcgtcgctccgatcttcctcccgactcgacgacacctccctcgacttcgccgtattaccgccgacctcgcccgcgcctccgtttcgctcgccgaccgccgaaacaccgtcgtcatcgtcatcccgaaccgcgccgccgcgtttcctccgctccgaccgccgttctcgtcgtcgtcgttatcccgaaataaaccgtaaaccgtccctttcgcttccctctcctctccgctctctcgaacgccgctccgccgcgccgataatcgccgacgataaccatcgaaacgcgatcgtaccgcctcccgtcgaccgtaccgacgaaaccgccttcgaacgcgccctcgcgactaccatataaaacccgaccgtcaaccgcccgcgcccgcgaatacgactaacgcgtaaaacccacgacgccgaccgccgccaactacgtactcccgatccaccgtaaaccgaaaaactaacgcgt

SEQ ID NO: 39371 - DNA, 1192 bp, Artificial Sequence
  chemically treated genomic DNA (Homo sapiens) CpG-island No: 39371
tttaaaagaagtttttttttttttttttttttttttgggtcggttcggtttagtttttttttttttttttttttttttacggtttatcggtttttttttcgtacgcgcgtcgttgataggcgggttcgttcgttattttcgttgacgggtggggtttatttgttatcgtttttttttcgtcgttttcgtcgttcgttcgtgttttagcgtcgtcgtcgtcgcgaatttcgtcgtatttcgtttttttcgcgcgttttaaagagggggaaattatttttcgcgtttttttttttcgtttttttcgattttttttttttttttttttcggattcgttcggatttatttcgtaattttcgtcggcgatatttatggagttcgagattttcgcgttcgtttttttttttttcggtcgcgttttttttttttcggtgttatataattgtttttcgagtttcgttttttcgtttttatcgttcgtcgttcgttttcgtcgtcggattcgtgttcgcgtcgtgttttttttttttcgtcgtcgtcgtcgattttcggttcgtcgtcgacgtcgtttcggtttttcgttcgattcggcgatatttttattcgtttcgtcgtgttgtcgtcgatttcgttcgtcgtttcgtttcgttcgtcggttgtcggagtatcgtcgttttcggtatttcgaatcgcgtcgtcgttttttttcgtttcggttcgtcgtcgtcgtcgtttcggtttttttttcgattcggcgatatttttttcggtttcgtcgtgttgtcgtcgatttcgttcgcgttttcgtttcgttcgtcgatcgtcggagtatcgtcgttatcgttatttcgaatcgcgtcgtcgcgtttttttcgtttcggtcgtcgttttcgtcgtcgtcgttgtttcggggtgagtcgtggatcgtttttttcgtttttttttttttttcgttttttcgggcgtcgtttcgtcgcgtcgatggtcgtcggcggtgattatcggggcgcggtcgtgtcgtttttcgtcggtcgtgtcggcgaggtcgttttcgggcgcgttttcgcggttgttatgtggggttcggtcgttagtcgttcgcgttcgcgggtgcggttgacgcgtgggatttacggcgtcgatcgtcgttagttgcgtgttttcggtttatcgtggatcgagaggttgacgcgt

SEQ ID NO: 39372 - DNA, 1192 bp, Artificial Sequence
  chemically treated genomic DNA (Homo sapiens) CpG-island No: 39372
acgcgtcaacctctcgatccacgataaaccgaaaacacgcaactaacgacgatcgacgccgtaaatcccacgcgtcaaccgcacccgcgaacgcgaacgactaacgaccgaaccccacataacaaccgcgaaaacgcgcccgaaaacgacctcgccgacacgaccgacgaaaaacgacacgaccgcgccccgataatcaccgccgacgaccatcgacgcgacgaaacgacgcccgaaaaaacgaaaaaaaaaaaaaaacgaaaaaaacgatccacgactcaccccgaaacaacgacgacgacgaaaacgacgaccgaaacgaaaaaaacgcgacgacgcgattcgaaataacgataacgacgatactccgacgatcgacgaacgaaacgaaaacgcgaacgaaatcgacgacaacacgacgaaaccgaaaaaaatatcgccgaatcgaaaaaaaaaccgaaacgacgacgacgacgaaccgaaacgaaaaaaaacgacgacgcgattcgaaataccgaaaacgacgatactccgacaaccgacgaacgaaacgaaacgacgaacgaaatcgacgacaacacgacgaaacgaataaaaatatcgccgaatcgaacgaaaaaccgaaacgacgtcgacgacgaaccgaaaatcgacgacgacgacgaaaaaaaaaaaacacgacgcgaacacgaatccgacgacgaaaacgaacgacgaacgataaaaacgaaaaaacgaaactcgaaaaacaattatataacaccgaaaaaaaaaaaacgcgaccgaaaaaaaaaaaaacgaacgcgaaaatctcgaactccataaatatcgccgacgaaaattacgaaataaatccgaacgaatccgaaaaaaaaaaaaaaaaaaaatcgaaaaaaacgaaaaaaaaaaacgcgaaaaataatttccccctctttaaaacgcgcgaaaaaaacgaaatacgacgaaattcgcgacgacgacgacgctaaaacacgaacgaacgacgaaaacgacgaaaaaaaaacgataacaaataaaccccacccgtcaacgaaaataacgaacgaacccgcctatcaacgacgcgcgtacgaaaaaaaaaccgataaaccgtaaaaaaaaaaaaaaaaaaaaaaaaactaaaccgaaccgacccaaaaaaaaaaaaaaaaaaaaaaaaacttcttttaaa

SEQ ID NO: 39373 - DNA, 1213 bp, Artificial Sequence
  chemically treated genomic DNA (Homo sapiens) CpG-island No: 39373
cgtcgttgttcgtttaggttttaaaggagagtcgagattgagtttttattcggtaaaatttttagaggtgatgggacgttacgataatatttttaagagggaatgtaacgttcgaaagcgatgttgttgttggtttaattaagattaggttgggtttttatttatcgttcgttatttgtttatttattaatgtcgtcgtaatgtttcgttacgatcgaaatttttattagtttatgggtattgaatcggtattaattattggttagttttatcggtttttttgtcgttagttttttgtagttatagcgtcggcgtttcgtattaacggtcgggacgatttttgtcgtcgttcgtatcgaaagttttcggtattattcgtatcgtcgtcgtcgtcggttatgttattacgtcgtttttttttttatgtatcgtaacggtttgttatcgttattagtcgtgtttttaaggtatttacgtttttatgttattagcgttgtgttttttgtaatcgatgacgttattatgtcgatttttcgttgttattacgtgttttttgtataagtagtttagttcgtcgttagttttttttttttatatttattttcggttgttggtattgttcgcgtgttagtacgtgcgttcgtcgtttttgtcgttagtcgttagatttggttaagggggtttaaatttggcggtgtttattacggtcgtcgttgtttcgtcgttatcgttgttgtaattttgtcgtcggtcgtttttttttcgtttgtttttatcggtgtttcgcgtttacggatgcggtgaaagtttattatcgtcgtcgttttaattttcgtttttatttttggttttcgttatttatcgtgtatcgggttgtttgtattatttttttttatgcgtttttcgtttatagtatttttattcgtgcgtcggtttcgatattagcgtcgttttggtcggttttcgtttttgtgtttgtcgcgagtttcgtcgtcgtcgttttcgtgagtcgtcgttttgttagtcgtttatttaggtggtagcgaggtagaggaagggggcgaagatgggtggcggcggtggttagggttttattgttcgagtcgtttaacgcgggggtcgacgcgggggttcgatcgtgtggatgtaatagttaattaatttttaagtttggttagtttttaagttttgagatgagatgtgatggtcggtt

SEQ ID NO: 39374 - DNA, 1213 bp, Artificial Sequence
  chemically treated genomic DNA (Homo sapiens) CpG-island No: 39374
aaccgaccatcacatctcatctcaaaacttaaaaactaaccaaacttaaaaattaattaactattacatccacacgatcgaacccccgcgtcgacccccgcgttaaacgactcgaacaataaaaccctaaccaccgccgccacccatcttcgcccccttcctctacctcgctaccacctaaataaacgactaacaaaacgacgactcacgaaaacgacgacgacgaaactcgcgacaaacacaaaaacgaaaaccgaccaaaacgacgctaatatcgaaaccgacgcacgaataaaaatactataaacgaaaaacgcataaaaaaaaataatacaaacaacccgatacacgataaataacgaaaaccaaaaataaaaacgaaaattaaaacgacgacgataataaactttcaccgcatccgtaaacgcgaaacaccgataaaaacaaacgaaaaaaaaacgaccgacgacaaaattacaacaacgataacgacgaaacaacgacgaccgtaataaacaccgccaaatttaaacccccttaaccaaatctaacgactaacgacaaaaacgacgaacgcacgtactaacacgcgaacaataccaacaaccgaaaataaatataaaaaaaaaaaactaacgacgaactaaactacttatacaaaaaacacgtaataacaacgaaaaatcgacataataacgtcatcgattacaaaaaacacaacgctaataacataaaaacgtaaataccttaaaaacacgactaataacgataacaaaccgttacgatacataaaaaaaaaaacgacgtaataacataaccgacgacgacgacgatacgaataataccgaaaactttcgatacgaacgacgacaaaaatcgtcccgaccgttaatacgaaacgccgacgctataactacaaaaaactaacgacaaaaaaaccgataaaactaaccaataattaataccgattcaatacccataaactaataaaaatttcgatcgtaacgaaacattacgacgacattaataaataaacaaataacgaacgataaataaaaacccaacctaatcttaattaaaccaacaacaacatcgctttcgaacgttacattccctcttaaaaatattatcgtaacgtcccatcacctctaaaaattttaccgaataaaaactcaatctcgactctcctttaaaacctaaacgaacaacgacg

SEQ ID NO: 39375 - DNA, 1213 bp, Artificial Sequence
  chemically treated genomic DNA (Homo sapiens) CpG-island No: 39375
aatcggttattatattttattttaagatttgagaattaattagatttgagaattaattaattgttgtatttatacgatcgggttttcgcgtcggttttcgcgttgggcgattcgggtagtggaattttagttatcgtcgttatttattttcgttttttttttttgtttcgttgttatttgagtgagcggttggtaaagcggcggtttacgagaacggcggcggcggggttcgcggtaggtataaaggcggaggtcggttagagcggcgttgatgtcgaggtcggcgtacgggtggaggtgttgtggacggagagcgtatgggagaaggtggtgtagatagttcgatgtacggtggatgacgggggttagagatggaggcggggattggggcggcggcggtggtgggtttttatcgtattcgtgagcgcgaagtatcggtggaggtaggcgaggagaaggcggtcggcggtagggttgtagtagcggtggcggcgaggtagcggcggtcgtggtgggtatcgttagatttggatttttttggttagatttggcggttgacggtagggacggcgggcgtacgtgttggtacgcgagtaatgttagtagtcggaggtggatgtggggagaggaaattggcgacgggttgggttgtttgtgtagagggtacgtgatggtaacgggaggtcggtatggtgacgttatcggttgtaaggagtatagcgttggtggtatggaggcgtggatgttttggaggtacggttggtgacggtgataggtcgttgcggtgtatggaggagaggacggcgtggtgatatggtcggcgacggcggcggtgcgggtagtgtcgagagttttcggtacgagcgacggtagaagtcgtttcgatcgttggtgcggagcgtcgacgttgtgattatagggagttggcggtagggaggtcggtgaagttggttagtggttggtgtcggtttagtgtttatgagttgatggaggtttcgatcgtggcggagtattgcggcgatattggtggatagataggtggcggacgatgggtgaaaatttagtttggttttggttgggttagtaataatatcgttttcgagcgttgtatttttttttgagggtgttgtcgtgacgttttattatttttaggggttttgtcgggtaaaaatttagtttcggtttttttttgaggtttggacggataacggcg

SEQ ID NO: 39376 - DNA, 1213 bp, Artificial Sequence
  chemically treated genomic DNA (Homo sapiens) CpG-island No: 39376
cgccgttatccgtccaaacctcaaaaaaaaaccgaaactaaatttttacccgacaaaacccctaaaaataataaaacgtcacgacaacaccctcaaaaaaaaatacaacgctcgaaaacgatattattactaacccaaccaaaaccaaactaaattttcacccatcgtccgccacctatctatccaccaatatcgccgcaatactccgccacgatcgaaacctccatcaactcataaacactaaaccgacaccaaccactaaccaacttcaccgacctccctaccgccaactccctataatcacaacgtcgacgctccgcaccaacgatcgaaacgacttctaccgtcgctcgtaccgaaaactctcgacactacccgcaccgccgccgtcgccgaccatatcaccacgccgtcctctcctccatacaccgcaacgacctatcaccgtcaccaaccgtacctccaaaacatccacgcctccataccaccaacgctatactccttacaaccgataacgtcaccataccgacctcccgttaccatcacgtaccctctacacaaacaacccaacccgtcgccaatttcctctccccacatccacctccgactactaacattactcgcgtaccaacacgtacgcccgccgtccctaccgtcaaccgccaaatctaaccaaaaaaatccaaatctaacgatacccaccacgaccgccgctacctcgccgccaccgctactacaaccctaccgccgaccgccttctcctcgcctacctccaccgatacttcgcgctcacgaatacgataaaaacccaccaccgccgccgccccaatccccgcctccatctctaacccccgtcatccaccgtacatcgaactatctacaccaccttctcccatacgctctccgtccacaacacctccacccgtacgccgacctcgacatcaacgccgctctaaccgacctccgcctttatacctaccgcgaaccccgccgccgccgttctcgtaaaccgccgctttaccaaccgctcactcaaataacaacgaaacaaaaaaaaaaaacgaaaataaataacgacgataactaaaattccactacccgaatcgcccaacgcgaaaaccgacgcgaaaacccgatcgtataaatacaacaattaattaattctcaaatctaattaattctcaaatcttaaaataaaatataataaccgatt

SEQ ID NO: 39377 - DNA, 850 bp, Artificial Sequence
  chemically treated genomic DNA (Homo sapiens) CpG-island No: 39377
cgtcgcgatattattttttgtcgttttttttttttttacgttcgtttaagcggttcgatggaaattacgcggtcgtaaggacgacggcggcgcggggttttttttttcgaggtcgcgacgtttggagtcgataatttcgatttagttttaaggcgacgataattatagtagtgacgtggtgaggaggcggagttaatgacgattgaaggcggtagcggcggtgcggattcggcgtttttttggtgtggatttagcgtgggtgtcgtttcgagcgttggcggtggtgaagtacgtggaggcggtagggtgttcgagtttcgatttttaggcgataaggcggtaaggtgcggtcgtgtggtgttggtggtagtatggtcgtatggaggcggaagcggtggcgcggtcgtgtggaggtagaggttcgattatatggaggtggtcgtacggtcgtgcgaaggtggaggcggtgaagtaatttggttgatgttacgttggtaggaggaggagtaacggttggttggaggtagttcgcgtatagtggagcgattggcgatagtagaggtcggtgaggcgcggttggtggcggaggaggtggtcgcggtgcgtggaggcgtaattaaattgtaagtgcggcgcgatgtggtttgtaggcgtggaggcggtggtcggcgtagcgggaagagagaggtttttgttggtggtcgatggtttagtgaggcgtaattggtggaagcgcgcggatattagtcggcggggggcgtcggtgtaatggtgtttatatattagcggaggtttagatggcggtggagaaatggtgtttttgtgatagatcggtaggtgaaaatttagt

SEQ ID NO: 39378 - DNA, 850 bp, Artificial Sequence
  chemically treated genomic DNA (Homo sapiens) CpG-island No: 39378
actaaattttcacctaccgatctatcacaaaaacaccatttctccaccgccatctaaacctccgctaatatataaacaccattacaccgacgccccccgccgactaatatccgcgcgcttccaccaattacgcctcactaaaccatcgaccaccaacaaaaacctctctcttcccgctacgccgaccaccgcctccacgcctacaaaccacatcgcgccgcacttacaatttaattacgcctccacgcaccgcgaccacctcctccgccaccaaccgcgcctcaccgacctctactatcgccaatcgctccactatacgcgaactacctccaaccaaccgttactcctcctcctaccaacgtaacatcaaccaaattacttcaccgcctccaccttcgcacgaccgtacgaccacctccatataatcgaacctctacctccacacgaccgcgccaccgcttccgcctccatacgaccatactaccaccaacaccacacgaccgcaccttaccgccttatcgcctaaaaatcgaaactcgaacaccctaccgcctccacgtacttcaccaccgccaacgctcgaaacgacacccacgctaaatccacaccaaaaaaacgccgaatccgcaccgccgctaccgccttcaatcgtcattaactccgcctcctcaccacgtcactactataattatcgtcgccttaaaactaaatcgaaattatcgactccaaacgtcgcgacctcgaaaaaaaaaaccccgcgccgccgtcgtccttacgaccgcgtaatttccatcgaaccgcttaaacgaacgtaaaaaaaaaaaaaacgacaaaaaataatatcgcgacg

SEQ ID NO: 39379 - DNA, 850 bp, Artificial Sequence
  chemically treated genomic DNA (Homo sapiens) CpG-island No: 39379
gttgggtttttatttgtcgatttattatagaagtattatttttttatcgttatttaaattttcgttggtgtgtgggtattattgtatcggcgtttttcgtcggttagtgttcgcgcgtttttattagttgcgttttattaggttatcggttattagtagaggttttttttttttcgttgcgtcggttatcgtttttacgtttgtaagttatatcgcgtcgtatttgtaatttggttgcgtttttacgtatcgcggttatttttttcgttattagtcgcgttttatcggtttttgttgtcgttagtcgttttattatgcgcgagttgtttttagttagtcgttgtttttttttttgttagcgtggtattagttagattgttttatcgtttttattttcgtacggtcgtgcgattatttttatatggtcgagtttttgtttttatacggtcgcgttatcgttttcgtttttatacgattatgttgttattagtattatacggtcgtattttgtcgttttgtcgtttgggggtcggagttcggatattttgtcgtttttacgtgttttattatcgttagcgttcgggacggtatttacgttagatttatattaggagagcgtcggattcgtatcgtcgttgtcgtttttagtcgttattggtttcgtttttttattacgttattgttgtggttgtcgtcgttttggaattaggtcggggttgtcggttttaagcgtcgcgatttcgggggagaaggtttcgcgtcgtcgtcgtttttgcggtcgcgtggtttttatcgggtcgtttgggcgagcgtaggaggaaggagggcggtaaggggtggtgtcgcggcg

SEQ ID NO: 39380 - DNA, 850 bp, Artificial Sequence
  chemically treated genomic DNA (Homo sapiens) CpG-island No: 39380
cgccgcgacaccaccccttaccgccctccttcctcctacgctcgcccaaacgacccgataaaaaccacgcgaccgcaaaaacgacgacgacgcgaaaccttctcccccgaaatcgcgacgcttaaaaccgacaaccccgacctaattccaaaacgacgacaaccacaacaataacgtaataaaaaaacgaaaccaataacgactaaaaacgacaacgacgatacgaatccgacgctctcctaatataaatctaacgtaaataccgtcccgaacgctaacgataataaaacacgtaaaaacgacaaaatatccgaactccgacccccaaacgacaaaacgacaaaatacgaccgtataatactaataacaacataatcgtataaaaacgaaaacgataacgcgaccgtataaaaacaaaaactcgaccatataaaaataatcgcacgaccgtacgaaaataaaaacgataaaacaatctaactaataccacgctaacaaaaaaaaaaacaacgactaactaaaaacaactcgcgcataataaaacgactaacgacaacaaaaaccgataaaacgcgactaataacgaaaaaaataaccgcgatacgtaaaaacgcaaccaaattacaaatacgacgcgatataacttacaaacgtaaaaacgataaccgacgcaacgaaaaaaaaaaaacctctactaataaccgataacctaataaaacgcaactaataaaaacgcgcgaacactaaccgacgaaaaacgccgatacaataatacccacacaccaacgaaaatttaaataacgataaaaaaataatacttctataataaatcgacaaataaaaacccaac

SEQ ID NO: 39381 - DNA, 571 bp, Artificial Sequence
  chemically treated genomic DNA (Homo sapiens) CpG-island No: 39381
gattagtgtaatgggttttattttcggtatcgacgatttcgtttttttattcgggtagacgtttcggttcggtagtttcgatttcgttattaataatttcggtaagattttttttttcgattcggaattagattagtcgggagagaatcggatttcggtttcgtttggattttcgaacgcggttgaaagttattttaagattatttcgatcgagtcggttttaaattattcggtcgagatcgtattttttttaacgatattagattaagatgatggggtttatttattagttttgatgaagtttttcgacgatttagcggtcgtttttattacgatagcgtttttatttcgtaggtttaggcggaagtcggttttaatatcgatttcgtttagttttagggaagtcggcgttattttttaattattcggtacggtttcgacggattagttggatgattataatagtttttttatcgtcgatttacgttttattgatattgtggagtacgacgaatttagttttcgttataacgatttcgacgatttcgacgatttcgacggaagtttagat

SEQ ID NO: 39382 - DNA, 571 bp, Artificial Sequence
  chemically treated genomic DNA (Homo sapiens) CpG-island No: 39382
atctaaacttccgtcgaaatcgtcgaaatcgtcgaaatcgttataacgaaaactaaattcgtcgtactccacaatatcaataaaacgtaaatcgacgataaaaaaactattataatcatccaactaatccgtcgaaaccgtaccgaataattaaaaaataacgccgacttccctaaaactaaacgaaatcgatattaaaaccgacttccgcctaaacctacgaaataaaaacgctatcgtaataaaaacgaccgctaaatcgtcgaaaaacttcatcaaaactaataaataaaccccatcatcttaatctaatatcgttaaaaaaaatacgatctcgaccgaataatttaaaaccgactcgatcgaaataatcttaaaataactttcaaccgcgttcgaaaatccaaacgaaaccgaaatccgattctctcccgactaatctaattccgaatcgaaaaaaaaaatcttaccgaaattattaataacgaaatcgaaactaccgaaccgaaacgtctacccgaataaaaaaacgaaatcgtcgataccgaaaataaaacccattacactaatc

SEQ ID NO: 39383 - DNA, 571 bp, Artificial Sequence
  chemically treated genomic DNA (Homo sapiens) CpG-island No: 39383
atttaggttttcgtcgaagtcgtcgaagtcgtcgaagtcgttgtagcgagaattaaattcgtcgtattttataatgttagtaggacgtgagtcgacggtgggagagttgttgtagttatttagttgattcgtcgaaatcgtgtcgagtggttggaggatgacgtcgatttttttgaagttaggcgaaatcggtgttgaagtcgattttcgtttaggtttacgggatgaagacgttgtcgtggtggagacggtcgttaaatcgtcggggagttttattaggattggtgggtaagttttattattttgatttggtgtcgttggagaagatgcgatttcggtcgagtggtttgaagtcgattcggtcgagatggttttgaagtagtttttagtcgcgttcgggaatttaaacgggatcgaaattcggttttttttcgattggtttgatttcgagtcgaggagagaaattttgtcgaagttgttggtgacgaagtcgaggttgtcgaatcgaaacgtttgttcgggtgggaagacgaggtcgtcgatgtcggagatggaatttattgtattgatt

SEQ ID NO: 39384 - DNA, 571 bp, Artificial Sequence
  chemically treated genomic DNA (Homo sapiens) CpG-island No: 39384
aatcaatacaataaattccatctccgacatcgacgacctcgtcttcccacccgaacaaacgtttcgattcgacaacctcgacttcgtcaccaacaacttcgacaaaatttctctcctcgactcgaaatcaaaccaatcgaaaaaaaaccgaatttcgatcccgtttaaattcccgaacgcgactaaaaactacttcaaaaccatctcgaccgaatcgacttcaaaccactcgaccgaaatcgcatcttctccaacgacaccaaatcaaaataataaaacttacccaccaatcctaataaaactccccgacgatttaacgaccgtctccaccacgacaacgtcttcatcccgtaaacctaaacgaaaatcgacttcaacaccgatttcgcctaacttcaaaaaaatcgacgtcatcctccaaccactcgacacgatttcgacgaatcaactaaataactacaacaactctcccaccgtcgactcacgtcctactaacattataaaatacgacgaatttaattctcgctacaacgacttcgacgacttcgacgacttcgacgaaaacctaaat

SEQ ID NO: 39385 - DNA, 1003 bp, Artificial Sequence
  chemically treated genomic DNA (Homo sapiens) CpG-island No: 39385
cggaggagtaacgttaagttcgggagatcgaagaacgtcgtcgattagaggaggagtattaagtataagaataagaacggttacggcgtgagtagtaggatcgtgagcggatcgcgaaggaggttgaggatcgacgttagcgagttttggaagtagggcgtcgagcgcgtgattttatcggttagtaagatgtcgaagggatatcggtttttcgtattttttaatagaatgcggttgtcgcgattatttttttcgatattttttttaattaaaacgagtttaattaattcgattacgtcgttaatattttgaattagacgaagattatgattgcggtttcggttttagttaatttcgaaagcgtttatacgtcgattggtagtcgagttttttattttcgattttatgattatcgttatttaagttttagtattatcggcgtaggatttaatcgtaggagtaggggttacgacgagcggtttgtttatttatttttcgatttttatagggagcgtcgagtggaacggtttcgtttattatttcgtcgtcgttttatcgattttcgcgatataattatatagcgtcgagtagttcgaggttattattattcgtcggatagttacgacgacgattttgacggagtagtagtttttatcgacgatttgcgtcgagtggattggttagtcggttttaagtcgattggaatagagaagtacgacggtattattaatttcgaatcgtggtttatcgtttacggtttcgcgattcgcgtagtaggaggagatagtaaggttatggcgaattatttattagtggttttagcggatttcgttcgattttggttttatggattgtttcgtggtataattggattttgggtcgaattacgcgattattttatcgttaatttttaaggtattttcgagcgtttcggtatataatatgatttttataacgttatttagaagttcggagaattttttcgagattatattcggcgatt

SEQ ID NO: 39386 - DNA, 1003 bp, Artificial Sequence
  chemically treated genomic DNA (Homo sapiens) CpG-island No: 39386
aatcgccgaatataatctcgaaaaaattctccgaacttctaaataacgttataaaaatcatattatataccgaaacgctcgaaaataccttaaaaattaacgataaaataatcgcgtaattcgacccaaaatccaattataccacgaaacaatccataaaaccaaaatcgaacgaaatccgctaaaaccactaataaataattcgccataaccttactatctcctcctactacgcgaatcgcgaaaccgtaaacgataaaccacgattcgaaattaataataccgtcgtacttctctattccaatcgacttaaaaccgactaaccaatccactcgacgcaaatcgtcgataaaaactactactccgtcaaaatcgtcgtcgtaactatccgacgaataataataacctcgaactactcgacgctatataattatatcgcgaaaatcgataaaacgacgacgaaataataaacgaaaccgttccactcgacgctccctataaaaatcgaaaaataaataaacaaaccgctcgtcgtaacccctactcctacgattaaatcctacgccgataatactaaaacttaaataacgataatcataaaatcgaaaataaaaaactcgactaccaatcgacgtataaacgctttcgaaattaactaaaaccgaaaccgcaatcataatcttcgtctaattcaaaatattaacgacgtaatcgaattaattaaactcgttttaattaaaaaaaatatcgaaaaaaataatcgcgacaaccgcattctattaaaaaatacgaaaaaccgatatcccttcgacatcttactaaccgataaaatcacgcgctcgacgccctacttccaaaactcgctaacgtcgatcctcaacctccttcgcgatccgctcacgatcctactactcacgccgtaaccgttcttattcttatacttaatactcctcctctaatcgacgacgttcttcgatctcccgaacttaacgttactcctccg

SEQ ID NO: 39387 - DNA, 1003 bp, Artificial Sequence
  chemically treated genomic DNA (Homo sapiens) CpG-island No: 39387
aatcgtcggatgtaatttcgaagggatttttcggatttttgaatgacgttgtagagattatattgtgtgtcgggacgttcgaaggtgttttggaagttggcgatgaagtggtcgcgtagttcggtttaagatttaattgtattacggggtaatttatggagttaagatcgggcggaattcgttaaagttattggtaaatagttcgttatggttttgttgtttttttttgttgcgcggatcgcgagatcgtagacggtaagttacgattcggggttagtggtgtcgtcgtatttttttattttagtcggtttgaagtcggttggttaatttattcgacgtaggtcgtcggtgaaggttgttatttcgttaaggtcgtcgtcgtggttgttcggcgagtgatggtagtttcgagttgttcggcgttgtatgattgtgtcgcgaagatcgatggggcggcgacgaggtggtgagcgaggtcgttttattcggcgttttttatgaaggtcgggaggtgagtgaatagatcgttcgtcgtgatttttgtttttgcggttggattttgcgtcggtgatgttgaggtttggatgacggtagttatgagatcggaagtggggaattcggttgttagtcggcgtgtggacgttttcggagttaattgggatcgaagtcgtaattatggttttcgtttggtttaagatgttgacgacgtggtcggattgattgagttcgttttggttgaggagggtgtcgagaagggtgatcgcggtaatcgtattttgttgaggggtgcggaaaatcggtgttttttcgatattttgttggtcgatgagattacgcgttcggcgttttgtttttaaagttcgttgacgtcgatttttagtttttttcgcggttcgtttacggttttgttgtttacgtcgtagtcgtttttgtttttgtgtttgatgttttttttttagtcggcgacgtttttcggtttttcgggtttggcgttgttttttcg

SEQ ID NO: 39388 - DNA, 1003 bp, Artificial Sequence
  chemically treated genomic DNA (Homo sapiens) CpG-island No: 39388
cgaaaaaacaacgccaaacccgaaaaaccgaaaaacgtcgccgactaaaaaaaaaacatcaaacacaaaaacaaaaacgactacgacgtaaacaacaaaaccgtaaacgaaccgcgaaaaaaactaaaaatcgacgtcaacgaactttaaaaacaaaacgccgaacgcgtaatctcatcgaccaacaaaatatcgaaaaaacaccgattttccgcacccctcaacaaaatacgattaccgcgatcacccttctcgacaccctcctcaaccaaaacgaactcaatcaatccgaccacgtcgtcaacatcttaaaccaaacgaaaaccataattacgacttcgatcccaattaactccgaaaacgtccacacgccgactaacaaccgaattccccacttccgatctcataactaccgtcatccaaacctcaacatcaccgacgcaaaatccaaccgcaaaaacaaaaatcacgacgaacgatctattcactcacctcccgaccttcataaaaaacgccgaataaaacgacctcgctcaccacctcgtcgccgccccatcgatcttcgcgacacaatcatacaacgccgaacaactcgaaactaccatcactcgccgaacaaccacgacgacgaccttaacgaaataacaaccttcaccgacgacctacgtcgaataaattaaccaaccgacttcaaaccgactaaaataaaaaaatacgacgacaccactaaccccgaatcgtaacttaccgtctacgatctcgcgatccgcgcaacaaaaaaaaacaacaaaaccataacgaactatttaccaataactttaacgaattccgcccgatcttaactccataaattaccccgtaatacaattaaatcttaaaccgaactacgcgaccacttcatcgccaacttccaaaacaccttcgaacgtcccgacacacaatataatctctacaacgtcattcaaaaatccgaaaaatcccttcgaaattacatccgacgatt

SEQ ID NO: 39389 - DNA, 758 bp, Artificial Sequence
  chemically treated genomic DNA (Homo sapiens) CpG-island No: 39389
cggcggagttcgtaatcgtataggtaaaaatattagttagtggcggtagaggtaagtcggtcggtgaagacgtagacgtttatgaacggtggtgtgattaattaatcgtataggcgaggatattagtcggcggtaatggaggtaagtcggtcggtgaagacgtagacgtttaataacggcggtataataggttagtcgtgtaggcggaaatattagtcggtggcggcgaaggtaagtcggtcggtgaagacgtagacgtttaataacggcggtataataggttagtcgtgtaggcggaaatattagtcggcggcgacggaggtaagtcggtcggtgaagacgtagacgtttaataacggcggtataataggttagtcgtgtaggcggaaatattagtcggtggcggcgaaggtaagtcggtcggtgaagatgacgatgtttattaacggtggtgtgattaatcgatcgtataggcggggatattagtcggcggcgacggaggtaggtcggtggtgaagtcgtagacgtttaatagcggcggtataataggttagtcgtgtaggcggaggtattagtcggcggcgacggaggtaggtcggcggtgaagtcgttgttgttattagtaatggcggtggcgaagataagtcggtagagtggattcgcggtcgatcgatcggaaagttgagacgtttcgagtttatgattagtattaatcgttttaatagtgtcgcgtaattatatgcgaataataataaaaa

SEQ ID NO: 39390 - DNA, 758 bp, Artificial Sequence
  chemically treated genomic DNA (Homo sapiens) CpG-island No: 39390
tttttattattattcgcatataattacgcgacactattaaaacgattaatactaatcataaactcgaaacgtctcaactttccgatcgatcgaccgcgaatccactctaccgacttatcttcgccaccgccattactaataacaacaacgacttcaccgccgacctacctccgtcgccgccgactaatacctccgcctacacgactaacctattataccgccgctattaaacgtctacgacttcaccaccgacctacctccgtcgccgccgactaatatccccgcctatacgatcgattaatcacaccaccgttaataaacatcgtcatcttcaccgaccgacttaccttcgccgccaccgactaatatttccgcctacacgactaacctattataccgccgttattaaacgtctacgtcttcaccgaccgacttacctccgtcgccgccgactaatatttccgcctacacgactaacctattataccgccgttattaaacgtctacgtcttcaccgaccgacttaccttcgccgccaccgactaatatttccgcctacacgactaacctattataccgccgttattaaacgtctacgtcttcaccgaccgacttacctccattaccgccgactaatatcctcgcctatacgattaattaatcacaccaccgttcataaacgtctacgtcttcaccgaccgacttacctctaccgccactaactaatatttttacctatacgattacgaactccgccg

SEQ ID NO: 39391 - DNA, 758 bp, Artificial Sequence
  chemically treated genomic DNA (Homo sapiens) CpG-island No: 39391
tttttgttgttgttcgtatataattacgcggtattattgaggcgattgatgttggttatggattcgaggcgttttagtttttcggtcgatcggtcgcgagtttattttgtcggtttgttttcgttatcgttattgttgataataataacgattttatcgtcggtttgttttcgtcgtcgtcgattggtgttttcgtttatacggttggtttattatgtcgtcgttgttgggcgtttacgattttattatcggtttgttttcgtcgtcgtcgattggtgttttcgtttatacggtcggttggttatattatcgttgatgggtatcgttatttttatcgatcggtttgttttcgtcgttatcgattggtgttttcgtttgtacggttggtttattatgtcgtcgttgttgggcgtttacgtttttatcgatcggtttgttttcgtcgtcgtcgattggtgttttcgtttgtacggttggtttattatgtcgtcgttgttgggcgtttacgtttttatcgatcggtttgttttcgtcgttatcgattggtgttttcgtttgtacggttggtttattatgtcgtcgttgttgggcgtttacgtttttatcgatcggtttgtttttattgtcgtcgattggtgttttcgtttatacggttggttggttatattatcgtttatgggcgtttacgtttttatcgatcggtttgtttttgtcgttattgattggtgtttttgtttatacggttgcggatttcgtcg

SEQ ID NO: 39392 - DNA, 758 bp, Artificial Sequence
  chemically treated genomic DNA (Homo sapiens) CpG-island No: 39392
cgacgaaatccgcaaccgtataaacaaaaacaccaatcaataacgacaaaaacaaaccgatcgataaaaacgtaaacgcccataaacgataatataaccaaccaaccgtataaacgaaaacaccaatcgacgacaataaaaacaaaccgatcgataaaaacgtaaacgcccaacaacgacgacataataaaccaaccgtacaaacgaaaacaccaatcgataacgacgaaaacaaaccgatcgataaaaacgtaaacgcccaacaacgacgacataataaaccaaccgtacaaacgaaaacaccaatcgacgacgacgaaaacaaaccgatcgataaaaacgtaaacgcccaacaacgacgacataataaaccaaccgtacaaacgaaaacaccaatcgataacgacgaaaacaaaccgatcgataaaaataacgatacccatcaacgataatataaccaaccgaccgtataaacgaaaacaccaatcgacgacgacgaaaacaaaccgataataaaatcgtaaacgcccaacaacgacgacataataaaccaaccgtataaacgaaaacaccaatcgacgacgacgaaaacaaaccgacgataaaatcgttattattatcaacaataacgataacgaaaacaaaccgacaaaataaactcgcgaccgatcgaccgaaaaactaaaacgcctcgaatccataaccaacatcaatcgcctcaataataccgcgtaattatatacgaacaacaacaaaaa

SEQ ID NO: 39393 - DNA, 590 bp, Artificial Sequence
  chemically treated genomic DNA (Homo sapiens) CpG-island No: 39393
gcgttagttgcgtggaggttgtaatcgtatcgtatatgaggggagttttttttgtttttttattttggattggaaaaagttgatggcgtatataagatcgtttttgagttatggtttcgtcgtttattttttaagtacgttttagggagagggagggtagcgtttaggttattacgttggcggtcgagtagtgagtaggcgatagcgatggatatggtggaggggaaggatgcggcggcgtgatggtgattttgattgtcgttttttttttagatttgacgaggtcgaggacggcgagggtaggacgaggatgtttttgggcgtgggatgcgggtttatggttggagtcgtgtgtttttggttttttgatttttgatattgacgataatggtgcggattaggtcggttagcggcgtagataatcgtagcgattagcgagtacggcgtacggttgatggttcgggttcgttattacgtagtttggatgcgtcgttcgtttttcggaggagtagtcggcgttgggggaggaataacgattatgagtagttagttataggattttacgaggtagcgggtaagtattttttttt

SEQ ID NO: 39394 - DNA, 590 bp, Artificial Sequence
  chemically treated genomic DNA (Homo sapiens) CpG-island No: 39394
aaaaaaaaatacttacccgctacctcgtaaaatcctataactaactactcataatcgttattcctcccccaacgccgactactcctccgaaaaacgaacgacgcatccaaactacgtaataacgaacccgaaccatcaaccgtacgccgtactcgctaatcgctacgattatctacgccgctaaccgacctaatccgcaccattatcgtcaatatcaaaaatcaaaaaaccaaaaacacacgactccaaccataaacccgcatcccacgcccaaaaacatcctcgtcctaccctcgccgtcctcgacctcgtcaaatctaaaaaaaaaacgacaatcaaaatcaccatcacgccgccgcatccttcccctccaccatatccatcgctatcgcctactcactactcgaccgccaacgtaataacctaaacgctaccctccctctccctaaaacgtacttaaaaaataaacgacgaaaccataactcaaaaacgatcttatatacgccatcaactttttccaatccaaaataaaaaaacaaaaaaaactcccctcatatacgatacgattacaacctccacgcaactaacgc

SEQ ID NO: 39395 - DNA, 590 bp, Artificial Sequence
  chemically treated genomic DNA (Homo sapiens) CpG-island No: 39395
aaggggaggtgtttgttcgttatttcgtggagttttgtggttagttgtttatggtcgttgttttttttttagcgtcgattattttttcgggaggcgggcgacgtatttaggttgcgtggtgacgagttcgggttattaatcgtgcgtcgtgttcgttgatcgttgcggttgtttgcgtcgttggtcgatttaattcgtattattatcgttagtgttaggggttaggagattaagagtatacggttttagttatggattcgtattttacgtttaagggtattttcgttttgttttcgtcgttttcggtttcgttagatttggggaggagacgataattaggattattattacgtcgtcgtattttttttttttattatgtttatcgttgtcgtttgtttattgttcgatcgttagcgtggtggtttaggcgttgttttttttttttttaaggcgtgtttaggaggtagacggcggagttatgatttaggaacgattttgtgtgcgttattagttttttttaatttaaagtaggaggataaagaagattttttttatgtacggtgcggttgtaatttttacgtagttgacgt

SEQ ID NO: 39396 - DNA, 590 bp, Artificial Sequence
  chemically treated genomic DNA (Homo sapiens) CpG-island No: 39396
acgtcaactacgtaaaaattacaaccgcaccgtacataaaaaaaatcttctttatcctcctactttaaattaaaaaaaactaataacgcacacaaaatcgttcctaaatcataactccgccgtctacctcctaaacacgccttaaaaaaaaaaaaaacaacgcctaaaccaccacgctaacgatcgaacaataaacaaacgacaacgataaacataataaaaaaaaaaaatacgacgacgtaataataatcctaattatcgtctcctccccaaatctaacgaaaccgaaaacgacgaaaacaaaacgaaaatacccttaaacgtaaaatacgaatccataactaaaaccgtatactcttaatctcctaacccctaacactaacgataataatacgaattaaatcgaccaacgacgcaaacaaccgcaacgatcaacgaacacgacgcacgattaataacccgaactcgtcaccacgcaacctaaatacgtcgcccgcctcccgaaaaaataatcgacgctaaaaaaaaaacaacgaccataaacaactaaccacaaaactccacgaaataacgaacaaacacctcccctt

SEQ ID NO: 39397 - DNA, 888 bp, Artificial Sequence
  chemically treated genomic DNA (Homo sapiens) CpG-island No: 39397
gtggacggcggtacgatgaatcgtggaggagttagatttcggcgacggtaatgtatttatgacgattttggagtagtattttttatcgcgacgtagttgacgaagaagaggcggatcggggaatatgttgttattacgaagtaatcgttttcgttgtcgttttattttgaatttggcgataattgagttttatagtgtagcgtagaggacggttgcgattaacgagtattgtgtatagaggatggttagggtcgtcgttttaaattcggttttagtgggatttagtttcggtgatttagtgtaggtaatttataacgtgatatattatgtatttcggtcgtttaaaataaatttaacggagatggtatttgggttcgtttgtaggtcgaaatatcgtcgttcgtcgtttatttagttatttcgcgttcgagatagcgttcgtttttaatttttttcgtacgtttgtatcgttgttgtgtttcgttcgcgttcggtcgtcgttcgagcgcgagttagttaggaggttcgttatcgttacgtttgttttaggtcgtcgtgttcgttacgattggggaggggttcgggcggttatcgcgcgaggttaattttttgttttgttttgtcgcgatttatggagaggtattaggtcgttaaggttttgttttgtcgtcgcgatcgggggcgcgtggaggcggtcggttattagcgtaacggcgcggtggtgtaggcgggcggtcgcgtagttcgagttcgacgcgtggaggaggggacgttatggaaaagtcgtttaggattaggatgtatatggaattatgaatttgatggggcggttaatgggcgggtgatcgttttaggcgatttttttgtgtatgaaatgagaatgttaga

SEQ ID NO: 39398 - DNA, 888 bp, Artificial Sequence
  chemically treated genomic DNA (Homo sapiens) CpG-island No: 39398
tctaacattctcatttcatacacaaaaaaatcgcctaaaacgatcacccgcccattaaccgccccatcaaattcataattccatatacatcctaatcctaaacgacttttccataacgtcccctcctccacgcgtcgaactcgaactacgcgaccgcccgcctacaccaccgcgccgttacgctaataaccgaccgcctccacgcgcccccgatcgcgacgacaaaacaaaaccttaacgacctaatacctctccataaatcgcgacaaaacaaaacaaaaaattaacctcgcgcgataaccgcccgaacccctccccaatcgtaacgaacacgacgacctaaaacaaacgtaacgataacgaacctcctaactaactcgcgctcgaacgacgaccgaacgcgaacgaaacacaacaacgatacaaacgtacgaaaaaaattaaaaacgaacgctatctcgaacgcgaaataactaaataaacgacgaacgacgatatttcgacctacaaacgaacccaaataccatctccgttaaatttattttaaacgaccgaaatacataatatatcacgttataaattacctacactaaatcaccgaaactaaatcccactaaaaccgaatttaaaacgacgaccctaaccatcctctatacacaatactcgttaatcgcaaccgtcctctacgctacactataaaactcaattatcgccaaattcaaaataaaacgacaacgaaaacgattacttcgtaataacaacatattccccgatccgcctcttcttcgtcaactacgtcgcgataaaaaatactactccaaaatcgtcataaatacattaccgtcgccgaaatctaactcctccacgattcatcgtaccgccgtccac

SEQ ID NO: 39399 - DNA, 888 bp, Artificial Sequence
  chemically treated genomic DNA (Homo sapiens) CpG-island No: 39399
tttggtatttttattttatgtataaagaggtcgtttggagcgattattcgtttattagtcgttttattagatttataattttatatatattttggttttgggcgatttttttatgacgtttttttttttacgcgtcgggttcgggttgcgcggtcgttcgtttgtattatcgcgtcgttacgttagtggtcggtcgtttttacgcgttttcggtcgcggcggtagggtagggttttggcggtttagtgtttttttatgggtcgcggtagggtagggtagggagttggtttcgcgcggtggtcgttcggatttttttttagtcgtggcgagtacgacggtttagggtaggcgtagcggtggcgagttttttagttggttcgcgttcgggcgacggtcggacgcgggcgaggtataatagcgatgtaagcgtgcgggaaagattgggggcgggcgttgtttcggacgcgggatggttggatgggcggcgggcggcgatatttcgatttataggcgggtttaagtgttattttcgttggatttattttggacggtcgagatgtatggtatgttacgttgtgaattgtttatattaagttatcgaagttgagttttattggagtcggatttggagcggcgattttggttattttttgtgtatagtgttcgttggtcgtagtcgttttttacgttgtattatagagtttagttgtcgttagatttagagtggagcgatagcgaggacgattgtttcgtggtggtaatatgtttttcgattcgtttttttttcgttaattacgtcgcgatggagggtgttgttttaaagtcgttatgaatgtattgtcgtcgtcggaatttggtttttttacggtttatcgtgtcgtcgtttat

SEQ ID NO: 39400 - DNA, 888 bp, Artificial Sequence
  chemically treated genomic DNA (Homo sapiens) CpG-island No: 39400
ataaacgacgacacgataaaccgtaaaaaaaccaaattccgacgacgacaatacattcataacgactttaaaacaacaccctccatcgcgacgtaattaacgaaaaaaaaacgaatcgaaaaacatattaccaccacgaaacaatcgtcctcgctatcgctccactctaaatctaacgacaactaaactctataatacaacgtaaaaaacgactacgaccaacgaacactatacacaaaaaataaccaaaatcgccgctccaaatccgactccaataaaactcaacttcgataacttaatataaacaattcacaacgtaacataccatacatctcgaccgtccaaaataaatccaacgaaaataacacttaaacccgcctataaatcgaaatatcgccgcccgccgcccatccaaccatcccgcgtccgaaacaacgcccgcccccaatctttcccgcacgcttacatcgctattatacctcgcccgcgtccgaccgtcgcccgaacgcgaaccaactaaaaaactcgccaccgctacgcctaccctaaaccgtcgtactcgccacgactaaaaaaaaatccgaacgaccaccgcgcgaaaccaactccctaccctaccctaccgcgacccataaaaaaacactaaaccgccaaaaccctaccctaccgccgcgaccgaaaacgcgtaaaaacgaccgaccactaacgtaacgacgcgataatacaaacgaacgaccgcgcaacccgaacccgacgcgtaaaaaaaaaaacgtcataaaaaaatcgcccaaaaccaaaatatatataaaattataaatctaataaaacgactaataaacgaataatcgctccaaacgacctctttatacataaaataaaaataccaaa

SEQ ID NO: 39401 - DNA, 583 bp, Artificial Sequence
  chemically treated genomic DNA (Homo sapiens) CpG-island No: 39401
gcgaaatgaacgagtcgagtacgggggtgttttttatgagttcgggaatgcgtgatcgacgtcggacgtggcggaatcggtcgtcgaagtgaggcgtcgacgtggggtggtggaggggttaatcggcgtcgattttcgtgcggagagtgcgggaaaacggcgtcgacgtggggtacgatcgcgtttattacgcgcggtagagggagtcgcgcgggagaggcggcgacgtgggaggatttggcggttatggcggcggttggggcgacgggaggtaagggatgaagatgataggtggggtttcgggttttatttgtcggggagagagagaggggaaaacgggcgagtgaggtaaagtagatttgagggagagagagagtcgagtgggtcgagggaggaggtcggtttaggaaggaggaggggaggaaaatcggggaacgtaaagaagattttcgtaaggcgcgggtcggtcgagagagggaggaggcgcgcggtttacgggagtggaggggaaggttttgttaagtttaaaagggaggaaggggaagattatttaaaattattttttgagtttcgaaaatttgcg

SEQ ID NO: 39402 - DNA, 583 bp, Artificial Sequence
  chemically treated genomic DNA (Homo sapiens) CpG-island No: 39402
cgcaaattttcgaaactcaaaaaataattttaaataatcttccccttcctcccttttaaacttaacaaaaccttcccctccactcccgtaaaccgcgcgcctcctccctctctcgaccgacccgcgccttacgaaaatcttctttacgttccccgattttcctcccctcctccttcctaaaccgacctcctccctcgacccactcgactctctctctccctcaaatctactttacctcactcgcccgttttcccctctctctctccccgacaaataaaacccgaaaccccacctatcatcttcatcccttacctcccgtcgccccaaccgccgccataaccgccaaatcctcccacgtcgccgcctctcccgcgcgactccctctaccgcgcgtaataaacgcgatcgtaccccacgtcgacgccgttttcccgcactctccgcacgaaaatcgacgccgattaacccctccaccaccccacgtcgacgcctcacttcgacgaccgattccgccacgtccgacgtcgatcacgcattcccgaactcataaaaaacacccccgtactcgactcgttcatttcgc

SEQ ID NO: 39403 - DNA, 583 bp, Artificial Sequence
  chemically treated genomic DNA (Homo sapiens) CpG-island No: 39403
cgtaaattttcggagtttaagaaataattttaaataattttttttttttttttttttgggtttggtaaggtttttttttttattttcgtgggtcgcgcgttttttttttttttcggtcggttcgcgttttgcgaaagttttttttacgtttttcggttttttttttttttttttttttaggtcggttttttttttcggtttattcggtttttttttttttttaagtttgttttattttattcgttcgttttttttttttttttttttcgataggtgggattcgaggttttatttgttatttttattttttatttttcgtcgttttaatcgtcgttatggtcgttaaatttttttacgtcgtcgtttttttcgcgcgattttttttatcgcgcgtggtggacgcggtcgtgttttacgtcggcgtcgttttttcgtatttttcgtacgaaaatcggcgtcggttaatttttttattattttacgtcggcgttttatttcgacggtcgatttcgttacgttcggcgtcgattacgtattttcgagtttataaaaagtattttcgtgttcgattcgtttatttcgt

SEQ ID NO: 39404 - DNA, 583 bp, Artificial Sequence
  chemically treated genomic DNA (Homo sapiens) CpG-island No: 39404
acgaaataaacgaatcgaacacgaaaatactttttataaactcgaaaatacgtaatcgacgccgaacgtaacgaaatcgaccgtcgaaataaaacgccgacgtaaaataataaaaaaattaaccgacgccgattttcgtacgaaaaatacgaaaaaacgacgccgacgtaaaacacgaccgcgtccaccacgcgcgataaaaaaaatcgcgcgaaaaaaacgacgacgtaaaaaaatttaacgaccataacgacgattaaaacgacgaaaaataaaaaataaaaataacaaataaaacctcgaatcccacctatcgaaaaaaaaaaaaaaaaaaaacgaacgaataaaataaaacaaacttaaaaaaaaaaaaaaaccgaataaaccgaaaaaaaaaaccgacctaaaaaaaaaaaaaaaaaaaaaaccgaaaaacgtaaaaaaaactttcgcaaaacgcgaaccgaccgaaaaaaaaaaaaaacgcgcgacccacgaaaataaaaaaaaaaaccttaccaaacccaaaaaaaaaaaaaaaaaaaattatttaaaattatttcttaaactccgaaaatttacg

SEQ ID NO: 39405 - DNA, 696 bp, Artificial Sequence
  chemically treated genomic DNA (Homo sapiens) CpG-island No: 39405
cgttgcgacgggttaggacggaaggtgagtaatagcgtatttttcgagttattaacgtcggaggttttttttttttggggaattacgggcgtaggttcggtacgaggggtttcgacgaagtaggtttacgttagggattgacgaataagttcgggtttggaggtgtttttgcgggcggtgattttttggttgcggtagacgcggcgacgtttggggcggttgttttttttttgggcgattttgagttgatgtagttgcgtttttaacgcgtcgaggttttttttgagttgtagatttttttgacgtagttttaggatttttaggttgttttttattatgttacggcgtattatttgatggaagtcgatacgagtcgcgtcgtacgtttttattatgcgtgttaggtgtacgacggtggcgttatttttcgagttggcgtttcggaaggtggcgtagtcgcgggttttttcgcgacgagggtggtagcggtagggcgagtgttgtaattcgttcgggtagcgttggtgaagggtgtcgatggcgaggagagcggcgttttggtaagcggcggggaaggaatttttattcgcggtgattgttagcgaagttcgttcgggagagtcggagaggattattgtagtgattttttaattagcgtgaggttttgtatttttatttttttgtttcgggagcggt

SEQ ID NO: 39406 - DNA, 696 bp, Artificial Sequence
  chemically treated genomic DNA (Homo sapiens) CpG-island No: 39406
accgctcccgaaacaaaaaaataaaaatacaaaacctcacgctaattaaaaaatcactacaataatcctctccgactctcccgaacgaacttcgctaacaatcaccgcgaataaaaattccttccccgccgcttaccaaaacgccgctctcctcgccatcgacacccttcaccaacgctacccgaacgaattacaacactcgccctaccgctaccaccctcgtcgcgaaaaaacccgcgactacgccaccttccgaaacgccaactcgaaaaataacgccaccgtcgtacacctaacacgcataataaaaacgtacgacgcgactcgtatcgacttccatcaaataatacgccgtaacataataaaaaacaacctaaaaatcctaaaactacgtcaaaaaaatctacaactcaaaaaaaacctcgacgcgttaaaaacgcaactacatcaactcaaaatcgcccaaaaaaaaaacaaccgccccaaacgtcgccgcgtctaccgcaaccaaaaaatcaccgcccgcaaaaacacctccaaacccgaacttattcgtcaatccctaacgtaaacctacttcgtcgaaacccctcgtaccgaacctacgcccgtaattccccaaaaaaaaaaaacctccgacgttaataactcgaaaaatacgctattactcaccttccgtcctaacccgtcgcaacg

SEQ ID NO: 39407 - DNA, 696 bp, Artificial Sequence
  chemically treated genomic DNA (Homo sapiens) CpG-island No: 39407
gtcgttttcggagtaggagggtgaggatgtagagttttacgttggttgggaggttattgtagtgatttttttcggttttttcgagcggatttcgttggtagttatcgcgggtggagatttttttttcgtcgtttgttagaacgtcgtttttttcgttatcggtattttttattagcgttattcggacgagttgtagtattcgttttatcgttattattttcgtcgcggaggagttcgcgattacgttatttttcgagacgttagttcggaggatgacgttatcgtcgtgtatttggtacgtatggtggaggcgtacgacgcggttcgtatcgatttttattagatggtgcgtcgtggtatggtggagaataatttgaagattttggagttgcgttaggagaatttgtagtttaagaaggatttcgacgcgttggaggcgtagttgtattagtttaagatcgtttagggagaggatagtcgttttaagcgtcgtcgcgtttgtcgtagttagaagattatcgttcgtaagagtatttttaggttcgagtttgttcgttagtttttggcgtggatttgtttcgtcgagatttttcgtgtcgagtttgcgttcgtggttttttaggagggggaagttttcggcgttggtagttcggagggtgcgttgttgtttatttttcgttttggttcgtcgtagcg

SEQ ID NO: 39408 - DNA, 696 bp, Artificial Sequence
  chemically treated genomic DNA (Homo sapiens) CpG-island No: 39408
cgctacgacgaaccaaaacgaaaaataaacaacaacgcaccctccgaactaccaacgccgaaaacttccccctcctaaaaaaccacgaacgcaaactcgacacgaaaaatctcgacgaaacaaatccacgccaaaaactaacgaacaaactcgaacctaaaaatactcttacgaacgataatcttctaactacgacaaacgcgacgacgcttaaaacgactatcctctccctaaacgatcttaaactaatacaactacgcctccaacgcgtcgaaatccttcttaaactacaaattctcctaacgcaactccaaaatcttcaaattattctccaccataccacgacgcaccatctaataaaaatcgatacgaaccgcgtcgtacgcctccaccatacgtaccaaatacacgacgataacgtcatcctccgaactaacgtctcgaaaaataacgtaatcgcgaactcctccgcgacgaaaataataacgataaaacgaatactacaactcgtccgaataacgctaataaaaaataccgataacgaaaaaaacgacgttctaacaaacgacgaaaaaaaaatctccacccgcgataactaccaacgaaatccgctcgaaaaaaccgaaaaaaatcactacaataacctcccaaccaacgtaaaactctacatcctcaccctcctactccgaaaacgac

SEQ ID NO: 39409 - DNA, 746 bp, Artificial Sequence
  chemically treated genomic DNA (Homo sapiens) CpG-island No: 39409
gttcgaagttggttggttgttcgtcgtcgggcgtttcgttggtttttagttttttgcgcgggtacgatgttaatttttagtaatcggttttttaaattcgggcgtcgagtacgtcgcgtataattattaggatttcgttttcgcgtttacggttgttttggcgcgtttgcggaagttgtgcgcgttttattttttttcggttaaggcgttcgacgattttcgagtagttcgggagggcgaggtcgcgtttatggtgaggaatttcgttcggtagtaggcggcgttagtggcgttggggtaggaagcgaacgtttgcgttacgaatacgttggttcgcgttattatcggttatcgggtgttcgtcgtcgacggcggggaaggcgtaagggagtttaaggagatggttgtggagttgatgtagttcgtcggcgtttttaacgtcggggatttcgtgtcggcgtttcggtggttcgattcgtagggcgtcgtggtaaagatgaagaggttgtatcgtcggtacgataatatgatgaacggatttattaacgaaaggaaggtcggggcgtagttcgacggggtcgtcgttggcgagtacggtaacgattttttaagcgtgttgttggcgaggatgtaggaggagtagaagttggacggcgacggcgaaaagattatcgaaattgatattaaagttttgtttttggtaagtttttgatgatcgtgtttttttagattatcgtaatattatt

SEQ ID NO: 39410 - DNA, 746 bp, Artificial Sequence
  chemically treated genomic DNA (Homo sapiens) CpG-island No: 39410
aataatattacgataatctaaaaaaacacgatcatcaaaaacttaccaaaaacaaaactttaatatcaatttcgataatcttttcgccgtcgccgtccaacttctactcctcctacatcctcgccaacaacacgcttaaaaaatcgttaccgtactcgccaacgacgaccccgtcgaactacgccccgaccttcctttcgttaataaatccgttcatcatattatcgtaccgacgatacaacctcttcatctttaccacgacgccctacgaatcgaaccaccgaaacgccgacacgaaatccccgacgttaaaaacgccgacgaactacatcaactccacaaccatctccttaaactcccttacgccttccccgccgtcgacgacgaacacccgataaccgataataacgcgaaccaacgtattcgtaacgcaaacgttcgcttcctaccccaacgccactaacgccgcctactaccgaacgaaattcctcaccataaacgcgacctcgccctcccgaactactcgaaaatcgtcgaacgccttaaccgaaaaaaaataaaacgcgcacaacttccgcaaacgcgccaaaacaaccgtaaacgcgaaaacgaaatcctaataattatacgcgacgtactcgacgcccgaatttaaaaaaccgattactaaaaattaacatcgtacccgcgcaaaaaactaaaaaccaacgaaacgcccgacgacgaacaaccaaccaacttcgaac

SEQ ID NO: 39411 - DNA, 746 bp, Artificial Sequence
  chemically treated genomic DNA (Homo sapiens) CpG-island No: 39411
agtggtgttgcgataatttgaaaaggtacggttattaggaatttattaggagtagagttttgatgttagtttcggtgattttttcgtcgtcgtcgtttagtttttgttttttttgtattttcgttagtagtacgtttagaaggtcgttgtcgtgttcgttagcggcgatttcgtcgggttgcgtttcggtttttttttcgttgatgaattcgtttattatgttgtcgtatcgacggtgtagtttttttatttttgttacgacgttttgcgggtcgagttatcggagcgtcggtacgaagttttcgacgttgaaaacgtcggcgagttgtattagttttataattatttttttgaatttttttgcgtttttttcgtcgtcgacggcgaatattcggtgatcgatggtggcgcgggttagcgtgttcgtggcgtagacgttcgttttttgttttagcgttattgacgtcgtttgttgtcgagcgaggttttttattatgagcgcgatttcgttttttcggattgttcggaggtcgtcgagcgttttggtcgagaagaggtggagcgcgtatagttttcgtaggcgcgttagagtaatcgtaggcgcgaagacgaggttttggtagttgtacgcgacgtgttcggcgttcgagtttggggggtcggttgttgaaagttggtatcgtgttcgcgtaggaaattaggggttaacggggcgttcgacggcgggtaattaattaatttcgggt

SEQ ID NO: 39412 - DNA, 746 bp, Artificial Sequence
  chemically treated genomic DNA (Homo sapiens) CpG-island No: 39412
acccgaaattaattaattacccgccgtcgaacgccccgttaacccctaatttcctacgcgaacacgataccaactttcaacaaccgaccccccaaactcgaacgccgaacacgtcgcgtacaactaccaaaacctcgtcttcgcgcctacgattactctaacgcgcctacgaaaactatacgcgctccacctcttctcgaccaaaacgctcgacgacctccgaacaatccgaaaaaacgaaatcgcgctcataataaaaaacctcgctcgacaacaaacgacgtcaataacgctaaaacaaaaaacgaacgtctacgccacgaacacgctaacccgcgccaccatcgatcaccgaatattcgccgtcgacgacgaaaaaaacgcaaaaaaattcaaaaaaataattataaaactaatacaactcgccgacgttttcaacgtcgaaaacttcgtaccgacgctccgataactcgacccgcaaaacgtcgtaacaaaaataaaaaaactacaccgtcgatacgacaacataataaacgaattcatcaacgaaaaaaaaaccgaaacgcaacccgacgaaatcgccgctaacgaacacgacaacgaccttctaaacgtactactaacgaaaatacaaaaaaaacaaaaactaaacgacgacgacgaaaaaatcaccgaaactaacatcaaaactctactcctaataaattcctaataaccgtaccttttcaaattatcgcaacaccact

SEQ ID NO: 39413 - DNA, 569 bp, Artificial Sequence
  chemically treated genomic DNA (Homo sapiens) CpG-island No: 39413
gcggagttgattcggtattcggacgtttttaaggaggtttagtatgagtttgatatcgtcgtcggtaggggtcgtttcgtgttcgagtttgattttttacgttttttttattttatcgcggtgattaaggagacgtttcggttttattcgttaacgtcgtttttattgtttcgggaggttgtagaggagtgtgaggtggacggttatcgtatttttaagggcgttatttttttagttaacgtttgggttatagttcgtgattcgatttaatggttcgattcgttatagtattagttttttcggttttttttcggtaggatgtatgtagacgtggatgttaagggtgttgatttcggtttgatattattcggagtaggacggagaatatgcgttggttttagttggggtttgcggatggttatattgatgattgttacgttagtgtacgggttcgattggattttggttaacggcgcgatttcggataagtttaatatggaggaggtttatgggtttattttgtagagggtcgtgtcgttgatggtttagttcgtgttaaggttgttttt

SEQ ID NO: 39414 - DNA, 569 bp, Artificial Sequence
  chemically treated genomic DNA (Homo sapiens) CpG-island No: 39414
aaaaacaaccttaacacgaactaaaccatcaacgacacgaccctctacaaaataaacccataaacctcctccatattaaacttatccgaaatcgcgccgttaaccaaaatccaatcgaacccgtacactaacgtaacaatcatcaatataaccatccgcaaaccccaactaaaaccaacgcatattctccgtcctactccgaataatatcaaaccgaaatcaacacccttaacatccacgtctacatacatcctaccgaaaaaaaaccgaaaaaactaatactataacgaatcgaaccattaaatcgaatcacgaactataacccaaacgttaactaaaaaaataacgcccttaaaaatacgataaccgtccacctcacactcctctacaacctcccgaaacaataaaaacgacgttaacgaataaaaccgaaacgtctccttaatcaccgcgataaaataaaaaaaacgtaaaaaatcaaactcgaacacgaaacgacccctaccgacgacgatatcaaactcatactaaacctccttaaaaacgtccgaataccgaatcaactccgc

SEQ ID NO: 39415 - DNA, 569 bp, Artificial Sequence
  chemically treated genomic DNA (Homo sapiens) CpG-island No: 39415
ggaagtagttttggtacgggttggattattaacggtacggttttttgtaaggtgagtttataggttttttttatgttgagtttgttcggagtcgcgtcgttagttaaggtttagtcgaattcgtgtattagcgtggtagttattagtgtgattattcgtaagttttaattaaggttagcgtatatttttcgttttgtttcgaatggtattaggtcgaaattagtatttttgatatttacgtttgtatgtattttgtcggggagaaatcgagaaggttggtattgtagcgggtcgggttattgggtcgggttacgggttatagtttagacgttgattaggagggtagcgtttttggggatacggtagtcgtttattttatatttttttgtagtttttcgaggtagtgagagcggcgttgacgggtgaagtcgaaacgtttttttgattatcgcggtgaggtaggggaggcgtggaaggttagattcggatacgagacgatttttatcgacgacggtgttaagtttatgttgggtttttttgaggacgttcgggtgtcggattagtttcgt

SEQ ID NO: 39416 - DNA, 569 bp, Artificial Sequence
  chemically treated genomic DNA (Homo sapiens) CpG-island No: 39416
acgaaactaatccgacacccgaacgtcctcaaaaaaacccaacataaacttaacaccgtcgtcgataaaaatcgtctcgtatccgaatctaaccttccacgcctcccctacctcaccgcgataatcaaaaaaacgtttcgacttcacccgtcaacgccgctctcactacctcgaaaaactacaaaaaaatataaaataaacgactaccgtatccccaaaaacgctaccctcctaatcaacgtctaaactataacccgtaacccgacccaataacccgacccgctacaataccaaccttctcgatttctccccgacaaaatacatacaaacgtaaatatcaaaaatactaatttcgacctaataccattcgaaacaaaacgaaaaatatacgctaaccttaattaaaacttacgaataatcacactaataactaccacgctaatacacgaattcgactaaaccttaactaacgacgcgactccgaacaaactcaacataaaaaaaacctataaactcaccttacaaaaaaccgtaccgttaataatccaacccgtaccaaaactacttcc

SEQ ID NO: 39417 - DNA, 895 bp, Artificial Sequence
  chemically treated genomic DNA (Homo sapiens) CpG-island No: 39417
atacgggatagttttttgtgttatagtcgatgtagttaaagcgaagggtgcgagagagtcgtggtcgatgaagtcgtgcgtagagtagttgtggtcgatatagttaaagtcgggaagttgatgtcgaggtagtagagtcgtagagtacgtatggggagtcgtagagtggttatggatatacgggagtgcgttgtggattaatgtgcgcgaggacgcgttggatatgaagatagtgatataattgcggtagtcgttgaggaagatggtgtcgaagagttgatgtagtcgaatcgtgaaggacgagatgttacgttaggtttgttagatttggggataattcgggacgaacgagcgcgtcggtgttgttaatattatacgggcgaggtaggggattattatgaattatacgttaatgtcggaagagattagtagagtaggttttcgagacggtcgcggtacgagaacggcgtagagggagaattgtcggagtagtacgtagttgtcgaagaagagcgaagtgtagtcgaggaagatacggcgatgttagcgatgaattatgttggatgaagttgaaggcgaagtagtaggattaacggtttagacggcgttatcggtagttatgtaaaggtagttggattatcggtttagattcgcgatagtggtaatttggagatgcggcggcgatgttcgaagtagataaagaagattcgagtggttgacgatgattagtggggatgatgagggtgtcgaagcgtgaacgacgatgaagacgatgaaagcggtgaaattgcggttcgagaggataatatatttgtagttttatgttaatgaatcggcgagaagtttatcggtgatgaagttatgttaaggaggacgttttttgttggtatttttt

SEQ ID NO: 39418 - DNA, 895 bp, Artificial Sequence
  chemically treated genomic DNA (Homo sapiens) CpG-island No: 39418
aaaaaataccaacaaaaaacgtcctccttaacataacttcatcaccgataaacttctcgccgattcattaacataaaactacaaatatattatcctctcgaaccgcaatttcaccgctttcatcgtcttcatcgtcgttcacgcttcgacaccctcatcatccccactaatcatcgtcaaccactcgaatcttctttatctacttcgaacatcgccgccgcatctccaaattaccactatcgcgaatctaaaccgataatccaactacctttacataactaccgataacgccgtctaaaccgttaatcctactacttcgccttcaacttcatccaacataattcatcgctaacatcgccgtatcttcctcgactacacttcgctcttcttcgacaactacgtactactccgacaattctccctctacgccgttctcgtaccgcgaccgtctcgaaaacctactctactaatctcttccgacattaacgtataattcataataatcccctacctcgcccgtataatattaacaacaccgacgcgctcgttcgtcccgaattatccccaaatctaacaaacctaacgtaacatctcgtccttcacgattcgactacatcaactcttcgacaccatcttcctcaacgactaccgcaattatatcactatcttcatatccaacgcgtcctcgcgcacattaatccacaacgcactcccgtatatccataaccactctacgactccccatacgtactctacgactctactacctcgacatcaacttcccgactttaactatatcgaccacaactactctacgcacgacttcatcgaccacgactctctcgcacccttcgctttaactacatcgactataacacaaaaaactatcccgtat

SEQ ID NO: 39419 - DNA, 895 bp, Artificial Sequence
  chemically treated genomic DNA (Homo sapiens) CpG-island No: 39419
aagaaatattaataagaggcgttttttttagtatggttttattatcggtggatttttcgtcggtttattgatatggaattgtaggtgtgttgttttttcggatcgtagttttatcgtttttatcgtttttatcgtcgtttacgtttcgatatttttattatttttattggttatcgttagttattcgggttttttttatttatttcgagtatcgtcgtcgtatttttaagttgttattgtcgcggatttaggtcggtggtttaattatttttatatggttatcgatgacgtcgtttagatcgttggttttattatttcgtttttaattttatttagtatgatttatcgttagtatcgtcgtatttttttcgattatatttcgttttttttcggtaattgcgtgttgtttcggtaattttttttttacgtcgttttcgtgtcgcgatcgtttcggaggtttattttgttagtttttttcgatattggcgtatgatttatggtggttttttgtttcgttcgtatggtattggtaatatcggcgcgttcgttcgtttcgagttgtttttaagtttggtaaatttagcgtgatatttcgttttttacggttcgattatattagtttttcggtattattttttttaacgattgtcgtaattgtgttattatttttatatttagcgcgttttcgcgtatattggtttataacgtattttcgtgtgtttatgattattttacgattttttatgcgtgttttgcggttttgttatttcgatattaatttttcgattttggttatatcgattatagttattttacgtacgattttatcgattacggttttttcgtatttttcgttttggttatatcgattatggtataaagggttatttcgtgt

SEQ ID NO: 39420 - DNA, 895 bp, Artificial Sequence
  chemically treated genomic DNA (Homo sapiens) CpG-island No: 39420
acacgaaataaccctttataccataatcgatataaccaaaacgaaaaatacgaaaaaaccgtaatcgataaaatcgtacgtaaaataactataatcgatataaccaaaatcgaaaaattaatatcgaaataacaaaaccgcaaaacacgcataaaaaatcgtaaaataatcataaacacacgaaaatacgttataaaccaatatacgcgaaaacgcgctaaatataaaaataataacacaattacgacaatcgttaaaaaaaataataccgaaaaactaatataatcgaaccgtaaaaaacgaaatatcacgctaaatttaccaaacttaaaaacaactcgaaacgaacgaacgcgccgatattaccaataccatacgaacgaaacaaaaaaccaccataaatcatacgccaatatcgaaaaaaactaacaaaataaacctccgaaacgatcgcgacacgaaaacgacgtaaaaaaaaaattaccgaaacaacacgcaattaccgaaaaaaaacgaaatataatcgaaaaaaatacgacgatactaacgataaatcatactaaataaaattaaaaacgaaataataaaaccaacgatctaaacgacgtcatcgataaccatataaaaataattaaaccaccgacctaaatccgcgacaataacaacttaaaaatacgacgacgatactcgaaataaataaaaaaaacccgaataactaacgataaccaataaaaataataaaaatatcgaaacgtaaacgacgataaaaacgataaaaacgataaaactacgatccgaaaaaacaacacacctacaattccatatcaataaaccgacgaaaaatccaccgataataaaaccatactaaaaaaaacgcctcttattaatatttctt

SEQ ID NO: 39421 - DNA, 524 bp, Artificial Sequence
  chemically treated genomic DNA (Homo sapiens) CpG-island No: 39421
ggttttggaaaatatcgagttacgtttttttttgtaatatttttattttttttgttattgttatttcgtatttcgttatttaaacggtttttattagtatatggtttcgttatatcggcgttttattatcgattaattgtaattttatttttcgtagcgtataattttttttgtcgattttcgtttatgggttgtttttttgttttagtttacggtcgcgttatcgatattttgagttatcggtttatatcgttattgtgatttttttcgtcgttaattatatgcggatgtagttatagattcgttattatgttagatttaggtcgtcgatcgtcgtcgcgtttttataggttttattgtttcgttttttaattaacgtaagtttatttcgttatttagttttcgttatcgtcggatagtcgtcggattcggttgcgggatattcggatttagttatggagcgttagattcgatagtcgttaatattgtttgtttttttgttattaatttttattgtagttttg

SEQ ID NO: 39422 - DNA, 524 bp, Artificial Sequence
  chemically treated genomic DNA (Homo sapiens) CpG-island No: 39422
caaaactacaataaaaattaataacaaaaaaacaaacaatattaacgactatcgaatctaacgctccataactaaatccgaatatcccgcaaccgaatccgacgactatccgacgataacgaaaactaaataacgaaataaacttacgttaattaaaaaacgaaacaataaaacctataaaaacgcgacgacgatcgacgacctaaatctaacataataacgaatctataactacatccgcatataattaacgacgaaaaaaatcacaataacgatataaaccgataactcaaaatatcgataacgcgaccgtaaactaaaacaaaaaaacaacccataaacgaaaatcgacaaaaaaaattatacgctacgaaaaataaaattacaattaatcgataataaaacgccgatataacgaaaccatatactaataaaaaccgtttaaataacgaaatacgaaataacaataacaaaaaaaataaaaatattacaaaaaaaaacgtaactcgatattttccaaaacc

SEQ ID NO: 39423 - DNA, 524 bp, Artificial Sequence
  chemically treated genomic DNA (Homo sapiens) CpG-island No: 39423
tagagttgtagtggaggttggtagtaggggagtaagtagtgttggcggttgtcggatttagcgttttatggttagattcgggtgtttcgtaatcggattcggcgattgttcggcgatggcggaggttaggtgacggggtagatttgcgttggttaggggacgaagtagtggagtttatggaggcgcggcgacgatcggcggtttagatttagtatagtggcgggtttgtggttatattcgtatgtagttggcggcggagagggttatagtggcgatgtaggtcgatgatttaaggtgtcggtggcgcggtcgtgggttggagtagagaagtagtttatggacgaaggtcggtagaggaggttgtgcgttgcggaaggtggggttgtagttggtcggtgatggggcgtcgatgtggcgaggttatatgttagtgaaggtcgtttgggtggcggagtgcgggatgataatgatagggggggtgagggtgttgtaagagaaagcgtggttcggtgttttttagggtt

SEQ ID NO: 39424 - DNA, 524 bp, Artificial Sequence
  chemically treated genomic DNA (Homo sapiens) CpG-island No: 39424
aaccctaaaaaacaccgaaccacgctttctcttacaacaccctcaccccccctatcattatcatcccgcactccgccacccaaacgaccttcactaacatataacctcgccacatcgacgccccatcaccgaccaactacaaccccaccttccgcaacgcacaacctcctctaccgaccttcgtccataaactacttctctactccaacccacgaccgcgccaccgacaccttaaatcatcgacctacatcgccactataaccctctccgccgccaactacatacgaatataaccacaaacccgccactatactaaatctaaaccgccgatcgtcgccgcgcctccataaactccactacttcgtcccctaaccaacgcaaatctaccccgtcacctaacctccgccatcgccgaacaatcgccgaatccgattacgaaacacccgaatctaaccataaaacgctaaatccgacaaccgccaacactacttactcccctactaccaacctccactacaactcta

SEQ ID NO: 39425 - DNA, 755 bp, Artificial Sequence
  chemically treated genomic DNA (Homo sapiens) CpG-island No: 39425
gtcgttacgacgcggttattcgacgtcgcgttatggtcggcgatggtatcggagacgacgacgacgtgtatgtacgggtgaagtataagggcgtggcgaggacggcggacgggcggtggcgagggtttattattaataagttcgggaggcggtacggcgtcggcgattacggtacgtcggaggaggcggcgttggcgtacgatcgcgttattttcgttattttgggcgcgtacgtttcgtcggcggcgtttaattttcgcgtcgcgtttagcgatacggagtttcggttttttcgcgggtcgtacgcgtcgtcgcgtcgcgtcgcgggcgtcgtcgtcgcggttatgcgcggcgtcgcgttcgacgtcgcgttcgagcggttcgcggcgcgcgtttacgacgcgtatatcgattcggagttcgcgttcgacgtcgtcgcgtttcgtttcgttattcgcgacgtcggtacgtcgttggcgtagtcggacgtcgagagggcggcgttcgtggcggcggcgaggaataaggtgtacgacgcggcgtggttgaggagttatttgcggcggcggcggttggtcggcgcgacgttcgaggacgagaataggtggtcgttcgtggtgtcgtcggcggtggtcgacgtcggcgacggtttcgtcggtaacgagttggtgtattttttttatggtagttgttatgtggacgagatgatgatttgatcgtcgttttaagattatttggaaatgttttataatttt

SEQ ID NO: 39426 - DNA, 755 bp, Artificial Sequence
  chemically treated genomic DNA (Homo sapiens) CpG-island No: 39426
aaaattataaaacatttccaaataatcttaaaacgacgatcaaatcatcatctcgtccacataacaactaccataaaaaaaatacaccaactcgttaccgacgaaaccgtcgccgacgtcgaccaccgccgacgacaccacgaacgaccacctattctcgtcctcgaacgtcgcgccgaccaaccgccgccgccgcaaataactcctcaaccacgccgcgtcgtacaccttattcctcgccgccgccacgaacgccgccctctcgacgtccgactacgccaacgacgtaccgacgtcgcgaataacgaaacgaaacgcgacgacgtcgaacgcgaactccgaatcgatatacgcgtcgtaaacgcgcgccgcgaaccgctcgaacgcgacgtcgaacgcgacgccgcgcataaccgcgacgacgacgcccgcgacgcgacgcgacgacgcgtacgacccgcgaaaaaaccgaaactccgtatcgctaaacgcgacgcgaaaattaaacgccgccgacgaaacgtacgcgcccaaaataacgaaaataacgcgatcgtacgccaacgccgcctcctccgacgtaccgtaatcgccgacgccgtaccgcctcccgaacttattaataataaaccctcgccaccgcccgtccgccgtcctcgccacgcccttatacttcacccgtacatacacgtcgtcgtcgtctccgataccatcgccgaccataacgcgacgtcgaataaccgcgtcgtaacgac

SEQ ID NO: 39427 - DNA, 755 bp, Artificial Sequence
  chemically treated genomic DNA (Homo sapiens) CpG-island No: 39427
gaaattatggagtatttttaggtaattttgaggcggcgattagattattatttcgtttatatggtagttgttataggggaggtatattagttcgttgtcggcgaagtcgtcgtcgacgtcggttatcgtcggcggtattacgggcggttatttgttttcgttttcgaacgtcgcgtcgattagtcgtcgtcgtcgtaggtagttttttagttacgtcgcgtcgtgtattttgtttttcgtcgtcgttacgaacgtcgttttttcggcgttcggttgcgttagcggcgtgtcggcgtcgcgggtggcgaggcggaacgcggcgacgtcgagcgcgagtttcgggtcggtgtgcgcgtcgtaggcgcgcgtcgcgaatcgttcgagcgcggcgtcgaacgcggcgtcgcgtatgatcgcggcgacgacgttcgcggcgcggcgcgacggcgcgtgcggttcgcggaggaatcggagtttcgtgtcgttgaacgcggcgcggaagttgagcgtcgtcggcgaagcgtgcgcgtttaggatggcgaggatggcgcggtcgtgcgttagcgtcgtttttttcggcgtgtcgtggtcgtcgacgtcgtatcgtttttcgaatttgttggtgatgaattttcgttatcgttcgttcgtcgttttcgttacgtttttgtattttattcgtgtatgtacgtcgtcgtcgttttcggtgttatcgtcggttatggcgcggcgtcgggtggtcgcgtcgtggcggt

SEQ ID NO: 39428 - DNA, 755 bp, Artificial Sequence
  chemically treated genomic DNA (Homo sapiens) CpG-island No: 39428
accgccacgacgcgaccacccgacgccgcgccataaccgacgataacaccgaaaacgacgacgacgtacatacacgaataaaatacaaaaacgtaacgaaaacgacgaacgaacgataacgaaaattcatcaccaacaaattcgaaaaacgatacgacgtcgacgaccacgacacgccgaaaaaaacgacgctaacgcacgaccgcgccatcctcgccatcctaaacgcgcacgcttcgccgacgacgctcaacttccgcgccgcgttcaacgacacgaaactccgattcctccgcgaaccgcacgcgccgtcgcgccgcgccgcgaacgtcgtcgccgcgatcatacgcgacgccgcgttcgacgccgcgctcgaacgattcgcgacgcgcgcctacgacgcgcacaccgacccgaaactcgcgctcgacgtcgccgcgttccgcctcgccacccgcgacgccgacacgccgctaacgcaaccgaacgccgaaaaaacgacgttcgtaacgacgacgaaaaacaaaatacacgacgcgacgtaactaaaaaactacctacgacgacgacgactaatcgacgcgacgttcgaaaacgaaaacaaataaccgcccgtaataccgccgacgataaccgacgtcgacgacgacttcgccgacaacgaactaatatacctcccctataacaactaccatataaacgaaataataatctaatcgccgcctcaaaattacctaaaaatactccataatttc

SEQ ID NO: 39429 - DNA, 1215 bp, Artificial Sequence
  chemically treated genomic DNA (Homo sapiens) CpG-island No: 39429
tgttttcgcgtagttgaatcgcgtttttttttatgtcggtgtgcgtcgtcgtcgcgttatgtcgtgtcgtgttaacgtcgttcgcgtacgttagttcgaaattatacgtcgcggtcgtcgttggattcgtcgcgatttttttttaaaattagtagatcgagtattatcgcgttataagagtagcgacgttttttcgttttttttttttcgtttcgatttaagaagtagagaggagagggatttttgtttttttgattatttatggcgcggttgcggcgtggtttcgaatatttggagcggcggtacgcgttttacgcggcgtattattttaattcggcgaacgtgttcgtttacgtcgtgtgcgtgtggtttattttttttatcgcgatgttttcgtttcggtacgcgtcgtcgttgtcgttgtttcgattttattgttcgttttgtcgttagtattttttcgtgtagttcggttttttcgtcgtcgtcgcgttgggcgcgtattacgcgtttatggatcgtcgcgcgggcgtcgtcgtcgcggcgttttgcgtcgtcgggtgggtcgtcgggacgtttttcgtcgacgtcgcggggttttggacgtttcgcgacgcgtggaggtcgttgtttatcgcgtaggtcgtgttttggttcgtttagttttttttttacgtttttttcgaggtaatttttcgtcgtttcgtttcgtcgtcgtcgtcgcgacggcgcgtcgtttatttttgcgtgtttttgttgtattgtgtcgattttatggtgaggtgattgtagaagcggcggtcggcgttggtggatggttcggtgtaggcggtggtgacggcgtcgttgttcgtttttatcgaggtaattggtcgtgttcgttcgagttggtcgtcgtgcggcgatggcgatcgttaagtgttcgatttaatgcgagtgcggttgtttcgtgtttttgtaggtgttgtataggttgttcgggtacgagtcgacgtcggggttttataagcgcgtttaggcgagggtggcggcgatgtataacgggtcgtcggtatcggcgtcggcgtcggagaagaaggaggaggaggagaaggagaacgtgagtaaggcgacgtaggaggagagcgtcgagaaggattcgtaggtgttttcgagggagagtgtgatagataggagaggtagagttcgggatgttatgaatttgtaatagtttgt

SEQ ID NO: 39430 - DNA, 1215 bp, Artificial Sequence
  chemically treated genomic DNA (Homo sapiens) CpG-island No: 39430
acaaactattacaaattcataacatcccgaactctacctctcctatctatcacactctccctcgaaaacacctacgaatccttctcgacgctctcctcctacgtcgccttactcacgttctccttctcctcctcctccttcttctccgacgccgacgccgataccgacgacccgttatacatcgccgccaccctcgcctaaacgcgcttataaaaccccgacgtcgactcgtacccgaacaacctatacaacacctacaaaaacacgaaacaaccgcactcgcattaaatcgaacacttaacgatcgccatcgccgcacgacgaccaactcgaacgaacacgaccaattacctcgataaaaacgaacaacgacgccgtcaccaccgcctacaccgaaccatccaccaacgccgaccgccgcttctacaatcacctcaccataaaatcgacacaatacaacaaaaacacgcaaaaataaacgacgcgccgtcgcgacgacgacgacgaaacgaaacgacgaaaaattacctcgaaaaaaacgtaaaaaaaaaactaaacgaaccaaaacacgacctacgcgataaacaacgacctccacgcgtcgcgaaacgtccaaaaccccgcgacgtcgacgaaaaacgtcccgacgacccacccgacgacgcaaaacgccgcgacgacgacgcccgcgcgacgatccataaacgcgtaatacgcgcccaacgcgacgacgacgaaaaaaccgaactacacgaaaaaatactaacgacaaaacgaacaataaaatcgaaacaacgacaacgacgacgcgtaccgaaacgaaaacatcgcgataaaaaaaataaaccacacgcacacgacgtaaacgaacacgttcgccgaattaaaataatacgccgcgtaaaacgcgtaccgccgctccaaatattcgaaaccacgccgcaaccgcgccataaataatcaaaaaaacaaaaatccctctcctctctacttcttaaatcgaaacgaaaaaaaaaaaacgaaaaaacgtcgctactcttataacgcgataatactcgatctactaattttaaaaaaaaatcgcgacgaatccaacgacgaccgcgacgtataatttcgaactaacgtacgcgaacgacgttaacacgacacgacataacgcgacgacgacgcacaccgacataaaaaaaaacgcgattcaactacgcgaaaaca

SEQ ID NO: 39431 - DNA, 1215 bp, Artificial Sequence
  chemically treated genomic DNA (Homo sapiens) CpG-island No: 39431
ataagttattataagtttataatatttcgagttttgttttttttgtttgttatattttttttcgaaaatatttacgaatttttttcggcgttttttttttgcgtcgttttgtttacgtttttttttttttttttttttttttttttcggcgtcggcgtcggtgtcggcggttcgttgtgtatcgtcgttattttcgtttggacgcgtttgtagaatttcggcgtcggttcgtattcgaataatttatgtagtatttgtaaaaatacggagtaatcgtattcgtattaaatcgaatatttggcggtcgttatcgtcgtacggcgattaattcgaacgaatacggttaattatttcgatgaagacgaatagcggcgtcgttattatcgtttgtatcgggttatttattagcgtcggtcgtcgtttttgtaattattttattataagatcggtataatgtaataaaaatacgtaaagatgggcggcgcgtcgtcgcggcggcggcggcgaggcgaggcgacgagaggttatttcgaagaaggcgtgggagaagaattgggcggattagagtacggtttgcgcggtgagtagcggtttttacgcgtcgcggaacgtttagagtttcgcggcgtcggcgaggagcgtttcggcggtttattcggcgacgtagagcgtcgcggcggcggcgttcgcgcggcggtttatgagcgcgtagtacgcgtttagcgcgacggcgacggggaagtcgagttgtacggggaggtattggcggtagagcgggtagtagaatcggagtagcggtagcggcggcgcgtatcggagcgggagtatcgcggtgaggaggatgggttatacgtatacggcgtggacgagtacgttcgtcgggttggagtggtacgtcgcgtagaacgcgtatcgtcgttttaggtgttcgagattacgtcgtagtcgcgttatggatgattaagaaaataagaattttttttttttttgttttttggatcgagacgaggaagaagaggcgggggggcgtcgttgtttttatggcgcggtggtgttcgatttgttggttttggaggagggtcgcggcgaatttagcggcggtcgcggcgtgtggtttcgagttggcgtgcgcgggcggcgttgatacggtacggtatggcgcggcggcggcgtatatcggtatgggggagagcgcggtttagttgcgcgggggta

SEQ ID NO: 39432 - DNA, 1215 bp, Artificial Sequence
  chemically treated genomic DNA (Homo sapiens) CpG-island No: 39432
tacccccgcgcaactaaaccgcgctctcccccataccgatatacgccgccgccgcgccataccgtaccgtatcaacgccgcccgcgcacgccaactcgaaaccacacgccgcgaccgccgctaaattcgccgcgaccctcctccaaaaccaacaaatcgaacaccaccgcgccataaaaacaacgacgcccccccgcctcttcttcctcgtctcgatccaaaaaacaaaaaaaaaaaaaattcttattttcttaatcatccataacgcgactacgacgtaatctcgaacacctaaaacgacgatacgcgttctacgcgacgtaccactccaacccgacgaacgtactcgtccacgccgtatacgtataacccatcctcctcaccgcgatactcccgctccgatacgcgccgccgctaccgctactccgattctactacccgctctaccgccaatacctccccgtacaactcgacttccccgtcgccgtcgcgctaaacgcgtactacgcgctcataaaccgccgcgcgaacgccgccgccgcgacgctctacgtcgccgaataaaccgccgaaacgctcctcgccgacgccgcgaaactctaaacgttccgcgacgcgtaaaaaccgctactcaccgcgcaaaccgtactctaatccgcccaattcttctcccacgccttcttcgaaataacctctcgtcgcctcgcctcgccgccgccgccgcgacgacgcgccgcccatctttacgtatttttattacattataccgatcttataataaaataattacaaaaacgacgaccgacgctaataaataacccgatacaaacgataataacgacgccgctattcgtcttcatcgaaataattaaccgtattcgttcgaattaatcgccgtacgacgataacgaccgccaaatattcgatttaatacgaatacgattactccgtatttttacaaatactacataaattattcgaatacgaaccgacgccgaaattctacaaacgcgtccaaacgaaaataacgacgatacacaacgaaccgccgacaccgacgccgacgccgaaaaaaaaaaaaaaaaaaaaaaaaaaaaacgtaaacaaaacgacgcaaaaaaaaaacgccgaaaaaaattcgtaaatattttcgaaaaaaaatataacaaacaaaaaaaacaaaactcgaaatattataaacttataataacttat

SEQ ID NO: 39433 - DNA, 1234 bp, Artificial Sequence
  chemically treated genomic DNA (Homo sapiens) CpG-island No: 39433
cgaatcgggataaatcgttgcgtcgtcgcgtcgtcgtcgtcggcgtattaggcggcggcggtgggcggtatatcgcggttatcgtcgatacgtcgacggttttgtggttgacgtatttcgttagtagttcgatcggtcggtttgtttgtcgtcggtgttgttgttgttttacggttatcgtcgtcgtcggtttttttttgtcgtcgtcgtcgtcgtcgcgtttcgacgcggcgacggatacgtcggcggcgttcgtcgtgattacgttttattggacgttcgtttcgttgggttcgtagtttcggtagtcgtcgattattaggtttttgatttcgaataggtcggagttcgattcgttttcgacgtcgtcgtcgtcgtcgtcgtcgtcggacgtcggtatggtgatttttatcggagcgaggagagtgaagttgtttcggaaattcgagttcgaatatttcgacgtcgtcgtcgtgttttttttttttttaatggtcgttattttcgtcgcgttaatattatttaaatttggcgggagattagcggcgattacgtcgttatggttgacgttattttcggttttgtttagttttaggtttttgtattattcgattttattcgtcgtcgtcggtggtagttcgtttttcggatcgtcggtcggtttcgtcgtcgttatcgcggcgtcgtcgacgtgtatcgatcgtttttcggagtacgagcgtaggatgtcgtcgatatgggcgtagtatttgtcgcggcggcgttgttttcggagtagtacggtttggttgttggcggtggagttcgatgattcggcgttcgttatcgacgcgcgcgtcgtttacggcgtcggtcggtttatcgttacggtcggtttcgtcgtcgtcgtcgttattatcggcgacgcgaggtttattttgttgtagtcgtcggcgtcgtttattgcgtttttgaagtattttttagcggcgaagacgtcgagttcgtcgtcggcgtacgtgcgtcgttagttcgttacgttatgcggcggtggcgtcggtaatggtcgtcgcggcggtattttttcggcgtcgtttttttttcggacgaggtcgaggtaggtggcgaagtcgtcgtcgtcgtcggcgacgtttcggcgtcggtcgaatagttggtgtttataggtgatcgtgacgttattattttttgagttttttattggtgtattgatatttttaagtatttgttatatagt

SEQ ID NO: 39434 - DNA, 1234 bp, Artificial Sequence
  chemically treated genomic DNA (Homo sapiens) CpG-island No: 39434
actatataacaaatacttaaaaatatcaatacaccaataaaaaactcaaaaaataataacgtcacgatcacctataaacaccaactattcgaccgacgccgaaacgtcgccgacgacgacgacgacttcgccacctacctcgacctcgtccgaaaaaaaaacgacgccgaaaaaataccgccgcgacgaccattaccgacgccaccgccgcataacgtaacgaactaacgacgcacgtacgccgacgacgaactcgacgtcttcgccgctaaaaaatacttcaaaaacgcaataaacgacgccgacgactacaacaaaataaacctcgcgtcgccgataataacgacgacgacgacgaaaccgaccgtaacgataaaccgaccgacgccgtaaacgacgcgcgcgtcgataacgaacgccgaatcatcgaactccaccgccaacaaccaaaccgtactactccgaaaacaacgccgccgcgacaaatactacgcccatatcgacgacatcctacgctcgtactccgaaaaacgatcgatacacgtcgacgacgccgcgataacgacgacgaaaccgaccgacgatccgaaaaacgaactaccaccgacgacgacgaataaaatcgaataatacaaaaacctaaaactaaacaaaaccgaaaataacgtcaaccataacgacgtaatcgccgctaatctcccgccaaatttaaataatattaacgcgacgaaaataacgaccattaaaaaaaaaaaaaacacgacgacgacgtcgaaatattcgaactcgaatttccgaaacaacttcactctcctcgctccgataaaaatcaccataccgacgtccgacgacgacgacgacgacgacgacgtcgaaaacgaatcgaactccgacctattcgaaatcaaaaacctaataatcgacgactaccgaaactacgaacccaacgaaacgaacgtccaataaaacgtaatcacgacgaacgccgccgacgtatccgtcgccgcgtcgaaacgcgacgacgacgacgacgacaaaaaaaaaccgacgacgacgataaccgtaaaacaacaacaacaccgacgacaaacaaaccgaccgatcgaactactaacgaaatacgtcaaccacaaaaccgtcgacgtatcgacgataaccgcgatataccgcccaccgccgccgcctaatacgccgacgacgacgacgcgacgacgcaacgatttatcccgattcg

SEQ ID NO: 39435 - DNA, 1234 bp, Artificial Sequence
  chemically treated genomic DNA (Homo sapiens) CpG-island No: 39435
gttatgtggtagatatttgagaatattagtgtattaatggagagtttaagaaatggtgacgttacggttatttatgagtattagttgttcggtcggcgtcggaacgtcgtcggcggcggcggcggtttcgttatttatttcgatttcgttcgggaggaaggcgacgtcggaaagatgtcgtcgcggcggttattgtcggcgttatcgtcgtatggcgtggcgagttggcggcgtacgtacgtcgacggcgagttcgacgttttcgtcgttgagaggtattttaagggcgtaatggacggcgtcgacggttataataaggtggatttcgcgtcgtcggtgatggcggcggcggcggcgaggtcggtcgtggcggtgagtcggtcggcgtcgtggacgacgcgcgcgtcggtggcgagcgtcgggttatcgggttttatcgttaatagttaggtcgtgttgtttcgggagtagcgtcgtcgcgataagtgttgcgtttatgtcggcggtattttgcgttcgtgtttcgggaagcggtcggtgtacgtcggcggcgtcgcggtggcggcgacggagtcggtcggcgattcgggggacgagttgttatcggcgacggcgagtaggatcgagtggtatagagatttgaggttggataaggtcggagatggcgttagttatggcggcgtggtcgtcgttggtttttcgttaaatttgaatagtattggcgcggcgagagtggcggttattgggagggaggagggtacggcggcgacgtcggagtattcgagttcgagttttcggagtaattttatttttttcgtttcggtgaaggttattatatcggcgttcggcggcgacgacgacgacgacgacgtcgggagcgagtcgagtttcgatttgttcgagattaagagtttgatgatcgacgattgtcggggttacgagtttagcgaggcgagcgtttaatggagcgtggttacggcgagcgtcgtcgacgtgttcgtcgtcgcgtcggggcgcggcggcggcggcggcggtaaggggaggtcggcggcggcggtggtcgtgaggtagtagtagtatcggcggtaggtagatcggtcggtcgggttgttggcgggatgcgttagttatagggtcgtcgacgtgtcggcggtggtcgcggtgtgtcgtttatcgtcgtcgtttggtgcgtcggcgacggcgacgcggcggcgtagcgatttgtttcggttcg

SEQ ID NO: 39436 - DNA, 1234 bp, Artificial Sequence
  chemically treated genomic DNA (Homo sapiens) CpG-island No: 39436
cgaaccgaaacaaatcgctacgccgccgcgtcgccgtcgccgacgcaccaaacgacgacgataaacgacacaccgcgaccaccgccgacacgtcgacgaccctataactaacgcatcccgccaacaacccgaccgaccgatctacctaccgccgatactactactacctcacgaccaccgccgccgccgacctccccttaccgccgccgccgccgccgcgccccgacgcgacgacgaacacgtcgacgacgctcgccgtaaccacgctccattaaacgctcgcctcgctaaactcgtaaccccgacaatcgtcgatcatcaaactcttaatctcgaacaaatcgaaactcgactcgctcccgacgtcgtcgtcgtcgtcgtcgccgccgaacgccgatataataaccttcaccgaaacgaaaaaaataaaattactccgaaaactcgaactcgaatactccgacgtcgccgccgtaccctcctccctcccaataaccgccactctcgccgcgccaatactattcaaatttaacgaaaaaccaacgacgaccacgccgccataactaacgccatctccgaccttatccaacctcaaatctctataccactcgatcctactcgccgtcgccgataacaactcgtcccccgaatcgccgaccgactccgtcgccgccaccgcgacgccgccgacgtacaccgaccgcttcccgaaacacgaacgcaaaataccgccgacataaacgcaacacttatcgcgacgacgctactcccgaaacaacacgacctaactattaacgataaaacccgataacccgacgctcgccaccgacgcgcgcgtcgtccacgacgccgaccgactcaccgccacgaccgacctcgccgccgccgccgccatcaccgacgacgcgaaatccaccttattataaccgtcgacgccgtccattacgcccttaaaatacctctcaacgacgaaaacgtcgaactcgccgtcgacgtacgtacgccgccaactcgccacgccatacgacgataacgccgacaataaccgccgcgacgacatctttccgacgtcgccttcctcccgaacgaaatcgaaataaataacgaaaccgccgccgccgccgacgacgttccgacgccgaccgaacaactaatactcataaataaccgtaacgtcaccatttcttaaactctccattaatacactaatattctcaaatatctaccacataac

SEQ ID NO: 39437 - DNA, 631 bp, Artificial Sequence
  chemically treated genomic DNA (Homo sapiens) CpG-island No: 39437
agtcgatttgggtgaggttggcgagtagtatgacgaggttgcgcgcgaggttcggttgtttttcgtcgcgtttggttacgacgtttatggcggttacgacggcgtcgagcgatacgaggcgggtcgagagcgcgtcgttttggttgaggttgacgagcgagttcgtcgtcgtttttttcgtgtttagttcgtttttcgcggacgttagtagtcggagtagcgtcggtagcgcgcggtcggcgcgcgtcgagagggcgcgtaggtcgttcgcgtcgttcgttagttttcgtacgatgttcgtcgtcgcgtcgcgtatttgatagaaaaatagacggcgaacgagaacgagaatacgggttagagagaagtagaatagttattaagttatggggaattaaggggggattagagcgtacgtttggttggggagaggagaggaagtcgaggagttcgtcgagttcgtcggttatggcggcggcggcggcggcgaggggggaggaggttttgtggggttcggtttttttttaagttcgaaagtacgcgacgtgacggatttacgtaaattcgaggtgaaaacgtattgtacggaaatacgtaagttagcggtgaagacgtatttttttcgtaaaaa

SEQ ID NO: 39438 - DNA, 631 bp, Artificial Sequence
  chemically treated genomic DNA (Homo sapiens) CpG-island No: 39438
tttttacgaaaaaaatacgtcttcaccgctaacttacgtatttccgtacaatacgttttcacctcgaatttacgtaaatccgtcacgtcgcgtactttcgaacttaaaaaaaaaccgaaccccacaaaacctcctcccccctcgccgccgccgccgccgccataaccgacgaactcgacgaactcctcgacttcctctcctctccccaaccaaacgtacgctctaatccccccttaattccccataacttaataactattctacttctctctaacccgtattctcgttctcgttcgccgtctatttttctatcaaatacgcgacgcgacgacgaacatcgtacgaaaactaacgaacgacgcgaacgacctacgcgccctctcgacgcgcgccgaccgcgcgctaccgacgctactccgactactaacgtccgcgaaaaacgaactaaacacgaaaaaaacgacgacgaactcgctcgtcaacctcaaccaaaacgacgcgctctcgacccgcctcgtatcgctcgacgccgtcgtaaccgccataaacgtcgtaaccaaacgcgacgaaaaacaaccgaacctcgcgcgcaacctcgtcatactactcgccaacctcacccaaatcgact

SEQ ID NO: 39439 - DNA, 631 bp, Artificial Sequence
  chemically treated genomic DNA (Homo sapiens) CpG-island No: 39439
tttttacggagggagtacgtttttatcgttggtttacgtattttcgtgtaatacgtttttatttcgggtttgcgtaaattcgttacgtcgcgtgttttcggatttggagagaagtcgaattttataaaatttttttttttttcgtcgtcgtcgtcgtcgttatggtcgacgagttcgacgaatttttcggtttttttttttttttttagttaaacgtacgttttgatttttttttgattttttatggtttagtagttgttttgtttttttttgattcgtgttttcgttttcgttcgtcgtttgtttttttattaggtgcgcggcgcggcggcgggtatcgtgcgggggttgacgggcgacgcggacggtttgcgcgttttttcggcgcgcgtcgatcgcgcgttgtcggcgttgtttcggttgttggcgttcgcggggggcgagttgggtacggggggagcggcggcggattcgttcgttaattttagttaggacggcgcgttttcggttcgtttcgtgtcgttcggcgtcgtcgtggtcgttatggacgtcgtggttaagcgcggcggggagtagtcgggtttcgcgcgtagtttcgttatgttgttcgttaattttatttaggtcgatt

SEQ ID NO: 39440 - DNA, 631 bp, Artificial Sequence
  chemically treated genomic DNA (Homo sapiens) CpG-island No: 39440
aatcgacctaaataaaattaacgaacaacataacgaaactacgcgcgaaacccgactactccccgccgcgcttaaccacgacgtccataacgaccacgacgacgccgaacgacacgaaacgaaccgaaaacgcgccgtcctaactaaaattaacgaacgaatccgccgccgctccccccgtacccaactcgccccccgcgaacgccaacaaccgaaacaacgccgacaacgcgcgatcgacgcgcgccgaaaaaacgcgcaaaccgtccgcgtcgcccgtcaacccccgcacgatacccgccgccgcgccgcgcacctaataaaaaaacaaacgacgaacgaaaacgaaaacacgaatcaaaaaaaaacaaaacaactactaaaccataaaaaatcaaaaaaaaatcaaaacgtacgtttaactaaaaaaaaaaaaaaaaaccgaaaaattcgtcgaactcgtcgaccataacgacgacgacgacgacgaaaaaaaaaaaaattttataaaattcgacttctctccaaatccgaaaacacgcgacgtaacgaatttacgcaaacccgaaataaaaacgtattacacgaaaatacgtaaaccaacgataaaaacgtactccctccgtaaaaa

SEQ ID NO: 39441 - DNA, 602 bp, Artificial Sequence
  chemically treated genomic DNA (Homo sapiens) CpG-island No: 39441
ggagttcggtagcggtcgcgaaggtggcggtaatcgtggaggcggcggcggtcgtggacgaggcggaggaggcggcgggtgtggcgatagtgttcgcgatggtggcggcgttcgcggaggtggtggttgtggtgttcgcggaggtggcgacgttcgtggaggcggcggcgggtgtggaggcgaggcggttttcggatttgagaggagcgcggcggtgttcgcggaggtggcggcgttcgcggaggtggcggtcgcggtgttcgcggaggtggcggcgttcgtggaggcggcggcggtgttcgcggaggtggcggcgtttgtggataagcggcgattttatggaggtgacggtggtcgtggaggaggaggaggcggcggcgttcgtggacgcgtagaggtggtagtgggcgtggacgaggtagcggcgtttagggaggcggcgatatttgcggatgtacggcggagttcgcggaggtggcggatggtacggtgacgtcgttcgttcgttttaggtgggacgagttcgttcgttagttttttgcggattagttggttttggatttaaaaggaatatttttttttagggattaatttattttatt

SEQ ID NO: 39442 - DNA, 602 bp, Artificial Sequence
  chemically treated genomic DNA (Homo sapiens) CpG-island No: 39442
aataaaataaattaatccctaaaaaaaaatattccttttaaatccaaaaccaactaatccgcaaaaaactaacgaacgaactcgtcccacctaaaacgaacgaacgacgtcaccgtaccatccgccacctccgcgaactccgccgtacatccgcaaatatcgccgcctccctaaacgccgctacctcgtccacgcccactaccacctctacgcgtccacgaacgccgccgcctcctcctcctccacgaccaccgtcacctccataaaatcgccgcttatccacaaacgccgccacctccgcgaacaccgccgccgcctccacgaacgccgccacctccgcgaacaccgcgaccgccacctccgcgaacgccgccacctccgcgaacaccgccgcgctcctctcaaatccgaaaaccgcctcgcctccacacccgccgccgcctccacgaacgtcgccacctccgcgaacaccacaaccaccacctccgcgaacgccgccaccatcgcgaacactatcgccacacccgccgcctcctccgcctcgtccacgaccgccgccgcctccacgattaccgccaccttcgcgaccgctaccgaactcc

SEQ ID NO: 39443 - DNA, 602 bp, Artificial Sequence
  chemically treated genomic DNA (Homo sapiens) CpG-island No: 39443
ggtgggatgggttggtttttggagaggaatattttttttagatttaggattaattgattcgtaaaaaattggcggacgaattcgttttatttaggacgagcgaacggcgttatcgtgttattcgttattttcgcgaatttcgtcgtgtattcgtaagtgtcgtcgtttttttgagcgtcgttgtttcgtttacgtttattgttatttttgcgcgtttacgagcgtcgtcgttttttttttttttacgattatcgttatttttatgaggtcgtcgtttgtttataagcgtcgttattttcgcgagtatcgtcgtcgtttttacgagcgtcgttattttcgcgagtatcgcgatcgttattttcgcgagcgtcgttattttcgcgagtatcgtcgcgttttttttagattcgggagtcgtttcgtttttatattcgtcgtcgtttttacgagcgtcgttattttcgcgagtattataattattattttcgcgagcgtcgttattatcgcgagtattgtcgttatattcgtcgtttttttcgtttcgtttacgatcgtcgtcgtttttacgattgtcgttattttcgcgatcgttgtcgagtttt

SEQ ID NO: 39444 - DNA, 602 bp, Artificial Sequence
  chemically treated genomic DNA (Homo sapiens) CpG-island No: 39444
aaaactcgacaacgatcgcgaaaataacgacaatcgtaaaaacgacgacgatcgtaaacgaaacgaaaaaaacgacgaatataacgacaatactcgcgataataacgacgctcgcgaaaataataattataatactcgcgaaaataacgacgctcgtaaaaacgacgacgaatataaaaacgaaacgactcccgaatctaaaaaaaacgcgacgatactcgcgaaaataacgacgctcgcgaaaataacgatcgcgatactcgcgaaaataacgacgctcgtaaaaacgacgacgatactcgcgaaaataacgacgcttataaacaaacgacgacctcataaaaataacgataatcgtaaaaaaaaaaaaaacgacgacgctcgtaaacgcgcaaaaataacaataaacgtaaacgaaacaacgacgctcaaaaaaacgacgacacttacgaatacacgacgaaattcgcgaaaataacgaataacacgataacgccgttcgctcgtcctaaataaaacgaattcgtccgccaattttttacgaatcaattaatcctaaatctaaaaaaaatattcctctccaaaaaccaacccatcccacc

SEQ ID NO: 39445 - DNA, 1287 bp, Artificial Sequence
  chemically treated genomic DNA (Homo sapiens) CpG-island No: 39445
ggcgggtaggtcggataaggcgtttacgtcgtattcgataattacgtttaagtcgggttgtttgatgcgacgttggcgcgttttattaggttatatcgttgtgaagtgttttatttcgtaggtcggataaggcggttacgtcgtattcgatatttaacgttcgagtcgggttgtttgatgcgacgttgtcgcgttttattatgtttatatcgttgtgaagtgttttatttcgtaggtcggataaggcgtttacgtcgtattcgattatttaacgtttaagtcggttgtttgatgcgacgttggcgcgttttattaggtttataaattttcgtatttttcgtaggtcggataaggcgttcgcgtcgtattcggtaacggtgtcgattgtttgatgcgacgtttgcgcgttttattaggtttataaattttcgtatttttcgtaggtcggataaggcgtttacgtcgtattcggtaatagtgttaattgtttgatgcgacgtttgcgcgttttattaggtttataaattttcgtattattcgtaggtcggataaggcgtttacgtcgtattcggtaacggtgtcgattgtttgatgcgacgtttgcgcgttttattaggtttataaattttcgtatttttcgtaggtcggataaggcgtttacgtcgtattcggtaatggtgtcgattgtttgatgcgacgtttatcgcgttttattaggtttatacgttatacgtaggtcggataaggcgtttacgtcgtattcggtaaatattgcgagagtagattatttcgttttaatcgttttattttttaataattttcgtatttataatcgattcgggtttaacgtcgttagcgtattggtatttatcggaatcggttcgtcgtttatttgcgtcgttagaatttcggtatatagcggggtagaatataaatcgcgagaatttaaagtcgtaaatataaagagatcgttaaaaatcggcgcgtttatcgttttatttttttgtttcgttaacgacgtatattttacgagtgttgttttataatcgggaatattgtttattattggtagatgatcgcgggtggtataacgtatatcgtagcgcgtttttttattattgatattaattttttttgtttattgtgtttgcgggaaataattaattaatcgttggcgattttgttgttgatcgtttttattgtacgtcgtattttcgttgtcgcgatgataattggtattaatataatgatgttgattcgtcggattttgtggcgtgagataatcgt

SEQ ID NO: 39446 - DNA, 1287 bp, Artificial Sequence
  chemically treated genomic DNA (Homo sapiens) CpG-island No: 39446
acgattatctcacgccacaaaatccgacgaatcaacatcattatattaataccaattatcatcgcgacaacgaaaatacgacgtacaataaaaacgatcaacaacaaaatcgccaacgattaattaattatttcccgcaaacacaataaacaaaaaaaattaatatcaataataaaaaaacgcgctacgatatacgttataccacccgcgatcatctaccaataataaacaatattcccgattataaaacaacactcgtaaaatatacgtcgttaacgaaacaaaaaaataaaacgataaacgcgccgatttttaacgatctctttatatttacgactttaaattctcgcgatttatattctaccccgctatataccgaaattctaacgacgcaaataaacgacgaaccgattccgataaataccaatacgctaacgacgttaaacccgaatcgattataaatacgaaaattattaaaaaataaaacgattaaaacgaaataatctactctcgcaatatttaccgaatacgacgtaaacgccttatccgacctacgtataacgtataaacctaataaaacgcgataaacgtcgcatcaaacaatcgacaccattaccgaatacgacgtaaacgccttatccgacctacgaaaaatacgaaaatttataaacctaataaaacgcgcaaacgtcgcatcaaacaatcgacaccgttaccgaatacgacgtaaacgccttatccgacctacgaataatacgaaaatttataaacctaataaaacgcgcaaacgtcgcatcaaacaattaacactattaccgaatacgacgtaaacgccttatccgacctacgaaaaatacgaaaatttataaacctaataaaacgcgcaaacgtcgcatcaaacaatcgacaccgttaccgaatacgacgcgaacgccttatccgacctacgaaaaatacgaaaatttataaacctaataaaacgcgccaacgtcgcatcaaacaaccgacttaaacgttaaataatcgaatacgacgtaaacgccttatccgacctacgaaataaaacacttcacaacgatataaacataataaaacgcgacaacgtcgcatcaaacaacccgactcgaacgttaaatatcgaatacgacgtaaccgccttatccgacctacgaaataaaacacttcacaacgatataacctaataaaacgcgccaacgtcgcatcaaacaacccgacttaaacgtaattatcgaatacgacgtaaacgccttatccgacctacccgcc

SEQ ID NO: 39447 - DNA, 1287 bp, Artificial Sequence
  chemically treated genomic DNA (Homo sapiens) CpG-island No: 39447
acggttattttacgttataaaattcggcgaattaatattattgtattggtgttagttattatcgcggtagcgaagatacggcgtatagtgaggacgattagtagtagaatcgttagcggttgattgattgtttttcgtaggtatagtgggtaaaagaggttgatgttagtgataaagaggcgcgttgcggtgtgcgttgtgttattcgcgattatttgttaatggtaggtaatgttttcgattatgaggtaatattcgtggaatatgcgtcgttggcggagtagaaagatgaggcggtaagcgcgtcggtttttgacgatttttttatgtttgcggttttaggttttcgcggtttgtgttttgtttcgttgtgtgtcgagattttggcggcgtagatgagcgacgaatcgatttcgatggatgttagtacgttggcggcgttaaattcgaatcggttatgggtgcggaaattgttgaagggtaaagcggttaaggcggggtaatttgttttcgtagtgtttgtcggatgcggcgtgaacgttttattcgatttacgtgtgacgtgtaggtttgataagacgcgataagcgtcgtattaggtagtcggtattattgtcggatgcggcgtaaacgttttattcggtttacggagggtgcgggaatttgtaggtttgataagacgcgtaagcgtcgtattaggtagtcggtatcgttgtcggatgcggcgtaaacgttttattcggtttacggatggtgcgggaatttgtaggtttgataagacgcgtaagcgtcgtattaggtagttggtattgttgtcggatgcggcgtaaacgttttattcggtttacggagggtgcgggaatttgtaggtttgataagacgcgtaagcgtcgtattaggtagtcggtatcgttgtcggatgcggcgcgagcgttttattcggtttacggagggtgcgggaatttgtaggtttgataagacgcgttagcgtcgtattaggtaatcggtttgggcgttagatggtcggatgcggcgtgaacgttttattcggtttacggggtggagtattttatagcggtgtaggtatgataagacgcggtagcgtcgtattaggtaattcggttcggacgttggatgtcggatgcggcgtaatcgttttattcgatttacggggtggagtattttatagcggtgtagtttgataagacgcgttagcgtcgtattaggtaattcggtttgggcgtggttgtcggatgcggcgtgaacgttttattcgatttattcgtt

SEQ ID NO: 39448 - DNA, 1287 bp, Artificial Sequence
  chemically treated genomic DNA (Homo sapiens) CpG-island No: 39448
aacgaataaatcgaataaaacgttcacgccgcatccgacaaccacgcccaaaccgaattacctaatacgacgctaacgcgtcttatcaaactacaccgctataaaatactccaccccgtaaatcgaataaaacgattacgccgcatccgacatccaacgtccgaaccgaattacctaatacgacgctaccgcgtcttatcatacctacaccgctataaaatactccaccccgtaaaccgaataaaacgttcacgccgcatccgaccatctaacgcccaaaccgattacctaatacgacgctaacgcgtcttatcaaacctacaaattcccgcaccctccgtaaaccgaataaaacgctcgcgccgcatccgacaacgataccgactacctaatacgacgcttacgcgtcttatcaaacctacaaattcccgcaccctccgtaaaccgaataaaacgtttacgccgcatccgacaacaataccaactacctaatacgacgcttacgcgtcttatcaaacctacaaattcccgcaccatccgtaaaccgaataaaacgtttacgccgcatccgacaacgataccgactacctaatacgacgcttacgcgtcttatcaaacctacaaattcccgcaccctccgtaaaccgaataaaacgtttacgccgcatccgacaataataccgactacctaatacgacgcttatcgcgtcttatcaaacctacacgtcacacgtaaatcgaataaaacgttcacgccgcatccgacaaacactacgaaaacaaattaccccgccttaaccgctttacccttcaacaatttccgcacccataaccgattcgaatttaacgccgccaacgtactaacatccatcgaaatcgattcgtcgctcatctacgccgccaaaatctcgacacacaacgaaacaaaacacaaaccgcgaaaacctaaaaccgcaaacataaaaaaatcgtcaaaaaccgacgcgcttaccgcctcatctttctactccgccaacgacgcatattccacgaatattacctcataatcgaaaacattacctaccattaacaaataatcgcgaataacacaacgcacaccgcaacgcgcctctttatcactaacatcaacctcttttacccactatacctacgaaaaacaatcaatcaaccgctaacgattctactactaatcgtcctcactatacgccgtatcttcgctaccgcgataataactaacaccaatacaataatattaattcgccgaattttataacgtaaaataaccgt

SEQ ID NO: 39449 - DNA, 533 bp, Artificial Sequence
  chemically treated genomic DNA (Homo sapiens) CpG-island No: 39449
gcggggcgcggggtttttggcgtttttgcgttcggaacggttgttttcgggttgggtggttgttgtcgtttaatacgcggttttcgtagaatagtgggttgaggtcggtttagtacggcggttttagttttaggatcggcgtatagtagagggttcggtaaaggtttcggtttagcggggaaggcgcgtttttttgcggcgttgacggggatagtagggttttcgggtcgttttttggttgtgtttcgtttcgggggacgttgggcggattgcggggcgtgttcgggggcgttgtagtgtgtgcggattcgtagtgggtgtttattgtcggttagagttaaggcgttcggtcgtttcggtttgaggaatgaaggcgttttgtgtcgttttagtaggtagtagtgattcgtggcgcgttttcggggattcgattgcgggtttagtggtgcgaagttagttttgtgttcgggtttggtttttttagtttttaggaaagcggatttcgttttcggtgagatgaaacggtttaggag

SEQ ID NO: 39450 - DNA, 533 bp, Artificial Sequence
  chemically treated genomic DNA (Homo sapiens) CpG-island No: 39450
ctcctaaaccgtttcatctcaccgaaaacgaaatccgctttcctaaaaactaaaaaaaccaaacccgaacacaaaactaacttcgcaccactaaacccgcaatcgaatccccgaaaacgcgccacgaatcactactacctactaaaacgacacaaaacgccttcattcctcaaaccgaaacgaccgaacgccttaactctaaccgacaataaacacccactacgaatccgcacacactacaacgcccccgaacacgccccgcaatccgcccaacgtcccccgaaacgaaacacaaccaaaaaacgacccgaaaaccctactatccccgtcaacgccgcaaaaaaacgcgccttccccgctaaaccgaaacctttaccgaaccctctactatacgccgatcctaaaactaaaaccgccgtactaaaccgacctcaacccactattctacgaaaaccgcgtattaaacgacaacaaccacccaacccgaaaacaaccgttccgaacgcaaaaacgccaaaaaccccgcgccccgc

SEQ ID NO: 39451 - DNA, 533 bp, Artificial Sequence
  chemically treated genomic DNA (Homo sapiens) CpG-island No: 39451
tttttgggtcgttttattttatcgagagcgagattcgtttttttagaggttgggaggattaggttcgggtataggattggtttcgtattattggattcgtagtcgggttttcggggacgcgttacgggttattgttgtttgttaaagcgatataaggcgtttttattttttaggtcgaggcggtcgaacgttttggttttggtcgatagtgagtatttattgcgagttcgtatatattgtagcgttttcgggtacgtttcgtagttcgtttagcgtttttcggggcggggtatagttagaggacggttcgagagttttgttgttttcgttagcgtcgtaggagggcgcgtttttttcgttgggtcgaggtttttgtcgggttttttattgtacgtcggttttagggttgggatcgtcgtgttggatcgattttagtttattgttttgcggaggtcgcgtgttgggcgatagtagttatttagttcggaagtagtcgtttcgagcgtaggggcgttaagagtttcgcgtttcgt

SEQ ID NO: 39452 - DNA, 533 bp, Artificial Sequence
  chemically treated genomic DNA (Homo sapiens) CpG-island No: 39452
acgaaacgcgaaactcttaacgcccctacgctcgaaacgactacttccgaactaaataactactatcgcccaacacgcgacctccgcaaaacaataaactaaaatcgatccaacacgacgatcccaaccctaaaaccgacgtacaataaaaaacccgacaaaaacctcgacccaacgaaaaaaacgcgccctcctacgacgctaacgaaaacaacaaaactctcgaaccgtcctctaactataccccgccccgaaaaacgctaaacgaactacgaaacgtacccgaaaacgctacaatatatacgaactcgcaataaatactcactatcgaccaaaaccaaaacgttcgaccgcctcgacctaaaaaataaaaacgccttatatcgctttaacaaacaacaataacccgtaacgcgtccccgaaaacccgactacgaatccaataatacgaaaccaatcctatacccgaacctaatcctcccaacctctaaaaaaacgaatctcgctctcgataaaataaaacgacccaaaaa

SEQ ID NO: 39453 - DNA, 624 bp, Artificial Sequence
  chemically treated genomic DNA (Homo sapiens) CpG-island No: 39453
gttcgggtgagggcgcgggggcggattttagggcggggcgcggggtggcgtcggtggagtcggttcggcggcgcggttcgtagtgttgcggtcgggtttcgggcgtttcggcggttattatgtttagcgtcgtgtatttttttcggagtttttttaaggtgagagtcggcgttcgggatttgcggtcgggttttcggcgttttgcgcgggtggggaggagtatagttcgcgttggttgttgcgtttcgggtcgttttttgggtattcggtgggtggggatattttcgtggtttttcgtcgtttttaatttttcgacgtgtagatcggaggcggcgttttgtaaagtggggtcgtttcgagcgcggggaaggacggggtttcgttgggggcggtagggacggcggttcggggcgagtttttgagagggtaagggcgagcgtttgagtcggttttttcgtatttggatcgttttgggcgcgcggggtattcggagtcgttgtttggatcggtttgggcgcgtagggtattcggagtttttgtcgtttggcgtagtattagttgttttgggaaggagggttggtgtcggttcggtgggtacgggagaagtggttgttgttgttattt

SEQ ID NO: 39454 - DNA, 624 bp, Artificial Sequence
  chemically treated genomic DNA (Homo sapiens) CpG-island No: 39454
aaataacaacaacaaccacttctcccgtacccaccgaaccgacaccaaccctccttcccaaaacaactaatactacgccaaacgacaaaaactccgaataccctacgcgcccaaaccgatccaaacaacgactccgaataccccgcgcgcccaaaacgatccaaatacgaaaaaaccgactcaaacgctcgcccttaccctctcaaaaactcgccccgaaccgccgtccctaccgcccccaacgaaaccccgtccttccccgcgctcgaaacgaccccactttacaaaacgccgcctccgatctacacgtcgaaaaattaaaaacgacgaaaaaccacgaaaatatccccacccaccgaatacccaaaaaacgacccgaaacgcaacaaccaacgcgaactatactcctccccacccgcgcaaaacgccgaaaacccgaccgcaaatcccgaacgccgactctcaccttaaaaaaactccgaaaaaaatacacgacgctaaacataataaccgccgaaacgcccgaaacccgaccgcaacactacgaaccgcgccgccgaaccgactccaccgacgccaccccgcgccccgccctaaaatccgcccccgcgccctcacccgaac

SEQ ID NO: 39455 - DNA, 624 bp, Artificial Sequence
  chemically treated genomic DNA (Homo sapiens) CpG-island No: 39455
gaataataatagtaattatttttttcgtatttatcgggtcggtattagtttttttttttaaaatagttggtattgcgttaagcggtagaggtttcgagtgttttgcgcgtttaggtcggtttaggtagcggtttcgagtgtttcgcgcgtttaggacggtttaggtgcggggaggtcggtttaggcgttcgtttttgtttttttaggggttcgtttcgggtcgtcgtttttatcgtttttaacggagtttcgttttttttcgcgttcgagacggttttattttgtaggacgtcgttttcggtttgtacgtcggaaagttgggagcggcggggagttacgagggtgtttttatttatcgggtgtttaggggacggttcggggcgtagtagttagcgcgggttgtgtttttttttattcgcgtagggcgtcgggagttcgatcgtaagtttcggacgtcggtttttattttgaagaagtttcggaggaagtgtacgacgttgagtatggtggtcgtcgggacgttcggagttcggtcgtagtattacgagtcgcgtcgtcgagtcggttttatcgacgttatttcgcgtttcgttttagggttcgttttcgcgtttttattcggat

SEQ ID NO: 39456 - DNA, 624 bp, Artificial Sequence
  chemically treated genomic DNA (Homo sapiens) CpG-island No: 39456
atccgaataaaaacgcgaaaacgaaccctaaaacgaaacgcgaaataacgtcgataaaaccgactcgacgacgcgactcgtaatactacgaccgaactccgaacgtcccgacgaccaccatactcaacgtcgtacacttcctccgaaacttcttcaaaataaaaaccgacgtccgaaacttacgatcgaactcccgacgccctacgcgaataaaaaaaaacacaacccgcgctaactactacgccccgaaccgtcccctaaacacccgataaataaaaacaccctcgtaactccccgccgctcccaactttccgacgtacaaaccgaaaacgacgtcctacaaaataaaaccgtctcgaacgcgaaaaaaaacgaaactccgttaaaaacgataaaaacgacgacccgaaacgaacccctaaaaaaacaaaaacgaacgcctaaaccgacctccccgcacctaaaccgtcctaaacgcgcgaaacactcgaaaccgctacctaaaccgacctaaacgcgcaaaacactcgaaacctctaccgcttaacgcaataccaactattttaaaaaaaaaaactaataccgacccgataaatacgaaaaaaataattactattattattc

SEQ ID NO: 39457 - DNA, 574 bp, Artificial Sequence
  chemically treated genomic DNA (Homo sapiens) CpG-island No: 39457
attcgcggggtaggattaacgtagtttttcggggttttggcgatttatcgttgggggttcgtagtgtagtagggcgcggtcgcgataggttcgggtatcgcgtcggagcgcgagtcgcgtttagtattacggttagttttcggcgtcgcgcgtcgcggtcgggagggggaggttcggcgttcgtatttatttatcgcggttttaggggtttcgcggggtcgggtaggcgagggttaagtcgttagaggttagcgggaggggcgggtcggcgttggcgcgtaggggtggcgagggggcgcgtcggtcgcggtgggggttgtttcgttaggttgtcgtttttttgcgtcgtcgttcgggtcgcgttcgagtcggttttgtttgttcgtatcgtttcgtttttgtttttgggtgtttttgttttttattcggttgcggttgcgttttttttaggtgtagtcgttttttttcgttttcgtgcgtacggcgttttcgtcgttgttttttttttcgggagcgtataggtgtgggagttttttttttttagtttagagagttagtttagttttgtcgatcg

SEQ ID NO: 39458 - DNA, 574 bp, Artificial Sequence
  chemically treated genomic DNA (Homo sapiens) CpG-island No: 39458
cgatcgacaaaactaaactaactctctaaactaaaaaaaaaaaactcccacacctatacgctcccgaaaaaaaaaacaacgacgaaaacgccgtacgcacgaaaacgaaaaaaaacgactacacctaaaaaaaacgcaaccgcaaccgaataaaaaacaaaaacacccaaaaacaaaaacgaaacgatacgaacaaacaaaaccgactcgaacgcgacccgaacgacgacgcaaaaaaacgacaacctaacgaaacaacccccaccgcgaccgacgcgccccctcgccacccctacgcgccaacgccgacccgcccctcccgctaacctctaacgacttaaccctcgcctacccgaccccgcgaaacccctaaaaccgcgataaataaatacgaacgccgaacctccccctcccgaccgcgacgcgcgacgccgaaaactaaccgtaatactaaacgcgactcgcgctccgacgcgatacccgaacctatcgcgaccgcgccctactacactacgaacccccaacgataaatcgccaaaaccccgaaaaactacgttaatcctaccccgcgaat

SEQ ID NO: 39459 - DNA, 574 bp, Artificial Sequence
  chemically treated genomic DNA (Homo sapiens) CpG-island No: 39459
cggtcggtagggttgggttggttttttgggttgagggggaggggtttttatatttgtgcgttttcggaagaggggatagcggcgggggcgtcgtgcgtacgggggcgaggggagacgattgtatttgagggaggcgtagtcgtaatcgggtgggaggtagagatatttagaaatagagacggggcgatacgaatagataaagtcggttcgagcgcggttcgagcggcggcgtagggaggcggtagtttggcggagtagtttttatcgcggtcggcgcgttttttcgttatttttgcgcgttagcgtcggttcgtttttttcgttggtttttggcggtttaattttcgtttgttcgatttcgcggggtttttggagtcgcggtgggtgggtgcgggcgtcgggtttttttttttcggtcgcggcgcgcggcgtcgggagttgatcgtggtgttgagcgcggttcgcgtttcgacgcggtgttcgagtttgtcgcggtcgcgttttgttgtattgcgggtttttagcggtaagtcgttaaggtttcgagaggttgcgttggttttgtttcgcggat

SEQ ID NO: 39460 - DNA, 574 bp, Artificial Sequence
  chemically treated genomic DNA (Homo sapiens) CpG-island No: 39460
atccgcgaaacaaaaccaacgcaacctctcgaaaccttaacgacttaccgctaaaaacccgcaatacaacaaaacgcgaccgcgacaaactcgaacaccgcgtcgaaacgcgaaccgcgctcaacaccacgatcaactcccgacgccgcgcgccgcgaccgaaaaaaaaaaacccgacgcccgcacccacccaccgcgactccaaaaaccccgcgaaatcgaacaaacgaaaattaaaccgccaaaaaccaacgaaaaaaacgaaccgacgctaacgcgcaaaaataacgaaaaaacgcgccgaccgcgataaaaactactccgccaaactaccgcctccctacgccgccgctcgaaccgcgctcgaaccgactttatctattcgtatcgccccgtctctatttctaaatatctctacctcccacccgattacgactacgcctccctcaaatacaatcgtctcccctcgcccccgtacgcacgacgcccccgccgctatcccctcttccgaaaacgcacaaatataaaaacccctccccctcaacccaaaaaaccaacccaaccctaccgaccg

SEQ ID NO: 39461 - DNA, 1074 bp, Artificial Sequence
  chemically treated genomic DNA (Homo sapiens) CpG-island No: 39461
  unsure (124..125, 135..136, 141..142, 144, 150..151, 153, 163, 165)
  unsure (192)
ttttcgggcgatattagggttttgggagattcgggaggttattgcgtttaggttttttacggttagttaggcgagaggcgggacgcgaagtcgcggtttttttttttttttttgaggcggtggnnngggtaaaannttttnnnntttttnnnncgggggtcgntngcggaggggcggggtttgttatagcgncgtcggttgacgcgaatgacgttgcgttagttaggtcgtagtttcgttgtttggttcgtcgggttcgttttggtcggttcggttcgttttcggttttttttgtacggtttttcgtgcgtttttgttagattgtggcggtcggtcgcgcggtgcgttttttttttttgttcgtagtttggagaggcgtttcgtgttgtatattttcgcgtttttgtcggtatcgcgtttgttttttgtcgcgtttcgttttgtcgtcgatcgtacgttcgtcgcgggatatggtatacgtatcggtacgttgttttagcgttcggggtttcggggacggcgagatgggtaagtttaggaacgtggcgtttattatcggtattataggttaggtgagtgcgggggcgggggcgcgtcggtcgaggtagtttgggtacgcgtgttttttttacgcgtcgttattcgtgggttgcggtttttttaggaatagttttttcggcgtttcggaaggggtttgttgtcgggaggtgggacggaaggtacggtgtagttagtgtgttgcgtgtggggtgtgcgggatatatcgagcgtttttggtttttttttgggggttgtgagcgtgtgtgtcgcgcgggatgtcgcgtttatattcgggtaggatcgttcgtttttatttgttttttaggtgatcgtagcgtttttttttttaagtttatgtcgtgtttcgtagtttttagtgtcggaaagggaaaagaatcggtgattaatgaatttgcgggtgaggtttttttgatgtgtttcggtttaaggggcgtttatttgttaacgtttgggaagtaagaaaaagggtgttttgttggtttcgttttttattatcggatttttagatagaaa

SEQ ID NO: 39462 - DNA, 1074 bp, Artificial Sequence
  chemically treated genomic DNA (Homo sapiens) CpG-island No: 39462
  unsure (883, 910, 912, 922..923, 925, 931..932, 934, 939..940, 949..)
tttctatctaaaaatccgataataaaaaacgaaaccaacaaaacaccctttttcttacttcccaaacgttaacaaataaacgccccttaaaccgaaacacatcaaaaaaacctcacccgcaaattcattaatcaccgattcttttccctttccgacactaaaaactacgaaacacgacataaacttaaaaaaaaaaacgctacgatcacctaaaaaacaaataaaaacgaacgatcctacccgaatataaacgcgacatcccgcgcgacacacacgctcacaacccccaaaaaaaaaccaaaaacgctcgatatatcccgcacaccccacacgcaacacactaactacaccgtaccttccgtcccacctcccgacaacaaaccccttccgaaacgccgaaaaaactattcctaaaaaaaccgcaacccacgaataacgacgcgtaaaaaaaacacgcgtacccaaactacctcgaccgacgcgcccccgcccccgcactcacctaacctataataccgataataaacgccacgttcctaaacttacccatctcgccgtccccgaaaccccgaacgctaaaacaacgtaccgatacgtataccatatcccgcgacgaacgtacgatcgacgacaaaacgaaacgcgacaaaaaacaaacgcgataccgacaaaaacgcgaaaatatacaacacgaaacgcctctccaaactacgaacaaaaaaaaaaaacgcaccgcgcgaccgaccgccacaatctaacaaaaacgcacgaaaaaccgtacaaaaaaaaccgaaaacgaaccgaaccgaccaaaacgaacccgacgaaccaaacaacgaaactacgacctaactaacgcaacgtcattcgcgtcaaccgacgncgctataacaaaccccgcccctccgcnancgacccccgnnnnaaaaannnnaaaannttttacccnnnccaccgcctcaaaaaaaaaaaaaaaaaccgcgacttcgcgtcccgcctctcgcctaactaaccgtaaaaaacctaaacgcaataacctcccgaatctcccaaaaccctaatatcgcccgaaaa

SEQ ID NO: 39463 - DNA, 1074 bp, Artificial Sequence
  chemically treated genomic DNA (Homo sapiens) CpG-island No: 39463
  unsure (883, 910, 912, 922..923, 925, 931..932, 934, 939..940, 949..)
tttttatttggaaattcggtgataggggacgaaattagtaaagtatttttttttttgttttttaaacgttagtaggtaagcgttttttgagtcgagatatattaagaagattttattcgtaagtttattgattatcggttttttttttttttcggtattaggagttgcgaagtacgatatgggtttggaggaagagacgttgcggttatttgaggggtaggtgagagcgggcggttttgttcgggtgtgagcgcgatatttcgcgcggtatatacgtttatagtttttagaggaagattagaggcgttcgatgtatttcgtatattttatacgtaatatattaattgtatcgtatttttcgttttatttttcggtagtagatttttttcgggacgtcgagagggttgtttttggagagatcgtagtttacgagtagcggcgcgtagggagagtacgcgtgtttaggttgtttcggtcggcgcgttttcgttttcgtatttatttggtttgtgatatcggtgatgagcgttacgtttttgggtttgtttatttcgtcgttttcggagtttcgggcgttggggtagcgtgtcggtgcgtgtgttatgtttcgcggcgggcgtgcggtcggcggtagggcggagcgcggtagagggtaggcgcggtgtcggtaggaacgcgggggtgtgtagtacgaagcgtttttttaggttgcgggtagggagggagagcgtatcgcgcgatcggtcgttatagtttgataggggcgtacgggaggtcgtgtagggagggtcgggggcgggtcgagtcggttaaggcgggttcgacgggttaagtagcggggttgcggtttgattggcgtagcgttattcgcgttagtcggcgncgttgtagtaggtttcgttttttcgtngncggttttcgnnnnggaggnnnnggggnnttttgtttnnnttatcgttttagggaagaggaaggaggtcgcggtttcgcgtttcgtttttcgtttggttggtcgtggggggtttggacgtagtggtttttcgaattttttaggattttaatatcgttcgagga

SEQ ID NO: 39464 - DNA, 1074 bp, Artificial Sequence
  chemically treated genomic DNA (Homo sapiens) CpG-island No: 39464
  unsure (124..125, 135..136, 141..142, 144, 150..151, 153, 163, 165)
  unsure (192)
tcctcgaacgatattaaaatcctaaaaaattcgaaaaaccactacgtccaaaccccccacgaccaaccaaacgaaaaacgaaacgcgaaaccgcgacctccttcctcttccctaaaacgataannnaaacaaaannccccnnnncctccnnnncgaaaaccgncnacgaaaaaacgaaacctactacaacgncgccgactaacgcgaataacgctacgccaatcaaaccgcaaccccgctacttaacccgtcgaacccgccttaaccgactcgacccgcccccgaccctccctacacgacctcccgtacgcccctatcaaactataacgaccgatcgcgcgatacgctctccctccctacccgcaacctaaaaaaacgcttcgtactacacacccccgcgttcctaccgacaccgcgcctaccctctaccgcgctccgccctaccgccgaccgcacgcccgccgcgaaacataacacacgcaccgacacgctaccccaacgcccgaaactccgaaaacgacgaaataaacaaacccaaaaacgtaacgctcatcaccgatatcacaaaccaaataaatacgaaaacgaaaacgcgccgaccgaaacaacctaaacacgcgtactctccctacgcgccgctactcgtaaactacgatctctccaaaaacaaccctctcgacgtcccgaaaaaaatctactaccgaaaaataaaacgaaaaatacgatacaattaatatattacgtataaaatatacgaaatacatcgaacgcctctaatcttcctctaaaaactataaacgtatataccgcgcgaaatatcgcgctcacacccgaacaaaaccgcccgctctcacctacccctcaaataaccgcaacgtctcttcctccaaacccatatcgtacttcgcaactcctaataccgaaaaaaaaaaaaaaccgataatcaataaacttacgaataaaatcttcttaatatatctcgactcaaaaaacgcttacctactaacgtttaaaaaacaaaaaaaaaaatactttactaatttcgtcccctatcaccgaatttccaaataaaaa

SEQ ID NO: 39465 - DNA, 629 bp, Artificial Sequence
  chemically treated genomic DNA (Homo sapiens) CpG-island No: 39465
tcgtcgcgcggaaggagttagaaagcgagtcgcgttagttcgggagttgtcgttcgttggggttgttcgaggcgtagcggcggcggcggtcgcgggggcggagggcggagggcggagggcggtgggtgtttggtgggtgtgtgtttgtggcggagtagggtagaggttgcgcgcgggaggttaggcggggcgttttggggcgtcgttttttcgtttcgtagttagtcggttcggcgcgtatatagggttgcggttattttagtttttcgtttcgttttttttcgcgtttcgcgtattcgcgggttggagcggtcgtcgtttttttttttttttttttttttttttttttttttttagcgttttcggttgttaaggtgggcggcggggcgggatggttgggttgcgcgagtcggtagcgtatcgtcggggacgtcggggttttgtttcgcggcgtcggagttgtgcgttcggtcggggatagcgttttggtgtttagggcgcggttggggcgcgggtaggtatcgtttatatttcggcggggtgttttttttagttttcgcgcgttagttatttttgttgtttcgggtttggttttatatttatttgtttcgttttgtagtttttattcg

SEQ ID NO: 39466 - DNA, 629 bp, Artificial Sequence
  chemically treated genomic DNA (Homo sapiens) CpG-island No: 39466
cgaataaaaactacaaaacgaaacaaataaatataaaaccaaacccgaaacaacaaaaataactaacgcgcgaaaactaaaaaaaacaccccgccgaaatataaacgatacctacccgcgccccaaccgcgccctaaacaccaaaacgctatccccgaccgaacgcacaactccgacgccgcgaaacaaaaccccgacgtccccgacgatacgctaccgactcgcgcaacccaaccatcccgccccgccgcccaccttaacaaccgaaaacgctaaaaaaaaaaaaaaaaaaaaaaaaaaaaaaaaaaaaacgacgaccgctccaacccgcgaatacgcgaaacgcgaaaaaaaacgaaacgaaaaactaaaataaccgcaaccctatatacgcgccgaaccgactaactacgaaacgaaaaaacgacgccccaaaacgccccgcctaacctcccgcgcgcaacctctaccctactccgccacaaacacacacccaccaaacacccaccgccctccgccctccgccctccgcccccgcgaccgccgccgccgctacgcctcgaacaaccccaacgaacgacaactcccgaactaacgcgactcgctttctaactccttccgcgcgacga

SEQ ID NO: 39467 - DNA, 629 bp, Artificial Sequence
  chemically treated genomic DNA (Homo sapiens) CpG-island No: 39467
cgggtgggagttgtagagcgaagtaggtgggtgtggagttaggttcggggtagtaggagtggttggcgcgcggaagttgagggaggtatttcgtcgaggtgtgggcggtgtttgttcgcgttttagtcgcgttttgggtattagagcgttgttttcggtcgagcgtatagtttcggcgtcgcgaggtagagtttcggcgttttcggcggtgcgttgtcggttcgcgtagtttagttatttcgtttcgtcgtttattttgatagtcgggagcgttgaggaggaagagggggagggggaggaggaagagaaggcggcggtcgttttagttcgcgggtgcgcggagcgcgggaggaggcggagcgggaggttggggtggtcgtagttttgtgtgcgcgtcgggtcggttagttgcggggcgggggagcggcgttttagagcgtttcgtttagtttttcgcgcgtagtttttattttgtttcgttatagatatatatttattaagtatttatcgtttttcgtttttcgtttttcgttttcgcggtcgtcgtcgtcgttgcgtttcgggtagttttagcgagcggtaattttcgggttggcgcggttcgttttttggtttttttcgcgcggcga

SEQ ID NO: 39468 - DNA, 629 bp, Artificial Sequence
  chemically treated genomic DNA (Homo sapiens) CpG-island No: 39468
tcgccgcgcgaaaaaaaccaaaaaacgaaccgcgccaacccgaaaattaccgctcgctaaaactacccgaaacgcaacgacgacgacgaccgcgaaaacgaaaaacgaaaaacgaaaaacgataaatacttaataaatatatatctataacgaaacaaaataaaaactacgcgcgaaaaactaaacgaaacgctctaaaacgccgctcccccgccccgcaactaaccgacccgacgcgcacacaaaactacgaccaccccaacctcccgctccgcctcctcccgcgctccgcgcacccgcgaactaaaacgaccgccgccttctcttcctcctccccctccccctcttcctcctcaacgctcccgactatcaaaataaacgacgaaacgaaataactaaactacgcgaaccgacaacgcaccgccgaaaacgccgaaactctacctcgcgacgccgaaactatacgctcgaccgaaaacaacgctctaatacccaaaacgcgactaaaacgcgaacaaacaccgcccacacctcgacgaaatacctccctcaacttccgcgcgccaaccactcctactaccccgaacctaactccacacccacctacttcgctctacaactcccacccg

SEQ ID NO: 39469 - DNA, 586 bp, Artificial Sequence
  chemically treated genomic DNA (Homo sapiens) CpG-island No: 39469
gttgttatgtgtaggacgtttacggtttttcggcgtttcgcgcgttcgcggggttggaaggggcgggaaggggcgggtcggggtagagataggggttcgcgtttatcgtcgcgtcgggagtttggcgtggaggcggcgggacggcggcgtaggtttttgaggtgtgcgcggggcgtcgggcgtttttggtcggggtattggttgagttacgtttgttcgtttttttttggcgtcgttcgcgtggcgcgtttcgattttgttttttcgcgagggtcgggagggtttcgggattttgtagattttacgcgttttacggtttttttagtttttcggatttttttttttgcgtcgtcgtcgagttttttggggcggtttcgttttcggtcgtttttttagagattttttttggggggcgttttttttttagcgttttttttcgggtttcgagttagcggttgtcgtaggagttggtttcggggcgaggagtttcggatttaggtttttagtcggtttcggtaaggagattggaaggatttttcgcgaatgtttatttttatttttggagtggcgtcggagttattaatta

SEQ ID NO: 39470 - DNA, 586 bp, Artificial Sequence
  chemically treated genomic DNA (Homo sapiens) CpG-island No: 39470
taattaataactccgacgccactccaaaaataaaaataaacattcgcgaaaaatccttccaatctccttaccgaaaccgactaaaaacctaaatccgaaactcctcgccccgaaaccaactcctacgacaaccgctaactcgaaacccgaaaaaaaacgctaaaaaaaaaacgccccccaaaaaaaatctctaaaaaaacgaccgaaaacgaaaccgccccaaaaaactcgacgacgacgcaaaaaaaaaaatccgaaaaactaaaaaaaccgtaaaacgcgtaaaatctacaaaatcccgaaaccctcccgaccctcgcgaaaaaacaaaatcgaaacgcgccacgcgaacgacgccaaaaaaaaacgaacaaacgtaactcaaccaataccccgaccaaaaacgcccgacgccccgcgcacacctcaaaaacctacgccgccgtcccgccgcctccacgccaaactcccgacgcgacgataaacgcgaacccctatctctaccccgacccgccccttcccgccccttccaaccccgcgaacgcgcgaaacgccgaaaaaccgtaaacgtcctacacataacaac

SEQ ID NO: 39471 - DNA, 586 bp, Artificial Sequence
  chemically treated genomic DNA (Homo sapiens) CpG-island No: 39471
taattggtaatttcgacgttattttagaaataaaaatgagtattcgcggagaatttttttagtttttttatcgaggtcggttagggatttgaattcgaagtttttcgtttcggagttagtttttgcggtagtcgttggttcgaggttcgggaaggggcgttgaggggaaggcgttttttagggaaggtttttgaggagacggtcggaggcggggtcgttttaggggattcggcggcgacgtaaggagaaagattcgaggagttggaggagtcgtgaggcgcgtggagtttgtaaggtttcggagttttttcggttttcgcgggagagtagggtcgaggcgcgttacgcgggcggcgttagggaggggcgggtaggcgtggtttagttagtgtttcggttagaggcgttcggcgtttcgcgtatattttagaggtttgcgtcgtcgtttcgtcgtttttacgttaggttttcggcgcggcgatgggcgcgggtttttgtttttgtttcggttcgttttttttcgttttttttagtttcgcgaacgcgcgagacgtcgggggatcgtgggcgttttgtatatagtagt

SEQ ID NO: 39472 - DNA, 586 bp, Artificial Sequence
  chemically treated genomic DNA (Homo sapiens) CpG-island No: 39472
actactatatacaaaacgcccacgatcccccgacgtctcgcgcgttcgcgaaactaaaaaaaacgaaaaaaaacgaaccgaaacaaaaacaaaaacccgcgcccatcgccgcgccgaaaacctaacgtaaaaacgacgaaacgacgacgcaaacctctaaaatatacgcgaaacgccgaacgcctctaaccgaaacactaactaaaccacgcctacccgcccctccctaacgccgcccgcgtaacgcgcctcgaccctactctcccgcgaaaaccgaaaaaactccgaaaccttacaaactccacgcgcctcacgactcctccaactcctcgaatctttctccttacgtcgccgccgaatcccctaaaacgaccccgcctccgaccgtctcctcaaaaaccttccctaaaaaacgccttcccctcaacgccccttcccgaacctcgaaccaacgactaccgcaaaaactaactccgaaacgaaaaacttcgaattcaaatccctaaccgacctcgataaaaaaactaaaaaaattctccgcgaatactcatttttatttctaaaataacgtcgaaattaccaatta

SEQ ID NO: 39473 - DNA, 554 bp, Artificial Sequence
  chemically treated genomic DNA (Homo sapiens) CpG-island No: 39473
ttcgcgcggatttattcgcgtttcgggcgttgcgttacgtttcgtcgagggtcggttgcgttggtgcgggtttttcgttcgtcgtttcggcgtttcggttgtgcgtttttattcgttgggttcgttttagtcgttttttatcgattatcgtcgcggttcggtagagttgttagcggcgcgtcggtttagacgttttgttattcgttgttgtttggggttttggttgttaggcgttggaattattggcgaggaggtagtttcgaatttatagtgaggggcgttgttgttttttgggtttcggggacgaggttttgttttgtatttttttttttttcgtttcgtttcgggagattttttcggtttaattttttttttttcgggatattgacggtagtaaggatgatgttatagtcgtttcgtgttaattattagattagcgtttacggggtttcgaatttcgtttagcgaggggtcgtgagggagagcgagttgggggtataggagtattattttttgcggagattcgtgttttttaatattttttttttttgaat

SEQ ID NO: 39474 - DNA, 554 bp, Artificial Sequence
  chemically treated genomic DNA (Homo sapiens) CpG-island No: 39474
attcaaaaaaaaaaaatattaaaaaacacgaatctccgcaaaaaataatactcctatacccccaactcgctctccctcacgacccctcgctaaacgaaattcgaaaccccgtaaacgctaatctaataattaacacgaaacgactataacatcatccttactaccgtcaatatcccgaaaaaaaaaaaattaaaccgaaaaaatctcccgaaacgaaacgaaaaaaaaaaaaatacaaaacaaaacctcgtccccgaaacccaaaaaacaacaacgcccctcactataaattcgaaactacctcctcgccaataattccaacgcctaacaaccaaaaccccaaacaacaacgaataacaaaacgtctaaaccgacgcgccgctaacaactctaccgaaccgcgacgataatcgataaaaaacgactaaaacgaacccaacgaataaaaacgcacaaccgaaacgccgaaacgacgaacgaaaaacccgcaccaacgcaaccgaccctcgacgaaacgtaacgcaacgcccgaaacgcgaataaatccgcgcgaa

SEQ ID NO: 39475 - DNA, 554 bp, Artificial Sequence
  chemically treated genomic DNA (Homo sapiens) CpG-island No: 39475
gtttagaaaaaaaaaatgttgaagaatacgaattttcgtaggaaatgatatttttgtatttttagttcgtttttttttacgatttttcgttaggcggggttcgggatttcgtgaacgttgatttgatagttgatacgggacgattgtggtattatttttgttgtcgttagtatttcgagagggaggaggttgggtcgggagggtttttcggggcggggcggaggaggagggaatgtaaaatagagtttcgttttcggaatttaagaagtagtaacgttttttattataaattcggagttgttttttcgttaatgattttagcgtttgatagttaggattttaggtagtagcgagtgataggacgtttggatcggcgcgtcgttagtagttttgtcgggtcgcggcggtgatcgatggggagcggttggagcggatttagcgagtgagggcgtatagtcgggacgtcgaggcggcgggcgggagattcgtattagcgtagtcggttttcggcgggacgtgacgtagcgttcggggcgcgggtgagttcgcgcgga

SEQ ID NO: 39476 - DNA, 554 bp, Artificial Sequence
  chemically treated genomic DNA (Homo sapiens) CpG-island No: 39476
tccgcgcgaactcacccgcgccccgaacgctacgtcacgtcccgccgaaaaccgactacgctaatacgaatctcccgcccgccgcctcgacgtcccgactatacgccctcactcgctaaatccgctccaaccgctccccatcgatcaccgccgcgacccgacaaaactactaacgacgcgccgatccaaacgtcctatcactcgctactacctaaaatcctaactatcaaacgctaaaatcattaacgaaaaaacaactccgaatttataataaaaaacgttactacttcttaaattccgaaaacgaaactctattttacattccctcctcctccgccccgccccgaaaaaccctcccgacccaacctcctccctctcgaaatactaacgacaacaaaaataataccacaatcgtcccgtatcaactatcaaatcaacgttcacgaaatcccgaaccccgcctaacgaaaaatcgtaaaaaaaaacgaactaaaaatacaaaaatatcatttcctacgaaaattcgtattcttcaacattttttttttctaaac

SEQ ID NO: 39477 - DNA, 517 bp, Artificial Sequence
  chemically treated genomic DNA (Homo sapiens) CpG-island No: 39477
gtgggttcgggagggggagacgggaggaattacgttagatatgttgaaaggaagaaacgtaaagtatcgcgagttatatagatatattgtagagatagtttcgaattttgtttttgtatacgttcgttttttacgaatttatcgcgttttttgtcgcgagttttcgtgggcgtcgggttgttacgggaagcggtgcgtatgcgcggggacgtttaacggggtaggagttcgttaggttttttcgttatttttggaaattatcggagttttggcgattggaggggaaaaggttaggcgatttaagatggcggaggatttggacgagtttttggatgaagtcgagtttaagttttgtatatttgattttttaagacggggtatggtcgagtagtttaaaggttgcggcggcggtatttatagtagcgatcggaattaagttaaggcgaaagagacgtttaggttaatcgggcgggaggggtggattgttttggtaaagttttgttttaggttttagagt

SEQ ID NO: 39478 - DNA, 517 bp, Artificial Sequence
  chemically treated genomic DNA (Homo sapiens) CpG-island No: 39478
actctaaaacctaaaacaaaactttaccaaaacaatccacccctcccgcccgattaacctaaacgtctctttcgccttaacttaattccgatcgctactataaataccgccgccgcaacctttaaactactcgaccataccccgtcttaaaaaatcaaatatacaaaacttaaactcgacttcatccaaaaactcgtccaaatcctccgccatcttaaatcgcctaaccttttcccctccaatcgccaaaactccgataatttccaaaaataacgaaaaaacctaacgaactcctaccccgttaaacgtccccgcgcatacgcaccgcttcccgtaacaacccgacgcccacgaaaactcgcgacaaaaaacgcgataaattcgtaaaaaacgaacgtatacaaaaacaaaattcgaaactatctctacaatatatctatataactcgcgatactttacgtttcttcctttcaacatatctaacgtaattcctcccgtctccccctcccgaacccac

SEQ ID NO: 39479 - DNA, 517 bp, Artificial Sequence
  chemically treated genomic DNA (Homo sapiens) CpG-island No: 39479
gttttagggtttggagtagggttttattagaatagtttatttttttcgttcggttaatttgagcgtttttttcgttttggtttggtttcggtcgttattgtgggtgtcgtcgtcgtagtttttgggttgttcgattatatttcgttttagaaggttaggtgtgtaaaatttggattcgattttatttaagagttcgtttaggtttttcgttattttgaatcgtttggtttttttttttttaatcgttaaggtttcggtggtttttaggagtaacgaggggatttggcgggtttttgtttcgttaggcgttttcgcgtatgcgtatcgtttttcgtggtaattcggcgtttacgagggttcgcggtagagaacgcggtgggttcgtgaggggcgggcgtatgtagggatagagttcggagttgtttttgtagtgtgtttgtgtgattcgcgatgttttgcgttttttttttttagtatgtttggcgtggtttttttcgtttttttttttcgggtttat

SEQ ID NO: 39480 - DNA, 517 bp, Artificial Sequence
  chemically treated genomic DNA (Homo sapiens) CpG-island No: 39480
ataaacccgaaaaaaaaaaacgaaaaaaaccacgccaaacatactaaaaaaaaaaaacgcaaaacatcgcgaatcacacaaacacactacaaaaacaactccgaactctatccctacatacgcccgcccctcacgaacccaccgcgttctctaccgcgaaccctcgtaaacgccgaattaccacgaaaaacgatacgcatacgcgaaaacgcctaacgaaacaaaaacccgccaaatcccctcgttactcctaaaaaccaccgaaaccttaacgattaaaaaaaaaaaaaccaaacgattcaaaataacgaaaaacctaaacgaactcttaaataaaatcgaatccaaattttacacacctaaccttctaaaacgaaatataatcgaacaacccaaaaactacgacgacgacacccacaataacgaccgaaaccaaaccaaaacgaaaaaaacgctcaaattaaccgaacgaaaaaaataaactattctaataaaaccctactccaaaccctaaaac

SEQ ID NO: 39481 - DNA, 701 bp, Artificial Sequence
  chemically treated genomic DNA (Homo sapiens) CpG-island No: 39481
agaacgattttgggcggttgtattgattgtcgggtgtgggcggagcgaagggcgtttcggtcggtatggcgggtaggaagtgcgggtgcgcgtttgcgtataggtcgggtttgcggtgttatcgttttcgtttttgtttgagttagtttttacggtgacgtttttttttagttttttcgagtaggatcgtgtttaggggaggaggtagagtgcggtagtggggagggggcggagcgtagagcgtttgcgggggcgttcgggtaaggagtggggatttttggggatgggggtacgggaggaggcgtgggtgggcgataaggttgcgtggaggggaggggcggggggcgtcggggcgggagacggaggggatttgttttgggggagttcggtttttttttagttttgttcggggtacgtcggtgatttcgtgtgtttgtttcgtggtagtattttcgtgggtcgtttgtttttttttttagttcgtttttattcgcggtttcgtttttagagtagggttttttattcgcggggtttcgggttttttattcggtatttttgttagaggggatcgtttttcggcgcgtcgggtattcgttttttttattttttttttttttaggagaaattgaatacgttttttagtttaaattcggtagggtaaattagaatatttttcgtttaagtagtttcggggagtttta

SEQ ID NO: 39482 - DNA, 701 bp, Artificial Sequence
  chemically treated genomic DNA (Homo sapiens) CpG-island No: 39482
taaaactccccgaaactacttaaacgaaaaatattctaatttaccctaccgaatttaaactaaaaaacgtattcaatttctcctaaaaaaaaaaaaaataaaaaaaacgaatacccgacgcgccgaaaaacgatcccctctaacaaaaataccgaataaaaaacccgaaaccccgcgaataaaaaaccctactctaaaaacgaaaccgcgaataaaaacgaactaaaaaaaaaaacaaacgacccacgaaaatactaccacgaaacaaacacacgaaatcaccgacgtaccccgaacaaaactaaaaaaaaaccgaactcccccaaaacaaatcccctccgtctcccgccccgacgccccccgcccctcccctccacgcaaccttatcgcccacccacgcctcctcccgtacccccatccccaaaaatccccactccttacccgaacgcccccgcaaacgctctacgctccgccccctccccactaccgcactctacctcctcccctaaacacgatcctactcgaaaaaactaaaaaaaaacgtcaccgtaaaaactaactcaaacaaaaacgaaaacgataacaccgcaaacccgacctatacgcaaacgcgcacccgcacttcctacccgccataccgaccgaaacgcccttcgctccgcccacacccgacaatcaatacaaccgcccaaaatcgttct

SEQ ID NO: 39483 - DNA, 701 bp, Artificial Sequence
  chemically treated genomic DNA (Homo sapiens) CpG-island No: 39483
taaaatttttcggaattgtttagacggggaatgttttggtttgttttgtcgagtttaggttggaaaacgtgtttagttttttttgaagagggaaggggtgaaagagacgaatgttcgacgcgtcgggaggcggttttttttggtagaggtgtcgggtgaggagttcgaagtttcgcgggtgagaaattttgttttgaaagcggagtcgcggataagggcgggttgagggggagggtaggcggtttacgaaagtattgttacggggtagatatacggggttatcggcgtgtttcgggtaaggttaggggagaatcgggtttttttaggatagatttttttcgtttttcgtttcggcgtttttcgttttttttttttacgtagttttatcgtttatttacgttttttttcgtatttttatttttaaggatttttattttttgttcgggcgttttcgtaggcgttttgcgtttcgttttttttttattgtcgtattttgtttttttttttgggtacgattttattcggaaaagttggggaaaagcgttatcgtgaggattgatttaagtagaagcgaaagcggtgatatcgtagattcgatttatgcgtaggcgcgtattcgtattttttgttcgttatatcggtcggggcgtttttcgtttcgtttatattcggtagttaatatagtcgtttagagtcgtttt

SEQ ID NO: 39484 - DNA, 701 bp, Artificial Sequence
  chemically treated genomic DNA (Homo sapiens) CpG-island No: 39484
aaaacgactctaaacgactatattaactaccgaatataaacgaaacgaaaaacgccccgaccgatataacgaacaaaaaatacgaatacgcgcctacgcataaatcgaatctacgatatcaccgctttcgcttctacttaaatcaatcctcacgataacgcttttccccaacttttccgaataaaatcgtacccaaaaaaaaaaacaaaatacgacaataaaaaaaaaacgaaacgcaaaacgcctacgaaaacgcccgaacaaaaaataaaaatccttaaaaataaaaatacgaaaaaaaacgtaaataaacgataaaactacgtaaaaaaaaaaaacgaaaaacgccgaaacgaaaaacgaaaaaaatctatcctaaaaaaacccgattctcccctaaccttacccgaaacacgccgataaccccgtatatctaccccgtaacaatactttcgtaaaccgcctaccctccccctcaacccgcccttatccgcgactccgctttcaaaacaaaatttctcacccgcgaaacttcgaactcctcacccgacacctctaccaaaaaaaaccgcctcccgacgcgtcgaacattcgtctctttcaccccttccctcttcaaaaaaaactaaacacgttttccaacctaaactcgacaaaacaaaccaaaacattccccgtctaaacaattccgaaaaatttta

SEQ ID NO: 39485 - DNA, 517 bp, Artificial Sequence
  chemically treated genomic DNA (Homo sapiens) CpG-island No: 39485
tcgttttttgattttttttacgtgatttcgggttattttgtaatcgttatatcgttttttgattttttttacgtgatttcgggttattttgtaatcgttatatcgttttttgattttgtttacgtgatttcgggttattttgtaatcgttatatcgttttttgattttttttacgtgatttcgggttattttgtaatttttatatcgttttttgattttgtttacgtgatttcgggttattttgtaattattatatcgttttttgattttttttacgtgatttcgggttattttgtaatcgttatatcgttttttgattttgtttacgtgatttcgggttattttgtaatcgttatatcgttttttgattttgtttacgtgatggttttattattttttcggtcggagagaaatcgtttttaaattttgtttcgttttttttcgtagtttttttggttttggttgagcggggtcggtttatacggtttagatcgtgataaatgtttagtaataaatg

SEQ ID NO: 39486 - DNA, 517 bp, Artificial Sequence
  chemically treated genomic DNA (Homo sapiens) CpG-island No: 39486
catttattactaaacatttatcacgatctaaaccgtataaaccgaccccgctcaaccaaaaccaaaaaaactacgaaaaaaaacgaaacaaaatttaaaaacgatttctctccgaccgaaaaaataataaaaccatcacgtaaacaaaatcaaaaaacgatataacgattacaaaataacccgaaatcacgtaaacaaaatcaaaaaacgatataacgattacaaaataacccgaaatcacgtaaaaaaaatcaaaaaacgatataataattacaaaataacccgaaatcacgtaaacaaaatcaaaaaacgatataaaaattacaaaataacccgaaatcacgtaaaaaaaatcaaaaaacgatataacgattacaaaataacccgaaatcacgtaaacaaaatcaaaaaacgatataacgattacaaaataacccgaaatcacgtaaaaaaaatcaaaaaacgatataacgattacaaaataacccgaaatcacgtaaaaaaaatcaaaaaacga

SEQ ID NO: 39487 - DNA, 517 bp, Artificial Sequence
  chemically treated genomic DNA (Homo sapiens) CpG-island No: 39487
tatttattgttggatatttgttacggtttgagtcgtgtggatcggtttcgtttagttagagttaggagggttacgaggggaggcggggtagggtttggggacgattttttttcgatcgaaggagtaatggggttattacgtaggtaaggttaaaggacgatgtggcggttgtagggtgattcgaggttacgtaggtaaggttaaaggacgatgtggcggttgtagggtgattcgaggttacgtagggaaggttaaaggacgatgtggtggttgtagggtgattcgaggttacgtaggtaaggttaaaggacgatgtgggggttgtagggtgattcgaggttacgtagggaaggttaaaggacgatgtggcggttgtagggtgattcgaggttacgtaggtaaggttaaaggacgatgtggcggttgtagggtgattcgaggttacgtagggaaggttaaaggacgatgtggcggttgtagggtgattcgaggttacgtagggaaggttaaaggacga

SEQ ID NO: 39488 - DNA, 517 bp, Artificial Sequence
  chemically treated genomic DNA (Homo sapiens) CpG-island No: 39488
tcgtcctttaaccttccctacgtaacctcgaatcaccctacaaccgccacatcgtcctttaaccttccctacgtaacctcgaatcaccctacaaccgccacatcgtcctttaaccttacctacgtaacctcgaatcaccctacaaccgccacatcgtcctttaaccttccctacgtaacctcgaatcaccctacaacccccacatcgtcctttaaccttacctacgtaacctcgaatcaccctacaaccaccacatcgtcctttaaccttccctacgtaacctcgaatcaccctacaaccgccacatcgtcctttaaccttacctacgtaacctcgaatcaccctacaaccgccacatcgtcctttaaccttacctacgtaataaccccattactccttcgatcgaaaaaaaatcgtccccaaaccctaccccgcctcccctcgtaaccctcctaactctaactaaacgaaaccgatccacacgactcaaaccgtaacaaatatccaacaataaata

SEQ ID NO: 39489 - DNA, 507 bp, Artificial Sequence
  chemically treated genomic DNA (Homo sapiens) CpG-island No: 39489
tttttttcgggggtttggggagtaggggttgggcgtgaggggcgcgcgatttaggttttgttagttcggaagtcgtaggtagtcgtaggtcggatattttttatttttcgttttcgttttattcgttttatcggtatttgcggtggtttgggcggggcggggtttcgtttatttggggagtcgaggagtaggggtatttaaattgcgggtaggatatggcgggcgcggttcggggcggacgggcggggtttgtagggttttgcgcgttggggtcggcgtggcgcggttattgtttcggagttgtaggtttttaggcgttgggagggcgaagtaggagagtcggttagtttattttcgcgtttcgtaaatttttttaatcgggtaataaagtgagtagcggtggtcgtcgcgatttttttaatttcgtatttcggaggttcgagggggttttgggatcgagcggtttcgtagcggcgatagaaatatatattttacgaaaaagaaaaa

SEQ ID NO: 39490 - DNA, 507 bp, Artificial Sequence
  chemically treated genomic DNA (Homo sapiens) CpG-island No: 39490
tttttctttttcgtaaaatatatatttctatcgccgctacgaaaccgctcgatcccaaaaccccctcgaacctccgaaatacgaaattaaaaaaatcgcgacgaccaccgctactcactttattacccgattaaaaaaatttacgaaacgcgaaaataaactaaccgactctcctacttcgccctcccaacgcctaaaaacctacaactccgaaacaataaccgcgccacgccgaccccaacgcgcaaaaccctacaaaccccgcccgtccgccccgaaccgcgcccgccatatcctacccgcaatttaaatacccctactcctcgactccccaaataaacgaaaccccgccccgcccaaaccaccgcaaataccgataaaacgaataaaacgaaaacgaaaaataaaaaatatccgacctacgactacctacgacttccgaactaacaaaacctaaatcgcgcgcccctcacgcccaacccctactccccaaacccccgaaaaaaa

SEQ ID NO: 39491 - DNA, 507 bp, Artificial Sequence
  chemically treated genomic DNA (Homo sapiens) CpG-island No: 39491
tttttttttttcgtaaaatatgtatttttgtcgtcgttgcgaggtcgttcggttttagagttttttcgagttttcggaatgcgaagttaaaggaatcgcggcggttatcgttgtttattttgttattcggttagaaaagtttgcggagcgcggggatggattaatcggtttttttgtttcgtttttttagcgtttagaagtttgtagtttcggagtagtggtcgcgttacgtcggttttagcgcgtagaattttgtaggtttcgttcgttcgtttcgggtcgcgttcgttatgttttattcgtagtttggatatttttatttttcggttttttaggtaagcggagtttcgtttcgtttaggttatcgtaggtgtcggtagggcggatggggcggggacggggggtggggagtgttcgatttacgattgtttgcggttttcgagttagtaaggtttgggtcgcgcgttttttacgtttaatttttgttttttaaattttcggggaaag

SEQ ID NO: 39492 - DNA, 507 bp, Artificial Sequence
  chemically treated genomic DNA (Homo sapiens) CpG-island No: 39492
ctttccccgaaaatttaaaaaacaaaaattaaacgtaaaaaacgcgcgacccaaaccttactaactcgaaaaccgcaaacaatcgtaaatcgaacactccccaccccccgtccccgccccatccgccctaccgacacctacgataacctaaacgaaacgaaactccgcttacctaaaaaaccgaaaaataaaaatatccaaactacgaataaaacataacgaacgcgacccgaaacgaacgaacgaaacctacaaaattctacgcgctaaaaccgacgtaacgcgaccactactccgaaactacaaacttctaaacgctaaaaaaacgaaacaaaaaaaccgattaatccatccccgcgctccgcaaacttttctaaccgaataacaaaataaacaacgataaccgccgcgattcctttaacttcgcattccgaaaactcgaaaaaactctaaaaccgaacgacctcgcaacgacgacaaaaatacatattttacgaaaaaaaaaaa

SEQ ID NO: 39493 - DNA, 829 bp, Artificial Sequence
  chemically treated genomic DNA (Homo sapiens) CpG-island No: 39493
tttcgtcgtttgttttttgggtacggtttgaggttggacggagcgtcgttcgggcgtttaggatttaggtttggttatttcgagttttttatttttcgtttcgcgtcggttcgcgtattttgtttttcgtaatttgtagtaaacgtagcggtttttggagagtttagcgacgggtagtaaattttgtttttttaagcgtaagagtaattttcgtaaagtttgtgcggcggagtttattttttatttgagttggggaagttttcgttcgcgtcgtgtggttgtcggggtcgcggggagtagttcgtagttcgggacgtatcggggagtcgtcgtagtcgtcgtcgttcgtttttttcggcggtcgcgcggagttttcgttttttcggaaggggggaggggtttcggaatttcggggcgggggcgggagcgggggattttatttatttgcggtggcgttgggtcgttttcggtagttcgcgagggtttcgcgcggaagttcggcgcgcgcgttttagcggggagtcggcgataattaatggagatatttttaggcggagtatttggcgagcggagcgcgtcggcgtttttaggcgtcgcggtcgttagtcgagttcgtatcggcgtgacgtgggcgagcgagcgcgttgtttttattcggtcgtttattaacgttttttttcgcgggcgtcgcgtttttgttaattttttttttcgttcggtttgcgcgcggcgcgtcgggtgtaggagttggggtgagggcgtttcgggtgttagtaggggcgttgggagttgtttgggcggggacgtagggtttcgggaggttatatag

SEQ ID NO: 39494 - DNA, 829 bp, Artificial Sequence
  chemically treated genomic DNA (Homo sapiens) CpG-island No: 39494
ctatataacctcccgaaaccctacgtccccgcccaaacaactcccaacgcccctactaacacccgaaacgccctcaccccaactcctacacccgacgcgccgcgcgcaaaccgaacgaaaaaaaaaattaacaaaaacgcgacgcccgcgaaaaaaaacgttaataaacgaccgaataaaaacaacgcgctcgctcgcccacgtcacgccgatacgaactcgactaacgaccgcgacgcctaaaaacgccgacgcgctccgctcgccaaatactccgcctaaaaatatctccattaattatcgccgactccccgctaaaacgcgcgcgccgaacttccgcgcgaaaccctcgcgaactaccgaaaacgacccaacgccaccgcaaataaataaaatcccccgctcccgcccccgccccgaaattccgaaacccctccccccttccgaaaaaacgaaaactccgcgcgaccgccgaaaaaaacgaacgacgacgactacgacgactccccgatacgtcccgaactacgaactactccccgcgaccccgacaaccacacgacgcgaacgaaaacttccccaactcaaataaaaaataaactccgccgcacaaactttacgaaaattactcttacgcttaaaaaaacaaaatttactacccgtcgctaaactctccaaaaaccgctacgtttactacaaattacgaaaaacaaaatacgcgaaccgacgcgaaacgaaaaataaaaaactcgaaataaccaaacctaaatcctaaacgcccgaacgacgctccgtccaacctcaaaccgtacccaaaaaacaaacgacgaaa

SEQ ID NO: 39495 - DNA, 829 bp, Artificial Sequence
  chemically treated genomic DNA (Homo sapiens) CpG-island No: 39495
ttgtgtgatttttcggagttttacgttttcgtttaaatagtttttagcgtttttgttggtattcggggcgtttttattttagtttttgtattcggcgcgtcgcgcgtagatcggacggaggggaaagttggtaagagcgcggcgttcgcgggagaaagcgttaatgggcggtcgggtgggagtagcgcgttcgttcgtttacgttacgtcggtgcgggttcggttgacgatcgcggcgtttggggacgtcggcgcgtttcgttcgttaggtgtttcgtttggaaatgtttttattagttgtcgtcggtttttcgttggagcgcgcgcgtcgagttttcgcgcggagttttcgcgggttgtcgggagcggtttagcgttatcgtaggtaggtgaggtttttcgttttcgttttcgtttcggggtttcgagattttttttttttttcgaggaggcggaggtttcgcgcggtcgtcgaggggagcgggcggcggcggttgcggcgatttttcggtgcgtttcgggttgcgagttgtttttcgcggtttcggtagttatacggcgcgggcgggagtttttttagtttaggtagggagtgggtttcgtcgtataaattttgcgaggattgtttttgcgtttaaggggataaagtttgttattcgtcgttaggttttttagaggtcgttgcgtttgttgtaagttgcgggaagtagggtgcgcgggtcggcgcggggcggggggtggggggttcggagtggttaggtttgagttttggacgttcggacggcgtttcgtttagttttaggtcgtatttagggagtaagcggcgggg

SEQ ID NO: 39496 - DNA, 829 bp, Artificial Sequence
  chemically treated genomic DNA (Homo sapiens) CpG-island No: 39496
ccccgccgcttactccctaaatacgacctaaaactaaacgaaacgccgtccgaacgtccaaaactcaaacctaaccactccgaaccccccaccccccgccccgcgccgacccgcgcaccctacttcccgcaacttacaacaaacgcaacgacctctaaaaaacctaacgacgaataacaaactttatccccttaaacgcaaaaacaatcctcgcaaaatttatacgacgaaacccactccctacctaaactaaaaaaactcccgcccgcgccgtataactaccgaaaccgcgaaaaacaactcgcaacccgaaacgcaccgaaaaatcgccgcaaccgccgccgcccgctcccctcgacgaccgcgcgaaacctccgcctcctcgaaaaaaaaaaaaaatctcgaaaccccgaaacgaaaacgaaaacgaaaaacctcacctacctacgataacgctaaaccgctcccgacaacccgcgaaaactccgcgcgaaaactcgacgcgcgcgctccaacgaaaaaccgacgacaactaataaaaacatttccaaacgaaacacctaacgaacgaaacgcgccgacgtccccaaacgccgcgatcgtcaaccgaacccgcaccgacgtaacgtaaacgaacgaacgcgctactcccacccgaccgcccattaacgctttctcccgcgaacgccgcgctcttaccaactttcccctccgtccgatctacgcgcgacgcgccgaatacaaaaactaaaataaaaacgccccgaataccaacaaaaacgctaaaaactatttaaacgaaaacgtaaaactccgaaaaatcacacaa

SEQ ID NO: 39497 - DNA, 720 bp, Artificial Sequence
  chemically treated genomic DNA (Homo sapiens) CpG-island No: 39497
gtttggggacgattttttttcgatcgaaggagtaatggggttattacgtaggtaaggttaaaggacgatgtggcggttgtagggtgattcgaggttacgtaggtaaggttaaaggacgatgtggcggttgtagggtgattcgaggttacgtagggaaggttaaaggacgatgtggtggttgtagggtgattcgaggttacgtaggtaaggttaaaggacgatgtgggggttgtagggtgattcgaggttacgtagggaaggttaaaggacgatgtggcggttgtagggtgattcgaggttacgtaggtaaggttaaaggacgatgtggcggttgtagggtgattcgaggttacgtagggaaggttaaaggacgatgtggcggttgtagggtgattcgaggttacgtagggaaggttaaaggacgatgtgggggttgtagggtgattcgaggttacgtaggtaaggttaaaggacgatgtggcggttgtagggtgattcgaggttacgtagggaaggttaaaggacgatgtgggggttgtagggtgattcgaggttacgtagggaaggttaaaggacgatgtgggggttgtagggtgattcgaggttatgtaggtaaggttaaaggacgatgtggcggttgtagggtgattcgaggttatgtaggtaaggttaaaggacgatgtgagggttgtaggggtgattcgaggttagtagtttttt

SEQ ID NO: 39498 - DNA, 720 bp, Artificial Sequence
  chemically treated genomic DNA (Homo sapiens) CpG-island No: 39498
aaaaaactactaacctcgaatcacccctacaaccctcacatcgtcctttaaccttacctacataacctcgaatcaccctacaaccgccacatcgtcctttaaccttacctacataacctcgaatcaccctacaacccccacatcgtcctttaaccttccctacgtaacctcgaatcaccctacaacccccacatcgtcctttaaccttccctacgtaacctcgaatcaccctacaaccgccacatcgtcctttaaccttacctacgtaacctcgaatcaccctacaacccccacatcgtcctttaaccttccctacgtaacctcgaatcaccctacaaccgccacatcgtcctttaaccttccctacgtaacctcgaatcaccctacaaccgccacatcgtcctttaaccttacctacgtaacctcgaatcaccctacaaccgccacatcgtcctttaaccttccctacgtaacctcgaatcaccctacaacccccacatcgtcctttaaccttacctacgtaacctcgaatcaccctacaaccaccacatcgtcctttaaccttccctacgtaacctcgaatcaccctacaaccgccacatcgtcctttaaccttacctacgtaacctcgaatcaccctacaaccgccacatcgtcctttaaccttacctacgtaataaccccattactccttcgatcgaaaaaaaatcgtccccaaac

SEQ ID NO: 39499 - DNA, 720 bp, Artificial Sequence
  chemically treated genomic DNA (Homo sapiens) CpG-island No: 39499
aaaggattgttggtttcgggttatttttgtaatttttatatcgttttttgattttgtttatatgatttcgggttattttgtaatcgttatatcgttttttgattttgtttatatgatttcgggttattttgtaatttttatatcgttttttgattttttttacgtgatttcgggttattttgtaatttttatatcgttttttgattttttttacgtgatttcgggttattttgtaatcgttatatcgttttttgattttgtttacgtgatttcgggttattttgtaatttttatatcgttttttgattttttttacgtgatttcgggttattttgtaatcgttatatcgttttttgattttttttacgtgatttcgggttattttgtaatcgttatatcgttttttgattttgtttacgtgatttcgggttattttgtaatcgttatatcgttttttgattttttttacgtgatttcgggttattttgtaatttttatatcgttttttgattttgtttacgtgatttcgggttattttgtaattattatatcgttttttgattttttttacgtgatttcgggttattttgtaatcgttatatcgttttttgattttgtttacgtgatttcgggttattttgtaatcgttatatcgttttttgattttgtttacgtgatggttttattattttttcggtcggagagaaatcgtttttaaat

SEQ ID NO: 39500 - DNA, 720 bp, Artificial Sequence
  chemically treated genomic DNA (Homo sapiens) CpG-island No: 39500
atttaaaaacgatttctctccgaccgaaaaaataataaaaccatcacgtaaacaaaatcaaaaaacgatataacgattacaaaataacccgaaatcacgtaaacaaaatcaaaaaacgatataacgattacaaaataacccgaaatcacgtaaaaaaaatcaaaaaacgatataataattacaaaataacccgaaatcacgtaaacaaaatcaaaaaacgatataaaaattacaaaataacccgaaatcacgtaaaaaaaatcaaaaaacgatataacgattacaaaataacccgaaatcacgtaaacaaaatcaaaaaacgatataacgattacaaaataacccgaaatcacgtaaaaaaaatcaaaaaacgatataacgattacaaaataacccgaaatcacgtaaaaaaaatcaaaaaacgatataaaaattacaaaataacccgaaatcacgtaaacaaaatcaaaaaacgatataacgattacaaaataacccgaaatcacgtaaaaaaaatcaaaaaacgatataaaaattacaaaataacccgaaatcacgtaaaaaaaatcaaaaaacgatataaaaattacaaaataacccgaaatcatataaacaaaatcaaaaaacgatataacgattacaaaataacccgaaatcatataaacaaaatcaaaaaacgatataaaaattacaaaaataacccgaaaccaacaatccttt

SEQ ID NO: 39501 - DNA, 523 bp, Artificial Sequence
  chemically treated genomic DNA (Homo sapiens) CpG-island No: 39501
ggggtttcgaatagtgtcgtattttgtgggtatacgtcgggtagatagaaagtatagacgcgacgcgttcggtttttcgtcgggcgtcgggttttggtgttgtcgtttaggtgttggtttttagttttaagttcgtttcgtagtcggcgttgcgggtgagatcgttcgtaagtatttagtttattggcggttgtttattagcggtttatttttttcggggcgtttaaagtttttcgttcggtattgtttcgggagcgaacgttgagtttttgggatttagtttcgattcggcgtagcggtttttttttcggtttgcgttcgggagaatttttttcgtcgtggcgtcggacggcgatgttagggttgagcggtgagttgtttcgggtttcgcgttttgatcgcggattagttttagggtttcgtcgcggaagtagggggcgcgtttggggttagtttgtagattttagagttcggcggtaggattttcggcgttattcggatatttggtagtagttttcgtttg

SEQ ID NO: 39502 - DNA, 523 bp, Artificial Sequence
  chemically treated genomic DNA (Homo sapiens) CpG-island No: 39502
caaacgaaaactactaccaaatatccgaataacgccgaaaatcctaccgccgaactctaaaatctacaaactaaccccaaacgcgccccctacttccgcgacgaaaccctaaaactaatccgcgatcaaaacgcgaaacccgaaacaactcaccgctcaaccctaacatcgccgtccgacgccacgacgaaaaaaattctcccgaacgcaaaccgaaaaaaaaaccgctacgccgaatcgaaactaaatcccaaaaactcaacgttcgctcccgaaacaataccgaacgaaaaactttaaacgccccgaaaaaaataaaccgctaataaacaaccgccaataaactaaatacttacgaacgatctcacccgcaacgccgactacgaaacgaacttaaaactaaaaaccaacacctaaacgacaacaccaaaacccgacgcccgacgaaaaaccgaacgcgtcgcgtctatactttctatctacccgacgtatacccacaaaatacgacactattcgaaacccc

SEQ ID NO: 39503 - DNA, 523 bp, Artificial Sequence
  chemically treated genomic DNA (Homo sapiens) CpG-island No: 39503
taggcgagaattgttgttaggtgttcgggtggcgtcgggggttttgtcgtcggattttggggtttataggttggttttaggcgcgttttttgttttcgcggcgggattttgaggttggttcgcggttaaagcgcgggattcgggatagtttatcgtttagttttggtatcgtcgttcgacgttacgacggagggggttttttcgggcgtaagtcgagagggaaatcgttgcgtcgagtcggggttgggttttaggggtttagcgttcgttttcggggtaatgtcgggcggggagttttaggcgtttcgaggaaagtgagtcgttggtaggtagtcgttagtaaattgagtgtttgcgggcgattttattcgtagcgtcgattacgaggcgggtttggagttggggattagtatttgagcgatagtattaggattcgacgttcgacgaggggtcgagcgcgtcgcgtttatattttttatttgttcggcgtgtgtttatagaatgcggtattattcggggtttt

SEQ ID NO: 39504 - DNA, 523 bp, Artificial Sequence
  chemically treated genomic DNA (Homo sapiens) CpG-island No: 39504
aaaaccccgaataataccgcattctataaacacacgccgaacaaataaaaaatataaacgcgacgcgctcgacccctcgtcgaacgtcgaatcctaatactatcgctcaaatactaatccccaactccaaacccgcctcgtaatcgacgctacgaataaaatcgcccgcaaacactcaatttactaacgactacctaccaacgactcactttcctcgaaacgcctaaaactccccgcccgacattaccccgaaaacgaacgctaaacccctaaaacccaaccccgactcgacgcaacgatttccctctcgacttacgcccgaaaaaaccccctccgtcgtaacgtcgaacgacgataccaaaactaaacgataaactatcccgaatcccgcgctttaaccgcgaaccaacctcaaaatcccgccgcgaaaacaaaaaacgcgcctaaaaccaacctataaaccccaaaatccgacgacaaaacccccgacgccacccgaacacctaacaacaattctcgccta

SEQ ID NO: 39505 - DNA, 1028 bp, Artificial Sequence
  chemically treated genomic DNA (Homo sapiens) CpG-island No: 39505
gcggtgcgcgtttttcgtatcgcgcgtatatttttgtatatatatttggagcgcgtttcgggggggagggggaggagagttaaaacgagcgttttaaaatagagagttaggtagaggagcgcgagatattagagcgggaggtagcgattgagagtcgtcgggtattaggcgcgtaggtcggcgtcggagtggtacgggcgggcgggggcggggtgggcgcggacgttttttagtatatatttcgtattcggttttgtaggaagttcgcgttgattgatagttgcgttgttttaaaaaggtttagcgaagatgttgatttgcgggtgggtttagacgcgcggtaggcgcgttcgttattcgttttttttcgcgcgttattcgagtttcgtcgtttttttagttgtcgggagcggggtttaggtttcgtcgtcgcgttagtttcgcggttttagcgggtcgggtattcgtagtcgcgttcgggtcggcggacgttcgcgtcggtttattatgtattgttacgtcgagttgaggttgagttcgttcggttagtttaaagtagttaggcggcgttataagatttttatgatcgacgagattttttttaaggagatttgcgattattttgagaaattttttttttatttcgtgtgttcgtcgttggtcgtgcgatttaagtttttgtatttttgtacgggtaagacgtttcgttaggggataagtggggttcggtagtttttacgttcgtgtaggtggtttgtgttttgcgattcgagggcgagaggaagggttaagttaagggattttttttttgcgttttagtaagcggtgggtattgtaaaggtatttgcgacgtggtcgggaaggattacgtaaggtgtggatggtacgagtggaaataaaggcggtagggttttaggagtgggttgttcgcgtaacgtttgattgttttgttcggaggagaacgttttttcgttttttgttgaaagtttaaatatttgagtaggtttagcgtttaaatcgttgtttta

SEQ ID NO: 39506 - DNA, 1028 bp, Artificial Sequence
  chemically treated genomic DNA (Homo sapiens) CpG-island No: 39506
taaaacaacgatttaaacgctaaacctactcaaatatttaaactttcaacaaaaaacgaaaaaacgttctcctccgaacaaaacaatcaaacgttacgcgaacaacccactcctaaaaccctaccgcctttatttccactcgtaccatccacaccttacgtaatccttcccgaccacgtcgcaaatacctttacaatacccaccgcttactaaaacgcaaaaaaaaaatcccttaacttaacccttcctctcgccctcgaatcgcaaaacacaaaccacctacacgaacgtaaaaactaccgaaccccacttatcccctaacgaaacgtcttacccgtacaaaaatacaaaaacttaaatcgcacgaccaacgacgaacacacgaaataaaaaaaaaatttctcaaaataatcgcaaatctccttaaaaaaaatctcgtcgatcataaaaatcttataacgccgcctaactactttaaactaaccgaacgaactcaacctcaactcgacgtaacaatacataataaaccgacgcgaacgtccgccgacccgaacgcgactacgaatacccgacccgctaaaaccgcgaaactaacgcgacgacgaaacctaaaccccgctcccgacaactaaaaaaacgacgaaactcgaataacgcgcgaaaaaaaacgaataacgaacgcgcctaccgcgcgtctaaacccacccgcaaatcaacatcttcgctaaacctttttaaaacaacgcaactatcaatcaacgcgaacttcctacaaaaccgaatacgaaatatatactaaaaaacgtccgcgcccaccccgcccccgcccgcccgtaccactccgacgccgacctacgcgcctaatacccgacgactctcaatcgctacctcccgctctaatatctcgcgctcctctacctaactctctattttaaaacgctcgttttaactctcctccccctcccccccgaaacgcgctccaaatatatatacaaaaatatacgcgcgatacgaaaaacgcgcaccgc

SEQ ID NO: 39507 - DNA, 1028 bp, Artificial Sequence
  chemically treated genomic DNA (Homo sapiens) CpG-island No: 39507
tgaaataacgatttagacgttgaatttgtttaagtgtttgaatttttagtaggaaacgaggaagcgttttttttcgagtaggataattaggcgttgcgcgagtagtttatttttaaggttttgtcgtttttatttttattcgtgttatttatattttgcgtggtttttttcggttacgtcgtagatgtttttgtaatgtttatcgtttgttgaggcgtaggaaaagaattttttaatttaattttttttttcgttttcggatcgtaaagtataggttatttatacggacgtgaaagttatcgaattttatttattttttagcggagcgttttattcgtataggaatgtaggggtttgggtcgtacgattagcgacgggtatacggagtagagggaaagttttttaaagtaatcgtaggtttttttggagaggatttcgtcgattatgaaagttttgtagcgtcgtttggttgttttgagttggtcgggcgagtttagttttagttcggcgtggtagtgtatggtgagtcggcgcgagcgttcgtcggttcgagcgcggttgcgagtgttcggttcgttggggtcgcggggttggcgcgacggcggggtttgggtttcgttttcggtagttggggaggcggcggggttcgggtggcgcgcggaggagagcgggtagcgggcgcgtttgtcgcgcgtttagatttattcgtagattagtattttcgttgagtttttttgggataacgtagttgttaattagcgcgagttttttgtagggtcgggtgcggagtgtgtgttgaggggcgttcgcgtttatttcgttttcgttcgttcgtgttatttcggcgtcgatttgcgcgtttagtgttcggcggtttttagtcgttgtttttcgttttggtgtttcgcgtttttttgtttggttttttattttaagacgttcgttttggtttttttttttttttttttcgggacgcgttttaggtgtgtgtgtaggagtgtgcgcgcggtgcggggagcgcgtatcgt

SEQ ID NO: 39508 - DNA, 1028 bp, Artificial Sequence
  chemically treated genomic DNA (Homo sapiens) CpG-island No: 39508
acgatacgcgctccccgcaccgcgcgcacactcctacacacacacctaaaacgcgtcccgaaaaaaaaaaaaaaaaaaaccaaaacgaacgtcttaaaataaaaaaccaaacaaaaaaacgcgaaacaccaaaacgaaaaacaacgactaaaaaccgccgaacactaaacgcgcaaatcgacgccgaaataacacgaacgaacgaaaacgaaataaacgcgaacgcccctcaacacacactccgcacccgaccctacaaaaaactcgcgctaattaacaactacgttatcccaaaaaaactcaacgaaaatactaatctacgaataaatctaaacgcgcgacaaacgcgcccgctacccgctctcctccgcgcgccacccgaaccccgccgcctccccaactaccgaaaacgaaacccaaaccccgccgtcgcgccaaccccgcgaccccaacgaaccgaacactcgcaaccgcgctcgaaccgacgaacgctcgcgccgactcaccatacactaccacgccgaactaaaactaaactcgcccgaccaactcaaaacaaccaaacgacgctacaaaactttcataatcgacgaaatcctctccaaaaaaacctacgattactttaaaaaactttccctctactccgtatacccgtcgctaatcgtacgacccaaacccctacattcctatacgaataaaacgctccgctaaaaaataaataaaattcgataactttcacgtccgtataaataacctatactttacgatccgaaaacgaaaaaaaaaattaaattaaaaaattcttttcctacgcctcaacaaacgataaacattacaaaaacatctacgacgtaaccgaaaaaaaccacgcaaaatataaataacacgaataaaaataaaaacgacaaaaccttaaaaataaactactcgcgcaacgcctaattatcctactcgaaaaaaaacgcttcctcgtttcctactaaaaattcaaacacttaaacaaattcaacgtctaaatcgttatttca

SEQ ID NO: 39509 - DNA, 596 bp, Artificial Sequence
  chemically treated genomic DNA (Homo sapiens) CpG-island No: 39509
ttttcgtagcgtttataggtttcgtaagtttttagttcgttttttgtttaaaataaaggacgttatttttagatttttggatatagaagttttatacgtacgtatacgtatttttttttgttattttttttcgagagttttttaaacgttttagaattcgcgtcgcggaagcgtttatttttcgcgggcgggcgggtttcgggtacgcggtgaaggtgtagcggcggtcgtttcgggcgatagacgggtggttacggtttttttttaaggtaggggtatcgtaggaggtcggcgcgttttttgttttcgttttcggtaggttacgtgggttagagttcgtagcgtttttcgttttttcggagcgttttttcgttatttaggggtttcgtcgtttcgtcggttttaatatcgtttttttttgcgtttgcgtttcggttttaggcgtttttatttaaatcgataacgtttcgcgtttttcggatcggttaatggcgggcggcgtagcggggcgggggcggggcgttggttgttttttttttcgtagttttggggaatcgtttgcgtgttaaggtgatagggggtttgggagtttggtt

SEQ ID NO: 39510 - DNA, 596 bp, Artificial Sequence
  chemically treated genomic DNA (Homo sapiens) CpG-island No: 39510
aaccaaactcccaaaccccctatcaccttaacacgcaaacgattccccaaaactacgaaaaaaaaaacaaccaacgccccgcccccgccccgctacgccgcccgccattaaccgatccgaaaaacgcgaaacgttatcgatttaaataaaaacgcctaaaaccgaaacgcaaacgcaaaaaaaaacgatattaaaaccgacgaaacgacgaaacccctaaataacgaaaaaacgctccgaaaaaacgaaaaacgctacgaactctaacccacgtaacctaccgaaaacgaaaacaaaaaacgcgccgacctcctacgatacccctaccttaaaaaaaaaccgtaaccacccgtctatcgcccgaaacgaccgccgctacaccttcaccgcgtacccgaaacccgcccgcccgcgaaaaataaacgcttccgcgacgcgaattctaaaacgtttaaaaaactctcgaaaaaaaataacaaaaaaaaatacgtatacgtacgtataaaacttctatatccaaaaatctaaaaataacgtcctttattttaaacaaaaaacgaactaaaaacttacgaaacctataaacgctacgaaaa

SEQ ID NO: 39511 - DNA, 596 bp, Artificial Sequence
  chemically treated genomic DNA (Homo sapiens) CpG-island No: 39511
gattaagtttttaagttttttgttattttgatacgtagacggttttttaggattgcgaagaggggggtaattagcgtttcgttttcgtttcgttgcgtcgttcgttattggtcggttcgaaagacgcggggcgttgtcggtttgaatgagagcgtttggagtcggggcgtaggcgtagaggagggcggtgttgagatcggcggagcggcgggatttttaggtggcggagggacgtttcgggaaagcgaggggcgttacgagttttggtttacgtgatttgtcgggggcgggagtagggggcgcgtcggttttttgcggtgtttttgttttggggaggggtcgtgattattcgtttgtcgttcgaggcggtcgtcgttgtatttttatcgcgtattcgggattcgttcgttcgcgggaggtgagcgttttcgcgacgcgggttttgaggcgtttgaggggttttcggagggaggtgatagggaggggtgcgtgtgcgtgcgtgtggggtttttgtgtttagaggtttgggggtgacgttttttgttttgggtaggaggcgggttgggggtttgcgggatttgtgggcgttgcgggga

SEQ ID NO: 39512 - DNA, 596 bp, Artificial Sequence
  chemically treated genomic DNA (Homo sapiens) CpG-island No: 39512
tccccgcaacgcccacaaatcccgcaaacccccaacccgcctcctacccaaaacaaaaaacgtcacccccaaacctctaaacacaaaaaccccacacgcacgcacacgcacccctccctatcacctccctccgaaaacccctcaaacgcctcaaaacccgcgtcgcgaaaacgctcacctcccgcgaacgaacgaatcccgaatacgcgataaaaatacaacgacgaccgcctcgaacgacaaacgaataatcacgacccctccccaaaacaaaaacaccgcaaaaaaccgacgcgccccctactcccgcccccgacaaatcacgtaaaccaaaactcgtaacgcccctcgctttcccgaaacgtccctccgccacctaaaaatcccgccgctccgccgatctcaacaccgccctcctctacgcctacgccccgactccaaacgctctcattcaaaccgacaacgccccgcgtctttcgaaccgaccaataacgaacgacgcaacgaaacgaaaacgaaacgctaattacccccctcttcgcaatcctaaaaaaccgtctacgtatcaaaataacaaaaaacttaaaaacttaatc

SEQ ID NO: 39513 - DNA, 614 bp, Artificial Sequence
  chemically treated genomic DNA (Homo sapiens) CpG-island No: 39513
tcgcgttcgcgtatttagaggcggttaggcggaggcgagggagtaggttagagggataaagagttttgtagacgttttcggcgttttgcgagcgttacgatcgggacgaggcggtcgggagttcgggaagagttcgtggatgttttgcgcgcggtttgggagtcgcgtcgtcgtcgttttagcgagaggaggaatgtatcggtcgcgcgtcgcggaacgtttcgtcgtttttggcgttgttggtcgcgttgttgttggtcgtacgcggggttgttgtttaaggtaagaggcgttcgcggttttcgttcgtttagattttttgattcgtggttattttttcgtcgtttagtcgggcgcgggatacgtaggaagcgtcgcgttggtttcggggcgcgttcggttattcgttacggggttcgtcggcgtcgtagcgtagggtttgtttcggagtttcgttaggttagggtttgtttcggagtttcgcggcgggtcgggggcgttagggattcgtttttcggtgcgtatagcgattgttagcgttgataggaagcgtggaggggtttgagggttttgggggtgatcggggtatttttgtgtagggcgtttttttttgt

SEQ ID NO: 39514 - DNA, 614 bp, Artificial Sequence
  chemically treated genomic DNA (Homo sapiens) CpG-island No: 39514
acaaaaaaaaacgccctacacaaaaataccccgatcacccccaaaaccctcaaacccctccacgcttcctatcaacgctaacaatcgctatacgcaccgaaaaacgaatccctaacgcccccgacccgccgcgaaactccgaaacaaaccctaacctaacgaaactccgaaacaaaccctacgctacgacgccgacgaaccccgtaacgaataaccgaacgcgccccgaaaccaacgcgacgcttcctacgtatcccgcgcccgactaaacgacgaaaaaataaccacgaatcaaaaaatctaaacgaacgaaaaccgcgaacgcctcttaccttaaacaacaaccccgcgtacgaccaacaacaacgcgaccaacaacgccaaaaacgacgaaacgttccgcgacgcgcgaccgatacattcctcctctcgctaaaacgacgacgacgcgactcccaaaccgcgcgcaaaacatccacgaactcttcccgaactcccgaccgcctcgtcccgatcgtaacgctcgcaaaacgccgaaaacgtctacaaaactctttatccctctaacctactccctcgcctccgcctaaccgcctctaaatacgcgaacgcga

SEQ ID NO: 39515 - DNA, 614 bp, Artificial Sequence
  chemically treated genomic DNA (Homo sapiens) CpG-island No: 39515
ataaggggggacgttttgtatagaagtgtttcgattatttttaggatttttaaatttttttacgttttttgttagcgttgataatcgttgtgcgtatcgaggaacgagtttttggcgttttcggttcgtcgcggggtttcggggtaaattttggtttggcggggtttcggggtaaattttgcgttgcggcgtcggcgagtttcgtggcgggtggtcggacgcgtttcggagttagcgcggcgttttttgcgtgtttcgcgttcggttggacgacggaagggtggttacgggttagggggtttgggcgggcgggggtcgcgggcgttttttattttgggtagtagtttcgcgtgcggttagtagtagcgcggttagtagcgttaggagcggcggggcgtttcgcggcgcgcggtcggtgtattttttttttcgttgaggcggcggcggcgcggtttttaggtcgcgcgtagaatatttacgggtttttttcgggttttcggtcgtttcgtttcggtcgtggcgttcgtaggacgtcggggacgtttgtaaagttttttgtttttttaatttgttttttcgttttcgtttggtcgtttttggatgcgcgagcgcga

SEQ ID NO: 39516 - DNA, 614 bp, Artificial Sequence
  chemically treated genomic DNA (Homo sapiens) CpG-island No: 39516
tcgcgctcgcgcatccaaaaacgaccaaacgaaaacgaaaaaacaaattaaaaaaacaaaaaactttacaaacgtccccgacgtcctacgaacgccacgaccgaaacgaaacgaccgaaaacccgaaaaaaacccgtaaatattctacgcgcgacctaaaaaccgcgccgccgccgcctcaacgaaaaaaaaaatacaccgaccgcgcgccgcgaaacgccccgccgctcctaacgctactaaccgcgctactactaaccgcacgcgaaactactacccaaaataaaaaacgcccgcgacccccgcccgcccaaaccccctaacccgtaaccacccttccgtcgtccaaccgaacgcgaaacacgcaaaaaacgccgcgctaactccgaaacgcgtccgaccacccgccacgaaactcgccgacgccgcaacgcaaaatttaccccgaaaccccgccaaaccaaaatttaccccgaaaccccgcgacgaaccgaaaacgccaaaaactcgttcctcgatacgcacaacgattatcaacgctaacaaaaaacgtaaaaaaatttaaaaatcctaaaaataatcgaaacacttctatacaaaacgtccccccttat

SEQ ID NO: 39517 - DNA, 683 bp, Artificial Sequence
  chemically treated genomic DNA (Homo sapiens) CpG-island No: 39517
gtatcggtcgtttttcgtcgggaagtgtcgggttcgtaggaggagcgcgaagtcgagttcgagttcgcggagttcgttttttagatcgtagaatcgttttttttattttttgttttgtttcgcgtcggggtttgggagcgatcggcggaggtcggcggcgcgtcggagttgattagttttttacgttttttcggttcgtagcggggagtttatatgtgtatgtgtaagaaggtgtggagaaggcgttagggtttcggtatttacgggttagggtagaacgttaacgagtcgtattgcgggttttcgcggtttcggtttttatgatatggtgacgtcggcggtaaggcggggggttgtttgtgggttttgaggttgttgggcggtgcgggcggagttagtaaaggggcgttggtaaagttttaaaattttacggttttacggagcgtaagttagattttttgaagtagttttttcgttcgttcgaagagggtattttatttgtatagcgggattttttgttagtttaggtttattgcgatttcgttttttcgagtatttttttcgttttagttttcgtttggtttgcgtatcgcgagtggggtttaaaggttaattttataatattagttagtttcggagggacgtttattattattgttttttatgttcgggttaaatgagtt

SEQ ID NO: 39518 - DNA, 683 bp, Artificial Sequence
  chemically treated genomic DNA (Homo sapiens) CpG-island No: 39518
aactcatttaacccgaacataaaaaacaataataataaacgtccctccgaaactaactaatattataaaattaacctttaaaccccactcgcgatacgcaaaccaaacgaaaactaaaacgaaaaaaatactcgaaaaaacgaaatcgcaataaacctaaactaacaaaaaatcccgctatacaaataaaataccctcttcgaacgaacgaaaaaactacttcaaaaaatctaacttacgctccgtaaaaccgtaaaattttaaaactttaccaacgcccctttactaactccgcccgcaccgcccaacaacctcaaaacccacaaacaaccccccgccttaccgccgacgtcaccatatcataaaaaccgaaaccgcgaaaacccgcaatacgactcgttaacgttctaccctaacccgtaaataccgaaaccctaacgccttctccacaccttcttacacatacacatataaactccccgctacgaaccgaaaaaacgtaaaaaactaatcaactccgacgcgccgccgacctccgccgatcgctcccaaaccccgacgcgaaacaaaacaaaaaataaaaaaaacgattctacgatctaaaaaacgaactccgcgaactcgaactcgacttcgcgctcctcctacgaacccgacacttcccgacgaaaaacgaccgatac

SEQ ID NO: 39519 - DNA, 683 bp, Artificial Sequence
  chemically treated genomic DNA (Homo sapiens) CpG-island No: 39519
ggtttatttggttcgagtatggaaggtagtgatagtgggcgttttttcggagttggttggtattgtggaattggtttttggattttattcgcgatgcgtagattagacggaagttgaaacgggggaaatgttcggggaagcggagtcgtagtgaatttgggttggtagggaatttcgttgtgtagatggaatatttttttcggacgaacggggaagttgttttagagaatttggtttgcgtttcgtggaatcgtggggttttagggttttgttaacgtttttttgttgatttcgttcgtatcgtttagtaattttaaggtttataggtagtttttcgttttgtcgtcggcgttattatgttatggaaatcgaagtcgcggagattcgtagtgcgattcgttggcgttttgttttgattcgtgggtgtcgggattttaacgttttttttatatttttttgtatatatatatgtgggtttttcgttgcgggtcggaggagcgtaggggattagttagtttcggcgcgtcgtcggttttcgtcggtcgtttttagatttcgacgcggggtagggtagaggatggagaaggcggttttgcgatttagggggcgggtttcgcgggttcggattcggtttcgcgttttttttgcggattcggtatttttcggcggaagacgatcggtat

SEQ ID NO: 39520 - DNA, 683 bp, Artificial Sequence
  chemically treated genomic DNA (Homo sapiens) CpG-island No: 39520
ataccgatcgtcttccgccgaaaaataccgaatccgcaaaaaaaacgcgaaaccgaatccgaacccgcgaaacccgccccctaaatcgcaaaaccgccttctccatcctctaccctaccccgcgtcgaaatctaaaaacgaccgacgaaaaccgacgacgcgccgaaactaactaatcccctacgctcctccgacccgcaacgaaaaacccacatatatatatacaaaaaaatataaaaaaaacgttaaaatcccgacacccacgaatcaaaacaaaacgccaacgaatcgcactacgaatctccgcgacttcgatttccataacataataacgccgacgacaaaacgaaaaactacctataaaccttaaaattactaaacgatacgaacgaaatcaacaaaaaaacgttaacaaaaccctaaaaccccacgattccacgaaacgcaaaccaaattctctaaaacaacttccccgttcgtccgaaaaaaatattccatctacacaacgaaattccctaccaacccaaattcactacgactccgcttccccgaacatttcccccgtttcaacttccgtctaatctacgcatcgcgaataaaatccaaaaaccaattccacaataccaaccaactccgaaaaaacgcccactatcactaccttccatactcgaaccaaataaacc

SEQ ID NO: 39521 - DNA, 538 bp, Artificial Sequence
  chemically treated genomic DNA (Homo sapiens) CpG-island No: 39521
tatttggacggggataggatcgggaatcgtcgggtagggggtttgcgcggcggcgttttttttttttcgttcggttttttcgttttattttcgcggtttggttaagggtagcgttaagggcgttcgcggagggcgtagttgtttcggacggagttttcgttatttttatagtcgcgcgggtgttttagagtatttaattttatttttattttaattttattagcggtcggggagtcgggcgggagataggaggtcggttttgatacgaattagttcggagattgttcgatacgttttggttagggcgtcggcgtcgcgcgttcgtttttttcgttttttttttgtgttcgtttcgtttcgtttttcggtttcgtcgcgttttattttcgcggcgttggttcgggtcgagcgaattgttttgtttttggttacgttgagcgcgtcgaggtagtcgggggcgcggggttttaggattcgtttgtttttggtgtttttagttttttagggttcggtcgggttatttgggtcgatttaggcg

SEQ ID NO: 39522 - DNA, 538 bp, Artificial Sequence
  chemically treated genomic DNA (Homo sapiens) CpG-island No: 39522
cgcctaaatcgacccaaataacccgaccgaaccctaaaaaactaaaaacaccaaaaacaaacgaatcctaaaaccccgcgcccccgactacctcgacgcgctcaacgtaaccaaaaacaaaacaattcgctcgacccgaaccaacgccgcgaaaataaaacgcgacgaaaccgaaaaacgaaacgaaacgaacacaaaaaaaaaacgaaaaaaacgaacgcgcgacgccgacgccctaaccaaaacgtatcgaacaatctccgaactaattcgtatcaaaaccgacctcctatctcccgcccgactccccgaccgctaataaaattaaaataaaaataaaattaaatactctaaaacacccgcgcgactataaaaataacgaaaactccgtccgaaacaactacgccctccgcgaacgcccttaacgctacccttaaccaaaccgcgaaaataaaacgaaaaaaccgaacgaaaaaaaaaaaacgccgccgcgcaaaccccctacccgacgattcccgatcctatccccgtccaaata

SEQ ID NO: 39523 - DNA, 538 bp, Artificial Sequence
  chemically treated genomic DNA (Homo sapiens) CpG-island No: 39523
cgtttggatcggtttaggtgattcggtcggattttgaggagttgggggtattaggagtagacgggttttggagtttcgcgttttcggttgtttcggcgcgtttaacgtggttaaaggtaaagtagttcgttcggttcgggttagcgtcgcgggaatggagcgcggcgaggtcgagaggcgaggcgaggcggatataaaggagaggcgagggaggcgagcgcgcggcgtcggcgttttggttaaggcgtatcggataattttcgggttaattcgtgttagggtcggttttttatttttcgttcggtttttcggtcgttgataaaattgaagtggaaatgaagttggatgttttggagtattcgcgcggttgtgggggtggcgggggtttcgttcggggtagttgcgtttttcgcgggcgtttttggcgttgtttttggttaggtcgcggggatggagcgggagagtcgggcggggaggggaggacgtcgtcgcgtagattttttgttcggcggttttcgattttgttttcgtttagatg

SEQ ID NO: 39524 - DNA, 538 bp, Artificial Sequence
  chemically treated genomic DNA (Homo sapiens) CpG-island No: 39524
catctaaacgaaaacaaaatcgaaaaccgccgaacaaaaaatctacgcgacgacgtcctcccctccccgcccgactctcccgctccatccccgcgacctaaccaaaaacaacgccaaaaacgcccgcgaaaaacgcaactaccccgaacgaaacccccgccacccccacaaccgcgcgaatactccaaaacatccaacttcatttccacttcaattttatcaacgaccgaaaaaccgaacgaaaaataaaaaaccgaccctaacacgaattaacccgaaaattatccgatacgccttaaccaaaacgccgacgccgcgcgctcgcctccctcgcctctcctttatatccgcctcgcctcgcctctcgacctcgccgcgctccattcccgcgacgctaacccgaaccgaacgaactactttacctttaaccacgttaaacgcgccgaaacaaccgaaaacgcgaaactccaaaacccgtctactcctaatacccccaactcctcaaaatccgaccgaatcacctaaaccgatccaaacg

SEQ ID NO: 39525 - DNA, 516 bp, Artificial Sequence
  chemically treated genomic DNA (Homo sapiens) CpG-island No: 39525
agagcggcggaatcgacggaaggatagggtacgtcgggggttagaagtggtcgggagattcgggagtgagtagttcgttcggtttagttcgtcgtatttattcgaggttcgggcggggtcgttcggcgttgcggtttttttcggtttgcggcggcggcggcggcgattgtagcggtcgaggtagggacgtattatgcggtcgcgtttatggtcgggttggagcgggtttcgcggttcggttcggtttggttttttgggtttcgtcgggtaggtcggaaggaggttgtagttaagtaaatgttttagttcggagttttggttggagagcggggcggtgcgagcgtcggaagtgaattcgacgaggttagtgacgttacgtcggcgtagtttcggtcgcgtagttttcgcggagaggggcgttcgaggcggtttgaggggattcggaggtttttataaattggtagtttattgagaaaaggtagtttttagttatagtttttttcgttaagatagaga

SEQ ID NO: 39526 - DNA, 516 bp, Artificial Sequence
  chemically treated genomic DNA (Homo sapiens) CpG-island No: 39526
tctctatcttaacgaaaaaaactataactaaaaactaccttttctcaataaactaccaatttataaaaacctccgaatcccctcaaaccgcctcgaacgcccctctccgcgaaaactacgcgaccgaaactacgccgacgtaacgtcactaacctcgtcgaattcacttccgacgctcgcaccgccccgctctccaaccaaaactccgaactaaaacatttacttaactacaacctccttccgacctacccgacgaaacccaaaaaaccaaaccgaaccgaaccgcgaaacccgctccaacccgaccataaacgcgaccgcataatacgtccctacctcgaccgctacaatcgccgccgccgccgccgcaaaccgaaaaaaaccgcaacgccgaacgaccccgcccgaacctcgaataaatacgacgaactaaaccgaacgaactactcactcccgaatctcccgaccacttctaacccccgacgtaccctatccttccgtcgattccgccgctct

SEQ ID NO: 39527 - DNA, 516 bp, Artificial Sequence
  chemically treated genomic DNA (Homo sapiens) CpG-island No: 39527
tttttgttttagcgagaggggttgtgattaaaagttgtttttttttaatgaattgttagtttgtaagagttttcgggtttttttaaatcgtttcgagcgttttttttcgcgagagttgcgcggtcggaattgcgtcggcgtgacgttattgatttcgtcgggtttattttcggcgttcgtatcgtttcgttttttagttaaggtttcgggttgaggtatttgtttggttgtagttttttttcgatttgttcggcgggatttaggggattaagtcgagtcgagtcgcggggttcgttttagttcggttatgagcgcggtcgtatgatgcgtttttgtttcggtcgttgtagtcgtcgtcgtcgtcgtcgtaggtcgggaggagtcgtagcgtcgggcgatttcgttcgggtttcgggtgagtgcggcgggttgggtcgggcgggttgtttattttcgggtttttcggttatttttggttttcggcgtgttttgttttttcgtcggtttcgtcgtttt

SEQ ID NO: 39528 - DNA, 516 bp, Artificial Sequence
  chemically treated genomic DNA (Homo sapiens) CpG-island No: 39528
aaaacgacgaaaccgacgaaaaaacaaaacacgccgaaaaccaaaaataaccgaaaaacccgaaaataaacaacccgcccgacccaacccgccgcactcacccgaaacccgaacgaaatcgcccgacgctacgactcctcccgacctacgacgacgacgacgacgactacaacgaccgaaacaaaaacgcatcatacgaccgcgctcataaccgaactaaaacgaaccccgcgactcgactcgacttaatcccctaaatcccgccgaacaaatcgaaaaaaaactacaaccaaacaaatacctcaacccgaaaccttaactaaaaaacgaaacgatacgaacgccgaaaataaacccgacgaaatcaataacgtcacgccgacgcaattccgaccgcgcaactctcgcgaaaaaaaacgctcgaaacgatttaaaaaaacccgaaaactcttacaaactaacaattcattaaaaaaaaacaacttttaatcacaacccctctcgctaaaacaaaaa

SEQ ID NO: 39529 - DNA, 1138 bp, Artificial Sequence
  chemically treated genomic DNA (Homo sapiens) CpG-island No: 39529
gttttttcgagttgtttttcgttttcggtttttttttcggcgttcgttcgttttttcgttcgttggcgtttttttcgtcgcgttttttttttttttttttaggcgttggtttcgcgttttttttagttgttaaagcgttagtttcggtcgcggttttatcgttttggaatttttttcgcgtcggttcggtttgggggtgtcgtcgtcgtcgttcgtacggtcgttcgtttttcgttcgttcgcgcgttcgttcggtttcgtttgcgtcgttttttgcgtttttagtatcgttgtcgtcgtcgtcgtcgtcgtcgttggtttatttggagtttaatcgaacgtggttattcgggcgagggagcgaggcgggcggtaacgtttcgcgatggatggtcgtttcggttaatcggcgtacgcgggggcgggttcgggtcggttgggagggacgttttgatagcgtcggtcgcggtagttttcgttgcggtcgttttcgcggagtcgttgtttgtttttgtaggcgaattgggggcgttcgggggcgcgagtttttttttttgtcgtcggggcggtgggcgacgtggatcgggttgggggtattttggttttttcgttttagcgaggagggggatttgattcgcgtttttcgcggcgtggattattggggggttaggggggcgttgcggtagcgttcgatgggagggggcgtagatttttaagcggtcgtcgttcgttttttttcgtttcgttttttttttttatttgttttttagttttttttcgtcgcggttcgtattagtttagtttttatttcgtttttcgtttttggttgttttttttttaggtttcgatttcgattttttttttagattttagttcggtttttagttcgtttcgttttcgggtttttttttcgtttagtttggttttcgagcgtcgggttcggggttttacgttgagagttgggcggttcgagtcggcgtcgaggcgcgcggttgtttttttattagattattaaaatattttggaaaattttaaagtggagtcgcgcgaaaatggtttttggcgtgttttggggagtcgggggggaggggggttggggataggggatttgaattaagaggagggagagtgatttttt

SEQ ID NO: 39530 - DNA, 1138 bp, Artificial Sequence
  chemically treated genomic DNA (Homo sapiens) CpG-island No: 39530
aaaaaatcactctccctcctcttaattcaaatcccctatccccaacccccctcccccccgactccccaaaacacgccaaaaaccattttcgcgcgactccactttaaaattttccaaaatattttaataatctaataaaaaaacaaccgcgcgcctcgacgccgactcgaaccgcccaactctcaacgtaaaaccccgaacccgacgctcgaaaaccaaactaaacgaaaaaaaaacccgaaaacgaaacgaactaaaaaccgaactaaaatctaaaaaaaaaatcgaaatcgaaacctaaaaaaaaaacaaccaaaaacgaaaaacgaaataaaaactaaactaatacgaaccgcgacgaaaaaaaactaaaaaacaaataaaaaaaaaaaacgaaacgaaaaaaaacgaacgacgaccgcttaaaaatctacgccccctcccatcgaacgctaccgcaacgcccccctaaccccccaataatccacgccgcgaaaaacgcgaatcaaatccccctcctcgctaaaacgaaaaaaccaaaatacccccaacccgatccacgtcgcccaccgccccgacgacaaaaaaaaaaactcgcgcccccgaacgcccccaattcgcctacaaaaacaaacaacgactccgcgaaaacgaccgcaacgaaaactaccgcgaccgacgctatcaaaacgtccctcccaaccgacccgaacccgcccccgcgtacgccgattaaccgaaacgaccatccatcgcgaaacgttaccgcccgcctcgctccctcgcccgaataaccacgttcgattaaactccaaataaaccaacgacgacgacgacgacgacgacaacgatactaaaaacgcaaaaaacgacgcaaacgaaaccgaacgaacgcgcgaacgaacgaaaaacgaacgaccgtacgaacgacgacgacgacacccccaaaccgaaccgacgcgaaaaaaattccaaaacgataaaaccgcgaccgaaactaacgctttaacaactaaaaaaaacgcgaaaccaacgcctaaaaaaaaaaaaaaaaaacgcgacgaaaaaaacgccaacgaacgaaaaaacgaacgaacgccgaaaaaaaaaccgaaaacgaaaaacaactcgaaaaaac

SEQ ID NO: 39531 - DNA, 1138 bp, Artificial Sequence
  chemically treated genomic DNA (Homo sapiens) CpG-island No: 39531
gagaaattattttttttttttttaatttaagttttttgtttttagtttttttttttttcggttttttaaagtacgttaagggttattttcgcgcggttttattttggggttttttaaagtattttaatgatttagtaaaggagtagtcgcgcgtttcggcgtcggttcgagtcgtttagtttttagcgtggagtttcgggttcggcgttcggaagttagattgggcgagagggaggttcgggggcggggcgggttgggggtcgggttggagtttggggagggggtcggggtcggagtttagggggaggataattaagagcggagggcgagataagggttgggttggtgcgggtcgcggcgggggggagttgaggggtagataagggagagggacggggcgggagggagcgagcggcgatcgtttgggggtttgcgtttttttttatcggacgttgtcgtagcgtttttttagttttttagtggtttacgtcgcggggagcgcgggttagattttttttttcgttggggcgaggagattagggtgtttttagttcgatttacgtcgtttatcgtttcggcgatagaaagagaggttcgcgttttcggacgtttttagttcgtttgtaggagtaggtagcggtttcgcggaggcggtcgtagcggggattgtcgcggtcggcgttgttagggcgttttttttagtcggttcgggttcgttttcgcgtgcgtcgattggtcgaggcggttatttatcgcgggacgttgtcgttcgtttcgttttttcgttcgggtagttacgttcggttgagttttaagtagattagcggcggcggcggcggcggcggtagcggtgttggaggcgtagagggcggcgtaggcggagtcgggcgggcgcgcgagcgagcggagagcgggcggtcgtgcgggcggcggcggcggtatttttaggtcgagtcggcgcggaaggagttttagggcgatggggtcgcggtcggggttgacgttttgatagttggaaagagcgcggagttagcgtttgggggggagggaggggagcgcggcgaggagagcgttagcgagcgagagagcgagcgagcgtcggggagggggtcgggagcgaggggtagttcgggagagt

SEQ ID NO: 39532 - DNA, 1138 bp, Artificial Sequence
  chemically treated genomic DNA (Homo sapiens) CpG-island No: 39532
actctcccgaactacccctcgctcccgaccccctccccgacgctcgctcgctctctcgctcgctaacgctctcctcgccgcgctcccctccctcccccccaaacgctaactccgcgctctttccaactatcaaaacgtcaaccccgaccgcgaccccatcgccctaaaactccttccgcgccgactcgacctaaaaataccgccgccgccgcccgcacgaccgcccgctctccgctcgctcgcgcgcccgcccgactccgcctacgccgccctctacgcctccaacaccgctaccgccgccgccgccgccgccgctaatctacttaaaactcaaccgaacgtaactacccgaacgaaaaaacgaaacgaacgacaacgtcccgcgataaataaccgcctcgaccaatcgacgcacgcgaaaacgaacccgaaccgactaaaaaaaacgccctaacaacgccgaccgcgacaatccccgctacgaccgcctccgcgaaaccgctacctactcctacaaacgaactaaaaacgtccgaaaacgcgaacctctctttctatcgccgaaacgataaacgacgtaaatcgaactaaaaacaccctaatctcctcgccccaacgaaaaaaaaaatctaacccgcgctccccgcgacgtaaaccactaaaaaactaaaaaaacgctacgacaacgtccgataaaaaaaaacgcaaacccccaaacgatcgccgctcgctccctcccgccccgtccctctcccttatctacccctcaactcccccccgccgcgacccgcaccaacccaacccttatctcgccctccgctcttaattatcctccccctaaactccgaccccgaccccctccccaaactccaacccgacccccaacccgccccgcccccgaacctccctctcgcccaatctaacttccgaacgccgaacccgaaactccacgctaaaaactaaacgactcgaaccgacgccgaaacgcgcgactactcctttactaaatcattaaaatactttaaaaaaccccaaaataaaaccgcgcgaaaataacccttaacgtactttaaaaaaccgaaaaaaaaaaaaactaaaaacaaaaaacttaaattaaaaaaaaaaaaaataatttctc

SEQ ID NO: 39533 - DNA, 511 bp, Artificial Sequence
  chemically treated genomic DNA (Homo sapiens) CpG-island No: 39533
tttggtgtcggtcggtacgttggggatgtattcgcgtaatttcgcgaatgcgttgttaatgtttttagtgcgttttcgtttttttttgggttttgagttttttcgtcggttaagacggtcgttaagcgtttttagtcgttcggggttttgtttaggtttggcgttaggattataggcggtggcggttgtagcggtcgcgggcggcggttcgttcgtagggaagttcggggtagcgttagtcgggtttagtagttagttttggaagtagggttttttttgatgatagcgcgaggtcggatcgaagaggaagggttcgtggagtatggggtgcgtagggtgcgggtggtgatggtggtgatggtgtgcgtagttgtttacgaggtttatgttggagcggttattggtttgcgtcgttagttttattaacgtcgttttatgcgttttagagattgtcgggggttatttgtgggttttggagttattattgggcgtcggttttgggagagttcgg

SEQ ID NO: 39534 - DNA, 511 bp, Artificial Sequence
  chemically treated genomic DNA (Homo sapiens) CpG-island No: 39534
ccgaactctcccaaaaccgacgcccaataataactccaaaacccacaaataacccccgacaatctctaaaacgcataaaacgacgttaataaaactaacgacgcaaaccaataaccgctccaacataaacctcgtaaacaactacgcacaccatcaccaccatcaccacccgcaccctacgcaccccatactccacgaacccttcctcttcgatccgacctcgcgctatcatcaaaaaaaaccctacttccaaaactaactactaaacccgactaacgctaccccgaacttccctacgaacgaaccgccgcccgcgaccgctacaaccgccaccgcctataatcctaacgccaaacctaaacaaaaccccgaacgactaaaaacgcttaacgaccgtcttaaccgacgaaaaaactcaaaacccaaaaaaaaacgaaaacgcactaaaaacattaacaacgcattcgcgaaattacgcgaatacatccccaacgtaccgaccgacaccaaa

SEQ ID NO: 39535 - DNA, 511 bp, Artificial Sequence
  chemically treated genomic DNA (Homo sapiens) CpG-island No: 39535
tcggatttttttaaagtcggcgtttagtagtggttttagagtttataggtggttttcggtagtttttggggcgtatggagcggcgttaatagggttggcggcgtaggttagtagtcgttttaatatgaatttcgtgggtagttacgtatattattattattattattattcgtattttgcgtattttatgttttacgaatttttttttttcggttcggtttcgcgttgttattaggaaaggttttatttttagagttggttgttgagttcggttgacgttgtttcggatttttttgcgggcgggtcgtcgttcgcggtcgttgtagtcgttatcgtttatggttttgacgttaggtttgggtagagtttcgggcggttggaggcgtttggcggtcgttttggtcggcggaaaggtttaggatttaagaaggagcggagacgtattgagagtattaatagcgtattcgcggagttgcgcgagtgtatttttaacgtgtcggtcgatattaag

SEQ ID NO: 39536 - DNA, 511 bp, Artificial Sequence
  chemically treated genomic DNA (Homo sapiens) CpG-island No: 39536
cttaatatcgaccgacacgttaaaaatacactcgcgcaactccgcgaatacgctattaatactctcaatacgtctccgctccttcttaaatcctaaacctttccgccgaccaaaacgaccgccaaacgcctccaaccgcccgaaactctacccaaacctaacgtcaaaaccataaacgataacgactacaacgaccgcgaacgacgacccgcccgcaaaaaaatccgaaacaacgtcaaccgaactcaacaaccaactctaaaaataaaacctttcctaataacaacgcgaaaccgaaccgaaaaaaaaaaattcgtaaaacataaaatacgcaaaatacgaataataataataataataatatacgtaactacccacgaaattcatattaaaacgactactaacctacgccgccaaccctattaacgccgctccatacgccccaaaaactaccgaaaaccacctataaactctaaaaccactactaaacgccgactttaaaaaaatccga

SEQ ID NO: 39537 - DNA, 504 bp, Artificial Sequence
  chemically treated genomic DNA (Homo sapiens) CpG-island No: 39537
gcgtacgagaatcgcgttgggcgttttgagagtagaatcggtcgtttaggtttttaaggagatttcgcgggcggtattaggaggaagcgcgcgtttcgggtagggtcgcggtcgaagagggggcgttaagttcggtatttgtcgttggcgttcggggtttgtaggtcgggggagggaagcgggttttgtgaagaggggttttcgagaaagtcgcgcgggacggcgaggggaggttttacgagggtagacgcgtttcggattcggagtttgggcgggcggggaagcggagaaggggacgttcgatttggacggagggagggtacggagtatttaggattagggcgggagcggcgagtagcgggcggcggttttaggcggataggttcgtagggagtgggtcggaggtcggggcggggttggggtttgtattcgttttagcgggtaggtcgttagtaggttgggagtcggggtcggggggcggggcggggtttgtatttatttagg

SEQ ID NO: 39538 - DNA, 504 bp, Artificial Sequence
  chemically treated genomic DNA (Homo sapiens) CpG-island No: 39538
cctaaataaatacaaaccccgccccgccccccgaccccgactcccaacctactaacgacctacccgctaaaacgaatacaaaccccaaccccgccccgacctccgacccactccctacgaacctatccgcctaaaaccgccgcccgctactcgccgctcccgccctaatcctaaatactccgtaccctccctccgtccaaatcgaacgtccccttctccgcttccccgcccgcccaaactccgaatccgaaacgcgtctaccctcgtaaaacctcccctcgccgtcccgcgcgactttctcgaaaacccctcttcacaaaacccgcttccctcccccgacctacaaaccccgaacgccaacgacaaataccgaacttaacgccccctcttcgaccgcgaccctacccgaaacgcgcgcttcctcctaataccgcccgcgaaatctccttaaaaacctaaacgaccgattctactctcaaaacgcccaacgcgattctcgtacgc

SEQ ID NO: 39539 - DNA, 504 bp, Artificial Sequence
  chemically treated genomic DNA (Homo sapiens) CpG-island No: 39539
tttaggtgagtgtagatttcgtttcgtttttcggtttcgatttttagtttgttggcgatttgttcgttagggcgagtgtagattttagtttcgtttcggttttcggtttattttttgcgaatttgttcgtttggggtcgtcgttcgttgttcgtcgttttcgttttagttttgagtgtttcgtgtttttttttcgtttaagtcgggcgttttttttttcgttttttcgttcgtttaggtttcgggttcggggcgcgtttgttttcgtgaagttttttttcgtcgtttcgcgcggttttttcggagatttttttttataaagttcgtttttttttttcggtttgtagatttcgagcgttagcggtaggtatcgggtttggcgtttttttttcggtcgcggttttgttcggagcgcgcgtttttttttggtgtcgttcgcggggtttttttaggggtttgagcggtcggttttgtttttagagcgtttagcgcgattttcgtgcgt

SEQ ID NO: 39540 - DNA, 504 bp, Artificial Sequence
  chemically treated genomic DNA (Homo sapiens) CpG-island No: 39540
acgcacgaaaatcgcgctaaacgctctaaaaacaaaaccgaccgctcaaacccctaaaaaaaccccgcgaacgacaccaaaaaaaaacgcgcgctccgaacaaaaccgcgaccgaaaaaaaaacgccaaacccgatacctaccgctaacgctcgaaatctacaaaccgaaaaaaaaaaacgaactttataaaaaaaaatctccgaaaaaaccgcgcgaaacgacgaaaaaaaacttcacgaaaacaaacgcgccccgaacccgaaacctaaacgaacgaaaaaacgaaaaaaaaaacgcccgacttaaacgaaaaaaaaacacgaaacactcaaaactaaaacgaaaacgacgaacaacgaacgacgaccccaaacgaacaaattcgcaaaaaataaaccgaaaaccgaaacgaaactaaaatctacactcgccctaacgaacaaatcgccaacaaactaaaaatcgaaaccgaaaaacgaaacgaaatctacactcacctaaa

SEQ ID NO: 39541 - DNA, 645 bp, Artificial Sequence
  chemically treated genomic DNA (Homo sapiens) CpG-island No: 39541
taacggtttgggtttgttacgcgttttatttttttcggcggtttgggtttgtcgcgcgttttatttttttcggcggtttgggtttgtcgcgcgttttatttttttcggcggtttgggtttgtcgcgcgttttatttttttcggcggtttgggtttgtcgcgcgttttatttttttcggcggtttgggtttgtcgcgcgttttatttttttcggcggtttgggtttgtcgcgcgttttatttttttcggcggtttgggtttgtcgcgcgttttatttttttcggcggtttgggtttgtcgcgcgttttatttttttcgacggtttgggtttgttattcgttttatttttttcgacggtttgggtttgtcgcgcgttttatttttttcgacggtttgggtttgtcgcgcgttttatttttttcgacggtttgggtttgtcgcgcgttttatttttttcgacggtttgggtttgtcgcgcgttttatttttttcgacggtttgggtttgtcgcgcgttttatttttttcggcggtttgggtttgtcgcgcgttttattttttttcgtggtttgggtttgtcgcgcgttttatttttttcgtcggtttgggtttgtcgcgcgttttattttttttaacggtttgggttt

SEQ ID NO: 39542 - DNA, 645 bp, Artificial Sequence
  chemically treated genomic DNA (Homo sapiens) CpG-island No: 39542
aaacccaaaccgttaaaaaaaataaaacgcgcgacaaacccaaaccgacgaaaaaaataaaacgcgcgacaaacccaaaccacgaaaaaaaataaaacgcgcgacaaacccaaaccgccgaaaaaaataaaacgcgcgacaaacccaaaccgtcgaaaaaaataaaacgcgcgacaaacccaaaccgtcgaaaaaaataaaacgcgcgacaaacccaaaccgtcgaaaaaaataaaacgcgcgacaaacccaaaccgtcgaaaaaaataaaacgcgcgacaaacccaaaccgtcgaaaaaaataaaacgaataacaaacccaaaccgtcgaaaaaaataaaacgcgcgacaaacccaaaccgccgaaaaaaataaaacgcgcgacaaacccaaaccgccgaaaaaaataaaacgcgcgacaaacccaaaccgccgaaaaaaataaaacgcgcgacaaacccaaaccgccgaaaaaaataaaacgcgcgacaaacccaaaccgccgaaaaaaataaaacgcgcgacaaacccaaaccgccgaaaaaaataaaacgcgcgacaaacccaaaccgccgaaaaaaataaaacgcgcgacaaacccaaaccgccgaaaaaaataaaacgcgtaacaaacccaaaccgtta

SEQ ID NO: 39543 - DNA, 645 bp, Artificial Sequence
  chemically treated genomic DNA (Homo sapiens) CpG-island No: 39543
aaatttaaatcgttgagaagggtgaggcgcgcgataaatttaaatcggcgagaagggtgaggcgcgcgataaatttaaattacggagaagggtgaggcgcgcgataaatttaaatcgtcgagaagggtgaggcgcgcgataaatttaaatcgtcgagaagggtgaggcgcgcgataaatttaaatcgtcgagaagggtgaggcgcgcgataaatttaaatcgtcgagaagggtgaggcgcgcgataaatttaaatcgtcgagaagggtgaggcgcgcgataaatttaaatcgtcgagaagggtgaggcgagtgataaatttaaatcgtcgagaagggtgaggcgcgcgataaatttaaatcgtcgagaagggtgaggcgcgcgataaatttaaatcgtcgagaagggtgaggcgcgcgataaatttaaatcgtcgagaagggtgaggcgcgcgataaatttaaatcgtcgagaagggtgaggcgcgcgataaatttaaatcgtcgagaagggtgaggcgcgcgataaatttaaatcgtcgagaagggtgaggcgcgcgataaatttaaatcgtcgagaagggtgaggcgcgcgataaatttaaatcgtcgagaagggtgaggcgcgtgataaatttaaatcgttg

SEQ ID NO: 39544 - DNA, 645 bp, Artificial Sequence
  chemically treated genomic DNA (Homo sapiens) CpG-island No: 39544
caacgatttaaatttatcacgcgcctcacccttctcgacgatttaaatttatcgcgcgcctcacccttctcgacgatttaaatttatcgcgcgcctcacccttctcgacgatttaaatttatcgcgcgcctcacccttctcgacgatttaaatttatcgcgcgcctcacccttctcgacgatttaaatttatcgcgcgcctcacccttctcgacgatttaaatttatcgcgcgcctcacccttctcgacgatttaaatttatcgcgcgcctcacccttctcgacgatttaaatttatcgcgcgcctcacccttctcgacgatttaaatttatcactcgcctcacccttctcgacgatttaaatttatcgcgcgcctcacccttctcgacgatttaaatttatcgcgcgcctcacccttctcgacgatttaaatttatcgcgcgcctcacccttctcgacgatttaaatttatcgcgcgcctcacccttctcgacgatttaaatttatcgcgcgcctcacccttctcgacgatttaaatttatcgcgcgcctcacccttctccgtaatttaaatttatcgcgcgcctcacccttctcgccgatttaaatttatcgcgcgcctcacccttctcaacgatttaaattt

SEQ ID NO: 39545 - DNA, 891 bp, Artificial Sequence
  chemically treated genomic DNA (Homo sapiens) CpG-island No: 39545
gggcgcgttgaggtcgtttagttgagtttagttaggtagtttcgggttcgcgtttttgtcgtttggagaggttttcgttgggagtcgagtttcggtttaggggattttcgcgaagaggtgtcgtttttaatttgttatttgttttcgttttttattttagaacgaattgtatattcgtttcgagaggataaattcggaagttttaaggtaattcgagggtttttcgtcgtatggaacgcggttttttatatatttgtttgttaagttttttttttatcgttcgtaattttagaattatttttcgttcgggtttgcgtgggtttagtattattttttttacggggcggatttcggaagggtagtaattttatttttttttttttcgcggtttgtagttatttatcgggaagcgttttcggaggcggtagtagaggtcgtcggataaggaacgtttagggaaatttttttagaattaatttagtttcggcgttagtagtagaagtcgagttttttataattgtgcgattaattttttcgggtgattggttatagggacgcgttcgcgttcgttttcgtcggcgacggggttggggacggattacgtgagcggcgcggcgcggcgcgtgcgtcgtcgttcgcgggtcgggttacgtgaagggcgcgcgttttttcgattttaggtcgtttttttgcgcgtcgcgcgtacgcgttgggtaggttcgcgtcgttacgtcgatcgtttttgggtttttagaaagtggtggggtgtttacgtcgtattttcgttgggtatttaggcgggatttagataaattttagttttagttacgagagtggaatttggggaatcggaggttgagggttaaggtttaaggtttgcggatttagttt

SEQ ID NO: 39546 - DNA, 891 bp, Artificial Sequence
  chemically treated genomic DNA (Homo sapiens) CpG-island No: 39546
aaactaaatccgcaaaccttaaaccttaaccctcaacctccgattccccaaattccactctcgtaactaaaactaaaatttatctaaatcccgcctaaatacccaacgaaaatacgacgtaaacaccccaccactttctaaaaacccaaaaacgatcgacgtaacgacgcgaacctacccaacgcgtacgcgcgacgcgcaaaaaaacgacctaaaatcgaaaaaacgcgcgcccttcacgtaacccgacccgcgaacgacgacgcacgcgccgcgccgcgccgctcacgtaatccgtccccaaccccgtcgccgacgaaaacgaacgcgaacgcgtccctataaccaatcacccgaaaaaattaatcgcacaattataaaaaactcgacttctactactaacgccgaaactaaattaattctaaaaaaatttccctaaacgttccttatccgacgacctctactaccgcctccgaaaacgcttcccgataaataactacaaaccgcgaaaaaaaaaaaaataaaattactacccttccgaaatccgccccgtaaaaaaaataatactaaacccacgcaaacccgaacgaaaaataattctaaaattacgaacgataaaaaaaaaacttaacaaacaaatatataaaaaaccgcgttccatacgacgaaaaaccctcgaattaccttaaaacttccgaatttatcctctcgaaacgaatatacaattcgttctaaaataaaaaacgaaaacaaataacaaattaaaaacgacacctcttcgcgaaaatcccctaaaccgaaactcgactcccaacgaaaacctctccaaacgacaaaaacgcgaacccgaaactacctaactaaactcaactaaacgacctcaacgcgccc

SEQ ID NO: 39547 - DNA, 891 bp, Artificial Sequence
  chemically treated genomic DNA (Homo sapiens) CpG-island No: 39547
agattggattcgtaagttttgaattttaatttttaattttcgattttttaagttttattttcgtagttgaggttgaagtttgtttaagtttcgtttaggtatttaacggagatacggcgtgaatattttattattttttgggaatttagaggcggtcggcgtggcggcgcgaatttgtttagcgcgtgcgcgcggcgcgtagggaggcggtttggaatcgagggagcgcgcgttttttacgtgattcgattcgcgggcggcgacgtacgcgtcgcgtcgcgtcgtttacgtggttcgtttttagtttcgtcgtcggcggaggcgggcgcgggcgcgtttttgtggttagttattcggaggagttggtcgtataattatgaaagattcggtttttgttgttagcgtcggagttgagttagttttgagaaggtttttttgggcgttttttgttcggcggtttttgttgtcgttttcggagacgtttttcgatagatggttataggtcgcggaggaggaggaggtggagttgttgttttttcggagttcgtttcgtgaggagaatggtattggatttacgtaggttcgggcggggaatggttttggggttgcgggcggtaaaggagagatttggtaggtaagtgtgtggggagtcgcgttttatgcggcgaaggattttcgaattgttttgaggttttcggatttgttttttcgggacgggtgtgtagttcgttttggggtgaggggcgggagtaggtagtaagttagaggcgatattttttcgcgggaattttttgagtcgagattcggtttttagcgagggtttttttaggcggtagaggcgcgagttcgggattatttggttgggtttagttgagcggttttagcgcgttt

SEQ ID NO: 39548 - DNA, 891 bp, Artificial Sequence
  chemically treated genomic DNA (Homo sapiens) CpG-island No: 39548
aaacgcgctaaaaccgctcaactaaacccaaccaaataatcccgaactcgcgcctctaccgcctaaaaaaaccctcgctaaaaaccgaatctcgactcaaaaaattcccgcgaaaaaatatcgcctctaacttactacctactcccgcccctcaccccaaaacgaactacacacccgtcccgaaaaaacaaatccgaaaacctcaaaacaattcgaaaatccttcgccgcataaaacgcgactccccacacacttacctaccaaatctctcctttaccgcccgcaaccccaaaaccattccccgcccgaacctacgtaaatccaataccattctcctcacgaaacgaactccgaaaaaacaacaactccacctcctcctcctccgcgacctataaccatctatcgaaaaacgtctccgaaaacgacaacaaaaaccgccgaacaaaaaacgcccaaaaaaaccttctcaaaactaactcaactccgacgctaacaacaaaaaccgaatctttcataattatacgaccaactcctccgaataactaaccacaaaaacgcgcccgcgcccgcctccgccgacgacgaaactaaaaacgaaccacgtaaacgacgcgacgcgacgcgtacgtcgccgcccgcgaatcgaatcacgtaaaaaacgcgcgctccctcgattccaaaccgcctccctacgcgccgcgcgcacgcgctaaacaaattcgcgccgccacgccgaccgcctctaaattcccaaaaaataataaaatattcacgccgtatctccgttaaatacctaaacgaaacttaaacaaacttcaacctcaactacgaaaataaaacttaaaaaatcgaaaattaaaaattaaaattcaaaacttacgaatccaatct

SEQ ID NO: 39549 - DNA, 561 bp, Artificial Sequence
  chemically treated genomic DNA (Homo sapiens) CpG-island No: 39549
tggtaaacgaatgagagaaggagggggtatattgaaaggtagtcggatacggaagtgttcggtttcgtattagatacggcgtggaggggaagcgaaggttcggaagggtaaagcgagagtttcgttcgttttcgttattatttcgcggttttttcggatagggtcggttcgttgtttttattttcgtacgagggtcgtttagtttttacggttttcggtttttagtttttagcggttaaatcgttgggtttttcggtcgaaaagggacgcgttcgagaagatttatatttttatgacgtttcgtttcgtcgtttttagttgttagtagataaagaattttatattttatagttgttttcgtcgttattaatagcgttaaggtgttagtttcgcgcgttaaggtgttcgtcgggatcgtcgcgttgtatgtcgggagtttggcggattcggaatttcgcgttgcgcgtttttttttttcggggggtagggtgggggagtgtttttgtatttttttattaggtcgatttaagattgttaagcgtttgcggataggattatttt

SEQ ID NO: 39550 - DNA, 561 bp, Artificial Sequence
  chemically treated genomic DNA (Homo sapiens) CpG-island No: 39550
aaaataatcctatccgcaaacgcttaacaatcttaaatcgacctaataaaaaaatacaaaaacactcccccaccctaccccccgaaaaaaaaaaacgcgcaacgcgaaattccgaatccgccaaactcccgacatacaacgcgacgatcccgacgaacaccttaacgcgcgaaactaacaccttaacgctattaataacgacgaaaacaactataaaatataaaattctttatctactaacaactaaaaacgacgaaacgaaacgtcataaaaatataaatcttctcgaacgcgtcccttttcgaccgaaaaacccaacgatttaaccgctaaaaactaaaaaccgaaaaccgtaaaaactaaacgaccctcgtacgaaaataaaaacaacgaaccgaccctatccgaaaaaaccgcgaaataataacgaaaacgaacgaaactctcgctttacccttccgaaccttcgcttcccctccacgccgtatctaatacgaaaccgaacacttccgtatccgactacctttcaatataccccctccttctctcattcgtttacca

SEQ ID NO: 39551 - DNA, 561 bp, Artificial Sequence
  chemically treated genomic DNA (Homo sapiens) CpG-island No: 39551
aagataattttgttcgtaaacgtttagtagttttaaatcggtttggtggaaggatgtagggatatttttttattttgtttttcgaaaaaggggaacgcgtagcgcgaggtttcgggttcgttaagttttcggtatgtagcgcggcgatttcggcgagtattttggcgcgcggagttggtattttggcgttgttggtggcggcggagatagttgtgaagtgtgaggttttttgtttgttggtagttaggggcgacgaggcgggacgttatggaagtgtaagttttttcgggcgcgttttttttcggtcgaggagtttaacggtttgatcgttgagagttgagagtcgagagtcgtggggattgggcgattttcgtacgggagtgagggtagcgggtcggttttgttcgggagggtcgcggggtggtgacggggacgaacgggattttcgttttgttttttcgaattttcgttttttttttacgtcgtgtttggtgcggggtcgagtattttcgtgttcggttgttttttaatgtgtttttttttttttttattcgtttatta

SEQ ID NO: 39552 - DNA, 561 bp, Artificial Sequence
  chemically treated genomic DNA (Homo sapiens) CpG-island No: 39552
taataaacgaataaaaaaaaaaaaaaacacattaaaaaacaaccgaacacgaaaatactcgaccccgcaccaaacacgacgtaaaaaaaaaacgaaaattcgaaaaaacaaaacgaaaatcccgttcgtccccgtcaccaccccgcgaccctcccgaacaaaaccgacccgctaccctcactcccgtacgaaaatcgcccaatccccacgactctcgactctcaactctcaacgatcaaaccgttaaactcctcgaccgaaaaaaaacgcgcccgaaaaaacttacacttccataacgtcccgcctcgtcgcccctaactaccaacaaacaaaaaacctcacacttcacaactatctccgccgccaccaacaacgccaaaataccaactccgcgcgccaaaatactcgccgaaatcgccgcgctacataccgaaaacttaacgaacccgaaacctcgcgctacgcgttcccctttttcgaaaaacaaaataaaaaaatatccctacatccttccaccaaaccgatttaaaactactaaacgtttacgaacaaaattatctt

SEQ ID NO: 39553 - DNA, 526 bp, Artificial Sequence
  chemically treated genomic DNA (Homo sapiens) CpG-island No: 39553
  unsure (291, 406)
ggttcgtcgttttttttttttcgtcggaggttattgaatgttggtcgaggtttgttcgtttttttagggtttggttgtgtttatcgtttttgcgttcggcgggttcggtttggaaggttcggtttggaaggtttcgggacggcgcggcgggcgggtagtttaggggcgtcggcgcgggcgaaggggttaggagtagttattcggcgcggagacgtaaggttaatggtttcggttcggggcgagttcggggaatgcggcgttcgagaggagtcgtgggatcggggttcgggnggatcgtttttttttattcggtgtagaaagtttaggcggtttcgtagcggcggcgcggtagttatgatttaggttttttttcggtttgtttcgttttcgttaggttcgggttttntttaattttgcgcgggtttgggttcgtcggttaattttttacggtagggcgggttttgaggttggtttcgtaaataattggagtttaggttaattcgaagttttagagtatagatagatt

SEQ ID NO: 39554 - DNA, 526 bp, Artificial Sequence
  chemically treated genomic DNA (Homo sapiens) CpG-island No: 39554
  unsure (121, 236)
aatctatctatactctaaaacttcgaattaacctaaactccaattatttacgaaaccaacctcaaaacccgccctaccgtaaaaaattaaccgacgaacccaaacccgcgcaaaattaaanaaaacccgaacctaacgaaaacgaaacaaaccgaaaaaaaacctaaatcataactaccgcgccgccgctacgaaaccgcctaaactttctacaccgaataaaaaaaaacgatccncccgaaccccgatcccacgactcctctcgaacgccgcattccccgaactcgccccgaaccgaaaccattaaccttacgtctccgcgccgaataactactcctaaccccttcgcccgcgccgacgcccctaaactacccgcccgccgcgccgtcccgaaaccttccaaaccgaaccttccaaaccgaacccgccgaacgcaaaaacgataaacacaaccaaaccctaaaaaaacgaacaaacctcgaccaacattcaataacctccgacgaaaaaaaaaaaacgacgaacc

SEQ ID NO: 39555 - DNA, 526 bp, Artificial Sequence
  chemically treated genomic DNA (Homo sapiens) CpG-island No: 39555
  unsure (121, 236)
agtttgtttgtgttttgggatttcggattggtttaggttttaattgtttacgaagttaattttagggttcgttttatcgtgagggattggtcggcggatttagattcgcgtagagttgggnagggttcgggtttggcggaagcggggtagatcgggaggggatttggattatggttgtcgcgtcgtcgttacgggatcgtttgagttttttatatcgggtgaggaagggcggtttnttcgggtttcggttttacggtttttttcgagcgtcgtatttttcggattcgtttcgggtcggagttattgattttgcgttttcgcgtcgggtagttgtttttggttttttcgttcgcgtcgacgtttttgagttgttcgttcgtcgcgtcgtttcggggttttttaagtcgggttttttaagtcggattcgtcgagcgtaagggcgatgggtatagttagattttgggggaacgaataggtttcggttagtatttagtggttttcgacgggagggaaggagcggcggatt

SEQ ID NO: 39556 - DNA, 526 bp, Artificial Sequence
  chemically treated genomic DNA (Homo sapiens) CpG-island No: 39556
  unsure (291, 406)
aatccgccgctccttccctcccgtcgaaaaccactaaatactaaccgaaacctattcgttcccccaaaatctaactatacccatcgcccttacgctcgacgaatccgacttaaaaaacccgacttaaaaaaccccgaaacgacgcgacgaacgaacaactcaaaaacgtcgacgcgaacgaaaaaaccaaaaacaactacccgacgcgaaaacgcaaaatcaataactccgacccgaaacgaatccgaaaaatacgacgctcgaaaaaaaccgtaaaaccgaaacccgaanaaaccgcccttcctcacccgatataaaaaactcaaacgatcccgtaacgacgacgcgacaaccataatccaaatcccctcccgatctaccccgcttccgccaaacccgaaccctncccaactctacgcgaatctaaatccgccgaccaatccctcacgataaaacgaaccctaaaattaacttcgtaaacaattaaaacctaaaccaatccgaaatcccaaaacacaaacaaact

SEQ ID NO: 39557 - DNA, 976 bp, Artificial Sequence
  chemically treated genomic DNA (Homo sapiens) CpG-island No: 39557
ggcgggttagaggtttcgtcggttagtgcgtacgcggcgtcggttttcgattaaggtttcggttcgttttgttggttcgtttgaaacgtcgatatttttagcgtacgattcggggtttcgggggtatttatggggttcgaagtttttgtttgtcggcggcgatcggatagttttttcgggcgcgtagggtagaggaagcgttttcgaaagttttcgtacgtatttacgagtcggttttgcgcgggtatagcggtagtcgcggcgggatattcggtagggttttcggcgttattttgtgttaaaaattgcgttttcggagattcgggtatcgtcggcgtcggtagttagagcgggatttagtttttatcgcgttttttattggagtttttttcggtttttcggcgagtgcggttcgtggggagtgggcgtcggcgcgaggaagtttttcggttcgggcgatttcggtttttgagcggtttttttttacgtcgtcgttcgttaggtcgacggaggatcggggcggggacgggggttttagcggtttattttgttgttatttttgatttattttttagtaacggcgcgtttttttttcggttttttcgcgaggtttgttgaagacggatttagttttcgtagagttggggaaggacggatggacggaaggtttagcgcggtttatttttttttttcgtcgtttttcggttggtaggagtcgtagcgatagtttcggggagcggggtttgttttaagatttttttcgcggtatcgggagttaggcgtggtcggaggtatcgcggttgttttacgtggttttcgtcggtcgttatttcgcgcggggaggacgcgtgcgtgcggtgcgtggtcggcgggttgcggggacgcgtttgaaattaaattttcgtagtgtttgattttgtttttttttcggttttgataattgtagtagttgttttttttagaatttttgttgttg

SEQ ID NO: 39558 - DNA, 976 bp, Artificial Sequence
  chemically treated genomic DNA (Homo sapiens) CpG-island No: 39558
caacaacaaaaattctaaaaaaaacaactactacaattatcaaaaccgaaaaaaaaacaaaatcaaacactacgaaaatttaatttcaaacgcgtccccgcaacccgccgaccacgcaccgcacgcacgcgtcctccccgcgcgaaataacgaccgacgaaaaccacgtaaaacaaccgcgatacctccgaccacgcctaactcccgataccgcgaaaaaaatcttaaaacaaaccccgctccccgaaactatcgctacgactcctaccaaccgaaaaacgacgaaaaaaaaaaataaaccgcgctaaaccttccgtccatccgtccttccccaactctacgaaaactaaatccgtcttcaacaaacctcgcgaaaaaaccgaaaaaaaaacgcgccgttactaaaaaataaatcaaaaataacaacaaaataaaccgctaaaacccccgtccccgccccgatcctccgtcgacctaacgaacgacgacgtaaaaaaaaaccgctcaaaaaccgaaatcgcccgaaccgaaaaacttcctcgcgccgacgcccactccccacgaaccgcactcgccgaaaaaccgaaaaaaactccaataaaaaacgcgataaaaactaaatcccgctctaactaccgacgccgacgatacccgaatctccgaaaacgcaatttttaacacaaaataacgccgaaaaccctaccgaatatcccgccgcgactaccgctatacccgcgcaaaaccgactcgtaaatacgtacgaaaactttcgaaaacgcttcctctaccctacgcgcccgaaaaaactatccgatcgccgccgacaaacaaaaacttcgaaccccataaatacccccgaaaccccgaatcgtacgctaaaaatatcgacgtttcaaacgaaccaacaaaacgaaccgaaaccttaatcgaaaaccgacgccgcgtacgcactaaccgacgaaacctctaacccgcc

SEQ ID NO: 39559 - DNA, 976 bp, Artificial Sequence
  chemically treated genomic DNA (Homo sapiens) CpG-island No: 39559
tagtagtagggattttggaaaaaatagttgttgtagttattagggtcgaggaaaaaataaggttaggtattgcgaagatttaattttaagcgcgttttcgtagttcgtcggttacgtatcgtacgtacgcgtttttttcgcgcggggtggcggtcggcgggagttacgtggagtagtcgcggtgttttcggttacgtttggttttcgatgtcgcgaagggggttttggggtaggtttcgtttttcgaagttgtcgttgcggtttttgttagtcgggagacgacgaggggaaggggtgggtcgcgttgggtttttcgtttattcgtttttttttagttttgcgggggttaaattcgtttttaataaatttcgcgaaaaagtcgagggggggacgcgtcgttgttggagaataggttagaagtgatagtagaatgggtcgttgagattttcgttttcgtttcggtttttcgtcggtttggcgggcggcgacgtggggaggggtcgtttagaagtcggggtcgttcgggtcggggaattttttcgcgtcgacgtttattttttacgggtcgtattcgtcgaggggtcgaaaggggttttagtggaggacgcggtgggagttgggtttcgttttagttgtcgacgtcggcggtgttcgggttttcgggagcgtagtttttggtataaagtagcgtcgaagattttgtcgggtgtttcgtcgcggttgtcgttgtgttcgcgtagggtcggttcgtgaatgcgtgcgggggttttcgagggcgttttttttattttgcgcgttcgggggagttgttcggtcgtcgtcggtaggtagaggtttcgggttttatgggtgttttcgagatttcggatcgtgcgttgagaatgtcgacgttttaaacgagttagtagagcgggtcggagttttggtcgggaatcggcgtcgcgtgcgtattggtcggcgaggtttttggttcgtt

SEQ ID NO: 39560 - DNA, 976 bp, Artificial Sequence
  chemically treated genomic DNA (Homo sapiens) CpG-island No: 39560
aacgaaccaaaaacctcgccgaccaatacgcacgcgacgccgattcccgaccaaaactccgacccgctctactaactcgtttaaaacgtcgacattctcaacgcacgatccgaaatctcgaaaacacccataaaacccgaaacctctacctaccgacgacgaccgaacaactcccccgaacgcgcaaaataaaaaaaacgccctcgaaaacccccgcacgcattcacgaaccgaccctacgcgaacacaacgacaaccgcgacgaaacacccgacaaaatcttcgacgctactttataccaaaaactacgctcccgaaaacccgaacaccgccgacgtcgacaactaaaacgaaacccaactcccaccgcgtcctccactaaaacccctttcgacccctcgacgaatacgacccgtaaaaaataaacgtcgacgcgaaaaaattccccgacccgaacgaccccgacttctaaacgacccctccccacgtcgccgcccgccaaaccgacgaaaaaccgaaacgaaaacgaaaatctcaacgacccattctactatcacttctaacctattctccaacaacgacgcgtccccccctcgactttttcgcgaaatttattaaaaacgaatttaacccccgcaaaactaaaaaaaaacgaataaacgaaaaacccaacgcgacccaccccttcccctcgtcgtctcccgactaacaaaaaccgcaacgacaacttcgaaaaacgaaacctaccccaaaacccccttcgcgacatcgaaaaccaaacgtaaccgaaaacaccgcgactactccacgtaactcccgccgaccgccaccccgcgcgaaaaaaacgcgtacgtacgatacgtaaccgacgaactacgaaaacgcgcttaaaattaaatcttcgcaatacctaaccttattttttcctcgaccctaataactacaacaactattttttccaaaatccctactacta

SEQ ID NO: 39561 - DNA, 624 bp, Artificial Sequence
  chemically treated genomic DNA (Homo sapiens) CpG-island No: 39561
aagcggacgttaagcgaggattagagcgttcggagaagcggacgttaagcgaggattagagcgttcggagaagcggacgttaagcgaggattagagcgttcggagaagcggacgttaagcgaggattagagcgttcggagaagcggacgttaagcgaggattagatcgttcggagaagcggacgttaagcgaggattagagcgttcggagaagcggacgttaagcgaggattagagcgttcggagaagcggacgttaagcgaggattagagcgttcggagaagcggacgttaagcgaggattagatcgtttcgagaagcggacgttaagcgaggattagagcgttcggagaagcggacgttaagcgaggattagagcgttcggagaagcggacgttaagcgaggattagatcgttcggagaagcggacgttaagcgaggattagagcgttcggagaagcggacgttaagcgaggattagagcgttcggagaagcggacgttaagcgaggattagagcgttcggagaagtagcgtttggggaagtggcgttcgggaaagtggtatttataagtattttacgttacgttttttgatttttttgtaggtttaaaaattttttaaatt

SEQ ID NO: 39562 - DNA, 624 bp, Artificial Sequence
  chemically treated genomic DNA (Homo sapiens) CpG-island No: 39562
aatttaaaaaatttttaaacctacaaaaaaatcaaaaaacgtaacgtaaaatacttataaataccactttcccgaacgccacttccccaaacgctacttctccgaacgctctaatcctcgcttaacgtccgcttctccgaacgctctaatcctcgcttaacgtccgcttctccgaacgctctaatcctcgcttaacgtccgcttctccgaacgatctaatcctcgcttaacgtccgcttctccgaacgctctaatcctcgcttaacgtccgcttctccgaacgctctaatcctcgcttaacgtccgcttctcgaaacgatctaatcctcgcttaacgtccgcttctccgaacgctctaatcctcgcttaacgtccgcttctccgaacgctctaatcctcgcttaacgtccgcttctccgaacgctctaatcctcgcttaacgtccgcttctccgaacgatctaatcctcgcttaacgtccgcttctccgaacgctctaatcctcgcttaacgtccgcttctccgaacgctctaatcctcgcttaacgtccgcttctccgaacgctctaatcctcgcttaacgtccgcttctccgaacgctctaatcctcgcttaacgtccgctt

SEQ ID NO: 39563 - DNA, 624 bp, Artificial Sequence
  chemically treated genomic DNA (Homo sapiens) CpG-island No: 39563
gatttggagggtttttaagtttataggaaagttagggagcgtagcgtaaggtatttatgagtgttattttttcgagcgttatttttttaagcgttattttttcgagcgttttgattttcgtttagcgttcgttttttcgagcgttttgattttcgtttagcgttcgttttttcgagcgttttgattttcgtttagcgttcgttttttcgagcggtttgattttcgtttagcgttcgttttttcgagcgttttgattttcgtttagcgttcgttttttcgagcgttttgattttcgtttagcgttcgtttttcggagcggtttgattttcgtttagcgttcgttttttcgagcgttttgattttcgtttagcgttcgttttttcgagcgttttgattttcgtttagcgttcgttttttcgagcgttttgattttcgtttagcgttcgttttttcgagcggtttgattttcgtttagcgttcgttttttcgagcgttttgattttcgtttagcgttcgttttttcgagcgttttgattttcgtttagcgttcgttttttcgagcgttttgattttcgtttagcgttcgttttttcgagcgttttgattttcgtttagcgttcgttt

SEQ ID NO: 39564 - DNA, 624 bp, Artificial Sequence
  chemically treated genomic DNA (Homo sapiens) CpG-island No: 39564
aaacgaacgctaaacgaaaatcaaaacgctcgaaaaaacgaacgctaaacgaaaatcaaaacgctcgaaaaaacgaacgctaaacgaaaatcaaaacgctcgaaaaaacgaacgctaaacgaaaatcaaaacgctcgaaaaaacgaacgctaaacgaaaatcaaaccgctcgaaaaaacgaacgctaaacgaaaatcaaaacgctcgaaaaaacgaacgctaaacgaaaatcaaaacgctcgaaaaaacgaacgctaaacgaaaatcaaaacgctcgaaaaaacgaacgctaaacgaaaatcaaaccgctccgaaaaacgaacgctaaacgaaaatcaaaacgctcgaaaaaacgaacgctaaacgaaaatcaaaacgctcgaaaaaacgaacgctaaacgaaaatcaaaccgctcgaaaaaacgaacgctaaacgaaaatcaaaacgctcgaaaaaacgaacgctaaacgaaaatcaaaacgctcgaaaaaacgaacgctaaacgaaaatcaaaacgctcgaaaaaataacgcttaaaaaaataacgctcgaaaaaataacactcataaataccttacgctacgctccctaactttcctataaacttaaaaaccctccaaatc

SEQ ID NO: 39565 - DNA, 915 bp, Artificial Sequence
  chemically treated genomic DNA (Homo sapiens) CpG-island No: 39565
gggggcgtagtcgcgaagtttgtttggcgcgcggggtttgtagattcggtcggcggggaggggatgcggaattagtcgcgtttaaatttcgggtcggcgatttggcgtttcgttatttttaatattgtttcgaggttcggtgataatgaagcggtcggacggtcggggtgagtagcggcggtagttagtaattagtttggtattatttttttagttcgttacgtcggttcgttttttttgcgcgcgtcgatttcggattggttttttacgttttcgtttaggtcgtttcgggagtttattgggtcgttcggttgtttttcgggaagtttaagcgtgggaggagcggcggatggttgagggacgcgattatagagagcggtcgattggacgcggttggaaaggggcgggttatatagggggcgggggatcgagggcggcgggaggagttggtcgggtaggggcggggttttagcggttgtgggcggggcgtgaggtgggggtgtgatgggcgagtagggcgaggtagatgtgggcggggtaaggtaggtgtgggcggggtacgtagggtttggggaggagatattagggagggcgcgaggagtacgcggtttcggttcggtttttcgatatttttaggtcgtcgtattttcgcggttcggggtttttttagtgttttaggtcgttttgtttttatttacgtgcgcgatttttttcgttatttagtacgattgcgagggcgtgtgggcgttttgttaatttttttgattttttttttttcgcgttgttttgttgttttttttttttttttaaagttttaacgttgcgtttcgtgcgtagtcgttttgtgatttttttttttttcgggagttttggggatttcgtttaggttttttttagggaagttatttttttttt

SEQ ID NO: 39566 - DNA, 915 bp, Artificial Sequence
  chemically treated genomic DNA (Homo sapiens) CpG-island No: 39566
aaaaaaaaaataacttccctaaaaaaaacctaaacgaaatccccaaaactcccgaaaaaaaaaaaaatcacaaaacgactacgcacgaaacgcaacgttaaaactttaaaaaaaaaaaaaaaacaacaaaacaacgcgaaaaaaaaaaaatcaaaaaaattaacaaaacgcccacacgccctcgcaatcgtactaaataacgaaaaaaatcgcgcacgtaaataaaaacaaaacgacctaaaacactaaaaaaaccccgaaccgcgaaaatacgacgacctaaaaatatcgaaaaaccgaaccgaaaccgcgtactcctcgcgccctccctaatatctcctccccaaaccctacgtaccccgcccacacctaccttaccccgcccacatctacctcgccctactcgcccatcacacccccacctcacgccccgcccacaaccgctaaaaccccgcccctacccgaccaactcctcccgccgccctcgatcccccgccccctatataacccgcccctttccaaccgcgtccaatcgaccgctctctataatcgcgtccctcaaccatccgccgctcctcccacgcttaaacttcccgaaaaacaaccgaacgacccaataaactcccgaaacgacctaaacgaaaacgtaaaaaaccaatccgaaatcgacgcgcgcaaaaaaaacgaaccgacgtaacgaactaaaaaaataataccaaactaattactaactaccgccgctactcaccccgaccgtccgaccgcttcattatcaccgaacctcgaaacaatattaaaaataacgaaacgccaaatcgccgacccgaaatttaaacgcgactaattccgcatcccctccccgccgaccgaatctacaaaccccgcgcgccaaacaaacttcgcgactacgccccc

SEQ ID NO: 39567 - DNA, 915 bp, Artificial Sequence
  chemically treated genomic DNA (Homo sapiens) CpG-island No: 39567
aggggaaggatggtttttttggagaggatttgggcggaatttttagggttttcggagagagggggagttatagagcggttacgtacggggcgtagcgttaaaattttggagaaggaaaaaaaataataaagtagcgcgaagggaaggaggttagggaggttagtaaggcgtttatacgttttcgtagtcgtattgagtaacgaggggagtcgcgtacgtgggtggggatagagcggtttaggatattgggggagtttcgggtcgcgggagtgcggcggtttgggggtgtcggggagtcgagtcgaggtcgcgtgtttttcgcgttttttttggtgttttttttttaggttttgcgtgtttcgtttatatttgttttgtttcgtttatatttgtttcgttttattcgtttattatatttttattttacgtttcgtttataatcgttggggtttcgtttttgttcggttagtttttttcgtcgttttcggtttttcgttttttatatgattcgtttttttttagtcgcgtttaatcggtcgttttttgtagtcgcgttttttagttattcgtcgttttttttacgtttgaatttttcgaaggatagtcgagcggtttaatgagttttcgggacggtttgagcgggagcgtgaagggttaattcggagtcggcgcgcgtaggaaaggcgggtcggcgtgacgggttggggaggtggtgttaggttggttgttagttgtcgtcgttgtttatttcggtcgttcggtcgttttattgttatcgggtttcggggtagtgttgggggtggcggggcgttaggtcgtcgattcgaggtttgggcgcgattggtttcgtatttttttttcgtcggtcgaatttgtaggtttcgcgcgttaggtaggtttcgcggttgcgttttt

SEQ ID NO: 39568 - DNA, 915 bp, Artificial Sequence
  chemically treated genomic DNA (Homo sapiens) CpG-island No: 39568
aaaaacgcaaccgcgaaacctacctaacgcgcgaaacctacaaattcgaccgacgaaaaaaaaatacgaaaccaatcgcgcccaaacctcgaatcgacgacctaacgccccgccacccccaacactaccccgaaacccgataacaataaaacgaccgaacgaccgaaataaacaacgacgacaactaacaaccaacctaacaccacctccccaacccgtcacgccgacccgcctttcctacgcgcgccgactccgaattaacccttcacgctcccgctcaaaccgtcccgaaaactcattaaaccgctcgactatccttcgaaaaattcaaacgtaaaaaaaacgacgaataactaaaaaacgcgactacaaaaaacgaccgattaaacgcgactaaaaaaaaacgaatcatataaaaaacgaaaaaccgaaaacgacgaaaaaaactaaccgaacaaaaacgaaaccccaacgattataaacgaaacgtaaaataaaaatataataaacgaataaaacgaaacaaatataaacgaaacaaaacaaatataaacgaaacacgcaaaacctaaaaaaaaaacaccaaaaaaaacgcgaaaaacacgcgacctcgactcgactccccgacacccccaaaccgccgcactcccgcgacccgaaactcccccaatatcctaaaccgctctatccccacccacgtacgcgactcccctcgttactcaatacgactacgaaaacgtataaacgccttactaacctccctaacctccttcccttcgcgctactttattattttttttccttctccaaaattttaacgctacgccccgtacgtaaccgctctataactccccctctctccgaaaaccctaaaaattccgcccaaatcctctccaaaaaaaccatccttcccct

SEQ ID NO: 39569 - DNA, 517 bp, Artificial Sequence
  chemically treated genomic DNA (Homo sapiens) CpG-island No: 39569
gggataaggttcgttggtcgaggggttgcgcgatcgggagagagacgatcgggcggtcggtgttagggtgttagggtgttagggtgtcgcggttggagcgtaggtagcgttttacgtgttggtgaggttagatagggtcgttttcgcgttcgtttggggagcgtcgtttcgggagtttagcgagggagggcggtcgtcgtttcgagttttaggataaggaagtcggtttttatatttgggtaggaggcgtgaggcgaggggattggtggaagtttttgttttgtcggttgcgggtcgcgaatttgcgaggtcgcgggacgtgcgcgcgcggggttaggcgcgggtgtgtgcgcgcgggtaggtgtgcgagtgtgcgttcgggcgcgcgtcggtttttttggggagtttcggatgtagtcggagaaatgaaggtaaagtgggtgtgtttaggtttttttttcgtgtcggttgttttttagtttttgcgtcgtgtaatattagattatttataaaatat

SEQ ID NO: 39570 - DNA, 517 bp, Artificial Sequence
  chemically treated genomic DNA (Homo sapiens) CpG-island No: 39570
atattttataaataatctaatattacacgacgcaaaaactaaaaaacaaccgacacgaaaaaaaaacctaaacacacccactttaccttcatttctccgactacatccgaaactccccaaaaaaaccgacgcgcgcccgaacgcacactcgcacacctacccgcgcgcacacacccgcgcctaaccccgcgcgcgcacgtcccgcgacctcgcaaattcgcgacccgcaaccgacaaaacaaaaacttccaccaatcccctcgcctcacgcctcctacccaaatataaaaaccgacttccttatcctaaaactcgaaacgacgaccgccctccctcgctaaactcccgaaacgacgctccccaaacgaacgcgaaaacgaccctatctaacctcaccaacacgtaaaacgctacctacgctccaaccgcgacaccctaacaccctaacaccctaacaccgaccgcccgatcgtctctctcccgatcgcgcaacccctcgaccaacgaaccttatccc

SEQ ID NO: 39571 - DNA, 517 bp, Artificial Sequence
  chemically treated genomic DNA (Homo sapiens) CpG-island No: 39571
gtgttttgtagatgatttagtgttatacggcgtagggattgggaagtagtcggtacgagaaaggaatttgagtatatttattttgtttttattttttcggttgtattcgaggttttttagaggggtcggcgcgcgttcgggcgtatattcgtatatttgttcgcgcgtatatattcgcgtttggtttcgcgcgcgtacgtttcgcgatttcgtaggttcgcggttcgtaatcggtagggtaggagtttttattaattttttcgttttacgttttttgtttaaatatagaaatcgatttttttgttttagagttcggagcggcggtcgttttttttcgttgggttttcgaggcggcgttttttaggcgggcgcggggacggttttgtttggttttattagtacgtggggcgttgtttgcgttttagtcgcggtattttggtattttggtattttggtatcgatcgttcggtcgtttttttttcggtcgcgtagtttttcggttagcgggttttgtttt

SEQ ID NO: 39572 - DNA, 517 bp, Artificial Sequence
  chemically treated genomic DNA (Homo sapiens) CpG-island No: 39572
aaaacaaaacccgctaaccgaaaaactacgcgaccgaaaaaaaaacgaccgaacgatcgataccaaaataccaaaataccaaaataccgcgactaaaacgcaaacaacgccccacgtactaataaaaccaaacaaaaccgtccccgcgcccgcctaaaaaacgccgcctcgaaaacccaacgaaaaaaaacgaccgccgctccgaactctaaaacaaaaaaatcgatttctatatttaaacaaaaaacgtaaaacgaaaaaattaataaaaactcctaccctaccgattacgaaccgcgaacctacgaaatcgcgaaacgtacgcgcgcgaaaccaaacgcgaatatatacgcgcgaacaaatatacgaatatacgcccgaacgcgcgccgacccctctaaaaaacctcgaatacaaccgaaaaaataaaaacaaaataaatatactcaaattcctttctcgtaccgactacttcccaatccctacgccgtataacactaaatcatctacaaaacac

SEQ ID NO: 39573 - DNA, 883 bp, Artificial Sequence
  chemically treated genomic DNA (Homo sapiens) CpG-island No: 39573
aatcgtatttcgggttcgggagtagcgcgttcgggtttttagcggttatcgttcgggggttttttaggttcggtttttgttttttgtcgttcgttttttaggtcgagttttcgttttcgcgatgtcgtcgcgttcgtcgtcgttaggcgcgttggttcgtcgggtcgttcgggcgcggggcgcgtcgttcgtcgtagtttttttttttttttcggtttggttttgcggttcgtagcggggttcggggtagagcggtcgttttgttttcgtcgttcgacggcgcggggttttgtaaaggcggaagttcggcgttcgttatgatttcgtgcggacgtttagtgcgtttagtttcgtcgcgtcggtcgggttttcgggttttttcgcgttgagcgttcgaattcgtttttttcgcggtcgtttatcgttcgtcgtcgtcgtagtacgagtcgttttttcgttttcgttttttcgtttcgtcgtcgtcgtcgtcgtaggagagggagggaggcggagggaagggaggcggcgggttttgtttagagttcgtttcgggcgtcggtaagcgagtttcggtcgcggcggtagcgttatttcgggtcgcgggtagtcgtttttcgtttttcgcgttcggaattgttttcgttttttcgcgatttcgtagtagtcggttttcggggcgttacgaacgttgttttttttgtggagtagagattttttttttttttttagggggtgtcgtttcggggatcgttgagcgttaggggtttaggaggcggggacgggagcgtcgtgattcgttatggtttaagcggttaaatagttgaagaaaattaaagatatcgaggcgtaggttttttaggagtagaaggagaaggaggaattt

SEQ ID NO: 39574 - DNA, 883 bp, Artificial Sequence
  chemically treated genomic DNA (Homo sapiens) CpG-island No: 39574
aaattcctccttctccttctactcctaaaaaacctacgcctcgatatctttaattttcttcaactatttaaccgcttaaaccataacgaatcacgacgctcccgtccccgcctcctaaacccctaacgctcaacgatccccgaaacgacaccccctaaaaaaaaaaaaaaaatctctactccacaaaaaaaacaacgttcgtaacgccccgaaaaccgactactacgaaatcgcgaaaaaacgaaaacaattccgaacgcgaaaaacgaaaaacgactacccgcgacccgaaataacgctaccgccgcgaccgaaactcgcttaccgacgcccgaaacgaactctaaacaaaacccgccgcctcccttccctccgcctccctccctctcctacgacgacgacgacgacgaaacgaaaaaacgaaaacgaaaaaacgactcgtactacgacgacgacgaacgataaacgaccgcgaaaaaaacgaattcgaacgctcaacgcgaaaaaacccgaaaacccgaccgacgcgacgaaactaaacgcactaaacgtccgcacgaaatcataacgaacgccgaacttccgcctttacaaaaccccgcgccgtcgaacgacgaaaacaaaacgaccgctctaccccgaaccccgctacgaaccgcaaaaccaaaccgaaaaaaaaaaaaaaactacgacgaacgacgcgccccgcgcccgaacgacccgacgaaccaacgcgcctaacgacgacgaacgcgacgacatcgcgaaaacgaaaactcgacctaaaaaacgaacgacaaaaaacaaaaaccgaacctaaaaaacccccgaacgataaccgctaaaaacccgaacgcgctactcccgaacccgaaatacgatt

SEQ ID NO: 39575 - DNA, 883 bp, Artificial Sequence
  chemically treated genomic DNA (Homo sapiens) CpG-island No: 39575
ggatttttttttttttttttgtttttggagggtttgcgtttcgatgtttttgattttttttagttgtttggtcgtttgagttatggcgggttacggcgttttcgttttcgttttttggatttttagcgtttagcgattttcgaggcgatattttttaagaaggggaagggggtttttgttttatagaggggatagcgttcgtggcgtttcgagggtcggttgttgcggggtcgcgggaaggcgaaggtagtttcggacgcggagggcgaggggcggttgttcgcggttcgggatggcgttgtcgtcgcggtcggagttcgtttgtcggcgttcgggacgggttttgggtagggttcgtcgtttttttttttttcgttttttttttttttttgcggcggcggcggcggcgaagcgggggggcgggggcggggaggcggttcgtattgcggcggcggcgggcggtgagcggtcgcggaaggggcggattcgggcgtttagcgcgggaaggttcgggggttcggtcggcgcggcgaggttgggcgtattgggcgttcgtacggggttatggcgagcgtcgagttttcgtttttgtagagtttcgcgtcgtcgggcggcgggaataaagcggtcgttttatttcggatttcgttgcgggtcgtagggttaagtcgggggaagaggggaggttgcggcgggcggcgcgtttcgcgttcgggcgattcggcggattagcgcgtttggcggcggcgagcgcggcgatatcgcgggagcggaggttcggtttagagggcgggcggtagagggtaaggatcgggtttggggagttttcgggcggtggtcgttgagggttcggacgcgttattttcgagttcggggtgcggtt

SEQ ID NO: 39576 - DNA, 883 bp, Artificial Sequence
  chemically treated genomic DNA (Homo sapiens) CpG-island No: 39576
aaccgcaccccgaactcgaaaataacgcgtccgaaccctcaacgaccaccgcccgaaaactccccaaacccgatccttaccctctaccgcccgccctctaaaccgaacctccgctcccgcgatatcgccgcgctcgccgccgccaaacgcgctaatccgccgaatcgcccgaacgcgaaacgcgccgcccgccgcaacctcccctcttcccccgacttaaccctacgacccgcaacgaaatccgaaataaaacgaccgctttattcccgccgcccgacgacgcgaaactctacaaaaacgaaaactcgacgctcgccataaccccgtacgaacgcccaatacgcccaacctcgccgcgccgaccgaacccccgaaccttcccgcgctaaacgcccgaatccgccccttccgcgaccgctcaccgcccgccgccgccgcaatacgaaccgcctccccgcccccgcccccccgcttcgccgccgccgccgccgcaaaaaaaaaaaaaaaacgaaaaaaaaaaaaacgacgaaccctacccaaaacccgtcccgaacgccgacaaacgaactccgaccgcgacgacaacgccatcccgaaccgcgaacaaccgcccctcgccctccgcgtccgaaactaccttcgccttcccgcgaccccgcaacaaccgaccctcgaaacgccacgaacgctatcccctctataaaacaaaaacccccttccccttcttaaaaaatatcgcctcgaaaatcgctaaacgctaaaaatccaaaaaacgaaaacgaaaacgccgtaacccgccataactcaaacgaccaaacaactaaaaaaaatcaaaaacatcgaaacgcaaaccctccaaaaacaaaaaaaaaaaaaaaaatcc

SEQ ID NO: 39577 - DNA, 521 bp, Artificial Sequence
  chemically treated genomic DNA (Homo sapiens) CpG-island No: 39577
atttcgttttttatttttagttatttcgtggtcgcgagttaagaggtttttttaaaggcgcgagtttcgtttttattgtttattagggttttcgattggcggtttttgggcggggcggggttcggtttgggttcggggttggttcggggcgggttcggggtcggatcggttttcgttttttttgttcgcgttgcggcgggaggtggttgtcgggtgggaggtgtgtgcgcgtgtgtcgcgtcgtagggagcggcgggtcgcgtcgtcggttgttagttagtttcgcgtcgtcgttcgatggcgcgaggaggcgcgcgggtttagtttcggggggtcggtcgcgggtgagtttttcggtttgtcgttcgcgagtatgttatttttagtcgtcgtcgtcgtagttttcgttagtcgcgttcgcgttttcgtttttcgtagtcgtagtcgttgtttcgggtattggtttttagattttcgtttttgatttacgtttagattttagttttagagggttatggtcg

SEQ ID NO: 39578 - DNA, 521 bp, Artificial Sequence
  chemically treated genomic DNA (Homo sapiens) CpG-island No: 39578
cgaccataaccctctaaaactaaaatctaaacgtaaatcaaaaacgaaaatctaaaaaccaatacccgaaacaacgactacgactacgaaaaacgaaaacgcgaacgcgactaacgaaaactacgacgacgacgactaaaaataacatactcgcgaacgacaaaccgaaaaactcacccgcgaccgaccccccgaaactaaacccgcgcgcctcctcgcgccatcgaacgacgacgcgaaactaactaacaaccgacgacgcgacccgccgctccctacgacgcgacacacgcgcacacacctcccacccgacaaccacctcccgccgcaacgcgaacaaaaaaaacgaaaaccgatccgaccccgaacccgccccgaaccaaccccgaacccaaaccgaaccccgccccgcccaaaaaccgccaatcgaaaaccctaataaacaataaaaacgaaactcgcgcctttaaaaaaacctcttaactcgcgaccacgaaataactaaaaataaaaaacgaaat

SEQ ID NO: 39579 - DNA, 521 bp, Artificial Sequence
  chemically treated genomic DNA (Homo sapiens) CpG-island No: 39579
cggttatggttttttggagttagggtttgggcgtggattagaggcgggggtttgggggttaatgttcgaggtagcggttgcggttgcgggaggcgggggcgcgggcgcggttggcggaggttgcggcggcggcggttggaggtgatatgttcgcgggcggtaggtcgaggggtttattcgcggtcggtttttcggggttgggttcgcgcgttttttcgcgttatcgggcggcggcgcggagttagttgatagtcggcggcgcgattcgtcgttttttacggcgcggtatacgcgtatatattttttattcggtagttatttttcgtcgtagcgcgaataaagggggcgggggtcgattcggtttcgagttcgtttcgagttagtttcgagtttaggtcgggtttcgtttcgtttaggagtcgttaatcgaaagttttaatgagtagtgggggcgggattcgcgtttttaaagggattttttggttcgcggttacggggtggttgggggtagggggcgggat

SEQ ID NO: 39580 - DNA, 521 bp, Artificial Sequence
  chemically treated genomic DNA (Homo sapiens) CpG-island No: 39580
atcccgccccctacccccaaccaccccgtaaccgcgaaccaaaaaatccctttaaaaacgcgaatcccgcccccactactcattaaaactttcgattaacgactcctaaacgaaacgaaacccgacctaaactcgaaactaactcgaaacgaactcgaaaccgaatcgacccccgccccctttattcgcgctacgacgaaaaataactaccgaataaaaaatatatacgcgtataccgcgccgtaaaaaacgacgaatcgcgccgccgactatcaactaactccgcgccgccgcccgataacgcgaaaaaacgcgcgaacccaaccccgaaaaaccgaccgcgaataaacccctcgacctaccgcccgcgaacatatcacctccaaccgccgccgccgcaacctccgccaaccgcgcccgcgcccccgcctcccgcaaccgcaaccgctacctcgaacattaacccccaaacccccgcctctaatccacgcccaaaccctaactccaaaaaaccataaccg

SEQ ID NO: 39581 - DNA, 717 bp, Artificial Sequence
  chemically treated genomic DNA (Homo sapiens) CpG-island No: 39581
cgtcgtttcgcgtgggtgggtttcgcgtttttttcggggttttagagttattacgtgatttttacgaagcgcggggcgtcggcggaaagtcgcggtaggggtgggatttgggatttcgaggtgcggagagagggcgggtagaggaggaaacgaggcgggggtgggagaaggagggcggggtagacgtgggacgggaaggacggttgtcgggattggcgcgcggggatattgggtcgacgcgtggagtagcggggagagcgggaagtttgagggggcggggtcggcgcgaggtcgtgggtgcggtacgaggatgtcggcggcgggatagcgttcgtaggtagttttacgggtagggcgcgcgggcggggcggggcgggtcgggttagaggagcgttcggtatgtcgtaagggttttcggtcgtcggtagcgttttgtagaggagcgtcgcggcgttcgggaattagtcgtagtcgtagtcgtagtagtaggtagagggcgagaggtttagggagggtcgtggggtgcggggatcggcgcgtcgcggggggcgaggaggtgggtgttggagtttcgtggtggtgattgcggaggtgtagaggtggcgggtgcggtcggagataagtagaggtaggggcgtagggatgttggggaatgggggcgatttagggattttgtcgtgcgtatagtgttcgcggtttttggaatggtttttgagt

SEQ ID NO: 39582 - DNA, 717 bp, Artificial Sequence
  chemically treated genomic DNA (Homo sapiens) CpG-island No: 39582
actcaaaaaccattccaaaaaccgcgaacactatacgcacgacaaaatccctaaatcgcccccattccccaacatccctacgcccctacctctacttatctccgaccgcacccgccacctctacacctccgcaatcaccaccacgaaactccaacacccacctcctcgccccccgcgacgcgccgatccccgcaccccacgaccctccctaaacctctcgccctctacctactactacgactacgactacgactaattcccgaacgccgcgacgctcctctacaaaacgctaccgacgaccgaaaacccttacgacataccgaacgctcctctaacccgacccgccccgccccgcccgcgcgccctacccgtaaaactacctacgaacgctatcccgccgccgacatcctcgtaccgcacccacgacctcgcgccgaccccgccccctcaaacttcccgctctccccgctactccacgcgtcgacccaatatccccgcgcgccaatcccgacaaccgtccttcccgtcccacgtctaccccgccctccttctcccacccccgcctcgtttcctcctctacccgccctctctccgcacctcgaaatcccaaatcccacccctaccgcgactttccgccgacgccccgcgcttcgtaaaaatcacgtaataactctaaaaccccgaaaaaaacgcgaaacccacccacgcgaaacgacg

SEQ ID NO: 39583 - DNA, 717 bp, Artificial Sequence
  chemically treated genomic DNA (Homo sapiens) CpG-island No: 39583
gtttaggagttattttaggagtcgcggatattgtgcgtacgatagggtttttggatcgtttttattttttaatatttttacgtttttatttttgtttgttttcggtcgtattcgttatttttgtattttcgtagttattattacggaattttagtatttattttttcgtttttcgcggcgcgtcggttttcgtattttacggttttttttgagtttttcgttttttatttgttgttgcggttgcggttgcggttggttttcgggcgtcgcgacgtttttttgtaggacgttgtcggcggtcgggagtttttgcgatatgtcgggcgtttttttggttcggttcgtttcgtttcgttcgcgcgttttgttcgtggggttgtttacgggcgttgtttcgtcgtcggtattttcgtgtcgtatttacggtttcgcgtcggtttcgtttttttaggtttttcgtttttttcgttattttacgcgtcggtttagtgttttcgcgcgttagtttcggtagtcgtttttttcgttttacgtttgtttcgtttttttttttttattttcgtttcgtttttttttttgttcgtttttttttcgtatttcggggttttaaattttatttttgtcgcggtttttcgtcggcgtttcgcgtttcgtggaagttacgtggtggttttgaaatttcggagggaacgcgaagtttatttacgcgaggcgacg

SEQ ID NO: 39584 - DNA, 717 bp, Artificial Sequence
  chemically treated genomic DNA (Homo sapiens) CpG-island No: 39584
cgtcgcctcgcgtaaataaacttcgcgttccctccgaaatttcaaaaccaccacgtaacttccacgaaacgcgaaacgccgacgaaaaaccgcgacaaaaataaaatttaaaaccccgaaatacgaaaaaaaaacgaacaaaaaaaaaaacgaaacgaaaataaaaaaaaaaaaacgaaacaaacgtaaaacgaaaaaaacgactaccgaaactaacgcgcgaaaacactaaaccgacgcgtaaaataacgaaaaaaacgaaaaacctaaaaaaacgaaaccgacgcgaaaccgtaaatacgacacgaaaataccgacgacgaaacaacgcccgtaaacaaccccacgaacaaaacgcgcgaacgaaacgaaacgaaccgaaccaaaaaaacgcccgacatatcgcaaaaactcccgaccgccgacaacgtcctacaaaaaaacgtcgcgacgcccgaaaaccaaccgcaaccgcaaccgcaacaacaaataaaaaacgaaaaactcaaaaaaaaccgtaaaatacgaaaaccgacgcgccgcgaaaaacgaaaaaataaatactaaaattccgtaataataactacgaaaatacaaaaataacgaatacgaccgaaaacaaacaaaaataaaaacgtaaaaatattaaaaaataaaaacgatccaaaaaccctatcgtacgcacaatatccgcgactcctaaaataactcctaaac

SEQ ID NO: 39585 - DNA, 572 bp, Artificial Sequence
  chemically treated genomic DNA (Homo sapiens) CpG-island No: 39585
ggtagaagcgagattcgtcgaagggaagttcgagtagtcggggagtttaggggggttttttcggggagagggtcgcgggttttttttgtcgtttatttgtcgcgtcgaggtaaagtcgtagtcgcgtcgcggggtggttttcgggtttttttatcggacggtcgggagggtgggatcggggcgggattttttttagttgtattaacgcgttcgtttcgtttttttttggttaggtgtagcgggtttcgtcgtgtttttagtttgttgcgggttcgggaattttcggcggatcggtagaggggcgtttcggtttttttgcgttttagttcgtttcgggggtgcggtttttgcggttaggtttttagcgcggaaaaagattggagggttttagttattttaaagaggataggtattagtagagtcgcgggcggcgggtgtatggaatcggaatgtgttgcgcgttagtttggagcgttcggagttcggaggtttgtttcggagggggaaacgcggcggggcggttatgggtttcggggttttgttttaggtttgttttttatttgtgttttatt

SEQ ID NO: 39586 - DNA, 572 bp, Artificial Sequence
  chemically treated genomic DNA (Homo sapiens) CpG-island No: 39586
aataaaacacaaataaaaaacaaacctaaaacaaaaccccgaaacccataaccgccccgccgcgtttccccctccgaaacaaacctccgaactccgaacgctccaaactaacgcgcaacacattccgattccatacacccgccgcccgcgactctactaatacctatcctctttaaaataactaaaaccctccaatctttttccgcgctaaaaacctaaccgcaaaaaccgcacccccgaaacgaactaaaacgcaaaaaaaccgaaacgcccctctaccgatccgccgaaaattcccgaacccgcaacaaactaaaaacacgacgaaacccgctacacctaaccaaaaaaaaacgaaacgaacgcgttaatacaactaaaaaaaatcccgccccgatcccaccctcccgaccgtccgataaaaaaacccgaaaaccaccccgcgacgcgactacgactttacctcgacgcgacaaataaacgacaaaaaaaacccgcgaccctctccccgaaaaaacccccctaaactccccgactactcgaacttcccttcgacgaatctcgcttctacc

SEQ ID NO: 39587 - DNA, 572 bp, Artificial Sequence
  chemically treated genomic DNA (Homo sapiens) CpG-island No: 39587
gatggagtataaatgagaagtaaatttggggtaggatttcggggtttatggtcgtttcgtcgcgttttttttttcggggtaggttttcgggtttcgagcgttttaggttggcgcgtagtatatttcggttttatgtattcgtcgttcgcggttttgttaatgtttgttttttttggggtgattaggattttttaattttttttcgcgttgaaagtttggtcgtaaagatcgtattttcggggcgggttgagacgtagagaagtcggggcgtttttttgtcggttcgtcgggagttttcgggttcgtagtaggttgaggatacggcgggattcgttgtatttggttagggaggggcggggcgggcgcgttagtgtagttgggggaggtttcgtttcggttttattttttcggtcgttcggtggggaaattcgggagttatttcgcggcgcggttgcggttttgtttcggcgcgataggtaagcggtagaaggagttcgcgatttttttttcgggagggtttttttgagtttttcgattgttcggattttttttcggcggatttcgtttttgtt

SEQ ID NO: 39588 - DNA, 572 bp, Artificial Sequence
  chemically treated genomic DNA (Homo sapiens) CpG-island No: 39588
aacaaaaacgaaatccgccgaaaaaaaatccgaacaatcgaaaaactcaaaaaaaccctcccgaaaaaaaaatcgcgaactccttctaccgcttacctatcgcgccgaaacaaaaccgcaaccgcgccgcgaaataactcccgaatttccccaccgaacgaccgaaaaaataaaaccgaaacgaaacctcccccaactacactaacgcgcccgccccgcccctccctaaccaaatacaacgaatcccgccgtatcctcaacctactacgaacccgaaaactcccgacgaaccgacaaaaaaacgccccgacttctctacgtctcaacccgccccgaaaatacgatctttacgaccaaactttcaacgcgaaaaaaaattaaaaaatcctaatcaccccaaaaaaaacaaacattaacaaaaccgcgaacgacgaatacataaaaccgaaatatactacgcgccaacctaaaacgctcgaaacccgaaaacctaccccgaaaaaaaaaacgcgacgaaacgaccataaaccccgaaatcctaccccaaatttacttctcatttatactccatc

SEQ ID NO: 39589 - DNA, 946 bp, Artificial Sequence
  chemically treated genomic DNA (Homo sapiens) CpG-island No: 39589
gcgcgaagggaaatcgcgttgagtagttggggtgggtgcgtttgggggcgtggtttgcgggtcggcgggcgggcgggagtttgcggtggaggcgtggtacgagggaggggcgaaatcgggtggcgcggagggggcgtggcgttgggaggggcggggggagtgggcggggtcgagatgggggcgtgcgcgttgataggagcgtcgggggagtgagagacgttttttggcgggagttggcggttgtggattttagcgggggcggaggggaagaggggagtaggggcggggagtaaggagtcgggaggagggcggcgggcgggtttgtttttttaaggtgttcgaggttcgcgggcgttgcgttgaggggacggcgggaggcgcggtttggtttcgtatttaaagtcgtcgtagcgcgtttcgggttcggtcgattcggcggggatttaggggtgggcgatttcgcgggatcgtggcgtatggtgagtgggagcggttggggggttgtgtagttttttggttttttggttgggaaggggtcgggcgtcgagttcggttttttagaggttcggggtcgcggcgagtttcgcgggggtcgggagaagtttgggttcggttgcgcggaggataaagtgggggtgttgggcgcgggcgtataggtcggacgtcgggagttagtagtatttttgcgtcgttttggtttagattatttttgggtcggttcgcgtttttcgtagttcgcgtcggtcgagtcggggtgggggtggtttcgggtgttcggttttttatatcgttatcggtttttgtttcgcggggcgttcggcgttttcggggttttggtatcgttttatagaggttcggttttgttttggtcgttgttagtgttattttttttaacgagaaatttgggcgtgatgtatgcgaaataattttgatgtatgatggtttt

SEQ ID NO: 39590 - DNA, 946 bp, Artificial Sequence
  chemically treated genomic DNA (Homo sapiens) CpG-island No: 39590
aaaaccatcatacatcaaaattatttcgcatacatcacgcccaaatttctcgttaaaaaaaataacactaacaacgaccaaaacaaaaccgaacctctataaaacgataccaaaaccccgaaaacgccgaacgccccgcgaaacaaaaaccgataacgatataaaaaaccgaacacccgaaaccacccccaccccgactcgaccgacgcgaactacgaaaaacgcgaaccgacccaaaaataatctaaaccaaaacgacgcaaaaatactactaactcccgacgtccgacctatacgcccgcgcccaacacccccactttatcctccgcgcaaccgaacccaaacttctcccgacccccgcgaaactcgccgcgaccccgaacctctaaaaaaccgaactcgacgcccgaccccttcccaaccaaaaaaccaaaaaactacacaaccccccaaccgctcccactcaccatacgccacgatcccgcgaaatcgcccacccctaaatccccgccgaatcgaccgaacccgaaacgcgctacgacgactttaaatacgaaaccaaaccgcgcctcccgccgtcccctcaacgcaacgcccgcgaacctcgaacaccttaaaaaaacaaacccgcccgccgccctcctcccgactccttactccccgcccctactcccctcttcccctccgcccccgctaaaatccacaaccgccaactcccgccaaaaaacgtctctcactcccccgacgctcctatcaacgcgcacgcccccatctcgaccccgcccactccccccgcccctcccaacgccacgccccctccgcgccacccgatttcgcccctccctcgtaccacgcctccaccgcaaactcccgcccgcccgccgacccgcaaaccacgcccccaaacgcacccaccccaactactcaacgcgatttcccttcgcgc

SEQ ID NO: 39591 - DNA, 946 bp, Artificial Sequence
  chemically treated genomic DNA (Homo sapiens) CpG-island No: 39591
gaaattattatgtattaaaattgtttcgtatatattacgtttaagtttttcgttaagggagatggtattgatagcgattagggtagagtcgagtttttgtagagcggtgttagggtttcgaaggcgtcggacgtttcgcgaggtagaggtcggtagcggtgtgggggatcgggtattcggaattatttttatttcggttcggtcgacgcgggttgcggaggacgcgggtcggtttagagatggtttggattaaagcggcgtagagatgttgttggttttcggcgttcggtttgtgcgttcgcgtttagtatttttattttgtttttcgcgtagtcgggtttaggtttttttcggttttcgcgaagttcgtcgcggtttcgggtttttagagggtcgagttcggcgttcggtttttttttaattaagaggttaagaggttgtataattttttagtcgtttttatttattatgcgttacggtttcgcgaagtcgtttatttttagattttcgtcgggtcggtcgagttcggggcgcgttgcggcggttttgagtgcgaggttaggtcgcgtttttcgtcgtttttttagcgtagcgttcgcgagtttcgggtattttaaagagataggttcgttcgtcgtttttttttcggttttttgtttttcgtttttgttttttttttttttttcgttttcgttggggtttatagtcgttagttttcgttaggaggcgttttttattttttcggcgtttttgttagcgcgtacgtttttatttcggtttcgtttatttttttcgttttttttaacgttacgtttttttcgcgttattcggtttcgtttttttttcgtgttacgtttttatcgtaggttttcgttcgttcgtcggttcgtaggttacgtttttaggcgtatttattttagttgtttaacgcgattttttttcgcgt

SEQ ID NO: 39592 - DNA, 946 bp, Artificial Sequence
  chemically treated genomic DNA (Homo sapiens) CpG-island No: 39592
acgcgaaaaaaaatcgcgttaaacaactaaaataaatacgcctaaaaacgtaacctacgaaccgacgaacgaacgaaaacctacgataaaaacgtaacacgaaaaaaaaacgaaaccgaataacgcgaaaaaaacgtaacgttaaaaaaaacgaaaaaaataaacgaaaccgaaataaaaacgtacgcgctaacaaaaacgccgaaaaaataaaaaacgcctcctaacgaaaactaacgactataaaccccaacgaaaacgaaaaaaaaaaaaaaaacaaaaacgaaaaacaaaaaaccgaaaaaaaaacgacgaacgaacctatctctttaaaatacccgaaactcgcgaacgctacgctaaaaaaacgacgaaaaacgcgacctaacctcgcactcaaaaccgccgcaacgcgccccgaactcgaccgacccgacgaaaatctaaaaataaacgacttcgcgaaaccgtaacgcataataaataaaaacgactaaaaaattatacaacctcttaacctcttaattaaaaaaaaaccgaacgccgaactcgaccctctaaaaacccgaaaccgcgacgaacttcgcgaaaaccgaaaaaaacctaaacccgactacgcgaaaaacaaaataaaaatactaaacgcgaacgcacaaaccgaacgccgaaaaccaacaacatctctacgccgctttaatccaaaccatctctaaaccgacccgcgtcctccgcaacccgcgtcgaccgaaccgaaataaaaataattccgaatacccgatcccccacaccgctaccgacctctacctcgcgaaacgtccgacgccttcgaaaccctaacaccgctctacaaaaactcgactctaccctaatcgctatcaataccatctcccttaacgaaaaacttaaacgtaatatatacgaaacaattttaatacataataatttc

SEQ ID NO: 39593 - DNA, 520 bp, Artificial Sequence
  chemically treated genomic DNA (Homo sapiens) CpG-island No: 39593
ttacgtaatttttcggcgggtttcggttataggcggagaggcggcggaaggcgggatttaaagggggtttcgttttacgggttttgattttcgtttaatggagggcggtttgagtttcgtttacgaaaggagtcgggaggcgttggcggttttaagagtttttgtgtttttggtagcggattttatttttttttacgtcggagtttcgatttttgcgtttcggttcgatttagttgcgttttgttcgtttaagacgcgcggaaattataatttttagagtttatttcgtcgagattcggttttacgagttaggtggcggaggttaggtgatagcggattcgttttttttaaagtttagtcgggtaggggaacgcggtgtatttttgatcggtatttggcgaggtttatgcgtttcgtgagggcggtttttcgagtttgggggcgtttaggtgagagcggacgcggttttttttgttttttaggcggattttttgaggtatagtaggttagcggggtagtt

SEQ ID NO: 39594 - DNA, 520 bp, Artificial Sequence
  chemically treated genomic DNA (Homo sapiens) CpG-island No: 39594
aactaccccgctaacctactatacctcaaaaaatccgcctaaaaaacaaaaaaaaccgcgtccgctctcacctaaacgcccccaaactcgaaaaaccgccctcacgaaacgcataaacctcgccaaataccgatcaaaaatacaccgcgttcccctacccgactaaactttaaaaaaaacgaatccgctatcacctaacctccgccacctaactcgtaaaaccgaatctcgacgaaataaactctaaaaattataatttccgcgcgtcttaaacgaacaaaacgcaactaaatcgaaccgaaacgcaaaaatcgaaactccgacgtaaaaaaaaataaaatccgctaccaaaaacacaaaaactcttaaaaccgccaacgcctcccgactcctttcgtaaacgaaactcaaaccgccctccattaaacgaaaatcaaaacccgtaaaacgaaaccccctttaaatcccgccttccgccgcctctccgcctataaccgaaacccgccgaaaaattacgtaa

SEQ ID NO: 39595 - DNA, 520 bp, Artificial Sequence
  chemically treated genomic DNA (Homo sapiens) CpG-island No: 39595
ggttgtttcgttgatttgttgtgttttaaggggttcgtttgggaaataggggaggtcgcgttcgtttttatttgagcgtttttaggttcgaggaatcgtttttacgggacgtatgagtttcgttaggtgtcggttaggaatgtatcgcgtttttttgttcggttagattttgggagaggcgggttcgttgttatttgattttcgttatttgattcgtggggtcggatttcggcgagatgagttttgggagttgtagttttcgcgcgttttagacggatagagcgtagttgggtcgggtcggggcgtagagatcggggtttcggcgtgagggaagatgaggttcgttgttagggatatagagatttttggagtcgttagcgtttttcggtttttttcgtgagcgaagtttagatcgttttttattgggcggaaattagagttcgtggggcggggttttttttaggtttcgtttttcgtcgttttttcgtttatagtcggggttcgtcgagaggttgcgtgg

SEQ ID NO: 39596 - DNA, 520 bp, Artificial Sequence
  chemically treated genomic DNA (Homo sapiens) CpG-island No: 39596
ccacgcaacctctcgacgaaccccgactataaacgaaaaaacgacgaaaaacgaaacctaaaaaaaaccccgccccacgaactctaatttccgcccaataaaaaacgatctaaacttcgctcacgaaaaaaaccgaaaaacgctaacgactccaaaaatctctatatccctaacaacgaacctcatcttccctcacgccgaaaccccgatctctacgccccgacccgacccaactacgctctatccgtctaaaacgcgcgaaaactacaactcccaaaactcatctcgccgaaatccgaccccacgaatcaaataacgaaaatcaaataacaacgaacccgcctctcccaaaatctaaccgaacaaaaaaacgcgatacattcctaaccgacacctaacgaaactcatacgtcccgtaaaaacgattcctcgaacctaaaaacgctcaaataaaaacgaacgcgacctcccctatttcccaaacgaaccccttaaaacacaacaaatcaacgaaacaacc

SEQ ID NO: 39597 - DNA, 587 bp, Artificial Sequence
  chemically treated genomic DNA (Homo sapiens) CpG-island No: 39597
atagggcgagggcggggtcggtaggtcggggcggggttgggaagtagtcgggcggggttgtgagacgtcgcgtttagtttttatcgttgggcggttaataagtgcgggtttggtttagcgcgggggggcgcggagatcgcgaggcgatcgggagcggttgggttttcggttgcgcgtttttcggttaggtcgggagtcgcgttagtcggagttttcggtttagcgtggttcgtttttttttgggcgtttatttgttcggagtattgttagcgggtatgatcgatttattaggggcgtcgtcgtcggcgttcgtaggtcgcggatgaagaagaaaattcggcgtcgttcgattcggagcgaggagttgattcggagcgaggagttgattttgagtgaggaagcgatttggagtgaagaggcgatttagagtgaggaggcgatttagggcgaagagatgaatcggagttaggaggtgattcgggacgaggagtcgattcggagcgaggaggtgattagggaggaaatggcggtagttgggtttatcgtgattgttatttatagtgagtgtcgggcgttaggtgggtttt

SEQ ID NO: 39598 - DNA, 587 bp, Artificial Sequence
  chemically treated genomic DNA (Homo sapiens) CpG-island No: 39598
aaaacccacctaacgcccgacactcactataaataacaatcacgataaacccaactaccgccatttcctccctaatcacctcctcgctccgaatcgactcctcgtcccgaatcacctcctaactccgattcatctcttcgccctaaatcgcctcctcactctaaatcgcctcttcactccaaatcgcttcctcactcaaaatcaactcctcgctccgaatcaactcctcgctccgaatcgaacgacgccgaattttcttcttcatccgcgacctacgaacgccgacgacgacgcccctaataaatcgatcatacccgctaacaatactccgaacaaataaacgcccaaaaaaaaacgaaccacgctaaaccgaaaactccgactaacgcgactcccgacctaaccgaaaaacgcgcaaccgaaaacccaaccgctcccgatcgcctcgcgatctccgcgcccccccgcgctaaaccaaacccgcacttattaaccgcccaacgataaaaactaaacgcgacgtctcacaaccccgcccgactacttcccaaccccgccccgacctaccgaccccgccctcgccctat

SEQ ID NO: 39599 - DNA, 587 bp, Artificial Sequence
  chemically treated genomic DNA (Homo sapiens) CpG-island No: 39599
ggagtttatttggcgttcgatatttattgtgggtgatagttacggtgagtttagttgtcgttattttttttttggttattttttcgtttcgggtcgatttttcgtttcgggttattttttggtttcgatttattttttcgttttgggtcgtttttttattttgggtcgtttttttattttaggtcgtttttttatttagggttaatttttcgtttcgggttaatttttcgtttcgggtcgagcggcgtcgggtttttttttttattcgcggtttgcgagcgtcggcggcggcgtttttggtgggtcggttatgttcgttggtagtatttcgggtaggtggacgtttagagggaggcggattacgttgggtcgggggtttcgattggcgcggttttcggtttggtcgaagggcgcgtagtcgggaatttagtcgttttcggtcgtttcgcggttttcgcgttttttcgcgttgagttaggttcgtatttgttgatcgtttagcgatggaagttgagcgcggcgttttataatttcgttcgattattttttagtttcgtttcggtttgtcggtttcgttttcgttttat

SEQ ID NO: 39600 - DNA, 587 bp, Artificial Sequence
  chemically treated genomic DNA (Homo sapiens) CpG-island No: 39600
ataaaacgaaaacgaaaccgacaaaccgaaacgaaactaaaaaataatcgaacgaaattataaaacgccgcgctcaacttccatcgctaaacgatcaacaaatacgaacctaactcaacgcgaaaaaacgcgaaaaccgcgaaacgaccgaaaacgactaaattcccgactacgcgcccttcgaccaaaccgaaaaccgcgccaatcgaaacccccgacccaacgtaatccgcctccctctaaacgtccacctacccgaaatactaccaacgaacataaccgacccaccaaaaacgccgccgccgacgctcgcaaaccgcgaataaaaaaaaaaacccgacgccgctcgacccgaaacgaaaaattaacccgaaacgaaaaattaaccctaaataaaaaaacgacctaaaataaaaaaacgacccaaaataaaaaaacgacccaaaacgaaaaaataaatcgaaaccaaaaaataacccgaaacgaaaaatcgacccgaaacgaaaaaataaccaaaaaaaaaataacgacaactaaactcaccgtaactatcacccacaataaatatcgaacgccaaataaactcc

SEQ ID NO: 39601 - DNA, 615 bp, Artificial Sequence
  chemically treated genomic DNA (Homo sapiens) CpG-island No: 39601
aggggttgtagcggggcggggagatgggcgggaggagtgggagttggtttcgcgcgcgggggagggttattaggttgggaaggagcgcgaagggttggggggcggagttaatggtttcgcgtgtttgttaggagagggcgggtagcgtcgcggcgcgcgcgattcggttgacgtatttggtttcggttttttaagattagagcggggtcgggagggagggggaagaggcgagagcgcggagggcgcgcgtgcgtattggcgcggggaggagtagggattttggtagcgggcgaggaggttgcgagcgagtcgcgaatcgagcgggcggcgggcgcgcgtattatgggggagaaattcgggattaggtaagggaggtggggttacgcggcggggtatgggcggcggttcggggcgggggttgggacggttttagacgagggcgtagcggagaggatttgggggtcggacgtttgggtttttagggatagttattcggggtcgtacgcgtaggttttcgaggataatgagggtgggggggaaatgttcgggtttttgtagaaagcgaggtttgagggggattagaaaaatcggtgtcggggttttcgtagggatgtg

SEQ ID NO: 39602 - DNA, 615 bp, Artificial Sequence
  chemically treated genomic DNA (Homo sapiens) CpG-island No: 39602
cacatccctacgaaaaccccgacaccgatttttctaatccccctcaaacctcgctttctacaaaaacccgaacatttcccccccaccctcattatcctcgaaaacctacgcgtacgaccccgaataactatccctaaaaacccaaacgtccgacccccaaatcctctccgctacgccctcgtctaaaaccgtcccaacccccgccccgaaccgccgcccataccccgccgcgtaaccccacctcccttacctaatcccgaatttctcccccataatacgcgcgcccgccgcccgctcgattcgcgactcgctcgcaacctcctcgcccgctaccaaaatccctactcctccccgcgccaatacgcacgcgcgccctccgcgctctcgcctcttccccctccctcccgaccccgctctaatcttaaaaaaccgaaaccaaatacgtcaaccgaatcgcgcgcgccgcgacgctacccgccctctcctaacaaacacgcgaaaccattaactccgccccccaacccttcgcgctccttcccaacctaataaccctcccccgcgcgcgaaaccaactcccactcctcccgcccatctccccgccccgctacaacccct

SEQ ID NO: 39603 - DNA, 615 bp, Artificial Sequence
  chemically treated genomic DNA (Homo sapiens) CpG-island No: 39603
tatatttttgcgagaatttcgatatcggtttttttgattttttttaggtttcgttttttgtaggggttcgggtattttttttttatttttattattttcgaggatttgcgcgtgcggtttcggatggttgtttttagggatttaggcgttcggtttttagatttttttcgttgcgttttcgtttgggatcgttttagttttcgtttcgagtcgtcgtttatgtttcgtcgcgtggttttattttttttatttggtttcgggttttttttttatggtgcgcgcgttcgtcgttcgttcggttcgcggttcgttcgtagttttttcgttcgttgttaagatttttgttttttttcgcgttaatgcgtacgcgcgtttttcgcgttttcgttttttttttttttttttcggtttcgttttggttttggggaatcggggttagatgcgttagtcggatcgcgcgcgtcgcggcgttgttcgtttttttttagtagatacgcggggttattggtttcgttttttagtttttcgcgtttttttttagtttggtagttttttttcgcgcgcggggttagtttttatttttttcgtttattttttcgtttcgttgtaattttt

SEQ ID NO: 39604 - DNA, 615 bp, Artificial Sequence
  chemically treated genomic DNA (Homo sapiens) CpG-island No: 39604
aaaaattacaacgaaacgaaaaaataaacgaaaaaaataaaaactaaccccgcgcgcgaaaaaaaactaccaaactaaaaaaaaacgcgaaaaactaaaaaacgaaaccaataaccccgcgtatctactaaaaaaaaacgaacaacgccgcgacgcgcgcgatccgactaacgcatctaaccccgattccccaaaaccaaaacgaaaccgaaaaaaaaaaaaaaaaaacgaaaacgcgaaaaacgcgcgtacgcattaacgcgaaaaaaaacaaaaatcttaacaacgaacgaaaaaactacgaacgaaccgcgaaccgaacgaacgacgaacgcgcgcaccataaaaaaaaaacccgaaaccaaataaaaaaaataaaaccacgcgacgaaacataaacgacgactcgaaacgaaaactaaaacgatcccaaacgaaaacgcaacgaaaaaaatctaaaaaccgaacgcctaaatccctaaaaacaaccatccgaaaccgcacgcgcaaatcctcgaaaataataaaaataaaaaaaaaatacccgaacccctacaaaaaacgaaacctaaaaaaaatcaaaaaaaccgatatcgaaattctcgcaaaaatata

SEQ ID NO: 39605 - DNA, 709 bp, Artificial Sequence
  chemically treated genomic DNA (Homo sapiens) CpG-island No: 39605
gttcgtagtttttttttttttaatttttttatcgtatttgtattgtatcgtaatttcggcgtataggtgtcgcgttattttttttatagggtcgcgggtacgcgggttacggatttatttgggtttcgtttatcgatttatgtagtcgtaataggtatatgagttcgggtaaatgtggggtcgagcggtttgggggatgtatcggagtaacggtagatttcgttcgaggttgtagtaaattagaaatattttttagtagtagtaggcggagtcgcgggttcgagtttattgtcgagagattttcggtttcgttaggaattttagtcgcggagttcgtagagggtttatttagaacggttgtcgttattttttttcgggttttagtggtggcgtggcgcgatgacgtaaatatatcgcgacggtcgtttattggggagggggcgtggggagggggttgcggttttgcgtattgagtgaaggtaggttggattcgcgggtttaagttgggaaggagtatgcgcggagagagtagtttgggcgtcgaggtagcggggtgttcggttttcggagtgatggcggatgaggttgtttgtgagcgtgttcgaggcggttttgtgatgttaaaggtatacgtggttcggataaaaggcgttaaagtcggaacgatttttatttagcggacggagttttgggatattttcgttgtagg

SEQ ID NO: 39606 - DNA, 709 bp, Artificial Sequence
  chemically treated genomic DNA (Homo sapiens) CpG-island No: 39606
cctacaacgaaaatatcccaaaactccgtccgctaaataaaaatcgttccgactttaacgccttttatccgaaccacgtatacctttaacatcacaaaaccgcctcgaacacgctcacaaacaacctcatccgccatcactccgaaaaccgaacaccccgctacctcgacgcccaaactactctctccgcgcatactccttcccaacttaaacccgcgaatccaacctaccttcactcaatacgcaaaaccgcaaccccctccccacgccccctccccaataaacgaccgtcgcgatatatttacgtcatcgcgccacgccaccactaaaacccgaaaaaaaataacgacaaccgttctaaataaaccctctacgaactccgcgactaaaattcctaacgaaaccgaaaatctctcgacaataaactcgaacccgcgactccgcctactactactaaaaaatatttctaatttactacaacctcgaacgaaatctaccgttactccgatacatcccccaaaccgctcgaccccacatttacccgaactcatatacctattacgactacataaatcgataaacgaaacccaaataaatccgtaacccgcgtacccgcgaccctataaaaaaaataacgcgacacctatacgccgaaattacgatacaatacaaatacgataaaaaaattaaaaaaaaaaaaactacgaac

SEQ ID NO: 39607 - DNA, 709 bp, Artificial Sequence
  chemically treated genomic DNA (Homo sapiens) CpG-island No: 39607
tttatagcgaagatgttttaagatttcgttcgttaaatggaaatcgtttcgattttggcgttttttgttcggattacgtgtatttttaatattataggatcgtttcggatacgtttataggtagttttattcgttattatttcgggaatcgagtatttcgttgtttcggcgtttaggttgtttttttcgcgtatgtttttttttagtttgagttcgcgagtttagtttgtttttatttagtgcgtaagatcgtagttttttttttacgttttttttttagtaggcggtcgtcgcggtgtgtttgcgttatcgcgttacgttattattggaattcgggggaagatggcggtagtcgttttgagtgggttttttgcgggtttcgcggttggggtttttggcgggatcgggggtttttcggtagtgagttcgggttcgcggtttcgtttgttgttgttggagagtgtttttggtttgttgtaatttcgaacggggtttgtcgttgtttcggtgtattttttaaatcgttcggttttatatttgttcgggtttatgtgtttattgcggttgtatgggtcggtgggcggggtttaggtgagttcgtggttcgcgtgttcgcggttttgtggggaggatggcgcggtatttgtgcgtcgggattacggtgtagtgtaagtgcgatagggaggttgaaggaaggagagttgcgggt

SEQ ID NO: 39608 - DNA, 709 bp, Artificial Sequence
  chemically treated genomic DNA (Homo sapiens) CpG-island No: 39608
acccgcaactctccttccttcaacctccctatcgcacttacactacaccgtaatcccgacgcacaaataccgcgccatcctccccacaaaaccgcgaacacgcgaaccacgaactcacctaaaccccgcccaccgacccatacaaccgcaataaacacataaacccgaacaaatataaaaccgaacgatttaaaaaatacaccgaaacaacgacaaaccccgttcgaaattacaacaaaccaaaaacactctccaacaacaacaaacgaaaccgcgaacccgaactcactaccgaaaaacccccgatcccgccaaaaaccccaaccgcgaaacccgcaaaaaacccactcaaaacgactaccgccatcttcccccgaattccaataataacgtaacgcgataacgcaaacacaccgcgacgaccgcctactaaaaaaaaaacgtaaaaaaaaaactacgatcttacgcactaaataaaaacaaactaaactcgcgaactcaaactaaaaaaaaacatacgcgaaaaaaacaacctaaacgccgaaacaacgaaatactcgattcccgaaataataacgaataaaactacctataaacgtatccgaaacgatcctataatattaaaaatacacgtaatccgaacaaaaaacgccaaaatcgaaacgatttccatttaacgaacgaaatcttaaaacatcttcgctataaa

SEQ ID NO: 39609 - DNA, 626 bp, Artificial Sequence
  chemically treated genomic DNA (Homo sapiens) CpG-island No: 39609
aatgataacgcgttagagattagttttagtatcgtgaaggaagcggtgagtgagggcgcggcgttcggtattgtggtggttttttttagcgtgattgatcgcgatttagaggagaatgggtaggtgtagtgcgagttattgggagacgtgttttttcgttttaagtttttttttaagaattattatattatcgttatcgaagtttttttggatcgagaggcgggggatttttatattttgattgtagtggttcgggatcggggcgagtttgcgttttttattagtaagtcgatttaggtataagtgtcggatgtgaacgataacgcgtcgcgttttagttagtcggtttacgacgtgtatgtgattgaaaataacgtgtttggcgtttatatttacgcggtgagcgttatcgatcgggatgagggcgttaacgtttagtttgtttattttattttcgagtgttagatttagggtatgagcgtttttatttacgtttttattaattttgagaacggttatttgtacgttttgcgttttttcgattatgagtagttgaaggattttagtttttaggtggaagttcgggacgttggtagtttttaggcgttggttggtaacgttattgt

SEQ ID NO: 39610 - DNA, 626 bp, Artificial Sequence
  chemically treated genomic DNA (Homo sapiens) CpG-island No: 39610
acaataacgttaccaaccaacgcctaaaaactaccaacgtcccgaacttccacctaaaaactaaaatccttcaactactcataatcgaaaaaacgcaaaacgtacaaataaccgttctcaaaattaataaaaacgtaaataaaaacgctcataccctaaatctaacactcgaaaataaaataaacaaactaaacgttaacgccctcatcccgatcgataacgctcaccgcgtaaatataaacgccaaacacgttattttcaatcacatacacgtcgtaaaccgactaactaaaacgcgacgcgttatcgttcacatccgacacttatacctaaatcgacttactaataaaaaacgcaaactcgccccgatcccgaaccactacaatcaaaatataaaaatcccccgcctctcgatccaaaaaaacttcgataacgataatataataattcttaaaaaaaaacttaaaacgaaaaaacacgtctcccaataactcgcactacacctacccattctcctctaaatcgcgatcaatcacgctaaaaaaaaccaccacaataccgaacgccgcgccctcactcaccgcttccttcacgatactaaaactaatctctaacgcgttatcatt

SEQ ID NO: 39611 - DNA, 626 bp, Artificial Sequence
  chemically treated genomic DNA (Homo sapiens) CpG-island No: 39611
atagtggcgttattagttagcgtttgggggttgttagcgtttcgggtttttatttgaaaattgaagttttttagttgtttatagtcgaaggagcgtagggcgtataagtagtcgtttttagagttgatagaaacgtaggtgaagacgtttatgttttggatttggtattcgaggatagagtaggtaagttgggcgttggcgtttttatttcggtcggtggcgtttatcgcgtagatgtaggcgttaggtacgttgtttttagttatatatacgtcgtagatcggttggttgaaacgcggcgcgttgtcgtttatattcgatatttgtatttggatcgatttattggtggagagcgtaggttcgtttcggtttcgagttattatagttagggtgtaggagtttttcgtttttcggtttaggggggtttcggtaacgatggtgtagtaatttttaaaggaagatttgaggcggaaaggtacgttttttagtagttcgtattgtatttgtttatttttttttgagtcgcggttagttacgttgaaaagggttattatagtgtcgggcgtcgcgtttttatttatcgttttttttacggtgttgaagttgatttttggcgcgttgttatt

SEQ ID NO: 39612 - DNA, 626 bp, Artificial Sequence
  chemically treated genomic DNA (Homo sapiens) CpG-island No: 39612
aataacaacgcgccaaaaatcaacttcaacaccgtaaaaaaaacgataaataaaaacgcgacgcccgacactataataacccttttcaacgtaactaaccgcgactcaaaaaaaaataaacaaatacaatacgaactactaaaaaacgtacctttccgcctcaaatcttcctttaaaaattactacaccatcgttaccgaaacccccctaaaccgaaaaacgaaaaactcctacaccctaactataataactcgaaaccgaaacgaacctacgctctccaccaataaatcgatccaaatacaaatatcgaatataaacgacaacgcgccgcgtttcaaccaaccgatctacgacgtatatataactaaaaacaacgtacctaacgcctacatctacgcgataaacgccaccgaccgaaataaaaacgccaacgcccaacttacctactctatcctcgaataccaaatccaaaacataaacgtcttcacctacgtttctatcaactctaaaaacgactacttatacgccctacgctccttcgactataaacaactaaaaaacttcaattttcaaataaaaacccgaaacgctaacaacccccaaacgctaactaataacgccactat

SEQ ID NO: 39613 - DNA, 1151 bp, Artificial Sequence
  chemically treated genomic DNA (Homo sapiens) CpG-island No: 39613
ttagtaggtgagtcgtaattattatttgcgcgggcgtattttgtaggtgtcgtcgaattataattcgtagacgcggtaatatagcggtatttgggacggaacgtttaaatcggtatatagtaataatatggtttggtgtttgtgggatatgttgatttattcgcgttacggtatggggaaacgttttggtgcggcggatgtggataaatgggcgttgtatgttatcggttagtattgcgattagttagtgtcggacggttttggcggtacggagtcgcgtattatttgtaatgcgtatttgattatatagcgtaaggcgtgggatgtgtttagcgatttttgttcggcgatgcgttgtatgtcggtatggaacgggtagacgttgacgttcgtgtaggatcgatcgtcggataagacgtggatttataatcgtagtaatgtggtgatgtcggatgatggcgcgtcgtttcgttatagttttagcgttttgaaggatcgttataatgtcgttgaggtgaattggattgattcgaataacggttgggagacggcgatagagtttgttgaagatacgtaggttattgttcgttacggtcgtaatgttacgaagatggatgtttttggttgtattagtcgggggtaggtatatcgcgtcgggttgtggttgattaaaatagaattgttggaaacgtagatcgtggattttagcgtcggcgtagaagggtttcgttatgtatcgggcgatgttattgaaatttgcgatgatgattatgtcggtattagtatcggtggtcgtgtgttggcggtgaatagttagattcggacgttgacgttcgatcgtgaaattacgttgttatttttcggtatcgcgttgataagtttggttgacggaagtggtaattcggttagcgtggaggtttagttcgttatcgacggcgtgaaggtaaaagtgagtcgtgtttttgacggtgttgttgaatatagcgtatgggagttgaagttgtcgacgttgcgttagcgattgtttcgttgcgtgagtattcgtgagaacgacgacggtacgtatgttattatcgtcgtgtagtatgtgtcggaaaaagaggttatcgtggataacggggcgtattttgacggcgaatagagtggtacgg

SEQ ID NO: 39614 - DNA, 1151 bp, Artificial Sequence
  chemically treated genomic DNA (Homo sapiens) CpG-island No: 39614
ccgtaccactctattcgccgtcaaaatacgccccgttatccacgataacctctttttccgacacatactacacgacgataataacatacgtaccgtcgtcgttctcacgaatactcacgcaacgaaacaatcgctaacgcaacgtcgacaacttcaactcccatacgctatattcaacaacaccgtcaaaaacacgactcacttttaccttcacgccgtcgataacgaactaaacctccacgctaaccgaattaccacttccgtcaaccaaacttatcaacgcgataccgaaaaataacaacgtaatttcacgatcgaacgtcaacgtccgaatctaactattcaccgccaacacacgaccaccgatactaataccgacataatcatcatcgcaaatttcaataacatcgcccgatacataacgaaacccttctacgccgacgctaaaatccacgatctacgtttccaacaattctattttaatcaaccacaacccgacgcgatatacctacccccgactaatacaaccaaaaacatccatcttcgtaacattacgaccgtaacgaacaataacctacgtatcttcaacaaactctatcgccgtctcccaaccgttattcgaatcaatccaattcacctcaacgacattataacgatccttcaaaacgctaaaactataacgaaacgacgcgccatcatccgacatcaccacattactacgattataaatccacgtcttatccgacgatcgatcctacacgaacgtcaacgtctacccgttccataccgacatacaacgcatcgccgaacaaaaatcgctaaacacatcccacgccttacgctatataatcaaatacgcattacaaataatacgcgactccgtaccgccaaaaccgtccgacactaactaatcgcaatactaaccgataacatacaacgcccatttatccacatccgccgcaccaaaacgtttccccataccgtaacgcgaataaatcaacatatcccacaaacaccaaaccatattattactatataccgatttaaacgttccgtcccaaataccgctatattaccgcgtctacgaattataattcgacgacacctacaaaatacgcccgcgcaaataataattacgactcacctactaa

SEQ ID NO: 39615 - DNA, 1151 bp, Artificial Sequence
  chemically treated genomic DNA (Homo sapiens) CpG-island No: 39615
tcgtgttattttgttcgtcgttaaagtgcgtttcgttatttacgatggttttttttttcggtatatgttgtacggcggtgatggtatacgtgtcgtcgtcgtttttacggatatttacgtagcggaatagtcgttggcgtagcgtcggtagttttagtttttatacgttgtatttagtaatatcgttaggaatacggtttatttttatttttacgtcgtcggtgacggattgaatttttacgttgatcggattgttattttcgttaattaggtttattagcgcggtatcggaggatggtagcgtgattttacggtcgagcgttagcgttcgggtttggttgtttatcgttagtatacgattatcggtgttgatatcggtatagttattatcgtagattttaataatatcgttcggtatatggcgaagtttttttgcgtcgacgttgaaatttacggtttgcgtttttagtagttttgttttaattagttatagttcggcgcggtgtgtttgttttcggttggtatagttaaaggtatttattttcgtaatattacgatcgtaacgggtaatggtttgcgtatttttaataagttttgtcgtcgttttttagtcgttgttcgggttaatttagtttattttaacggtattatggcggttttttagggcgttgaagttgtagcggaacggcgcgttattattcggtattattatattattgcggttataggtttacgttttattcgacggtcggttttgtacgaacgttagcgtttgttcgttttatatcggtatatagcgtatcgtcgagtagaaatcgttgagtatattttacgttttacgttgtgtggttaggtacgtattataggtgatgcgcggtttcgtgtcgttaaagtcgttcggtattgattggtcgtagtattggtcgatgatatatagcgtttatttatttatattcgtcgtattaagacgtttttttatgtcgtagcgcggatgggttagtatattttatagatattaggttatgttgttgttgtatgtcggtttaaacgtttcgttttagatatcgttgtattgtcgcgtttgcgggttatagttcgacggtatttgtagaatacgttcgcgtagatgataattacggtttatttgttgg

SEQ ID NO: 39616 - DNA, 1151 bp, Artificial Sequence
  chemically treated genomic DNA (Homo sapiens) CpG-island No: 39616
ccaacaaataaaccgtaattatcatctacgcgaacgtattctacaaataccgtcgaactataacccgcaaacgcgacaatacaacgatatctaaaacgaaacgtttaaaccgacatacaacaacaacataacctaatatctataaaatatactaacccatccgcgctacgacataaaaaaacgtcttaatacgacgaatataaataaataaacgctatatatcatcgaccaatactacgaccaatcaataccgaacgactttaacgacacgaaaccgcgcatcacctataatacgtacctaaccacacaacgtaaaacgtaaaatatactcaacgatttctactcgacgatacgctatataccgatataaaacgaacaaacgctaacgttcgtacaaaaccgaccgtcgaataaaacgtaaacctataaccgcaataatataataataccgaataataacgcgccgttccgctacaacttcaacgccctaaaaaaccgccataataccgttaaaataaactaaattaacccgaacaacgactaaaaaacgacgacaaaacttattaaaaatacgcaaaccattacccgttacgatcgtaatattacgaaaataaatacctttaactataccaaccgaaaacaaacacaccgcgccgaactataactaattaaaacaaaactactaaaaacgcaaaccgtaaatttcaacgtcgacgcaaaaaaacttcgccatataccgaacgatattattaaaatctacgataataactataccgatatcaacaccgataatcgtatactaacgataaacaaccaaacccgaacgctaacgctcgaccgtaaaatcacgctaccatcctccgataccgcgctaataaacctaattaacgaaaataacaatccgatcaacgtaaaaattcaatccgtcaccgacgacgtaaaaataaaaataaaccgtattcctaacgatattactaaatacaacgtataaaaactaaaactaccgacgctacgccaacgactattccgctacgtaaatatccgtaaaaacgacgacgacacgtataccatcaccgccgtacaacatataccgaaaaaaaaaaccatcgtaaataacgaaacgcactttaacgacgaacaaaataacacga

SEQ ID NO: 39617 - DNA, 581 bp, Artificial Sequence
  chemically treated genomic DNA (Homo sapiens) CpG-island No: 39617
tttcggttggaaggttacggttagcgtggtgttttgtttttttattatcgaggtgttggtaggcgttacggttatgtcggttgtcgttgttatcgtgttgcgattttttgttatcgacggacgttttatattggtgatttttatcgtgcgggtgattatttttttcgtcgttatcgttttatcgatattgttgatttagttacggaatatatcgatcgtgtcgttcgggaagcggattttataggtacgggtatcgtttttattaaattacgttagtagcgtttgttgtttttgtttttcgggtatttacgttagcgtgaagttggtattttcggtagatttttgtttttgttcggtcgtagtttagtttgtatttttattatcgagatagttgtcgttataggatttagcggttagttcgtcgggcgttaggtttttaatttttgttagacgcgattagttaacgtttgaaagcggattcgcgtaagggttatcgttttttttataaatttatagggtggtttcggtattttttatcggtattgtaggatttggtataggtatagcgtttttatatttta

SEQ ID NO: 39618 - DNA, 581 bp, Artificial Sequence
  chemically treated genomic DNA (Homo sapiens) CpG-island No: 39618
taaaatataaaaacgctatacctataccaaatcctacaataccgataaaaaataccgaaaccaccctataaatttataaaaaaaacgataacccttacgcgaatccgctttcaaacgttaactaatcgcgtctaacaaaaattaaaaacctaacgcccgacgaactaaccgctaaatcctataacgacaactatctcgataataaaaatacaaactaaactacgaccgaacaaaaacaaaaatctaccgaaaataccaacttcacgctaacgtaaatacccgaaaaacaaaaacaacaaacgctactaacgtaatttaataaaaacgatacccgtacctataaaatccgcttcccgaacgacacgatcgatatattccgtaactaaatcaacaatatcgataaaacgataacgacgaaaaaaataatcacccgcacgataaaaatcaccaatataaaacgtccgtcgataacaaaaaatcgcaacacgataacaacgacaaccgacataaccgtaacgcctaccaacacctcgataataaaaaaacaaaacaccacgctaaccgtaaccttccaaccgaaa

SEQ ID NO: 39619 - DNA, 581 bp, Artificial Sequence
  chemically treated genomic DNA (Homo sapiens) CpG-island No: 39619
tgaaatgtgaggacgttatgtttgtattaaattttataatgtcggtgaaaggtgtcgggattattttgtgggtttataaggggagcggtgatttttacgcgaattcgtttttagacgttgattggtcgcgtttggtaaaagttaaagatttgacgttcggcgaattgatcgttgagttttatgacgatagttatttcgatgatgaagatgtagattggattgcgatcgggtaggggtagaaatttgtcggagatattagttttacgttggcgtggatgttcggagagtaggggtagtaggcgttgttggcgtggtttaatgaaggcgatattcgtgtttataaaattcgtttttcgaacggtacggtcgatgtgtttcgtggttgggttagtagtatcggtaaggcggtgacggcgaaggaagtgattattcgtacggtgaaagttattaatgtgggacgttcgtcgatggtagaagatcgtagtacggtaatagcggtaatcggtatgatcgtgacgtttgttagtatttcggtggtgaaagggtagagtattacgttgatcgtggttttttagtcggag

SEQ ID NO: 39620 - DNA, 581 bp, Artificial Sequence
  chemically treated genomic DNA (Homo sapiens) CpG-island No: 39620
ctccgactaaaaaaccacgatcaacgtaatactctaccctttcaccaccgaaatactaacaaacgtcacgatcataccgattaccgctattaccgtactacgatcttctaccatcgacgaacgtcccacattaataactttcaccgtacgaataatcacttccttcgccgtcaccgccttaccgatactactaacccaaccacgaaacacatcgaccgtaccgttcgaaaaacgaattttataaacacgaatatcgccttcattaaaccacgccaacaacgcctactacccctactctccgaacatccacgccaacgtaaaactaatatctccgacaaatttctacccctacccgatcgcaatccaatctacatcttcatcatcgaaataactatcgtcataaaactcaacgatcaattcgccgaacgtcaaatctttaacttttaccaaacgcgaccaatcaacgtctaaaaacgaattcgcgtaaaaatcaccgctccccttataaacccacaaaataatcccgacacctttcaccgacattataaaatttaatacaaacataacgtcctcacatttca

SEQ ID NO: 39621 - DNA, 572 bp, Artificial Sequence
  chemically treated genomic DNA (Homo sapiens) CpG-island No: 39621
atcgcggtattagttttatcgtcgaggaggagcgttttttcgacgtcgtcgagtacggtaatattttagtggtgcgtaagatgttggaggagtttaagacgttgaacgttaattgcgtggattatatgggttagaacgcgttgtagttggttgtgggtaacgagtatttggaggtgatcgagttgttgtttaagaaggagaatttggcgcgtattggcgacgttttgttgttcgttattagtaagggttacgtgcgtatcgtagaggttatttttaattattttggtttcgcggttagtaagcgttttattttgagtttttgtgagtaggagttgtaggacgacgatttttacgtttacgacgaggacggtacgcgtttttcgtcggatattatttttattattttggcggcgtattgttagaaatacgaagtggtgtatatgttgttgatgaagggtgttaggatcgagcggtcgtacgattatttttgtaagtgcggggattgtatggagaagtagaggtacgatttttttagttatttacgttcgaggattaatgtttataaggggttg

SEQ ID NO: 39622 - DNA, 572 bp, Artificial Sequence
  chemically treated genomic DNA (Homo sapiens) CpG-island No: 39622
caaccccttataaacattaatcctcgaacgtaaataactaaaaaaatcgtacctctacttctccatacaatccccgcacttacaaaaataatcgtacgaccgctcgatcctaacacccttcatcaacaacatatacaccacttcgtatttctaacaatacgccgccaaaataataaaaataatatccgacgaaaaacgcgtaccgtcctcgtcgtaaacgtaaaaatcgtcgtcctacaactcctactcacaaaaactcaaaataaaacgcttactaaccgcgaaaccaaaataattaaaaataacctctacgatacgcacgtaacccttactaataacgaacaacaaaacgtcgccaatacgcgccaaattctccttcttaaacaacaactcgatcacctccaaatactcgttacccacaaccaactacaacgcgttctaacccatataatccacgcaattaacgttcaacgtcttaaactcctccaacatcttacgcaccactaaaatattaccgtactcgacgacgtcgaaaaaacgctcctcctcgacgataaaactaataccgcgat

SEQ ID NO: 39623 - DNA, 572 bp, Artificial Sequence
  chemically treated genomic DNA (Homo sapiens) CpG-island No: 39623
tagttttttgtaggtattgattttcgagcgtgagtggttgaaggagtcgtgtttttgtttttttatgtagttttcgtatttgtagaaatagtcgtgcggtcgttcgattttggtattttttattagtagtatgtgtattatttcgtatttttggtagtgcgtcgttaggatgatgggggtgatgttcggcgagaagcgcgtgtcgttttcgtcgtaagcgtagaagtcgtcgttttgtagtttttgtttataggggtttagagtgagacgtttgttggtcgcgaagttagggtggttgaggatggtttttacgatgcgtacgtagtttttgttgatggcgagtagtagggcgtcgttaatgcgcgttaggtttttttttttgagtagtagttcggttatttttaggtgttcgttgtttatagttagttgtagcgcgttttggtttatgtagtttacgtagttgacgtttagcgttttggatttttttagtattttgcgtattattgggatgttgtcgtattcggcggcgtcgaggaagcgttttttttcggcggtgaggttggtgtcgcggt

SEQ ID NO: 39624 - DNA, 572 bp, Artificial Sequence
  chemically treated genomic DNA (Homo sapiens) CpG-island No: 39624
accgcgacaccaacctcaccgccgaaaaaaaacgcttcctcgacgccgccgaatacgacaacatcccaataatacgcaaaatactaaaaaaatccaaaacgctaaacgtcaactacgtaaactacataaaccaaaacgcgctacaactaactataaacaacgaacacctaaaaataaccgaactactactcaaaaaaaaaaacctaacgcgcattaacgacgccctactactcgccatcaacaaaaactacgtacgcatcgtaaaaaccatcctcaaccaccctaacttcgcgaccaacaaacgtctcactctaaacccctataaacaaaaactacaaaacgacgacttctacgcttacgacgaaaacgacacgcgcttctcgccgaacatcacccccatcatcctaacgacgcactaccaaaaatacgaaataatacacatactactaataaaaaataccaaaatcgaacgaccgcacgactatttctacaaatacgaaaactacataaaaaaacaaaaacacgactccttcaaccactcacgctcgaaaatcaatacctacaaaaaacta

SEQ ID NO: 39625 - DNA, 828 bp, Artificial Sequence
  chemically treated genomic DNA (Homo sapiens) CpG-island No: 39625
cgcgcgggatcgagggggcgagttttcggtcgaggtttgttttttttaaattattttaaatcgaattgtttggtcgtattatgtgggtttcggaggtttcgggttcgacgtggagtcgttcggcgcgcgttttttcgtttttcgttcggtatcgtttttcgaggcgcgggtcgcggtcgggttcggtatttataggttcggttcgtgggagaagggcggcgggtagtagtcgtgcggttttcgttgcgagggcgtcgagcgcggttttagtttttcgttgacgtttttttagtttcggcggcggcgttgcggtttcgcgttttcgttttcgttttcgttttttttttttttcggcgtcgggaaggttatttttgtttgttttttgtattttttgattttggtggatatcgcgtcggttgcggttcgagtgtgggggtgtcggttgtcggtttttttcgttttcgcggtagtgtagttttttcgcggcgtttttttattatttttcgcggttttcggggtttcgggcggtttagggcgggaaggtaggagcggagagcgtcgcggttcgcgatttagtagttagaggttagcgtcgaagtcgagttgtcgtcgtttattattaaatcgtgggagtagttgtcgcggtcgtggttgcgacgaggaagttcggggtcgagcggggttttggtgttgggagaggttttttagtttcgcggcggcggcgatgttttttcggcgttcgttttttgttttcgatagtattatttgttaggatagtatcgttatttagggagaaggagagggagggcgggagggggaagaggaggg

SEQ ID NO: 39626 - DNA, 828 bp, Artificial Sequence
  chemically treated genomic DNA (Homo sapiens) CpG-island No: 39626
ccctcctcttccccctcccgccctccctctccttctccctaaataacgatactatcctaacaaataatactatcgaaaacaaaaaacgaacgccgaaaaaacatcgccgccgccgcgaaactaaaaaacctctcccaacaccaaaaccccgctcgaccccgaacttcctcgtcgcaaccacgaccgcgacaactactcccacgatttaataataaacgacgacaactcgacttcgacgctaacctctaactactaaatcgcgaaccgcgacgctctccgctcctaccttcccgccctaaaccgcccgaaaccccgaaaaccgcgaaaaataataaaaaaacgccgcgaaaaaactacactaccgcgaaaacgaaaaaaaccgacaaccgacacccccacactcgaaccgcaaccgacgcgatatccaccaaaatcaaaaaatacaaaaaacaaacaaaaataaccttcccgacgccgaaaaaaaaaaaaaacgaaaacgaaaacgaaaacgcgaaaccgcaacgccgccgccgaaactaaaaaaacgtcaacgaaaaactaaaaccgcgctcgacgccctcgcaacgaaaaccgcacgactactacccgccgcccttctcccacgaaccgaacctataaataccgaacccgaccgcgacccgcgcctcgaaaaacgataccgaacgaaaaacgaaaaaacgcgcgccgaacgactccacgtcgaacccgaaacctccgaaacccacataatacgaccaaacaattcgatttaaaataatttaaaaaaaacaaacctcgaccgaaaactcgccccctcgatcccgcgcg

SEQ ID NO: 39627 - DNA, 828 bp, Artificial Sequence
  chemically treated genomic DNA (Homo sapiens) CpG-island No: 39627
ttttttttttttttttttcgttttttttttttttttttttgagtaacgatgttgttttagtaagtgatgttgtcggagataggagacgggcgtcgaggaggtatcgtcgtcgtcgcggggttggagagttttttttagtattagagtttcgttcggtttcgggttttttcgtcgtagttacggtcgcggtagttgtttttacggtttgatggtgggcggcggtagttcggtttcggcgttagtttttaattgttggatcgcgggtcgcgacgtttttcgtttttgttttttcgttttgggtcgttcggggtttcggaagtcgcgggaggtggtgaaggggcgtcgcgggaagattgtattgtcgcgaaggcggaggaggtcggtagtcggtatttttatattcggatcgtagtcggcgcgatgtttattaaggttaggaagtgtaaagaataagtaagggtgattttttcggcgtcggaggaggaggaagacgagggcgaggacgagggcgcggagtcgtagcgtcgtcgtcggggttggaggggcgttaacggggggttggagtcgcgttcggcgttttcgtagcgggagtcgtacggttattgttcgtcgttttttttttacgggtcggatttgtgagtatcgggttcggtcgcggttcgcgtttcggagggcggtgtcgggcggggggcgggaaggcgcgcgtcgggcggttttacgtcgagttcgggattttcgagatttatatggtacggttaggtagttcgatttggagtgatttggaggggatagatttcggtcggaggttcgttttttcggtttcgcgcg

SEQ ID NO: 39628 - DNA, 828 bp, Artificial Sequence
  chemically treated genomic DNA (Homo sapiens) CpG-island No: 39628
cgcgcgaaaccgaaaaaacgaacctccgaccgaaatctatcccctccaaatcactccaaatcgaactacctaaccgtaccatataaatctcgaaaatcccgaactcgacgtaaaaccgcccgacgcgcgccttcccgccccccgcccgacaccgccctccgaaacgcgaaccgcgaccgaacccgatactcacaaatccgacccgtaaaaaaaaaacgacgaacaataaccgtacgactcccgctacgaaaacgccgaacgcgactccaaccccccgttaacgcccctccaaccccgacgacgacgctacgactccgcgccctcgtcctcgccctcgtcttcctcctcctccgacgccgaaaaaatcacccttacttattctttacacttcctaaccttaataaacatcgcgccgactacgatccgaatataaaaataccgactaccgacctcctccgccttcgcgacaatacaatcttcccgcgacgccccttcaccacctcccgcgacttccgaaaccccgaacgacccaaaacgaaaaaacaaaaacgaaaaacgtcgcgacccgcgatccaacaattaaaaactaacgccgaaaccgaactaccgccgcccaccatcaaaccgtaaaaacaactaccgcgaccgtaactacgacgaaaaaacccgaaaccgaacgaaactctaatactaaaaaaaactctccaaccccgcgacgacgacgatacctcctcgacgcccgtctcctatctccgacaacatcacttactaaaacaacatcgttactcaaaaaaaaaaaaaaaaaaaacgaaaaaaaaaaaaaaaaaa

SEQ ID NO: 39629 - DNA, 766 bp, Artificial Sequence
  chemically treated genomic DNA (Homo sapiens) CpG-island No: 39629
tattttttttcgtttcgcgtaggcgttttttttcgttttagttagtttgttttttttttttgtttcgtttttgtttagttttttttggtttattttttattcgtttgcgattttgtcgttttgaatgacgttaaggtcgcgagcgtttttattggtttattttaatagtcgcgggatatttgaattgtaagaatagtcgtcgtttcggcgggttgttcgttgtatttttgggcgtttttggttcgttacgttgggtagtgtttgtttgcgtttttcgtaattttttcggttttgcgtggtttcgagttgggtgagcgagcgggcgggttggtaggttggtttgggttgcgatcggcggttacgattattttttggtcgggtcggtgcgagtggtcggttgggtagagtgtacgttgtttggcgtcgtaggttgatttcgtcgtttattttcgggagtagtgatgttgggtaattttgcgtcggggtttgcgattcgcgaggcgggttcggcgttgttagtattgtagtagacggcgttttaagaggattaggagaatattaattcggaaaaggtagcgttcgtttaataatcgcggattcgggtcgcgttggcggtattgaagttcgggaattcgcggggtttagcgtagtagtagaggtcgaagacgagacgggtaaagggatgcgggatatttgtaggagggtgggtcgagtagggtttggtattggtttagtaggtagagaagagtggcgagaaggtatgttt

SEQ ID NO: 39630 - DNA, 766 bp, Artificial Sequence
  chemically treated genomic DNA (Homo sapiens) CpG-island No: 39630
aaacataccttctcgccactcttctctacctactaaaccaataccaaaccctactcgacccaccctcctacaaatatcccgcatccctttacccgtctcgtcttcgacctctactactacgctaaaccccgcgaattcccgaacttcaataccgccaacgcgacccgaatccgcgattattaaacgaacgctaccttttccgaattaatattctcctaatcctcttaaaacgccgtctactacaatactaacaacgccgaacccgcctcgcgaatcgcaaaccccgacgcaaaattacccaacatcactactcccgaaaataaacgacgaaatcaacctacgacgccaaacaacgtacactctacccaaccgaccactcgcaccgacccgaccaaaaaataatcgtaaccgccgatcgcaacccaaaccaacctaccaacccgcccgctcgctcacccaactcgaaaccacgcaaaaccgaaaaaattacgaaaaacgcaaacaaacactacccaacgtaacgaaccaaaaacgcccaaaaatacaacgaacaacccgccgaaacgacgactattcttacaattcaaatatcccgcgactattaaaataaaccaataaaaacgctcgcgaccttaacgtcattcaaaacgacaaaatcgcaaacgaataaaaaataaaccaaaaaaaactaaacaaaaacgaaacaaaaaaaaaaaacaaactaactaaaacgaaaaaaaacgcctacgcgaaacgaaaaaaaata

SEQ ID NO: 39631 - DNA, 766 bp, Artificial Sequence
  chemically treated genomic DNA (Homo sapiens) CpG-island No: 39631
ggatatgttttttcgttatttttttttgtttgttaagttaatgttaaattttgttcgatttatttttttgtagatatttcgtatttttttattcgtttcgttttcggtttttgttgttgcgttagatttcgcgggttttcggattttagtatcgttagcgcggttcgggttcgcggttgttggacgggcgttgtttttttcgggttgatatttttttggtttttttggagcgtcgtttgttgtaatgttagtagcgtcgagttcgtttcgcgggtcgtaggtttcggcgtagagttgtttaatattattgttttcgggagtggacggcgggattagtttgcggcgttaagtagcgtgtattttgtttagtcgattattcgtatcgattcggttaaagaatagtcgtagtcgtcggtcgtagtttaggttagtttattagttcgttcgttcgtttatttagttcgagattacgtagggtcgaggaggttgcgaaaggcgtaggtaggtattgtttagcgtggcgagttaaagacgtttagagatgtagcgagtagttcgtcggagcggcggttgtttttgtagtttaagtatttcgcgattattgaaatggattaatgaaagcgttcgcggttttgacgttatttaaggcgatagggtcgtaggcgagtgaagggtaaattaaaggaaattgagtaggggcggggtaggagggagaaataaattggttggggcgggagaaaacgtttgcgcggggcggggagaggta

SEQ ID NO: 39632 - DNA, 766 bp, Artificial Sequence
  chemically treated genomic DNA (Homo sapiens) CpG-island No: 39632
tacctctccccgccccgcgcaaacgttttctcccgccccaaccaatttatttctccctcctaccccgcccctactcaatttcctttaatttacccttcactcgcctacgaccctatcgccttaaataacgtcaaaaccgcgaacgctttcattaatccatttcaataatcgcgaaatacttaaactacaaaaacaaccgccgctccgacgaactactcgctacatctctaaacgtctttaactcgccacgctaaacaatacctacctacgcctttcgcaacctcctcgaccctacgtaatctcgaactaaataaacgaacgaacgaactaataaactaacctaaactacgaccgacgactacgactattctttaaccgaatcgatacgaataatcgactaaacaaaatacacgctacttaacgccgcaaactaatcccgccgtccactcccgaaaacaataatattaaacaactctacgccgaaacctacgacccgcgaaacgaactcgacgctactaacattacaacaaacgacgctccaaaaaaaccaaaaaaatatcaacccgaaaaaaacaacgcccgtccaacaaccgcgaacccgaaccgcgctaacgatactaaaatccgaaaacccgcgaaatctaacgcaacaacaaaaaccgaaaacgaaacgaataaaaaaatacgaaatatctacaaaaaaataaatcgaacaaaatttaacattaacttaacaaacaaaaaaaaataacgaaaaaacatatcc

SEQ ID NO: 39633 - DNA, 843 bp, Artificial Sequence
  chemically treated genomic DNA (Homo sapiens) CpG-island No: 39633
ggggttcgcgcgtatttttttcggcgcggtagaaggttggtattgttgtttttttgcgggttttagagtcgttgggcgttcgcggtcgcgtagtcggattgtatttttgcggggttcgttttcgggtttggttcggggtcgtcgtcgtcgtcgtcgtttttttcggcgcgtaggttgttttttagtcgcggttacggggtagcgttcggttttttttttcgcgttttcgttttcgtcgcgttcgttttcggtttacgttgttttcgtagtttcggttcggcgtaggtaggagcggttttttggacgtcgagttcgggaagcggagggcggcgggttcggcgagcggtagcggcggtcgaggcgttggggcggtcgttgttttttcggttcgggaggtcggcgatcgtcgggcgttcgaaggggcgtcgcgttttcggagtcggggttgttcgtcgggtttttcgtgcgttttttcgagagtttcggtcggggcgcggcggagggtagagtcgtcggtttttattttcgggtcggtaggaggttttgcgttcgggcgtcggcgatagttcgcgtcgcgaagtttagtattttttttcgtcgtttcgcggttggcgcggatatgggcgtttagggttgcgcgttcggtttcgggattcgtaaagtttgttagtcggttgggcgcggagtcgagggcgcgttcggttttagcgttttcggaggagattcggcgtttttcgattcggcgcgagggcggtggagtttagagggggtggttcggtttcgttagatgttgtttgtaaagttagagagaagaaaattttagttttagggagattcggatcg

SEQ ID NO: 39634 - DNA, 843 bp, Artificial Sequence
  chemically treated genomic DNA (Homo sapiens) CpG-island No: 39634
cgatccgaatctccctaaaactaaaattttcttctctctaactttacaaacaacatctaacgaaaccgaaccaccccctctaaactccaccgccctcgcgccgaatcgaaaaacgccgaatctcctccgaaaacgctaaaaccgaacgcgccctcgactccgcgcccaaccgactaacaaactttacgaatcccgaaaccgaacgcgcaaccctaaacgcccatatccgcgccaaccgcgaaacgacgaaaaaaaatactaaacttcgcgacgcgaactatcgccgacgcccgaacgcaaaacctcctaccgacccgaaaataaaaaccgacgactctaccctccgccgcgccccgaccgaaactctcgaaaaaacgcacgaaaaacccgacgaacaaccccgactccgaaaacgcgacgccccttcgaacgcccgacgatcgccgacctcccgaaccgaaaaaacaacgaccgccccaacgcctcgaccgccgctaccgctcgccgaacccgccgccctccgcttcccgaactcgacgtccaaaaaaccgctcctacctacgccgaaccgaaactacgaaaacaacgtaaaccgaaaacgaacgcgacgaaaacgaaaacgcgaaaaaaaaaaccgaacgctaccccgtaaccgcgactaaaaaacaacctacgcgccgaaaaaaacgacgacgacgacgacgaccccgaaccaaacccgaaaacgaaccccgcaaaaatacaatccgactacgcgaccgcgaacgcccaacgactctaaaacccgcaaaaaaacaacaataccaaccttctaccgcgccgaaaaaaatacgcgcgaacccc

SEQ ID NO: 39635 - DNA, 843 bp, Artificial Sequence
  chemically treated genomic DNA (Homo sapiens) CpG-island No: 39635
cggttcgaatttttttggagttgaagtttttttttttttaattttgtaggtagtatttggcggggtcgaattattttttttgggttttatcgttttcgcgtcgaatcgggagacgtcgggtttttttcgggggcgttggggtcgggcgcgttttcggtttcgcgtttagtcggttagtaaattttgcgggtttcggagtcgggcgcgtagttttgagcgtttatgttcgcgttagtcgcggggcggcgggggagggtgttgggtttcgcgacgcgggttgtcgtcggcgttcgggcgtagagttttttgtcggttcgaggatggagatcggcggttttgtttttcgtcgcgtttcggtcggagttttcgggaagacgtacggagagttcggcgggtagtttcggtttcggggacgcggcgttttttcggacgttcggcgatcgtcgatttttcgggtcggaggagtaacggtcgttttagcgtttcggtcgtcgttgtcgttcgtcgagttcgtcgtttttcgtttttcgggttcggcgtttagagagtcgtttttgtttgcgtcgagtcggagttgcgggggtagcgtgagtcggggacgagcgcggcggaggcggagacgcggagaggggggtcgagcgttatttcgtggtcgcgattggagagtagtttgcgcgtcgggaggggcggcggcggcggcggcggtttcgagttaggttcgggagcgagtttcgtagaaatataattcgattgcgcggtcgcgggcgtttagcggttttgggattcgtaggggggtagtagtgttaattttttgtcgcgtcgggagagatgcgcgcgagtttt

SEQ ID NO: 39636 - DNA, 843 bp, Artificial Sequence
  chemically treated genomic DNA (Homo sapiens) CpG-island No: 39636
aaaactcgcgcgcatctctcccgacgcgacaaaaaattaacactactacccccctacgaatcccaaaaccgctaaacgcccgcgaccgcgcaatcgaattatatttctacgaaactcgctcccgaacctaactcgaaaccgccgccgccgccgccgcccctcccgacgcgcaaactactctccaatcgcgaccacgaaataacgctcgacccccctctccgcgtctccgcctccgccgcgctcgtccccgactcacgctacccccgcaactccgactcgacgcaaacaaaaacgactctctaaacgccgaacccgaaaaacgaaaaacgacgaactcgacgaacgacaacgacgaccgaaacgctaaaacgaccgttactcctccgacccgaaaaatcgacgatcgccgaacgtccgaaaaaacgccgcgtccccgaaaccgaaactacccgccgaactctccgtacgtcttcccgaaaactccgaccgaaacgcgacgaaaaacaaaaccgccgatctccatcctcgaaccgacaaaaaactctacgcccgaacgccgacgacaacccgcgtcgcgaaacccaacaccctcccccgccgccccgcgactaacgcgaacataaacgctcaaaactacgcgcccgactccgaaacccgcaaaatttactaaccgactaaacgcgaaaccgaaaacgcgcccgaccccaacgcccccgaaaaaaacccgacgtctcccgattcgacgcgaaaacgataaaacccaaaaaaaataattcgaccccgccaaatactacctacaaaattaaaaaaaaaaaaacttcaactccaaaaaaattcgaaccg

SEQ ID NO: 39637 - DNA, 531 bp, Artificial Sequence
  chemically treated genomic DNA (Homo sapiens) CpG-island No: 39637
cgcgttgttgataagtagtagtcgttgtagttttttgggtcgggggagttcgcgtagggcgtcgagtagttgttgtaagtcggtttcggcgtttaggtcggcgggtattcgtattacgcgtaggttagatcgttcggcgtttagttcggtttttagttggcgtagtgtttcgtcgttgcgggcgttaaggataagtacggagtcgggcgatagtagcgaggttaggagcggggttagcgttcggtcgaagtcgcgggaggtttcggttagtaagtatatagtacgttttagttcgttttttatgtttttgtttttcgtcggcggcgttggtattcgagattaggtaggaggcggtgcggtcgcggggggcgggatcgttacgggtgtcggcggggtcgttttgtcggggcggggcgggaattttaggtttcgggtcgcgagcgtttaggggtgttggtttttttgggatttggtttttttggttgttggtggcggaagttaaatcgtggcggtagtttagttcgtgttaag

SEQ ID NO: 39638 - DNA, 531 bp, Artificial Sequence
  chemically treated genomic DNA (Homo sapiens) CpG-island No: 39638
cttaacacgaactaaactaccgccacgatttaacttccgccaccaacaaccaaaaaaaccaaatcccaaaaaaaccaacacccctaaacgctcgcgacccgaaacctaaaattcccgccccgccccgacaaaacgaccccgccgacacccgtaacgatcccgccccccgcgaccgcaccgcctcctacctaatctcgaataccaacgccgccgacgaaaaacaaaaacataaaaaacgaactaaaacgtactatatacttactaaccgaaacctcccgcgacttcgaccgaacgctaaccccgctcctaacctcgctactatcgcccgactccgtacttatccttaacgcccgcaacgacgaaacactacgccaactaaaaaccgaactaaacgccgaacgatctaacctacgcgtaatacgaatacccgccgacctaaacgccgaaaccgacttacaacaactactcgacgccctacgcgaactcccccgacccaaaaaactacaacgactactacttatcaacaacgcg

SEQ ID NO: 39639 - DNA, 531 bp, Artificial Sequence
  chemically treated genomic DNA (Homo sapiens) CpG-island No: 39639
tttggtacggattgggttatcgttacggtttgattttcgttattagtaattaagggaattagattttaagggaattagtatttttgggcgttcgcggttcgaagtttgaggttttcgtttcgtttcggtagggcggtttcgtcgatattcgtagcggtttcgtttttcgcggtcgtatcgttttttgtttggtttcgggtgttagcgtcgtcggcggagaataggagtatggagggcgggttggggcgtgttgtgtgtttgttgatcggggtttttcgcggtttcggtcggacgttggtttcgtttttggtttcgttgttgtcgttcggtttcgtgtttgtttttagcgttcgtaacgacgaggtattgcgttagttggaggtcgagttgggcgtcgagcggtttggtttgcgcgtggtgcgggtgttcgtcgatttgggcgtcgaggtcggtttgtagtagttgttcggcgttttgcgcgagttttttcggtttaaggggttgtagcgattgttgtttattaataacgcg

SEQ ID NO: 39640 - DNA, 531 bp, Artificial Sequence
  chemically treated genomic DNA (Homo sapiens) CpG-island No: 39640
cgcgttattaataaacaacaatcgctacaaccccttaaaccgaaaaaactcgcgcaaaacgccgaacaactactacaaaccgacctcgacgcccaaatcgacgaacacccgcaccacgcgcaaaccaaaccgctcgacgcccaactcgacctccaactaacgcaatacctcgtcgttacgaacgctaaaaacaaacacgaaaccgaacgacaacaacgaaaccaaaaacgaaaccaacgtccgaccgaaaccgcgaaaaaccccgatcaacaaacacacaacacgccccaacccgccctccatactcctattctccgccgacgacgctaacacccgaaaccaaacaaaaaacgatacgaccgcgaaaaacgaaaccgctacgaatatcgacgaaaccgccctaccgaaacgaaacgaaaacctcaaacttcgaaccgcgaacgcccaaaaatactaattcccttaaaatctaattcccttaattactaataacgaaaatcaaaccgtaacgataacccaatccgtaccaaa

SEQ ID NO: 39641 - DNA, 520 bp, Artificial Sequence
  chemically treated genomic DNA (Homo sapiens) CpG-island No: 39641
gttttttagcgtcggattagtttcggagggagaacgaaggttgtttttgtttcgagggaggtagcgggagggttttgagttattgggttgtagggcgtcgggaagggatttcgcgtcggggttgcgaagggagattcgtttcgttcggtatgtagggttttttcgaagggaggggtcggcgtcggatttggggatagtcggtcggaggttcgatttagaggagtttgtttcgtttcgttcgttttcgtttttttgtggtttcggtattcggggtatttgagcgtgggttcgatgtaggtcgtgttagtgttttcgatttttcgtaggattcgttcgtgttttgtcgttgtttttaggtttttcgttttcgttattttatttcgttttatagattgggggcgtttcgtagcgcgtttttttcgtcggttcggtttattttttttttgttttataatgtcgtttttattataggttttatagtcgttttagtttttggttattcgtaggtcgattttttttt

SEQ ID NO: 39642 - DNA, 520 bp, Artificial Sequence
  chemically treated genomic DNA (Homo sapiens) CpG-island No: 39642
aaaaaaaaatcgacctacgaataaccaaaaactaaaacgactataaaacctataataaaaacgacattataaaacaaaaaaaaaataaaccgaaccgacgaaaaaaacgcgctacgaaacgcccccaatctataaaacgaaataaaataacgaaaacgaaaaacctaaaaacaacgacaaaacacgaacgaatcctacgaaaaatcgaaaacactaacacgacctacatcgaacccacgctcaaataccccgaataccgaaaccacaaaaaaacgaaaacgaacgaaacgaaacaaactcctctaaatcgaacctccgaccgactatccccaaatccgacgccgacccctcccttcgaaaaaaccctacataccgaacgaaacgaatctcccttcgcaaccccgacgcgaaatcccttcccgacgccctacaacccaataactcaaaaccctcccgctacctccctcgaaacaaaaacaaccttcgttctccctccgaaactaatccgacgctaaaaaac

SEQ ID NO: 39643 - DNA, 520 bp, Artificial Sequence
  chemically treated genomic DNA (Homo sapiens) CpG-island No: 39643
agggaggggtcggtttgcgggtagttagaggttggggcggttgtggagtttgtggtgggagcggtattgtggggtagggaaaaggtgagtcgagtcgacggaggggacgcgttgcggggcgtttttagtttatggagcggggtaagatggcggaggcggagagtttggagatagcggtagagtacgagcggattttgcgagagatcgagagtattgatacggtttgtatcgggtttacgtttaggtatttcgggtgtcgggattatagaggggcgggaacgggcgggacggggtaggtttttttgggtcgggttttcggtcggttgtttttaggttcggcgtcggttttttttttcggagagattttgtatatcgggcgaggcgggttttttttcgtagtttcgacgcggggttttttttcggcgttttatagtttagtgatttaggattttttcgttgtttttttcggggtaggagtagttttcgtttttttttcgaggttggttcggcgttggggaat

SEQ ID NO: 39644 - DNA, 520 bp, Artificial Sequence
  chemically treated genomic DNA (Homo sapiens) CpG-island No: 39644
attccccaacgccgaaccaacctcgaaaaaaaaacgaaaactactcctaccccgaaaaaaacaacgaaaaaatcctaaatcactaaactataaaacgccgaaaaaaaaccccgcgtcgaaactacgaaaaaaaacccgcctcgcccgatatacaaaatctctccgaaaaaaaaaaccgacgccgaacctaaaaacaaccgaccgaaaacccgacccaaaaaaacctaccccgtcccgcccgttcccgcccctctataatcccgacacccgaaatacctaaacgtaaacccgatacaaaccgtatcaatactctcgatctctcgcaaaatccgctcgtactctaccgctatctccaaactctccgcctccgccatcttaccccgctccataaactaaaaacgccccgcaacgcgtcccctccgtcgactcgactcaccttttccctaccccacaataccgctcccaccacaaactccacaaccgccccaacctctaactacccgcaaaccgacccctccct

SEQ ID NO: 39645 - DNA, 990 bp, Artificial Sequence
  chemically treated genomic DNA (Homo sapiens) CpG-island No: 39645
cggggacgtaatagggtggatttggaattcgggttttttggtttaaggtatcgaaggcgtagggattgttgttttcggttcgtttttcgcggtagttgtaattgggggtaagtttagcggtacggttttcggcgttcgtagttcggttcgggaattatttcgtttatttgcggttttattagttatcgttgttcggcgtcgtcgggcgtagggcgcggggcgcggaacgcggagtatacggggatgcggtttcgggtgttgtagagggtggcgaagcgtttagtatttttcgcgcgttgatagatttttacgtgggaatcggtcgttagtttcgtaggcggggtttcggcgtagaagaatttgttatattcgttaaagtcggtttttttttcgtttacgagtcggttttttagtagtttagttagggcgaagaggttgtttagcgcgagttagcgcgcggtgtttatggcggtttttgcgagcgcggcggggtcgagcggttgggttgtcgcggcgcgagttttgtaggttgggcggggagcgtattacgtagtcgagtagggtagggaagggaagtcgtagtttaggcgcggcgttttgcggagtcgggcggggcggttcgggcggcgggggcgggttcgcgtcgggaggtcgcgtttttttttttgaagatggttgtagaggtttagggtcgcgtttcgcgatgttgataacgtattttgggttgcgttcgggattggagacgcgggttatttgttttcgcgtcgtttggttttagtagttcgggggacgcgcgttattaagagtggagaattcgagtggggcgggtttagtttcggggttgggaagagatagtcgtatggattgggcgttaagaagtttgttgatcgcgcgcgttttacggtcgttttggtgatgtagaggggtggcgtgagatgtttttggagttgcggttggttcggagtggatgggtagagtttttttttgaaa

SEQ ID NO: 39646 - DNA, 990 bp, Artificial Sequence
  chemically treated genomic DNA (Homo sapiens) CpG-island No: 39646
tttcaaaaaaaaactctacccatccactccgaaccaaccgcaactccaaaaacatctcacgccacccctctacatcaccaaaacgaccgtaaaacgcgcgcgatcaacaaacttcttaacgcccaatccatacgactatctcttcccaaccccgaaactaaacccgccccactcgaattctccactcttaataacgcgcgtcccccgaactactaaaaccaaacgacgcgaaaacaaataacccgcgtctccaatcccgaacgcaacccaaaatacgttatcaacatcgcgaaacgcgaccctaaacctctacaaccatcttcaaaaaaaaaaacgcgacctcccgacgcgaacccgcccccgccgcccgaaccgccccgcccgactccgcaaaacgccgcgcctaaactacgacttcccttccctaccctactcgactacgtaatacgctccccgcccaacctacaaaactcgcgccgcgacaacccaaccgctcgaccccgccgcgctcgcaaaaaccgccataaacaccgcgcgctaactcgcgctaaacaacctcttcgccctaactaaactactaaaaaaccgactcgtaaacgaaaaaaaaaccgactttaacgaatataacaaattcttctacgccgaaaccccgcctacgaaactaacgaccgattcccacgtaaaaatctatcaacgcgcgaaaaatactaaacgcttcgccaccctctacaacacccgaaaccgcatccccgtatactccgcgttccgcgccccgcgccctacgcccgacgacgccgaacaacgataactaataaaaccgcaaataaacgaaataattcccgaaccgaactacgaacgccgaaaaccgtaccgctaaacttacccccaattacaactaccgcgaaaaacgaaccgaaaacaacaatccctacgccttcgataccttaaaccaaaaaacccgaattccaaatccaccctattacgtccccg

SEQ ID NO: 39647 - DNA, 990 bp, Artificial Sequence
  chemically treated genomic DNA (Homo sapiens) CpG-island No: 39647
ttttagaggggaattttgtttatttatttcgaattagtcgtagttttaggagtattttacgttatttttttgtattattagggcggtcgtggggcgcgcgcgattagtaggttttttggcgtttagtttatgcgattatttttttttagtttcgggattaggttcgttttattcggattttttatttttggtagcgcgcgtttttcggattgttgagattaggcggcgcggaggtaggtgattcgcgtttttagtttcgggcgtagtttagggtacgttgttagtatcgcggagcgcggttttgggtttttgtagttatttttagggagggaggcgcggtttttcgacgcggattcgttttcgtcgttcgggtcgtttcgttcggtttcgtagagcgtcgcgtttaggttgcgattttttttttttattttgttcggttgcgtagtgcgtttttcgtttagtttgtagagttcgcgtcgcggtagtttagtcgttcggtttcgtcgcgttcgtagaggtcgttatgggtatcgcgcgttggttcgcgttgggtagttttttcgttttggttgggttgttggaaggtcggttcgtgggcgaggaggaagtcggttttggcgaatgtgataagtttttttacgtcgggatttcgtttgcggggttggcggtcgatttttacgtgaagatttgttagcgcgcggagggtgttgagcgtttcgttattttttatagtattcgggatcgtattttcgtgtatttcgcgtttcgcgtttcgcgttttgcgttcggcggcgtcgagtagcgatggttggtggagtcgtaggtaagcgaagtggttttcgagtcgggttgcgggcgtcggagatcgtgtcgttggatttgtttttagttgtagttatcgcgaggggcgggtcgggaatagtaatttttacgttttcggtgttttgggttaagaaattcgggttttaggtttattttgttgcgttttcg

SEQ ID NO: 39648 - DNA, 990 bp, Artificial Sequence
  chemically treated genomic DNA (Homo sapiens) CpG-island No: 39648
cgaaaacgcaacaaaataaacctaaaacccgaatttcttaacccaaaacaccgaaaacgtaaaaattactattcccgacccgcccctcgcgataactacaactaaaaacaaatccaacgacacgatctccgacgcccgcaacccgactcgaaaaccacttcgcttacctacgactccaccaaccatcgctactcgacgccgccgaacgcaaaacgcgaaacgcgaaacgcgaaatacacgaaaatacgatcccgaatactataaaaaataacgaaacgctcaacaccctccgcgcgctaacaaatcttcacgtaaaaatcgaccgccaaccccgcaaacgaaatcccgacgtaaaaaaacttatcacattcgccaaaaccgacttcctcctcgcccacgaaccgaccttccaacaacccaaccaaaacgaaaaaactacccaacgcgaaccaacgcgcgatacccataacgacctctacgaacgcgacgaaaccgaacgactaaactaccgcgacgcgaactctacaaactaaacgaaaaacgcactacgcaaccgaacaaaataaaaaaaaaaaatcgcaacctaaacgcgacgctctacgaaaccgaacgaaacgacccgaacgacgaaaacgaatccgcgtcgaaaaaccgcgcctccctccctaaaaataactacaaaaacccaaaaccgcgctccgcgatactaacaacgtaccctaaactacgcccgaaactaaaaacgcgaatcacctacctccgcgccgcctaatctcaacaatccgaaaaacgcgcgctaccaaaaataaaaaatccgaataaaacgaacctaatcccgaaactaaaaaaaaataatcgcataaactaaacgccaaaaaacctactaatcgcgcgcgccccacgaccgccctaataatacaaaaaaataacgtaaaatactcctaaaactacgactaattcgaaataaataaacaaaattcccctctaaaa

SEQ ID NO: 39649 - DNA, 574 bp, Artificial Sequence
  chemically treated genomic DNA (Homo sapiens) CpG-island No: 39649
ggtcgttcgttttttttttaggttttttttggcgtttttacgcggggcgtaatcgtaagagaggaacgtaggtcgttttattagcgtttagtgtcgcgttagtttttaggttcgggttgttttcggagttatgagttgcggtcgtttttttttcgacgtggatggtatgattatttttaaggtggataatttgatttatcgtatttttttcgatagtttgaggcgcgtgttcgagaagtacgggcgcgtgggcgacgtgtatatttcgttggagttttatattaaggcgtttcggggtttcgttttcgttcgtttttacgatcggagcgacgcgtaagacgtcgaggtcgttatggacggggcggtgttggacgaacgcgagttgcgtgtgcggatggcgcgttatggtcgtcgggatttgtttcgtagtagttaggaagagttacgcggtaggttttggggcggtcgttacggacggcggagcggtagttttagggggcgatatcgtagttaatttcggggttttagttattttaggtttcgtagtagattttattatggggggtttcgttat

SEQ ID NO: 39650 - DNA, 574 bp, Artificial Sequence
  chemically treated genomic DNA (Homo sapiens) CpG-island No: 39650
ataacgaaaccccccataataaaatctactacgaaacctaaaataactaaaaccccgaaattaactacgatatcgccccctaaaactaccgctccgccgtccgtaacgaccgccccaaaacctaccgcgtaactcttcctaactactacgaaacaaatcccgacgaccataacgcgccatccgcacacgcaactcgcgttcgtccaacaccgccccgtccataacgacctcgacgtcttacgcgtcgctccgatcgtaaaaacgaacgaaaacgaaaccccgaaacgccttaatataaaactccaacgaaatatacacgtcgcccacgcgcccgtacttctcgaacacgcgcctcaaactatcgaaaaaaatacgataaatcaaattatccaccttaaaaataatcataccatccacgtcgaaaaaaaaacgaccgcaactcataactccgaaaacaacccgaacctaaaaactaacgcgacactaaacgctaataaaacgacctacgttcctctcttacgattacgccccgcgtaaaaacgccaaaaaaaacctaaaaaaaaaacgaacgacc

SEQ ID NO: 39651 - DNA, 574 bp, Artificial Sequence
  chemically treated genomic DNA (Homo sapiens) CpG-island No: 39651
atagcgagattttttatagtgagatttgttgcgggatttagagtagttgggatttcgggattggttgcggtgtcgttttttggggttgtcgtttcgtcgttcgtagcggtcgttttaggatttgtcgcgtggttttttttggttgttgcgaggtaggtttcggcggttatagcgcgttattcgtatacgtagttcgcgttcgtttagtatcgtttcgtttatggcggtttcggcgttttgcgcgtcgtttcggtcgtgaaagcggacgaaggcgaagtttcggggcgttttggtgtggggttttagcgggatgtatacgtcgtttacgcgttcgtatttttcgaatacgcgttttaagttgtcgggagaggtgcggtaggttaggttgtttattttgagggtgattatgttatttacgtcgggaggggggcggtcgtagtttatggtttcgagagtagttcgggtttggaaattggcgcggtattgggcgttggtggggcgatttgcgttttttttttgcggttgcgtttcgcgtggggacgttaggagagatttgggggagaggcgggcggtt

SEQ ID NO: 39652 - DNA, 574 bp, Artificial Sequence
  chemically treated genomic DNA (Homo sapiens) CpG-island No: 39652
aaccgcccgcctctcccccaaatctctcctaacgtccccacgcgaaacgcaaccgcaaaaaaaaaacgcaaatcgccccaccaacgcccaataccgcgccaatttccaaacccgaactactctcgaaaccataaactacgaccgcccccctcccgacgtaaataacataatcaccctcaaaataaacaacctaacctaccgcacctctcccgacaacttaaaacgcgtattcgaaaaatacgaacgcgtaaacgacgtatacatcccgctaaaaccccacaccaaaacgccccgaaacttcgccttcgtccgctttcacgaccgaaacgacgcgcaaaacgccgaaaccgccataaacgaaacgatactaaacgaacgcgaactacgtatacgaataacgcgctataaccgccgaaacctacctcgcaacaaccaaaaaaaaccacgcgacaaatcctaaaacgaccgctacgaacgacgaaacgacaaccccaaaaaacgacaccgcaaccaatcccgaaatcccaactactctaaatcccgcaacaaatctcactataaaaaatctcgctat

SEQ ID NO: 39653 - DNA, 567 bp, Artificial Sequence
  chemically treated genomic DNA (Homo sapiens) CpG-island No: 39653
gttcgagtttagttcgcggttttagtagtagcgtcgagagtagttttagtagtagcgttatggtcgggtggaacgtttatatcgataattttatggcggacgggatttgttaggacgcggttatcgtgggttataaggattcgtttttcgtttgggtcgtcgttttcgggaaaacgttcgttaatattacggtattgcgaggtttgcgcggttcggggtattgtttcggtttggattttgagggagggatttgggtgggggcgggcgcggtttagggcgcgtagcgagaggttttgattgggtgtttgttttggaagcggcgcgaatggcggttgtacgtgagtgggttttttagttgttcgtaggttttatgttttaggcggcggcgtttatttcgttcgttatttcgtttttcgcgacggggcgttatattcggggtatagggcggggaggggcgcggcgttcggtgcggcggtttattttcgttttttttagggcggggcggggacgcgttttagtttttattggggattgggattgagaggggattcggggatttttggattt

SEQ ID NO: 39654 - DNA, 567 bp, Artificial Sequence
  chemically treated genomic DNA (Homo sapiens) CpG-island No: 39654
aaatccaaaaatccccgaatcccctctcaatcccaatccccaataaaaactaaaacgcgtccccgccccgccctaaaaaaaacgaaaataaaccgccgcaccgaacgccgcgcccctccccgccctataccccgaatataacgccccgtcgcgaaaaacgaaataacgaacgaaataaacgccgccgcctaaaacataaaacctacgaacaactaaaaaacccactcacgtacaaccgccattcgcgccgcttccaaaacaaacacccaatcaaaacctctcgctacgcgccctaaaccgcgcccgcccccacccaaatccctccctcaaaatccaaaccgaaacaataccccgaaccgcgcaaacctcgcaataccgtaatattaacgaacgttttcccgaaaacgacgacccaaacgaaaaacgaatccttataacccacgataaccgcgtcctaacaaatcccgtccgccataaaattatcgatataaacgttccacccgaccataacgctactactaaaactactctcgacgctactactaaaaccgcgaactaaactcgaac

SEQ ID NO: 39655 - DNA, 567 bp, Artificial Sequence
  chemically treated genomic DNA (Homo sapiens) CpG-island No: 39655
gggtttaaggattttcgggtttttttttaattttaatttttagtaaaaattgaggcgcgttttcgtttcgttttgggagaggcggaagtgggtcgtcgtatcgggcgtcgcgttttttttcgttttgtgtttcggatgtaacgtttcgtcgcggaaagcggggtagcgggcgggatgggcgtcgtcgtttggggtataggatttacgggtaattgagggatttatttacgtgtagtcgttattcgcgtcgtttttagggtaagtatttagttagggtttttcgttgcgcgttttagatcgcgttcgtttttatttaagttttttttttagggtttaaatcggagtagtgtttcggatcgcgtaggtttcgtagtatcgtgatgttgacgaacgttttttcggggacggcggtttagacggagggcgagtttttgtagtttacgatggtcgcgttttgataggtttcgttcgttatgaggttgtcgatgtaggcgttttattcggttatggcgttgttattggggttgttttcggcgttgttgttggggtcgcggattgggttcgagt

SEQ ID NO: 39656 - DNA, 567 bp, Artificial Sequence
  chemically treated genomic DNA (Homo sapiens) CpG-island No: 39656
actcgaacccaatccgcgaccccaacaacaacgccgaaaacaaccccaataacaacgccataaccgaataaaacgcctacatcgacaacctcataacgaacgaaacctatcaaaacgcgaccatcgtaaactacaaaaactcgccctccgtctaaaccgccgtccccgaaaaaacgttcgtcaacatcacgatactacgaaacctacgcgatccgaaacactactccgatttaaaccctaaaaaaaaaacttaaataaaaacgaacgcgatctaaaacgcgcaacgaaaaaccctaactaaatacttaccctaaaaacgacgcgaataacgactacacgtaaataaatccctcaattacccgtaaatcctataccccaaacgacgacgcccatcccgcccgctaccccgctttccgcgacgaaacgttacatccgaaacacaaaacgaaaaaaaacgcgacgcccgatacgacgacccacttccgcctctcccaaaacgaaacgaaaacgcgcctcaatttttactaaaaattaaaattaaaaaaaaacccgaaaatccttaaaccc

SEQ ID NO: 39657 - DNA, 705 bp, Artificial Sequence
  chemically treated genomic DNA (Homo sapiens) CpG-island No: 39657
tcggggaggtttgataattagacggtagtttaaggcgacggaattggttttttttttttatttcggttttcgattagtagtcggttttttaaatgtgaaatcgttggttttttcgtttttttatttttatttttattttcgttagaggttaagtcggtaaaatgtaaagattaaggggaagcgcgaggtagggttatttttaacgaagttcgttttttttcgggttggtgttttcgggggggggttggagattgcgggaggaggagcgagcggttttcgtttagagattttcggagacgcgattttcgatattcgggttttttttttattcggtttttttttttcgcggtcgattcggagaattgtagtagcgttcgggcggattttaagtcggttttattggtatatacgttatatataaaagcgtcgcggtcgtcgtttttttatttttatagttttggcgaagtaattaatgaggcggcggcgttcgcgtttttttcgtgtatattcgaatacgggggtttgagcgggttagcgggggttgggtagttgttggtttattatcgttgcgtttgatttttacgtaaaattttcgatttggattttgtcgaagttggtcgttgttattattttatttggagtagtagtagcgggtcgaggggaggggggattcgggaaggggtcgggaataaggcgggggagggg

SEQ ID NO: 39658 - DNA, 705 bp, Artificial Sequence
  chemically treated genomic DNA (Homo sapiens) CpG-island No: 39658
cccctcccccgccttattcccgaccccttcccgaatcccccctcccctcgacccgctactactactccaaataaaataataacaacgaccaacttcgacaaaatccaaatcgaaaattttacgtaaaaatcaaacgcaacgataataaaccaacaactacccaacccccgctaacccgctcaaacccccgtattcgaatatacacgaaaaaaacgcgaacgccgccgcctcattaattacttcgccaaaactataaaaataaaaaaacgacgaccgcgacgcttttatatataacgtatataccaataaaaccgacttaaaatccgcccgaacgctactacaattctccgaatcgaccgcgaaaaaaaaaaaccgaataaaaaaaaaacccgaatatcgaaaatcgcgtctccgaaaatctctaaacgaaaaccgctcgctcctcctcccgcaatctccaacccccccccgaaaacaccaacccgaaaaaaaacgaacttcgttaaaaataaccctacctcgcgcttccccttaatctttacattttaccgacttaacctctaacgaaaataaaaataaaaataaaaaaacgaaaaaaccaacgatttcacatttaaaaaaccgactactaatcgaaaaccgaaataaaaaaaaaaaaccaattccgtcgccttaaactaccgtctaattatcaaacctccccga

SEQ ID NO: 39659 - DNA, 705 bp, Artificial Sequence
  chemically treated genomic DNA (Homo sapiens) CpG-island No: 39659
tttttttttcgttttgttttcggttttttttcgggtttttttttttttcggttcgttgttgttgttttagatgaggtgatggtaacggttaatttcggtaagatttagatcggggattttacgtggagattaagcgtagcgatggtgagttagtagttgtttagttttcgttggttcgtttaggttttcgtgttcgggtgtgtacggaggggacgcgggcgtcgtcgttttattgattgtttcgttagggttgtgggggtgggaaggcggcggtcgcggcgtttttgtgtgtggcgtgtgtgttagtgaggtcggtttggggttcgttcgggcgttgttgtagtttttcggatcggtcgcgggggagggaagtcgggtggggaaagggttcgggtgtcgagggtcgcgttttcgggggtttttgggcgagggtcgttcgttttttttttcgtaatttttagttttttttcggggatattagttcgggagggagcgggtttcgttagggatgattttgtttcgcgtttttttttggtttttgtattttatcggtttggtttttgacggggatggggatgggggtgggggagcgggaagattagcgattttatatttagagaatcgattgttggtcggaggtcgagatggggggaaagagttagtttcgtcgttttaaattgtcgtttggttgttaggttttttcgg

SEQ ID NO: 39660 - DNA, 705 bp, Artificial Sequence
  chemically treated genomic DNA (Homo sapiens) CpG-island No: 39660
ccgaaaaaacctaacaaccaaacgacaatttaaaacgacgaaactaactctttccccccatctcgacctccgaccaacaatcgattctctaaatataaaatcgctaatcttcccgctcccccacccccatccccatccccgtcaaaaaccaaaccgataaaatacaaaaaccaaaaaaaaacgcgaaacaaaatcatccctaacgaaacccgctccctcccgaactaatatccccgaaaaaaaactaaaaattacgaaaaaaaaaacgaacgaccctcgcccaaaaacccccgaaaacgcgaccctcgacacccgaaccctttccccacccgacttccctcccccgcgaccgatccgaaaaactacaacaacgcccgaacgaaccccaaaccgacctcactaacacacacgccacacacaaaaacgccgcgaccgccgccttcccacccccacaaccctaacgaaacaatcaataaaacgacgacgcccgcgtcccctccgtacacacccgaacacgaaaacctaaacgaaccaacgaaaactaaacaactactaactcaccatcgctacgcttaatctccacgtaaaatccccgatctaaatcttaccgaaattaaccgttaccatcacctcatctaaaacaacaacaacgaaccgaaaaaaaaaaaaacccgaaaaaaaaccgaaaacaaaacgaaaaaaaaa

SEQ ID NO: 39661 - DNA, 516 bp, Artificial Sequence
  chemically treated genomic DNA (Homo sapiens) CpG-island No: 39661
gaggacgcgtacgtcgggtagtcggggtgaagttagggtcggggtcgtgagacggcgcggggtagagtgggagggttcgtatcgttcgtcggggagtcgacgttggggaggcggggcgtcgcgcgtttgcgtagagcgcgttttcggcgtttttttttttttttcggttggttttttttcgttgtttttaggcggtttcgtttagttttgtagcggggtgggcggcggtcgcggtttatttagtcgttggagcgttgagcgttcggttcggtttatagttagtcggcgtcgcgtttgattttagcgcgcggtttagaagacgcgggaagcgtcgcgtcgagtttttttgttttttcgttttcgggaattggcgttgttgtcggaatgggttaaaggttacgtggttttaggggttttttagcgggttgagggatgtgaatttaagggtttttcgttgatagtacgggattcgggtttttatcggaaggtggtattttttatttttatttataggta

SEQ ID NO: 39662 - DNA, 516 bp, Artificial Sequence
  chemically treated genomic DNA (Homo sapiens) CpG-island No: 39662
tacctataaataaaaataaaaaataccaccttccgataaaaacccgaatcccgtactatcaacgaaaaacccttaaattcacatccctcaacccgctaaaaaacccctaaaaccacgtaacctttaacccattccgacaacaacgccaattcccgaaaacgaaaaaacaaaaaaactcgacgcgacgcttcccgcgtcttctaaaccgcgcgctaaaatcaaacgcgacgccgactaactataaaccgaaccgaacgctcaacgctccaacgactaaataaaccgcgaccgccgcccaccccgctacaaaactaaacgaaaccgcctaaaaacaacgaaaaaaaaccaaccgaaaaaaaaaaaaaaacgccgaaaacgcgctctacgcaaacgcgcgacgccccgcctccccaacgtcgactccccgacgaacgatacgaaccctcccactctaccccgcgccgtctcacgaccccgaccctaacttcaccccgactacccgacgtacgcgtcctc

SEQ ID NO: 39663 - DNA, 516 bp, Artificial Sequence
  chemically treated genomic DNA (Homo sapiens) CpG-island No: 39663
tatttgtaagtggaaatagggggtgttatttttcgatgaaaattcggatttcgtattgttaacggagggtttttgaatttatattttttagttcgttagaaagtttttgaaattacgtggtttttaatttatttcggtaatagcgttaattttcggaagcgagagggtaagaaagttcggcgcgacgtttttcgcgttttttaggtcgcgcgttgaaattaaacgcgacgtcggttagttgtgggtcgggtcgagcgtttaacgttttagcggttgggtaagtcgcggtcgtcgtttatttcgttgtagagttgggcggggtcgtttggaggtagcggggagaggttagtcgaaaaggaagaagagacgtcggaggcgcgttttgcgtaggcgcgcggcgtttcgtttttttagcgtcggtttttcggcgggcggtgcgggtttttttattttatttcgcgtcgttttacggtttcggttttagttttatttcgattattcggcgtgcgcgttttt

SEQ ID NO: 39664 - DNA, 516 bp, Artificial Sequence
  chemically treated genomic DNA (Homo sapiens) CpG-island No: 39664
aaaaacgcgcacgccgaataatcgaaataaaactaaaaccgaaaccgtaaaacgacgcgaaataaaataaaaaaacccgcaccgcccgccgaaaaaccgacgctaaaaaaacgaaacgccgcgcgcctacgcaaaacgcgcctccgacgtctcttcttccttttcgactaacctctccccgctacctccaaacgaccccgcccaactctacaacgaaataaacgacgaccgcgacttacccaaccgctaaaacgttaaacgctcgacccgacccacaactaaccgacgtcgcgtttaatttcaacgcgcgacctaaaaaacgcgaaaaacgtcgcgccgaactttcttaccctctcgcttccgaaaattaacgctattaccgaaataaattaaaaaccacgtaatttcaaaaactttctaacgaactaaaaaatataaattcaaaaaccctccgttaacaatacgaaatccgaattttcatcgaaaaataacaccccctatttccacttacaaata

SEQ ID NO: 39665 - DNA, 1015 bp, Artificial Sequence
  chemically treated genomic DNA (Homo sapiens) CpG-island No: 39665
acggttacgttaaaagtttatacgggtgtggtttatttacggcgaagttgtatgggagaagttcgggttttagtttttcggttcgtcgagttcgcgttttcgtcgttttatcgggaagttttagcggtcgggaagggggagggggtaggaacgtttcggagtcggacgataattatttttcgggaaagcggtttttagataagtcgttttagggaaggaaggcggtcgaggggttcggcgcggggttgtcgcgcgcgtcgaggtcgcggtaataaagtttggaaatcgcgagaaaatttttttaagaggaaacgcggcggcggcgttgggtttatagttttttttttttagtttaggcggtttttcgatttttcgagcgttgggaagcgtcggtcgtgttcgttcgggttttatattcgggttttgcgggggaagggatcgtcggttcgacgcgggttttacgttcgttcggggtttaattttcggcgacgtcgttaaagaaatcgcgtttcgttcgttcgttcgttcgcggttcgcggggtttagtttgggacggttcggtttaaggattttttcggtttggttcgagagatcgcgttcgcgaggagggaggtacgaagttatttgcggttagttgggcgagcgttaaattttagaggttcgaagtagacgggcgttgttttgtttttttttagttcggttaggaggaggaaatgggtcgttttacgttttcgttttcggttcgtttttcgttcgcggttttcgtttttgtttcggtttcgttcgttttttttggtattttttttcgattcgtttttttcggcgtttttcgtcgtcgtttcgttcgtttttttcggtcgtttcggttttcgtttttggggaaagggaaggtttttatcgcgaagagagtttggtaacgtcggatcgggattttcgagggattttttttttttcgtcgtttattttagaattttttttttttcggtttttagtgggagtttaggtcgggagtgat

SEQ ID NO: 39666 - DNA, 1015 bp, Artificial Sequence
  chemically treated genomic DNA (Homo sapiens) CpG-island No: 39666
atcactcccgacctaaactcccactaaaaaccgaaaaaaaaaaaattctaaaataaacgacgaaaaaaaaaaaatccctcgaaaatcccgatccgacgttaccaaactctcttcgcgataaaaaccttccctttccccaaaaacgaaaaccgaaacgaccgaaaaaaacgaacgaaacgacgacgaaaaacgccgaaaaaaacgaatcgaaaaaaaataccaaaaaaaacgaacgaaaccgaaacaaaaacgaaaaccgcgaacgaaaaacgaaccgaaaacgaaaacgtaaaacgacccatttcctcctcctaaccgaactaaaaaaaaacaaaacaacgcccgtctacttcgaacctctaaaatttaacgctcgcccaactaaccgcaaataacttcgtacctccctcctcgcgaacgcgatctctcgaaccaaaccgaaaaaatccttaaaccgaaccgtcccaaactaaaccccgcgaaccgcgaacgaacgaacgaacgaaacgcgatttctttaacgacgtcgccgaaaattaaaccccgaacgaacgtaaaacccgcgtcgaaccgacgatcccttcccccgcaaaacccgaatataaaacccgaacgaacacgaccgacgcttcccaacgctcgaaaaatcgaaaaaccgcctaaactaaaaaaaaaaaactataaacccaacgccgccgccgcgtttcctcttaaaaaaattttctcgcgatttccaaactttattaccgcgacctcgacgcgcgcgacaaccccgcgccgaacccctcgaccgccttccttccctaaaacgacttatctaaaaaccgctttcccgaaaaataattatcgtccgactccgaaacgttcctaccccctcccccttcccgaccgctaaaacttcccgataaaacgacgaaaacgcgaactcgacgaaccgaaaaactaaaacccgaacttctcccatacaacttcgccgtaaataaaccacacccgtataaacttttaacgtaaccgt

SEQ ID NO: 39667 - DNA, 1015 bp, Artificial Sequence
  chemically treated genomic DNA (Homo sapiens) CpG-island No: 39667
gttattttcggtttaagtttttattaggggtcggggaggaaggaattttgaggtgggcggcggggaggaagaggtttttcgggggtttcggttcggcgttgttagatttttttcgcggtgggggttttttttttttttaaaagcggaggtcggaacggtcgggaggagcgggcggggcggcggcgggaggcgtcgggaagagcgagtcggagggaggtgttaggaagggcgggcggggtcgggataggggcgggggtcgcgggcggggggcgggtcgggggcgggggcgtggggcggtttattttttttttttagtcggattggagggagataaagtagcgttcgtttgtttcgggtttttggaatttagcgttcgtttagttagtcgtaggtaatttcgtattttttttttcgcgggcgcggtttttcgggttaggtcgagagggtttttgggtcgggtcgttttaagttgggtttcgcgagtcgcgggcgggcgagcgggcggggcgcggtttttttggcgacgtcgtcgggaattgggtttcgggcgggcgtgggattcgcgtcgggtcggcggttttttttttcgtagggttcgagtatggggttcgggcgggtacggtcggcgttttttagcgttcgggaagtcggggggtcgtttgggttggggaggagaaattataggtttagcgtcgtcgtcgcgtttttttttggaaaagttttttcgcggtttttaaattttgttatcgcggtttcggcgcgcgcggtagtttcgcgtcgggtttttcggtcgttttttttttttggggcggtttgtttgggagtcgttttttcgggaagtgattgtcgttcggtttcgaggcgtttttgtttttttttttttttcggtcgttgagatttttcgatggggcggcggggacgcgggttcggcgaatcgggaggttggagttcgggttttttttatatagtttcgtcgtaggtgggttatattcgtgtggatttttggcgtgatcgt

SEQ ID NO: 39668 - DNA, 1015 bp, Artificial Sequence
  chemically treated genomic DNA (Homo sapiens) CpG-island No: 39668
acgatcacgccaaaaatccacacgaatataacccacctacgacgaaactatataaaaaaaacccgaactccaacctcccgattcgccgaacccgcgtccccgccgccccatcgaaaaatctcaacgaccgaaaaaaaaaaaaaaacaaaaacgcctcgaaaccgaacgacaatcacttcccgaaaaaacgactcccaaacaaaccgccccaaaaaaaaaaaacgaccgaaaaacccgacgcgaaactaccgcgcgcgccgaaaccgcgataacaaaatttaaaaaccgcgaaaaaacttttccaaaaaaaaacgcgacgacgacgctaaacctataatttctcctccccaacccaaacgaccccccgacttcccgaacgctaaaaaacgccgaccgtacccgcccgaaccccatactcgaaccctacgaaaaaaaaaaccgccgacccgacgcgaatcccacgcccgcccgaaacccaattcccgacgacgtcgccaaaaaaaccgcgccccgcccgctcgcccgcccgcgactcgcgaaacccaacttaaaacgacccgacccaaaaaccctctcgacctaacccgaaaaaccgcgcccgcgaaaaaaaaaatacgaaattacctacgactaactaaacgaacgctaaattccaaaaacccgaaacaaacgaacgctactttatctccctccaatccgactaaaaaaaaaaaataaaccgccccacgcccccgcccccgacccgccccccgcccgcgacccccgcccctatcccgaccccgcccgcccttcctaacacctccctccgactcgctcttcccgacgcctcccgccgccgccccgcccgctcctcccgaccgttccgacctccgcttttaaaaaaaaaaaaaacccccaccgcgaaaaaaatctaacaacgccgaaccgaaacccccgaaaaacctcttcctccccgccgcccacctcaaaattccttcctccccgacccctaataaaaacttaaaccgaaaataac

SEQ ID NO: 39669 - DNA, 665 bp, Artificial Sequence
  chemically treated genomic DNA (Homo sapiens) CpG-island No: 39669
ttacgtttcgcgggggttttcgtgatagattaagtttggcgtttttttagcgtcgtagttggatcgagagaggagcggtcgttttgtaaaaggaagtaagtcgttaatttcgtcggaatcgcgtttcggttttttcggtcgggcgagtttcggggtttttagaatcgcggtttcggtcgttaggttttcggcgtcgtttttagggattgtagagtgagggatgtttcgttaggtgtaggggaggcggtaggtggtcgtggtttttttgcgtcgtcggttttacgttttagcgtttatttcgtttagtttacgggtggcgttcggggttttcggggaggtacgtacgtttttaagcgtcgttcgttttggggtcgggaacgttgcgtatttttttttgcggggagttcgcgttttattttcggagtggagtttcggtttttattcggaatcgtggggcggggagatagtgattgaggcgttttagtcgtatcggggttcggattattagacgcgcgtcggttaggttttcgtttttttttttttcgcgtcgggtgtttgcggaggagtcgcggagagaagggggttggttcggagagttgtcgttattcggtaggattcggagcgggaggttgggtgaggcgtcgttgtttgttttattttttgat

SEQ ID NO: 39670 - DNA, 665 bp, Artificial Sequence
  chemically treated genomic DNA (Homo sapiens) CpG-island No: 39670
atcaaaaaataaaacaaacaacgacgcctcacccaacctcccgctccgaatcctaccgaataacgacaactctccgaaccaacccccttctctccgcgactcctccgcaaacacccgacgcgaaaaaaaaaaaaacgaaaacctaaccgacgcgcgtctaataatccgaaccccgatacgactaaaacgcctcaatcactatctccccgccccacgattccgaataaaaaccgaaactccactccgaaaataaaacgcgaactccccgcaaaaaaaaatacgcaacgttcccgaccccaaaacgaacgacgcttaaaaacgtacgtacctccccgaaaaccccgaacgccacccgtaaactaaacgaaataaacgctaaaacgtaaaaccgacgacgcaaaaaaaccacgaccacctaccgcctcccctacacctaacgaaacatccctcactctacaatccctaaaaacgacgccgaaaacctaacgaccgaaaccgcgattctaaaaaccccgaaactcgcccgaccgaaaaaaccgaaacgcgattccgacgaaattaacgacttacttccttttacaaaacgaccgctcctctctcgatccaactacgacgctaaaaaaacgccaaacttaatctatcacgaaaacccccgcgaaacgtaa

SEQ ID NO: 39671 - DNA, 665 bp, Artificial Sequence
  chemically treated genomic DNA (Homo sapiens) CpG-island No: 39671
gttaggaggtggggtaagtagcggcgttttatttagtttttcgtttcgggttttgtcggatggcggtagtttttcgggttagttttttttttttcgcggttttttcgtagatattcggcgcggaagaaggaggggcggagatttggtcggcgcgcgtttgatgattcggatttcggtgcgattggagcgttttagttattgttttttcgttttacggtttcgagtaaggatcggagttttatttcgggggtggagcgcgggtttttcgtagggaaaggtgcgtagcgttttcgattttaaaacgagcggcgtttgggagcgtgcgtgttttttcgagagtttcgggcgttattcgtgggttggacgaggtgggcgttggggcgtggggtcggcggcgtagagaagttacggttatttgtcgttttttttgtatttggcggagtattttttattttatagtttttggaggcggcgtcggaaatttggcggtcgggatcgcgattttggaagtttcggagttcgttcggtcggaggagtcggggcgcggtttcggcgagattggcgatttgtttttttttgtagaacggtcgtttttttttcggtttagttgcgacgttgggaaagcgttagatttggtttgttacgggagttttcgcggggcgtgg

SEQ ID NO: 39672 - DNA, 665 bp, Artificial Sequence
  chemically treated genomic DNA (Homo sapiens) CpG-island No: 39672
ccacgccccgcgaaaactcccgtaacaaaccaaatctaacgctttcccaacgtcgcaactaaaccgaaaaaaaaacgaccgttctacaaaaaaaaacaaatcgccaatctcgccgaaaccgcgccccgactcctccgaccgaacgaactccgaaacttccaaaatcgcgatcccgaccgccaaatttccgacgccgcctccaaaaactataaaataaaaaatactccgccaaatacaaaaaaaacgacaaataaccgtaacttctctacgccgccgaccccacgccccaacgcccacctcgtccaacccacgaataacgcccgaaactctcgaaaaaacacgcacgctcccaaacgccgctcgttttaaaatcgaaaacgctacgcacctttccctacgaaaaacccgcgctccacccccgaaataaaactccgatccttactcgaaaccgtaaaacgaaaaaacaataactaaaacgctccaatcgcaccgaaatccgaatcatcaaacgcgcgccgaccaaatctccgcccctccttcttccgcgccgaatatctacgaaaaaaccgcgaaaaaaaaaaaactaacccgaaaaactaccgccatccgacaaaacccgaaacgaaaaactaaataaaacgccgctacttaccccacctcctaac

SEQ ID NO: 39673 - DNA, 555 bp, Artificial Sequence
  chemically treated genomic DNA (Homo sapiens) CpG-island No: 39673
tttttatcgttgagtacgacgaaaatatcgttaggtttagcgtttcggtatttgttcgcgttttgggatggagaaggcgtttgtttgtaggtttttttttttcgttttttcgcgtttatttatagtgtcggtcgtcgataggaagacggcgagttcggggagtagttataagtaaagttaaaaattagtaaacgttaatcgttattattttttaaatttgtcgttttttattggaagtttcgttttatttcgttaagtttacgtttaatcgcgacggatgtcggttgggtttaagagacgttaggtaggtgggattggagttgttatggaaggggtagggcgtagggcggaattattgttcgcggagttggcgtcgagtcggaatttcggattgtaggaagtgggagtatcgcggtttcggggaagagatcggggttgagcgtttagtttatttttgcgtgattttcgttagcgtttagagcgttttcggggttcgagttgaagagtaaaattaagtgaaggaaattttattaagtttagggtgataagggagga

SEQ ID NO: 39674 - DNA, 555 bp, Artificial Sequence
  chemically treated genomic DNA (Homo sapiens) CpG-island No: 39674
tcctcccttatcaccctaaacttaataaaatttccttcacttaattttactcttcaactcgaaccccgaaaacgctctaaacgctaacgaaaatcacgcaaaaataaactaaacgctcaaccccgatctcttccccgaaaccgcgatactcccacttcctacaatccgaaattccgactcgacgccaactccgcgaacaataattccgccctacgccctaccccttccataacaactccaatcccacctacctaacgtctcttaaacccaaccgacatccgtcgcgattaaacgtaaacttaacgaaataaaacgaaacttccaataaaaaacgacaaatttaaaaaataataacgattaacgtttactaatttttaactttacttataactactccccgaactcgccgtcttcctatcgacgaccgacactataaataaacgcgaaaaaacgaaaaaaaaaaacctacaaacaaacgccttctccatcccaaaacgcgaacaaataccgaaacgctaaacctaacgatattttcgtcgtactcaacgataaaaa

SEQ ID NO: 39675 - DNA, 555 bp, Artificial Sequence
  chemically treated genomic DNA (Homo sapiens) CpG-island No: 39675
tttttttttgttattttgaatttagtgaagttttttttatttggttttgttttttaattcggatttcgaaaacgttttaaacgttggcggaagttacgtagagatgggttagacgtttaatttcggtttttttttcgaaatcgcggtgtttttattttttgtagttcgaggtttcgattcgacgttagtttcgcgagtaatggtttcgttttgcgttttgttttttttatgataattttagttttatttgtttggcgttttttgagtttaatcggtattcgtcgcggttggacgtgggtttggcggaatggggcgggatttttagtaggaggcggtaagtttgaaaagtgatgacggttgacgtttgttgatttttgattttgtttgtagttgtttttcgaattcgtcgtttttttgtcggcggtcggtattgtaggtgagcgcgagaggacggaggaaggaagtttgtagatagacgttttttttattttaaggcgcgggtaggtgtcgggacgttgggtttggcggtgttttcgtcgtgtttagcggtgggag

SEQ ID NO: 39676 - DNA, 555 bp, Artificial Sequence
  chemically treated genomic DNA (Homo sapiens) CpG-island No: 39676
ctcccaccgctaaacacgacgaaaacaccgccaaacccaacgtcccgacacctacccgcgccttaaaataaaaaaaacgtctatctacaaacttccttcctccgtcctctcgcgctcacctacaataccgaccgccgacaaaaaaacgacgaattcgaaaaacaactacaaacaaaatcaaaaatcaacaaacgtcaaccgtcatcacttttcaaacttaccgcctcctactaaaaatcccgccccattccgccaaacccacgtccaaccgcgacgaataccgattaaactcaaaaaacgccaaacaaataaaactaaaattatcataaaaaaaacaaaacgcaaaacgaaaccattactcgcgaaactaacgtcgaatcgaaacctcgaactacaaaaaataaaaacaccgcgatttcgaaaaaaaaaccgaaattaaacgtctaacccatctctacgtaacttccgccaacgtttaaaacgttttcgaaatccgaattaaaaaacaaaaccaaataaaaaaaacttcactaaattcaaaataacaaaaaaaaa

SEQ ID NO: 39677 - DNA, 661 bp, Artificial Sequence
  chemically treated genomic DNA (Homo sapiens) CpG-island No: 39677
ttttcgggtcgttttttttttttttttttttaggtcgcgatttggagggtttcgtttcgcggcgggggtagagttaggggcggggttgagcgcggtttgggcgattttttcggcggttggggtgggttggcgtttttttcgcgttcgggggattttttcgcgatcgtcgggacgtaaaaggggtttggtaggggcgttttcgttttattttcggaatttggtttttcgttgttttcgcgagcgtcgggagtttagtaggtttggtcgaggcgggattttcgtcgttttagttttcgttttcgttttcgcgttttttcgtcgcgcggagttttggttggtttgttttttaatcggattttggggttagcgtttagaaaagtttcgatttttttcggttcggttttattttaagaatcgattaaggttgtgagtgttcgggaattagattcgtttggaggttatagtttcgacgtttcgcgtttacgcggtagatcgggcgttgcggtttgggagtttcggggagatgcggagtaggagtaatttcggggttcgtttggacgggtacgcgcggttggtgtagtaaattattttgtgttattaggtaaggagggatcgtttttagggaacgcgtggaattatttttttatgtaatttatttttt

SEQ ID NO: 39678 - DNA, 661 bp, Artificial Sequence
  chemically treated genomic DNA (Homo sapiens) CpG-island No: 39678
aaaaaataaattacataaaaaaataattccacgcgttccctaaaaacgatccctccttacctaataacacaaaataatttactacaccaaccgcgcgtacccgtccaaacgaaccccgaaattactcctactccgcatctccccgaaactcccaaaccgcaacgcccgatctaccgcgtaaacgcgaaacgtcgaaactataacctccaaacgaatctaattcccgaacactcacaaccttaatcgattcttaaaataaaaccgaaccgaaaaaaatcgaaacttttctaaacgctaaccccaaaatccgattaaaaaacaaaccaaccaaaactccgcgcgacgaaaaaacgcgaaaacgaaaacgaaaactaaaacgacgaaaatcccgcctcgaccaaacctactaaactcccgacgctcgcgaaaacaacgaaaaaccaaattccgaaaataaaacgaaaacgcccctaccaaaccccttttacgtcccgacgatcgcgaaaaaatcccccgaacgcgaaaaaaacgccaacccaccccaaccgccgaaaaaatcgcccaaaccgcgctcaaccccgcccctaactctacccccgccgcgaaacgaaaccctccaaatcgcgacctaaaaaaaaaaaaaaaaaaaacgacccgaaaa

SEQ ID NO: 39679 - DNA, 661 bp, Artificial Sequence
  chemically treated genomic DNA (Homo sapiens) CpG-island No: 39679
ggagaatgagttatatgagagggtagttttacgcgttttttgggggcggtttttttttatttggtaatataggatggtttgttgtattagtcgcgcgtattcgtttaagcggatttcggaattgtttttgtttcgtattttttcgaggtttttaggtcgtagcgttcgatttgtcgcgtgggcgcgggacgtcggggttgtggtttttaagcgggtttggttttcggatatttatagttttagtcggtttttgggatgggatcgggtcggaggaggtcgagatttttttaaacgttagttttaaagttcggttggaaagtaagttaattagagtttcgcgcggcggggaggcgcgggggcggggacgggggttggagcgacgaaggtttcgtttcggttaggtttgttgggttttcgacgttcgcgggagtagcgggaaattaggtttcgggagtggggcgaggacgtttttgttaagttttttttacgtttcggcggtcgcgaggaggtttttcgggcgcgaagaagacgttagtttattttagtcgtcggggagatcgtttaggtcgcgtttagtttcgtttttggttttgttttcgtcgcggagcggaattttttaagtcgcggtttgaggaggaaggaaaagggggcggttcgggag

SEQ ID NO: 39680 - DNA, 661 bp, Artificial Sequence
  chemically treated genomic DNA (Homo sapiens) CpG-island No: 39680
ctcccgaaccgcccccttttccttcctcctcaaaccgcgacttaaaaaattccgctccgcgacgaaaacaaaaccaaaaacgaaactaaacgcgacctaaacgatctccccgacgactaaaataaactaacgtcttcttcgcgcccgaaaaacctcctcgcgaccgccgaaacgtaaaaaaaacttaacaaaaacgtcctcgccccactcccgaaacctaatttcccgctactcccgcgaacgtcgaaaacccaacaaacctaaccgaaacgaaaccttcgtcgctccaacccccgtccccgcccccgcgcctccccgccgcgcgaaactctaattaacttactttccaaccgaactttaaaactaacgtttaaaaaaatctcgacctcctccgacccgatcccatcccaaaaaccgactaaaactataaatatccgaaaaccaaacccgcttaaaaaccacaaccccgacgtcccgcgcccacgcgacaaatcgaacgctacgacctaaaaacctcgaaaaaatacgaaacaaaaacaattccgaaatccgcttaaacgaatacgcgcgactaatacaacaaaccatcctatattaccaaataaaaaaaaaccgcccccaaaaaacgcgtaaaactaccctctcatataactcattctcc

SEQ ID NO: 39681 - DNA, 510 bp, Artificial Sequence
  chemically treated genomic DNA (Homo sapiens) CpG-island No: 39681
aatgtttcgatttacgtcgttaagaaagttaaattcgaagtttttttatttttcgtagaatattcgatatttacgttcgtttttttggtcgtttgtatcgttattttggcgggttgatgaagttatcgtagtagatattgaaattttttcggagttcgttcggtttcgggggttatatcgcgttagatgtaggatattaatatttaggattcgtcggaagttgttatagcggaatagcgtcgttttacgttgagacgcgttgacgtagtagtttttttcgaatagatttcggggtaaaatcgagtttgagcgagattcgaggtcggaagatggaaaggcgagagtttaagatattttcgggttttgtatcgtaaagggcggggcgtagtttttaaaaggcgagatgtttcggtcggggaggttttgagtagaggaattcgggtggagagggcggggtttgaggagggcggagagttggggcgggttttaggtgagtaattggggagcgga

SEQ ID NO: 39682 - DNA, 510 bp, Artificial Sequence
  chemically treated genomic DNA (Homo sapiens) CpG-island No: 39682
tccgctccccaattactcacctaaaacccgccccaactctccgccctcctcaaaccccgccctctccacccgaattcctctactcaaaacctccccgaccgaaacatctcgccttttaaaaactacgccccgccctttacgatacaaaacccgaaaatatcttaaactctcgcctttccatcttccgacctcgaatctcgctcaaactcgattttaccccgaaatctattcgaaaaaaactactacgtcaacgcgtctcaacgtaaaacgacgctattccgctataacaacttccgacgaatcctaaatattaatatcctacatctaacgcgatataacccccgaaaccgaacgaactccgaaaaaatttcaatatctactacgataacttcatcaacccgccaaaataacgatacaaacgaccaaaaaaacgaacgtaaatatcgaatattctacgaaaaataaaaaaacttcgaatttaactttcttaacgacgtaaatcgaaacatt

SEQ ID NO: 39683 - DNA, 510 bp, Artificial Sequence
  chemically treated genomic DNA (Homo sapiens) CpG-island No: 39683
ttcgttttttagttatttatttgagattcgttttagtttttcgttttttttaggtttcgttttttttattcgggtttttttgtttagggttttttcgatcggaatatttcgttttttggaggttacgtttcgttttttacggtatagagttcggaagtgttttggattttcgtttttttatttttcggtttcgagtttcgtttaggttcggttttatttcggagtttattcgaagggggttgttacgttagcgcgttttagcgtaagacggcgttatttcgttgtaatagttttcggcgggttttggatgttgatgttttgtatttaacgcggtgtaattttcgaagtcgagcgagtttcggaggaattttagtatttgttacggtaattttattagttcgttaagatggcgatgtaagcggttaagagggcgaacgtgagtatcgggtgttttgcggagggtgggagaatttcgggtttgatttttttagcggcgtggatcggagtatt

SEQ ID NO: 39684 - DNA, 510 bp, Artificial Sequence
  chemically treated genomic DNA (Homo sapiens) CpG-island No: 39684
aatactccgatccacgccgctaaaaaaatcaaacccgaaattctcccaccctccgcaaaacacccgatactcacgttcgccctcttaaccgcttacatcgccatcttaacgaactaataaaattaccgtaacaaatactaaaattcctccgaaactcgctcgacttcgaaaattacaccgcgttaaatacaaaacatcaacatccaaaacccgccgaaaactattacaacgaaataacgccgtcttacgctaaaacgcgctaacgtaacaacccccttcgaataaactccgaaataaaaccgaacctaaacgaaactcgaaaccgaaaaataaaaaaacgaaaatccaaaacacttccgaactctataccgtaaaaaacgaaacgtaacctccaaaaaacgaaatattccgatcgaaaaaaccctaaacaaaaaaacccgaataaaaaaaacgaaacctaaaaaaaacgaaaaactaaaacgaatctcaaataaataactaaaaaacgaa

SEQ ID NO: 39685 - DNA, 748 bp, Artificial Sequence
  chemically treated genomic DNA (Homo sapiens) CpG-island No: 39685
cggacgttatttcgttttgtggtgttcgtaaggattcggcgattaaggattcgatcgttaacggacgcggttgcgggtgggtggcggcggtaggattggtcgggttacgcgtcggttatcgagaagtagcgattttagtttttttcgtaaattaagattcgttatttagagtcgtcgtttaattttttttgggtttgaagtcgtttttcgtcgtttcggtatcgttcgcgcggattcgttgtggaattcgcggcgtagggggcggagtgttcgcgcggcgttgcgttcgggagacggtgggcgttaatattcgcgcgtttcgtagacgcgggcgggtttttttttagtcgtagtcggacggtttcggggtcgtcgggtcgggttcgagtgtgtagtaggacggtcgcgggtttgttggttttgggagggtagagaggtgtttgtcgcggtcggcgattttttcgttaggtcgggcggttttcgcgtacgacgcgtttgcgcgggaggttttcggttcggggttggcgtggaggtcgtaggcgttcggtttagtgggtgggaggaagggtcgggagtgggcgcgatgagcgagagcgggtgcggacgtttacgatattttcgtcgtattcgtgtttcggggaggatttcgagtcgtttagagttcgaagattcgcgtagtatgatcgaaagtttttttttgttttttttaagtagtttagtttgtgtttttgtggttagaaagttgtag

SEQ ID NO: 39686 - DNA, 748 bp, Artificial Sequence
  chemically treated genomic DNA (Homo sapiens) CpG-island No: 39686
ctacaactttctaaccacaaaaacacaaactaaactacttaaaaaaaacaaaaaaaaactttcgatcatactacgcgaatcttcgaactctaaacgactcgaaatcctccccgaaacacgaatacgacgaaaatatcgtaaacgtccgcacccgctctcgctcatcgcgcccactcccgacccttcctcccacccactaaaccgaacgcctacgacctccacgccaaccccgaaccgaaaacctcccgcgcaaacgcgtcgtacgcgaaaaccgcccgacctaacgaaaaaatcgccgaccgcgacaaacacctctctaccctcccaaaaccaacaaacccgcgaccgtcctactacacactcgaacccgacccgacgaccccgaaaccgtccgactacgactaaaaaaaaacccgcccgcgtctacgaaacgcgcgaatattaacgcccaccgtctcccgaacgcaacgccgcgcgaacactccgccccctacgccgcgaattccacaacgaatccgcgcgaacgataccgaaacgacgaaaaacgacttcaaacccaaaaaaaattaaacgacgactctaaataacgaatcttaatttacgaaaaaaactaaaatcgctacttctcgataaccgacgcgtaacccgaccaatcctaccgccgccacccacccgcaaccgcgtccgttaacgatcgaatccttaatcgccgaatccttacgaacaccacaaaacgaaataacgtccg

SEQ ID NO: 39687 - DNA, 748 bp, Artificial Sequence
  chemically treated genomic DNA (Homo sapiens) CpG-island No: 39687
ttgtaattttttggttatagaaatataggttgagttgtttagagaaggtagggaggggttttcggttatattgcgcgagttttcgagttttgagcggttcgaagtttttttcgaggtacgggtgcgacggggatgtcgtaggcgttcgtattcgttttcgtttatcgcgtttattttcggtttttttttttatttattaggtcgggcgtttgcggtttttacgttagtttcgggtcgggggtttttcgcgtaggcgcgtcgtgcgcggggatcgttcggtttggcggggaggtcgtcggtcgcgataggtatttttttgtttttttaaggttagtaggttcgcggtcgttttgttatatattcgggttcggttcgacgatttcggagtcgttcgattgcggttggaagggagttcgttcgcgtttgcggaacgcgcgaatgttggcgtttatcgtttttcggacgtagcgtcgcgcgagtatttcgttttttgcgtcgcgggttttatagcgagttcgcgcgggcggtgtcggggcggcggaggacggttttaggtttaaaggggattgggcggcggttttaggtggcgggttttggtttgcggaaggggttggagtcgttgtttttcggtgatcggcgcgtggttcggttaattttgtcgtcgttatttattcgtaatcgcgttcgttgacggtcgggtttttggtcgtcgggtttttgcgggtattatagagcggggtggcgttcg

SEQ ID NO: 39688 - DNA, 748 bp, Artificial Sequence
  chemically treated genomic DNA (Homo sapiens) CpG-island No: 39688
cgaacgccaccccgctctataatacccgcaaaaacccgacgaccaaaaacccgaccgtcaacgaacgcgattacgaataaataacgacgacaaaattaaccgaaccacgcgccgatcaccgaaaaacaacgactccaaccccttccgcaaaccaaaacccgccacctaaaaccgccgcccaatcccctttaaacctaaaaccgtcctccgccgccccgacaccgcccgcgcgaactcgctataaaacccgcgacgcaaaaaacgaaatactcgcgcgacgctacgtccgaaaaacgataaacgccaacattcgcgcgttccgcaaacgcgaacgaactcccttccaaccgcaatcgaacgactccgaaatcgtcgaaccgaacccgaatatataacaaaacgaccgcgaacctactaaccttaaaaaaacaaaaaaatacctatcgcgaccgacgacctccccgccaaaccgaacgatccccgcgcacgacgcgcctacgcgaaaaacccccgacccgaaactaacgtaaaaaccgcaaacgcccgacctaataaataaaaaaaaaaaccgaaaataaacgcgataaacgaaaacgaatacgaacgcctacgacatccccgtcgcacccgtacctcgaaaaaaacttcgaaccgctcaaaactcgaaaactcgcgcaatataaccgaaaacccctccctaccttctctaaacaactcaacctatatttctataaccaaaaaattacaa

SEQ ID NO: 39689 - DNA, 654 bp, Artificial Sequence
  chemically treated genomic DNA (Homo sapiens) CpG-island No: 39689
gtcgttcgtgttttgtagcgttttttttcgcgttttcgcggtggggttatagcgatatttagtggttgaatgtattttaaatattcggtttgttgagggcgtgagtcggagcgttgttttttaggatttagtttttattcgtttttgcgtttcggcggggacggggagtcgggtcgagttagagtgaatatatattttttgcgcgtgtaattgagtcgagcggtagggttggttttattcgataggttaacgttttcgttttagttttcggttatatttgttttaaggaggggtggagtttcggcgtggattttcgttttttgtgtttcgtttttttataacggcgttcgtttattgcgtttgcgtatgttatacgcgtattcgcgtggttttcgcgaaggtgtcgttgttaagaaacgtgttttgcgcgttacgtcgtttgtttttagggtaacgtcggcgttttttagtaatcgcgcgcggtttaggtgggttttttcggtatttttagatttgttatggcgatcgcgagttttagcgtttttttatttatggttaacgggtaggtggagagcgtttaggtgagcggtcgtggatttcgttagggttcgttttttagcgtttttcggggtttttttcgtaatttttcgggtt

SEQ ID NO: 39690 - DNA, 654 bp, Artificial Sequence
  chemically treated genomic DNA (Homo sapiens) CpG-island No: 39690
aacccgaaaaattacgaaaaaaaccccgaaaaacgctaaaaaacgaaccctaacgaaatccacgaccgctcacctaaacgctctccacctacccgttaaccataaataaaaaaacgctaaaactcgcgatcgccataacaaatctaaaaataccgaaaaaacccacctaaaccgcgcgcgattactaaaaaacgccgacgttaccctaaaaacaaacgacgtaacgcgcaaaacacgtttcttaacaacgacaccttcgcgaaaaccacgcgaatacgcgtataacatacgcaaacgcaataaacgaacgccgttataaaaaaacgaaacacaaaaaacgaaaatccacgccgaaactccacccctccttaaaacaaatataaccgaaaactaaaacgaaaacgttaacctatcgaataaaaccaaccctaccgctcgactcaattacacgcgcaaaaaatatatattcactctaactcgacccgactccccgtccccgccgaaacgcaaaaacgaataaaaactaaatcctaaaaaacaacgctccgactcacgccctcaacaaaccgaatatttaaaatacattcaaccactaaatatcgctataaccccaccgcgaaaacgcgaaaaaaaacgctacaaaacacgaacgac

SEQ ID NO: 39691 - DNA, 654 bp, Artificial Sequence
  chemically treated genomic DNA (Homo sapiens) CpG-island No: 39691
agttcggggggttgcgggaagggtttcgggggacgttggggggcgggttttggcggggtttacggtcgtttatttgggcgttttttatttgttcgttgattatgagtagaaagacgttaggattcgcggtcgttatggtaggtttgggggtgtcggggggatttatttaggtcgcgcgcggttgttaagagacgtcggcgttgttttagaaatagacggcgtagcgcgtaggatacgttttttggtagcgatattttcgcgaaggttacgcgagtgcgcgtgtggtatgcgtaggcgtagtgaacgggcgtcgttataagggggcggggtataaggggcggggatttacgtcgaggttttatttttttttagggtaggtatgatcgagagttggggcgggagcgttgatttgtcgggtaaagttagttttatcgttcgatttagttgtacgcgtagggagtgtgtgtttattttgattcggttcggtttttcgttttcgtcgaagcgtagaggcgaatgagagttgagttttggggagtagcgtttcgatttacgtttttagtaagtcgagtgtttaaaatatatttagttattagatgtcgttgtggttttatcgcgaggacgcggagggaggcgttgtagagtacgggcgat

SEQ ID NO: 39692 - DNA, 654 bp, Artificial Sequence
  chemically treated genomic DNA (Homo sapiens) CpG-island No: 39692
atcgcccgtactctacaacgcctccctccgcgtcctcgcgataaaaccacaacgacatctaataactaaatatattttaaacactcgacttactaaaaacgtaaatcgaaacgctactccccaaaactcaactctcattcgcctctacgcttcgacgaaaacgaaaaaccgaaccgaatcaaaataaacacacactccctacgcgtacaactaaatcgaacgataaaactaactttacccgacaaatcaacgctcccgccccaactctcgatcatacctaccctaaaaaaaaataaaacctcgacgtaaatccccgccccttataccccgcccccttataacgacgcccgttcactacgcctacgcataccacacgcgcactcgcgtaaccttcgcgaaaatatcgctaccaaaaaacgtatcctacgcgctacgccgtctatttctaaaacaacgccgacgtctcttaacaaccgcgcgcgacctaaataaatccccccgacacccccaaacctaccataacgaccgcgaatcctaacgtctttctactcataatcaacgaacaaataaaaaacgcccaaataaacgaccgtaaaccccgccaaaacccgccccccaacgtcccccgaaacccttcccgcaaccccccgaact

SEQ ID NO: 39693 - DNA, 782 bp, Artificial Sequence
  chemically treated genomic DNA (Homo sapiens) CpG-island No: 39693
ttttcgcgttttaaatttttcggggttttcgattaggttcggtttcgtttcgttttttcggttttcgcgtagcggttgcgttcgggcgggaaggggcgaaggaggaagggagaggtaggtaggagagttttcgtttgggagcgggacggaggtcgcgggtcgaggttcggggttgtagggtcgtcgcgggacggagggcggtcggggcgggggtgcgcggtagcgtcggtttttagtcggtagggcgggcgggcggtcgtagtgttttattatgttggtgttttttaggtttttttttttttttttcggtttcgtagcgaatggacggcggcggcggcggcggttttttttacgggtttgttcggttttcgtttatgcgtagtgcggggcggttcggcgcggttcgaggaggtagtttcggatttcggggaggcggagggacggaggtaggcggagggcgtttcgcgcggggtttttttcgggcgcgggggtttttcggggagtgggcgggggcggggggcgcggcgggggaggggcgggcgacgtaagtttttcgcgcgtcgatatttttttgtcgcgtcgggcggtttttggtgggggcgtcgggggatattttattttcgttttttacgcggtttttttcggacgattacggtcgggtttacgtaggttggaagcgggtacgagcggcggcggataagttgagtagttgggggcggttgaaacggatggttgaggagttttatttattttagattttttttttttattagtattaaaaa

SEQ ID NO: 39694 - DNA, 782 bp, Artificial Sequence
  chemically treated genomic DNA (Homo sapiens) CpG-island No: 39694
tttttaatactaataaaaaaaaaaaatctaaaataaataaaactcctcaaccatccgtttcaaccgcccccaactactcaacttatccgccgccgctcgtacccgcttccaacctacgtaaacccgaccgtaatcgtccgaaaaaaaccgcgtaaaaaacgaaaataaaatatcccccgacgcccccaccaaaaaccgcccgacgcgacaaaaaaatatcgacgcgcgaaaaacttacgtcgcccgcccctcccccgccgcgccccccgcccccgcccactccccgaaaaacccccgcgcccgaaaaaaaccccgcgcgaaacgccctccgcctacctccgtccctccgcctccccgaaatccgaaactacctcctcgaaccgcgccgaaccgccccgcactacgcataaacgaaaaccgaacaaacccgtaaaaaaaaccgccgccgccgccgccgtccattcgctacgaaaccgaaaaaaaaaaaaaaaaacctaaaaaacaccaacataataaaacactacgaccgcccgcccgccctaccgactaaaaaccgacgctaccgcgcacccccgccccgaccgccctccgtcccgcgacgaccctacaaccccgaacctcgacccgcgacctccgtcccgctcccaaacgaaaactctcctacctacctctcccttcctccttcgccccttcccgcccgaacgcaaccgctacgcgaaaaccgaaaaaacgaaacgaaaccgaacctaatcgaaaaccccgaaaaatttaaaacgcgaaaa

SEQ ID NO: 39695 - DNA, 782 bp, Artificial Sequence
  chemically treated genomic DNA (Homo sapiens) CpG-island No: 39695
tttttgatattgatggggaggggaggtttgggatggatgaagttttttaattattcgttttagtcgtttttagttgtttaatttattcgtcgtcgttcgtgttcgtttttagtttgcgtagattcggtcgtggtcgttcggaaggaatcgcgtaggaaacggaggtggggtgtttttcggcgtttttattagagatcgttcggcgcggtaggaggatgtcggcgcgcggagggtttgcgtcgttcgtttttttttcgtcgcgtttttcgttttcgtttatttttcgggggattttcgcgttcgggggaagtttcgcgcggggcgtttttcgtttgttttcgttttttcgttttttcgaggttcggggttgttttttcgggtcgcgtcgggtcgtttcgtattgcgtatgagcgggagtcgggtaagttcgtgagaggagtcgtcgtcgtcgtcgtcgtttattcgttgcggagtcggaggaggaggggagaggtttggaggatattaatatggtgaggtattgcggtcgttcgttcgttttgtcggttgggggtcggcgttgtcgcgtattttcgtttcggtcgtttttcgtttcgcggcgattttgtagtttcgagtttcggttcgcggttttcgtttcgtttttaggcgggggtttttttgtttgtttttttttttttttttcgttttttttcgttcgggcgtagtcgttacgcgagagtcgaggaggcggagcggagtcgggtttagtcgggagtttcggggagtttggggcgcgggga

SEQ ID NO: 39696 - DNA, 782 bp, Artificial Sequence
  chemically treated genomic DNA (Homo sapiens) CpG-island No: 39696
tccccgcgccccaaactccccgaaactcccgactaaacccgactccgctccgcctcctcgactctcgcgtaacgactacgcccgaacgaaaaaaaacgaaaaaaaaaaaaaaaaacaaacaaaaaaacccccgcctaaaaacgaaacgaaaaccgcgaaccgaaactcgaaactacaaaatcgccgcgaaacgaaaaacgaccgaaacgaaaatacgcgacaacgccgacccccaaccgacaaaacgaacgaacgaccgcaatacctcaccatattaatatcctccaaacctctcccctcctcctccgactccgcaacgaataaacgacgacgacgacgacgactcctctcacgaacttacccgactcccgctcatacgcaatacgaaacgacccgacgcgacccgaaaaaacaaccccgaacctcgaaaaaacgaaaaaacgaaaacaaacgaaaaacgccccgcgcgaaacttcccccgaacgcgaaaatcccccgaaaaataaacgaaaacgaaaaacgcgacgaaaaaaaaacgaacgacgcaaaccctccgcgcgccgacatcctcctaccgcgccgaacgatctctaataaaaacgccgaaaaacaccccacctccgtttcctacgcgattccttccgaacgaccacgaccgaatctacgcaaactaaaaacgaacacgaacgacgacgaataaattaaacaactaaaaacgactaaaacgaataattaaaaaacttcatccatcccaaacctcccctccccatcaatatcaaaaa

SEQ ID NO: 39697 - DNA, 614 bp, Artificial Sequence
  chemically treated genomic DNA (Homo sapiens) CpG-island No: 39697
ttcgtagttattagagacggaaattgtgaggttgtaggaagggatgcgttcgcggtttaaggcgttggttattttgattaggtttaggttcggtattttgttgttttgtattttaaagtggcgttgtttattgttttcgagaatttgtacggagatgttttcgttggtcgcgggagaatttgcgttcgttacggtgagtagagttattacggtgtttatttgagtatttttatttatcgaggcgtagcgcgaggtggtcgggaagtagcggaattttattatcgggttattgttatttacgtttagtagttgaattagcgtttcggcgcgtttagtgagggaaggtacgtttttgtttatcgtttgtatcgtaagcgagtattggcgtcgagtttcgaagtttaggggttttcgtatcgtgataagtttcgttttagggtttatttggaagggggttttttcgttttgtaggcgatagcggatgttcgcgttggtgttttcgttcgcgttcgtcgtcgttatttggaggacgttggaatttataatcgcgtttttaggtattttcgtttggtagtgagaattgttaaaaatcggggggttgttattaatgtttt

SEQ ID NO: 39698 - DNA, 614 bp, Artificial Sequence
  chemically treated genomic DNA (Homo sapiens) CpG-island No: 39698
aaaacattaataacaaccccccgatttttaacaattctcactaccaaacgaaaatacctaaaaacgcgattataaattccaacgtcctccaaataacgacgacgaacgcgaacgaaaacaccaacgcgaacatccgctatcgcctacaaaacgaaaaaacccccttccaaataaaccctaaaacgaaacttatcacgatacgaaaacccctaaacttcgaaactcgacgccaatactcgcttacgatacaaacgataaacaaaaacgtaccttccctcactaaacgcgccgaaacgctaattcaactactaaacgtaaataacaataacccgataataaaattccgctacttcccgaccacctcgcgctacgcctcgataaataaaaatactcaaataaacaccgtaataactctactcaccgtaacgaacgcaaattctcccgcgaccaacgaaaacatctccgtacaaattctcgaaaacaataaacaacgccactttaaaatacaaaacaacaaaataccgaacctaaacctaatcaaaataaccaacgccttaaaccgcgaacgcatcccttcctacaacctcacaatttccgtctctaataactacgaa

SEQ ID NO: 39699 - DNA, 614 bp, Artificial Sequence
  chemically treated genomic DNA (Homo sapiens) CpG-island No: 39699
aagatattaatgataatttttcggtttttggtagtttttattattaggcgggggtgtttgaggacgcggttgtgggttttagcgttttttaggtggcggcggcggacgcggacgagggtattaacgcggatattcgttatcgtttgtaggacgaggggatttttttttaaatggattttgagacgggatttattacggtgcgggagtttttggatttcgaagttcggcgttaatattcgtttacggtgtaggcgatggatagaggcgtgtttttttttattgggcgcgtcgaggcgttgatttagttgttggacgtgaatgataatgattcggtagtgaagtttcgttatttttcggttatttcgcgttacgtttcggtagatgagaatgtttaagtgggtatcgtggtggttttgtttatcgtgacggacgtagattttttcgcggttaacgggaatattttcgtgtaaattttcgggggtaatgagtagcgttattttgaagtgtaaagtagtaaagtgtcgaatttgagtttaattaaggtggttagcgttttggatcgcgagcgtatttttttttataattttatagttttcgtttttgataattacggg

SEQ ID NO: 39700 - DNA, 614 bp, Artificial Sequence
  chemically treated genomic DNA (Homo sapiens) CpG-island No: 39700
cccgtaattatcaaaaacgaaaactataaaattataaaaaaaaatacgctcgcgatccaaaacgctaaccaccttaattaaactcaaattcgacactttactactttacacttcaaaataacgctactcattacccccgaaaatttacacgaaaatattcccgttaaccgcgaaaaaatctacgtccgtcacgataaacaaaaccaccacgatacccacttaaacattctcatctaccgaaacgtaacgcgaaataaccgaaaaataacgaaacttcactaccgaatcattatcattcacgtccaacaactaaatcaacgcctcgacgcgcccaataaaaaaaaacacgcctctatccatcgcctacaccgtaaacgaatattaacgccgaacttcgaaatccaaaaactcccgcaccgtaataaatcccgtctcaaaatccatttaaaaaaaaatcccctcgtcctacaaacgataacgaatatccgcgttaataccctcgtccgcgtccgccgccgccacctaaaaaacgctaaaacccacaaccgcgtcctcaaacacccccgcctaataataaaaactaccaaaaaccgaaaaattatcattaatatctt

SEQ ID NO: 39701 - DNA, 509 bp, Artificial Sequence
  chemically treated genomic DNA (Homo sapiens) CpG-island No: 39701
gggggcgggtaaggggatagcggaaagggtgggcgagggattcgtgttttaattcgtcgagtcgtagttttgtttttgcgagttttcgtcgagatcgtttttcgggaagtcgcgttttttttttgtagtcgcggttcggcgtggggtacggaggggttcgcgtttttagaagtcggtaggttttttcgcgggcgggttcgtagcgcgtttcgtttcggaaatacgtttatggtcgttttggcgcgtttttaaacgtttaggttttttatttttcggttgtttgggaattttttttttgttcgttaagttcgtagttattcgggcgcggcgggatttttagattcggcgttgcgatgaagaggattcgcgacgaggtggatgcgacgttgtagatcgttaagttgaatgcggtcgagttgttgtcggcggtgtattgtttgggtttcggttttggggttagcggcgttgtagtcggcgatttttgtttgttggagttggagtttacgttg

SEQ ID NO: 39702 - DNA, 509 bp, Artificial Sequence
  chemically treated genomic DNA (Homo sapiens) CpG-island No: 39702
caacgtaaactccaactccaacaaacaaaaatcgccgactacaacgccgctaaccccaaaaccgaaacccaaacaatacaccgccgacaacaactcgaccgcattcaacttaacgatctacaacgtcgcatccacctcgtcgcgaatcctcttcatcgcaacgccgaatctaaaaatcccgccgcgcccgaataactacgaacttaacgaacaaaaaaaaaattcccaaacaaccgaaaaataaaaaacctaaacgtttaaaaacgcgccaaaacgaccataaacgtatttccgaaacgaaacgcgctacgaacccgcccgcgaaaaaacctaccgacttctaaaaacgcgaacccctccgtaccccacgccgaaccgcgactacaaaaaaaaaacgcgacttcccgaaaaacgatctcgacgaaaactcgcaaaaacaaaactacgactcgacgaattaaaacacgaatccctcgcccaccctttccgctatccccttacccgccccc

SEQ ID NO: 39703 - DNA, 509 bp, Artificial Sequence
  chemically treated genomic DNA (Homo sapiens) CpG-island No: 39703
tagcgtgggttttagttttagtaggtagaagtcgtcggttgtagcgtcgttggttttagggtcgaagtttaggtagtgtatcgtcggtagtagttcggtcgtatttagtttggcgatttgtagcgtcgtatttatttcgtcgcgggttttttttatcgtagcgtcgggtttaggagtttcgtcgcgttcgggtggttgcgggtttggcgggtaagaaagaagtttttaagtagtcggaaggtaggaaatttgagcgtttgaaagcgcgttaaggcggttatgggcgtgttttcggggcggagcgcgttgcgggttcgttcgcgggaaggtttgtcggtttttgggagcgcgagttttttcgtgttttacgtcggatcgcgattgtaggaaggaaacgcggtttttcggggggcggtttcggcggaagttcgtaggggtagagttgcgattcggcgggttgggatacggatttttcgtttatttttttcgttgtttttttgttcgttttt

SEQ ID NO: 39704 - DNA, 509 bp, Artificial Sequence
  chemically treated genomic DNA (Homo sapiens) CpG-island No: 39704
aaaaacgaacaaaaaaacaacgaaaaaaataaacgaaaaatccgtatcccaacccgccgaatcgcaactctacccctacgaacttccgccgaaaccgccccccgaaaaaccgcgtttccttcctacaatcgcgatccgacgtaaaacacgaaaaaactcgcgctcccaaaaaccgacaaaccttcccgcgaacgaacccgcaacgcgctccgccccgaaaacacgcccataaccgccttaacgcgctttcaaacgctcaaatttcctaccttccgactacttaaaaacttctttcttacccgccaaacccgcaaccacccgaacgcgacgaaactcctaaacccgacgctacgataaaaaaaacccgcgacgaaataaatacgacgctacaaatcgccaaactaaatacgaccgaactactaccgacgatacactacctaaacttcgaccctaaaaccaacgacgctacaaccgacgacttctacctactaaaactaaaacccacgcta

SEQ ID NO: 39705 - DNA, 747 bp, Artificial Sequence
  chemically treated genomic DNA (Homo sapiens) CpG-island No: 39705
tatcgtttttttttagttttttatttttataaacgattttttaggttttttggtttatgcgtatcgtttatttacggaacgtcgaatttggtcgggttcggttgttgttgcggtgttaggtgagtttaggtcgtcgttatcgttttttaagcgtattagtcgcgtttcgtttcgcgttatacgtagttcgcgttttcgcgtattatacgtaatcgttcggcgtcgtacgattgggtaatggcgtgttagtttattggttgagtcggattaaattcgagtaaggacgtttgttttttggtaacggttaaacgtaagggcggggtcgtcgacggttattcgagggaggagtatcgtttttttttttggtttcgttttttcgtacgtaaatttcgttttttagaaggatttcggcgtgttataggcgaaggtttttgggaaggtggaggtcggtagggcggaggcggagttcgggaaggaaaggtggaattagagggtagaaggcgggatttaaggagaggcgatttttataggtagggaaagattagacgggcggggtttgggagagatggagtcggaagaaagacgagcgagaaaggggtggggttatggattttaggagacgtttggagtggaagagtgggtgtggaggggcgaggttattacgaaaagagaggaggaattagtaggtgggtcgggtttgcggaaaagtggagttttagagagggttgattgcgggtattttagttt

SEQ ID NO: 39706 - DNA, 747 bp, Artificial Sequence
  chemically treated genomic DNA (Homo sapiens) CpG-island No: 39706
aaactaaaatacccgcaatcaaccctctctaaaactccacttttccgcaaacccgacccacctactaattcctcctctcttttcgtaataacctcgcccctccacacccactcttccactccaaacgtctcctaaaatccataaccccacccctttctcgctcgtctttcttccgactccatctctcccaaaccccgcccgtctaatctttccctacctataaaaatcgcctctccttaaatcccgccttctaccctctaattccacctttccttcccgaactccgcctccgccctaccgacctccaccttcccaaaaaccttcgcctataacacgccgaaatccttctaaaaaacgaaatttacgtacgaaaaaacgaaaccaaaaaaaaaaacgatactcctccctcgaataaccgtcgacgaccccgcccttacgtttaaccgttaccaaaaaacaaacgtccttactcgaatttaatccgactcaaccaataaactaacacgccattacccaatcgtacgacgccgaacgattacgtataatacgcgaaaacgcgaactacgtataacgcgaaacgaaacgcgactaatacgcttaaaaaacgataacgacgacctaaactcacctaacaccgcaacaacaaccgaacccgaccaaattcgacgttccgtaaataaacgatacgcataaaccaaaaaacctaaaaaatcgtttataaaaataaaaaactaaaaaaaaacgata

SEQ ID NO: 39707 - DNA, 747 bp, Artificial Sequence
  chemically treated genomic DNA (Homo sapiens) CpG-island No: 39707
gaattagagtgttcgtagttagttttttttagggttttattttttcgtaggttcggtttatttattgatttttttttttttttcgtgatagtttcgtttttttatatttatttttttattttaagcgttttttggaatttatggttttatttttttttcgttcgtttttttttcggttttattttttttaagtttcgttcgtttgatttttttttgtttgtaaaaatcgtttttttttaggtttcgttttttgttttttggttttatttttttttttcgggtttcgttttcgttttgtcggtttttatttttttagaggttttcgtttatgatacgtcggagtttttttgaggggcggggtttacgtacgaagggacggaattaagaggagaggcggtgtttttttttcggatagtcgtcggcgatttcgtttttgcgtttagtcgttgttaggaaataagcgtttttgttcgggtttggttcggtttagttaatgagttggtacgttattgtttagtcgtgcgacgtcgggcggttgcgtgtggtgcgcgggggcgcgggttgcgtgtggcgcggggcggggcgcggttggtgcgtttgagaagcgatggcggcggtttgaatttatttaatatcgtagtaataatcgggttcggttaggttcggcgtttcgtgagtgaacggtacgtatgggttagagggtttggagagtcgtttgtggggatgagagattgggaaaagacggtg

SEQ ID NO: 39708 - DNA, 747 bp, Artificial Sequence
  chemically treated genomic DNA (Homo sapiens) CpG-island No: 39708
caccgtcttttcccaatctctcatccccacaaacgactctccaaaccctctaacccatacgtaccgttcactcacgaaacgccgaacctaaccgaacccgattattactacgatattaaataaattcaaaccgccgccatcgcttctcaaacgcaccaaccgcgccccgccccgcgccacacgcaacccgcgcccccgcgcaccacacgcaaccgcccgacgtcgcacgactaaacaataacgtaccaactcattaactaaaccgaaccaaacccgaacaaaaacgcttatttcctaacaacgactaaacgcaaaaacgaaatcgccgacgactatccgaaaaaaaaacaccgcctctcctcttaattccgtcccttcgtacgtaaaccccgcccctcaaaaaaactccgacgtatcataaacgaaaacctctaaaaaaataaaaaccgacaaaacgaaaacgaaacccgaaaaaaaaaaataaaaccaaaaaacaaaaaacgaaacctaaaaaaaaacgatttttacaaacaaaaaaaaatcaaacgaacgaaacttaaaaaaaataaaaccgaaaaaaaaacgaacgaaaaaaaaataaaaccataaattccaaaaaacgcttaaaataaaaaaataaatataaaaaaacgaaactatcacgaaaaaaaaaaaaaaatcaataaataaaccgaacctacgaaaaaataaaaccctaaaaaaaactaactacgaacactctaattc

SEQ ID NO: 39709 - DNA, 576 bp, Artificial Sequence
  chemically treated genomic DNA (Homo sapiens) CpG-island No: 39709
aggggggcgaggagaggtcgttttttgttgtcgttgtttaggttggagttgttgttttttacgtcggcgttgggtttggtcgcgtagttgtgtcgggataggttcgtggatatcgtttcgtcgtcgttattcgatacggcgggcgttattaatataggtcgtatcgggttttcgaggtcgttcgagtcggcggtttgggttatttcgtcggatattagcgttgtcgtcgaaatcgttacggaaggcggcgacggggaagaggataaagacgaggaggcggaagttatcgaggaggtcgtcgaggattcggggtttgttttagcggagttcgattcggtttggcggttattagatatcgtgatttttttttttttagtcgggcgttcggaggagagggatcgcgatttcgatttttcgtcgttttttttttttttagttttagtgtattttgaggacgttcgtcgagtcggaggtggggttgaggaataataaagttgcgtttttttttaaggtagttatataatagcgttttacgggagggggcggaggaaattaaaaaagcggagtagaaggtat

SEQ ID NO: 39710 - DNA, 576 bp, Artificial Sequence
  chemically treated genomic DNA (Homo sapiens) CpG-island No: 39710
ataccttctactccgcttttttaatttcctccgccccctcccgtaaaacgctattatataactaccttaaaaaaaaacgcaactttattattcctcaaccccacctccgactcgacgaacgtcctcaaaatacactaaaactaaaaaaaaaaaaaacgacgaaaaatcgaaatcgcgatccctctcctccgaacgcccgactaaaaaaaaaaaaatcacgatatctaataaccgccaaaccgaatcgaactccgctaaaacaaaccccgaatcctcgacgacctcctcgataacttccgcctcctcgtctttatcctcttccccgtcgccgccttccgtaacgatttcgacgacaacgctaatatccgacgaaataacccaaaccgccgactcgaacgacctcgaaaacccgatacgacctatattaataacgcccgccgtatcgaataacgacgacgaaacgatatccacgaacctatcccgacacaactacgcgaccaaacccaacgccgacgtaaaaaacaacaactccaacctaaacaacgacaacaaaaaacgacctctcctcgcccccct

SEQ ID NO: 39711 - DNA, 576 bp, Artificial Sequence
  chemically treated genomic DNA (Homo sapiens) CpG-island No: 39711
gtgttttttatttcgtttttttagtttttttcgttttttttcgtgggacgttgttgtgtggttgttttaaaaaaaaacgtaattttattgttttttagttttattttcggttcggcgggcgtttttaggatgtattgaggttgaggggaggggaggcggcggagggtcgaggtcgcggtttttttttttcgagcgttcggttggaggggagggagttacgatgtttggtagtcgttaggtcgggtcgggtttcgttgggataagtttcgggttttcggcggttttttcggtgattttcgttttttcgtttttattttttttttcgtcgtcgtttttcgtggcggtttcggcggtagcgttggtgttcggcggggtggtttaggtcgtcggttcgggcggtttcgggggttcggtgcggtttgtgttggtggcgttcgtcgtatcgggtagcggcggcggggcggtgtttacgggtttgtttcggtatagttgcgcggttaggtttagcgtcggcgtaggaggtagtagttttagtttaggtagcggtagtaggaagcgattttttttcgttttttt

SEQ ID NO: 39712 - DNA, 576 bp, Artificial Sequence
  chemically treated genomic DNA (Homo sapiens) CpG-island No: 39712
aaaaaaacgaaaaaaaatcgcttcctactaccgctacctaaactaaaactactacctcctacgccgacgctaaacctaaccgcgcaactataccgaaacaaacccgtaaacaccgccccgccgccgctacccgatacgacgaacgccaccaacacaaaccgcaccgaacccccgaaaccgcccgaaccgacgacctaaaccaccccgccgaacaccaacgctaccgccgaaaccgccacgaaaaacgacgacgaaaaaaaaaataaaaacgaaaaaacgaaaatcaccgaaaaaaccgccgaaaacccgaaacttatcccaacgaaacccgacccgacctaacgactaccaaacatcgtaactccctcccctccaaccgaacgctcgaaaaaaaaaaaccgcgacctcgaccctccgccgcctcccctcccctcaacctcaatacatcctaaaaacgcccgccgaaccgaaaataaaactaaaaaacaataaaattacgtttttttttaaaacaaccacacaacaacgtcccacgaaaaaaaacgaaaaaaactaaaaaaacgaaataaaaaacac

SEQ ID NO: 39713 - DNA, 649 bp, Artificial Sequence
  chemically treated genomic DNA (Homo sapiens) CpG-island No: 39713
ggcgggcggttgtttcggtttaggggtggaggtcggggttttgattcgacgtagttaggcggaagcgcggttgttattggaggttgtttttatttgcgcggggttcggggcgtaaagttcgaggcgtcggggggaggaggcggcggacggtagcgtaggtgggttcgcgttttcggttttgtaagatgtttttgaagttgcgggggaagaagaaggttaagtttaaggagatcgtcgggttggtggagggcgagtcgacgggcgcgggcggcgggagttttttagcgtttcgggttttcgtacgtaggttggttttttacgcgtagttggcgtacggtagtgttacgggtcgagtggagggtttttttagtatttaggagttttacgtttagatcgcgggcgcgtttgaaatttcgtcgtcggaggtaaggcgttaggtgtttaggttttttcgttttttcgtcgcgtcgcgtcgcgtcgcgcgtatttttgtgggtttaggagggttgagcggcgtttttcggagcgcgaaattcgatgtcgtgttgagttcgtcgggggcgtttcgggggaaagtgagtgtgttttttttggaagggaaaatttaatttggtaggatcgtagaaagttatagttttttttgtttcga

SEQ ID NO: 39714 - DNA, 649 bp, Artificial Sequence
  chemically treated genomic DNA (Homo sapiens) CpG-island No: 39714
tcgaaacaaaaaaaactataactttctacgatcctaccaaattaaattttcccttccaaaaaaaacacactcactttcccccgaaacgcccccgacgaactcaacacgacatcgaatttcgcgctccgaaaaacgccgctcaaccctcctaaacccacaaaaatacgcgcgacgcgacgcgacgcgacgaaaaaacgaaaaaacctaaacacctaacgccttacctccgacgacgaaatttcaaacgcgcccgcgatctaaacgtaaaactcctaaatactaaaaaaaccctccactcgacccgtaacactaccgtacgccaactacgcgtaaaaaaccaacctacgtacgaaaacccgaaacgctaaaaaactcccgccgcccgcgcccgtcgactcgccctccaccaacccgacgatctccttaaacttaaccttcttcttcccccgcaacttcaaaaacatcttacaaaaccgaaaacgcgaacccacctacgctaccgtccgccgcctcctccccccgacgcctcgaactttacgccccgaaccccgcgcaaataaaaacaacctccaataacaaccgcgcttccgcctaactacgtcgaatcaaaaccccgacctccacccctaaaccgaaacaaccgcccgcc

SEQ ID NO: 39715 - DNA, 649 bp, Artificial Sequence
  chemically treated genomic DNA (Homo sapiens) CpG-island No: 39715
tcggagtaagggggattgtgattttttgcggttttgttaagttaaatttttttttttagggaaggtatatttattttttttcgggacgttttcggcggatttaatacggtatcggatttcgcgtttcgggaaacgtcgtttaatttttttgggtttatagaaatacgcgcggcgcggcgcggcgcggcggagaggcgggagagtttgagtatttggcgttttattttcgacggcgagattttaaacgcgttcgcgatttgggcgtagagtttttggatgttggagaagttttttattcggttcgtggtattatcgtgcgttagttgcgcgtggaagattagtttgcgtgcgggagttcgggacgttgagaggttttcgtcgttcgcgttcgtcggttcgttttttattagttcggcggtttttttggatttggttttttttttttttcgtagttttaggggtattttgtagggtcgagagcgcgggtttatttgcgttgtcgttcgtcgtttttttttttcggcgtttcggattttgcgtttcgggtttcgcgtaggtaaaagtagtttttaatggtagtcgcgttttcgtttggttgcgtcgggttagggtttcgatttttatttttggatcggagtagtcgttcgtt

SEQ ID NO: 39716 - DNA, 649 bp, Artificial Sequence
  chemically treated genomic DNA (Homo sapiens) CpG-island No: 39716
aacgaacgactactccgatccaaaaataaaaatcgaaaccctaacccgacgcaaccaaacgaaaacgcgactaccattaaaaactacttttacctacgcgaaacccgaaacgcaaaatccgaaacgccgaaaaaaaaaaacgacgaacgacaacgcaaataaacccgcgctctcgaccctacaaaatacccctaaaactacgaaaaaaaaaaaaaaccaaatccaaaaaaaccgccgaactaataaaaaacgaaccgacgaacgcgaacgacgaaaacctctcaacgtcccgaactcccgcacgcaaactaatcttccacgcgcaactaacgcacgataataccacgaaccgaataaaaaacttctccaacatccaaaaactctacgcccaaatcgcgaacgcgtttaaaatctcgccgtcgaaaataaaacgccaaatactcaaactctcccgcctctccgccgcgccgcgccgcgccgcgcgtatttctataaacccaaaaaaattaaacgacgtttcccgaaacgcgaaatccgataccgtattaaatccgccgaaaacgtcccgaaaaaaaataaatataccttccctaaaaaaaaaaatttaacttaacaaaaccgcaaaaaatcacaatcccccttactccga

SEQ ID NO: 39717 - DNA, 546 bp, Artificial Sequence
  chemically treated genomic DNA (Homo sapiens) CpG-island No: 39717
tttcgggagtcggtgaggcggttgtaggtttttttttgcggagtcgttggttcggttggcggagatgtgatcgcgggttcggtcggtttgttttaggcgtcgcgttagttttcgtgttcgtgtttttaatttatatcgatggcgggattcggttgcgtttggggcgcggagtcgtcgcgttttttggaggttttcgggcggttgtggtaggtatagagtcgtttgggtagcggttttttcgtttcggtgtatcgggttcgttgttgcggtaattttggttcgtttttcggcgtttttaagtagtttttgtcgttaggaattatcggggttgcggtttttgtcgtcgagtatggttttcgtaaagagagggcggcgttggaatagttgtagggttatagaaatatcggtaattgtcgttgttttttttttttttttgtttaggttatagttcgagtatattttttttttcgttgtttggcgttttatttttttttttttttgcgggagaagcgggtttagttttttttattattttatttaggtttt

SEQ ID NO: 39718 - DNA, 546 bp, Artificial Sequence
  chemically treated genomic DNA (Homo sapiens) CpG-island No: 39718
aaaacctaaataaaataataaaaaaaactaaacccgcttctcccgcaaaaaaaaaaaaaaataaaacgccaaacaacgaaaaaaaaaatatactcgaactataacctaaacaaaaaaaaaaaaaaaacaacgacaattaccgatatttctataaccctacaactattccaacgccgccctctctttacgaaaaccatactcgacgacaaaaaccgcaaccccgataattcctaacgacaaaaactacttaaaaacgccgaaaaacgaaccaaaattaccgcaacaacgaacccgatacaccgaaacgaaaaaaccgctacccaaacgactctatacctaccacaaccgcccgaaaacctccaaaaaacgcgacgactccgcgccccaaacgcaaccgaatcccgccatcgatataaattaaaaacacgaacacgaaaactaacgcgacgcctaaaacaaaccgaccgaacccgcgatcacatctccgccaaccgaaccaacgactccgcaaaaaaaaacctacaaccgcctcaccgactcccgaaa

SEQ ID NO: 39719 - DNA, 546 bp, Artificial Sequence
  chemically treated genomic DNA (Homo sapiens) CpG-island No: 39719
ggggtttggatggggtgataaagagggttaaattcgtttttttcgtagaaggggaggaagatggaacgttagatagcgagaggaagagtgtgttcggattgtgatttgggtaagaagagaaaggagatagcggtaattatcgatgtttttgtgattttgtaattgttttagcgtcgttttttttttgcggaaattatattcggcggtagaggtcgtagtttcggtggtttttggcggtaagaattgtttgagggcgtcggggggcgagttagggttgtcgtagtagcgaattcgatatatcgaggcggaggagtcgttatttagacggttttgtatttgttatagtcgttcgaaggtttttagaaaacgcggcggtttcgcgttttaggcgtagtcggatttcgttatcggtgtgggttaagggtacggatacgggagttgacgcgacgtttgaggtaggtcggtcgggttcgcggttatattttcgttagtcggattagcggtttcgtagggagggatttgtagtcgttttatcgattttcggga

SEQ ID NO: 39720 - DNA, 546 bp, Artificial Sequence
  chemically treated genomic DNA (Homo sapiens) CpG-island No: 39720
tcccgaaaatcgataaaacgactacaaatccctccctacgaaaccgctaatccgactaacgaaaatataaccgcgaacccgaccgacctacctcaaacgtcgcgtcaactcccgtatccgtacccttaacccacaccgataacgaaatccgactacgcctaaaacgcgaaaccgccgcgttttctaaaaaccttcgaacgactataacaaatacaaaaccgtctaaataacgactcctccgcctcgatatatcgaattcgctactacgacaaccctaactcgccccccgacgccctcaaacaattcttaccgccaaaaaccaccgaaactacgacctctaccgccgaatataatttccgcaaaaaaaaaacgacgctaaaacaattacaaaatcacaaaaacatcgataattaccgctatctcctttctcttcttacccaaatcacaatccgaacacactcttcctctcgctatctaacgttccatcttcctccccttctacgaaaaaaacgaatttaaccctctttatcaccccatccaaacccc

SEQ ID NO: 39721 - DNA, 589 bp, Artificial Sequence
  chemically treated genomic DNA (Homo sapiens) CpG-island No: 39721
tcgtttcggcgtttcgggtcgcggtcgttttcgcgttcgcgtcgtcgtttgtgttttcggcgttgacgtgtttgggcggtcggtttttatttttttaggcgtcggtagttattagtcgtggcgagaggggcggggtggtcggggttggcgttttatttggttttcgttttcggttcgtttcgtcgtcgcggtttttcgtatgagggtatatattcggagcgagcgcgggacgtcgatgagtggtcgcgcggaaggagttggagacggtcgtagttgcggtcgcgtcgagaaaggtgaggggtttttagtttagcgaggagacggcggggttcgggattcgggcgggcggagggtttggttttatcgtatatacggttacgcgtttagacgtggatacgcgtcgtacgaacgtgtatagcgcgggtagtcgagtatacgtcgaggagtttttcgttcgttcgtagatatatattttagttcgtgcgtttcgtagtcgtattttatttttcgttatttcgcgagagggtgtgtgggttgggtagtcgggtggatggcggggttagggatggaatgagcgcgttttagatgg

SEQ ID NO: 39722 - DNA, 589 bp, Artificial Sequence
  chemically treated genomic DNA (Homo sapiens) CpG-island No: 39722
ccatctaaaacgcgctcattccatccctaaccccgccatccacccgactacccaacccacacaccctctcgcgaaataacgaaaaataaaatacgactacgaaacgcacgaactaaaatatatatctacgaacgaacgaaaaactcctcgacgtatactcgactacccgcgctatacacgttcgtacgacgcgtatccacgtctaaacgcgtaaccgtatatacgataaaaccaaaccctccgcccgcccgaatcccgaaccccgccgtctcctcgctaaactaaaaacccctcacctttctcgacgcgaccgcaactacgaccgtctccaactccttccgcgcgaccactcatcgacgtcccgcgctcgctccgaatatataccctcatacgaaaaaccgcgacgacgaaacgaaccgaaaacgaaaaccaaataaaacgccaaccccgaccaccccgcccctctcgccacgactaataactaccgacgcctaaaaaaataaaaaccgaccgcccaaacacgtcaacgccgaaaacacaaacgacgacgcgaacgcgaaaacgaccgcgacccgaaacgccgaaacga

SEQ ID NO: 39723 - DNA, 589 bp, Artificial Sequence
  chemically treated genomic DNA (Homo sapiens) CpG-island No: 39723
ttatttggggcgcgtttattttatttttggtttcgttatttattcggttgtttagtttatatattttttcgcggggtggcggaggatggggtgcgattgcggggcgtacgggttggggtgtgtgtttgcgggcgagcgggaggtttttcggcgtgtgttcggttgttcgcgttgtgtacgttcgtgcgacgcgtgtttacgtttgagcgcgtggtcgtgtgtgcggtggggttaggtttttcgttcgttcgggtttcgagtttcgtcgttttttcgttgggttgggagttttttatttttttcggcgcgatcgtagttacgatcgtttttagtttttttcgcgcggttatttatcggcgtttcgcgttcgtttcgaatatatatttttatgcggggggtcgcggcggcggggcgggtcgggagcgggggttaagtggagcgttagtttcggttatttcgtttttttcgttacgattagtggttgtcgacgtttgaaggagtggaagtcgatcgtttagatacgttagcgtcgggagtatagacgacgacgcggacgcggaggcggtcgcggttcggggcgtcggggcgg

SEQ ID NO: 39724 - DNA, 589 bp, Artificial Sequence
  chemically treated genomic DNA (Homo sapiens) CpG-island No: 39724
ccgccccgacgccccgaaccgcgaccgcctccgcgtccgcgtcgtcgtctatactcccgacgctaacgtatctaaacgatcgacttccactccttcaaacgtcgacaaccactaatcgtaacgaaaaaaacgaaataaccgaaactaacgctccacttaacccccgctcccgacccgccccgccgccgcgaccccccgcataaaaatatatattcgaaacgaacgcgaaacgccgataaataaccgcgcgaaaaaaactaaaaacgatcgtaactacgatcgcgccgaaaaaaataaaaaactcccaacccaacgaaaaaacgacgaaactcgaaacccgaacgaacgaaaaacctaaccccaccgcacacacgaccacgcgctcaaacgtaaacacgcgtcgcacgaacgtacacaacgcgaacaaccgaacacacgccgaaaaacctcccgctcgcccgcaaacacacaccccaacccgtacgccccgcaatcgcaccccatcctccgccaccccgcgaaaaaatatataaactaaacaaccgaataaataacgaaaccaaaaataaaataaacgcgccccaaataa

SEQ ID NO: 39725 - DNA, 1085 bp, Artificial Sequence
  chemically treated genomic DNA (Homo sapiens) CpG-island No: 39725
aagacgttcgtttcgtattttttcgggaatgaggtttttgtaggcgagggcggcgttgtttttttttttcgcggtagtgagatttcgagggcgttttagggtaggaggggaggtcgaattattttttgagaagagcgttagagaattttagagcgtttcgttttttttcgggagaggtaaatatcgatacgtttgtgttttttattaataagtgtttttaagttcggcgggggtagatattttcgcgtcggtcgtcggcgaggttttcgcggtttgcgggggttacggtttcgttttagttgcgttgatttagggcgttattcggtttcggggcgggaggcggtttttcgggcggcgaagtagcgttcgcggcgtggggcgatcgcgcggtgggcggaggggtagggggaggggcggagaggcgttttcggggcgtagggggcgggcgtgcgggtatacgcggtgcgcggcgggggcggttatcgtgttgcgtagtttgggcgtttggggagtcgtttatttcgtcgggtcgcgtttcgacggtcggagcgtggatgcggcggcgttcgtcgagtcggggcggacgcggggcggttcgggttcgggagacgcgtcggtagtttcggtatcgtagcggtcgtaggatggtcgaggtaagcgcggcgtttttcgcgggcgcggggattttttgtgcgcggagtaggcggttcgggacgtcgttgggtttcggttttcgtgggtattcgagggttatttttcgagggttagttggttatttgcgcggtagcgcggtttcgaggcgcggcgggagggatcgtggttttcggtcgggaggcggcggcgggggggttggggttttgggattcgtttttgttcgacgtttcggagttggtaaacggttttcgcgtcggatttgcgggcgcgtcggaggtgtcggcgggttagtttgtggaaatcggcggcggtattcggcgggtattttatacgttattttttgtcgttcgtattttaggttttagtttaggacgttaggatttgttgtttttatttgtgggggtcgatttttttttttttttttttttttt

SEQ ID NO: 39726 - DNA, 1085 bp, Artificial Sequence
  chemically treated genomic DNA (Homo sapiens) CpG-island No: 39726
aaaaaaaaaaaaaaaaaaaaaaaatcgacccccacaaataaaaacaacaaatcctaacgtcctaaactaaaacctaaaatacgaacgacaaaaaataacgtataaaatacccgccgaataccgccgccgatttccacaaactaacccgccgacacctccgacgcgcccgcaaatccgacgcgaaaaccgtttaccaactccgaaacgtcgaacaaaaacgaatcccaaaaccccaacccccccgccgccgcctcccgaccgaaaaccacgatccctcccgccgcgcctcgaaaccgcgctaccgcgcaaataaccaactaaccctcgaaaaataaccctcgaatacccacgaaaaccgaaacccaacgacgtcccgaaccgcctactccgcgcacaaaaaatccccgcgcccgcgaaaaacgccgcgcttacctcgaccatcctacgaccgctacgataccgaaactaccgacgcgtctcccgaacccgaaccgccccgcgtccgccccgactcgacgaacgccgccgcatccacgctccgaccgtcgaaacgcgacccgacgaaataaacgactccccaaacgcccaaactacgcaacacgataaccgcccccgccgcgcaccgcgtatacccgcacgcccgccccctacgccccgaaaacgcctctccgcccctccccctacccctccgcccaccgcgcgatcgccccacgccgcgaacgctacttcgccgcccgaaaaaccgcctcccgccccgaaaccgaataacgccctaaatcaacgcaactaaaacgaaaccgtaacccccgcaaaccgcgaaaacctcgccgacgaccgacgcgaaaatatctacccccgccgaacttaaaaacacttattaataaaaaacacaaacgtatcgatatttacctctcccgaaaaaaaacgaaacgctctaaaattctctaacgctcttctcaaaaaataattcgacctcccctcctaccctaaaacgccctcgaaatctcactaccgcgaaaaaaaaaaacaacgccgccctcgcctacaaaaacctcattcccgaaaaaatacgaaacgaacgtctt

SEQ ID NO: 39727 - DNA, 1085 bp, Artificial Sequence
  chemically treated genomic DNA (Homo sapiens) CpG-island No: 39727
aaagaaaaaaaaaaaaagaaggggtcgatttttataggtggaaatagtaagttttaacgttttgggttgaagtttggggtgcgggcggtagagagtggcgtgtagggtattcgtcgagtgtcgtcgtcgatttttataggttggttcgtcggtattttcgacgcgttcgtagattcggcgcggagatcgtttgttagtttcgggacgtcgggtagggacgggttttagagttttaattttttcgtcgtcgtttttcggtcggagattacggtttttttcgtcgcgtttcggggtcgcgttgtcgcgtaggtagttagttggttttcgggaggtggttttcgggtatttacgggagtcggagtttagcggcgtttcgggtcgtttgtttcgcgtatagagaattttcgcgttcgcggagggcgtcgcgtttatttcggttattttgcgatcgttgcggtgtcggggttgtcggcgcgtttttcgggttcgggtcgtttcgcgttcgtttcggttcggcgggcgtcgtcgtatttacgtttcggtcgtcggggcgcgattcggcgaagtgggcggttttttaagcgtttaggttgcgtagtacgatggtcgttttcgtcgcgtatcgcgtgtgttcgtacgttcgttttttgcgtttcggggacgttttttcgtttttttttttgttttttcgtttatcgcgcggtcgttttacgtcgcgggcgttgtttcgtcgttcgggaggtcgtttttcgtttcgggatcggataacgttttaaattagcgtagttgaggcgaggtcgtggttttcgtagatcgcggagatttcgtcggcggtcggcgcggaggtgtttgttttcgtcgggtttgaaggtatttgttggtaaaagatatagacgtgtcggtgtttgtttttttcggggaagggcgaaacgttttgaagttttttggcgttttttttaggagatgattcggtttttttttttattttggggcgttttcggggttttattgtcgcggaggaagaaggtagcgtcgttttcgtttgtagaaattttattttcgagaaagtgcgggacgagcgtttt

SEQ ID NO: 39728 - DNA, 1085 bp, Artificial Sequence
  chemically treated genomic DNA (Homo sapiens) CpG-island No: 39728
aaaacgctcgtcccgcactttctcgaaaataaaatttctacaaacgaaaacgacgctaccttcttcctccgcgacaataaaaccccgaaaacgccccaaaataaaaaaaaaaaccgaatcatctcctaaaaaaaacgccaaaaaacttcaaaacgtttcgcccttccccgaaaaaaacaaacaccgacacgtctatatcttttaccaacaaataccttcaaacccgacgaaaacaaacacctccgcgccgaccgccgacgaaatctccgcgatctacgaaaaccacgacctcgcctcaactacgctaatttaaaacgttatccgatcccgaaacgaaaaacgacctcccgaacgacgaaacaacgcccgcgacgtaaaacgaccgcgcgataaacgaaaaaacaaaaaaaaaaacgaaaaaacgtccccgaaacgcaaaaaacgaacgtacgaacacacgcgatacgcgacgaaaacgaccatcgtactacgcaacctaaacgcttaaaaaaccgcccacttcgccgaatcgcgccccgacgaccgaaacgtaaatacgacgacgcccgccgaaccgaaacgaacgcgaaacgacccgaacccgaaaaacgcgccgacaaccccgacaccgcaacgatcgcaaaataaccgaaataaacgcgacgccctccgcgaacgcgaaaattctctatacgcgaaacaaacgacccgaaacgccgctaaactccgactcccgtaaatacccgaaaaccacctcccgaaaaccaactaactacctacgcgacaacgcgaccccgaaacgcgacgaaaaaaaccgtaatctccgaccgaaaaacgacgacgaaaaaattaaaactctaaaacccgtccctacccgacgtcccgaaactaacaaacgatctccgcgccgaatctacgaacgcgtcgaaaataccgacgaaccaacctataaaaatcgacgacgacactcgacgaataccctacacgccactctctaccgcccgcaccccaaacttcaacccaaaacgttaaaacttactatttccacctataaaaatcgaccccttctttttttttttttcttt

SEQ ID NO: 39729 - DNA, 593 bp, Artificial Sequence
  chemically treated genomic DNA (Homo sapiens) CpG-island No: 39729
tcgtgtgcggggtagatttgattagttttattgcggattttggagtttttgtcgcggtttcgcgcgaggtggttcgttttttagaaagcgttgggacggggttaaggcgtttgggttttgggttggaagtcgggtcgagtcgcgttcgtcgtttcgaggtttttttggagtgataggaagtgggtttgggttgcggagttcgcggttgcgtttgtcgttttttttaggggtttgtatgggaagcgtcgggacgggaagttttcggttttcgatttcgagtttttttaatagtttcgtttagtttggttttgggatttgcgagcgcgtggttcgttcgtttcgggagcgtttcgtcggtttcgtgttgggagtcgggcggcggcggcgaggttgggggtcgcgggcggagaaggaggaggtcgttgcggggtttttcgttgttttttcggagtcgtcgtttagattcggagtttcgttcgttcgtttggttttgtcggagtttttcgggatttgttagttagatgtgataagattgtggcgaggcgagtgaaggagatttgatattaattagcgcgtagtttcgagttaaattt

SEQ ID NO: 39730 - DNA, 593 bp, Artificial Sequence
  chemically treated genomic DNA (Homo sapiens) CpG-island No: 39730
aaatttaactcgaaactacgcgctaattaatatcaaatctccttcactcgcctcgccacaatcttatcacatctaactaacaaatcccgaaaaactccgacaaaaccaaacgaacgaacgaaactccgaatctaaacgacgactccgaaaaaacaacgaaaaaccccgcaacgacctcctccttctccgcccgcgacccccaacctcgccgccgccgcccgactcccaacacgaaaccgacgaaacgctcccgaaacgaacgaaccacgcgctcgcaaatcccaaaaccaaactaaacgaaactattaaaaaaactcgaaatcgaaaaccgaaaacttcccgtcccgacgcttcccatacaaacccctaaaaaaaacgacaaacgcaaccgcgaactccgcaacccaaacccacttcctatcactccaaaaaaacctcgaaacgacgaacgcgactcgacccgacttccaacccaaaacccaaacgccttaaccccgtcccaacgctttctaaaaaacgaaccacctcgcgcgaaaccgcgacaaaaactccaaaatccgcaataaaactaatcaaatctaccccgcacacga

SEQ ID NO: 39731 - DNA, 593 bp, Artificial Sequence
  chemically treated genomic DNA (Homo sapiens) CpG-island No: 39731
aagtttggttcggagttacgcgttgattaatattagattttttttattcgtttcgttataattttgttatatttggttgataaatttcgaggaatttcggtaaagttaggcgggcgggcggggtttcgggtttgggcggcggtttcggaggagtagcgggagatttcgtagcggtttttttttttttcgttcgcggtttttagtttcgtcgtcgtcgttcggtttttagtacggaatcgacggggcgttttcgagacgggcgagttacgcgttcgtaggttttaaggttaggttgggcgggattgttaagggagttcgaagtcgggggtcgggggtttttcgtttcggcgttttttatgtaaatttttgaaggaagcggtaggcgtagtcgcgggtttcgtagtttaggtttattttttgttattttaggaaaatttcggagcggcggacgcggttcggttcggtttttagtttagagtttaagcgttttagtttcgttttagcgttttttgaaagacgggttatttcgcgcggagtcgcgataaggattttagggttcgtagtgaagttggttaaatttgtttcgtatacgg

SEQ ID NO: 39732 - DNA, 593 bp, Artificial Sequence
  chemically treated genomic DNA (Homo sapiens) CpG-island No: 39732
ccgtatacgaaacaaatttaaccaacttcactacgaaccctaaaatccttatcgcgactccgcgcgaaataacccgtctttcaaaaaacgctaaaacgaaactaaaacgcttaaactctaaactaaaaaccgaaccgaaccgcgtccgccgctccgaaattttcctaaaataacaaaaaataaacctaaactacgaaacccgcgactacgcctaccgcttccttcaaaaatttacataaaaaacgccgaaacgaaaaacccccgacccccgacttcgaactcccttaacaatcccgcccaacctaaccttaaaacctacgaacgcgtaactcgcccgtctcgaaaacgccccgtcgattccgtactaaaaaccgaacgacgacgacgaaactaaaaaccgcgaacgaaaaaaaaaaaaaccgctacgaaatctcccgctactcctccgaaaccgccgcccaaacccgaaaccccgcccgcccgcctaactttaccgaaattcctcgaaatttatcaaccaaatataacaaaattataacgaaacgaataaaaaaaatctaatattaatcaacgcgtaactccgaaccaaactt

SEQ ID NO: 39733 - DNA, 596 bp, Artificial Sequence
  chemically treated genomic DNA (Homo sapiens) CpG-island No: 39733
tcgttcgcggtttttgttatttaggcgatattagaagattttagttcggatttcgagtttcggtttcgtcgttcgtttattttcgttttttttttatatttttaatttcgttgtcgggttgagtttggtttcgttttttttttatagtcgttttttcgtcgtcgtcgtagtagtagtcgtcgtcgttatcgagttttttattttcgtcggagttatatggaatagttaagttagttacggcgttcgcggtagtcgggatttgtagttttttaggcggacggcgttttttacgtttattttttttttgatagatcgtttcgcgatcgttttttattttattaagttttgttagagttatcgtttagcgtttagtattttttttttcgtttttttttttcgttattattattattatttttttcgtcgtattttttatattaattttatttacggtagtttaatttttatcgtttcgtcgttattggttaggtttcgcgcgtgtttcgtttatttcggcggtcgggttttatagcggttggggtattttattggtagaattgtttgtttattataggggtttcgttttgtttttgttt

SEQ ID NO: 39734 - DNA, 596 bp, Artificial Sequence
  chemically treated genomic DNA (Homo sapiens) CpG-island No: 39734
aaacaaaaacaaaacgaaacccctataataaacaaacaattctaccaataaaataccccaaccgctataaaacccgaccgccgaaataaacgaaacacgcgcgaaacctaaccaataacgacgaaacgataaaaattaaactaccgtaaataaaattaatataaaaaatacgacgaaaaaaataataataataataacgaaaaaaaaaaacgaaaaaaaaaatactaaacgctaaacgataactctaacaaaacttaataaaataaaaaacgatcgcgaaacgatctatcaaaaaaaaaataaacgtaaaaaacgccgtccgcctaaaaaactacaaatcccgactaccgcgaacgccgtaactaacttaactattccatataactccgacgaaaataaaaaactcgataacgacgacgactactactacgacgacgacgaaaaaacgactataaaaaaaaaacgaaaccaaactcaacccgacaacgaaattaaaaatataaaaaaaaaacgaaaataaacgaacgacgaaaccgaaactcgaaatccgaactaaaatcttctaatatcgcctaaataacaaaaaccgcgaacga

SEQ ID NO: 39735 - DNA, 596 bp, Artificial Sequence
  chemically treated genomic DNA (Homo sapiens) CpG-island No: 39735
gagtaagggtaaggcggagtttttgtgatgggtaggtagttttattaatgaggtgttttagtcgttgtaagattcggtcgtcgaggtgggcggggtacgcgcggggtttggttaatggcggcggggcggtggaggttgagttgtcgtgggtagggttagtgtgagaggtgcggcgggggaggtaatgatgatggtggcggaggagaaaggcgggggagggggtgttgggcgttgagcggtggttttggtagggtttggtagggtgggggacggtcgcggggcgatttgttagggagggggtgggcgtgaggggcgtcgttcgtttgaggggttgtagatttcggttatcgcgagcgtcgtggttggtttggttgttttatgtggtttcggcggggatggaggattcggtggcggcggcggttgttgttgcggcggcgacggaggagcggttatgagaagggaacggggttagatttagttcgatagcgggattagaggtgtgaggagggggcgggagtggacgagcggcggggtcggggttcggggttcgggttggggttttttggtatcgtttgggtgatagggatcgcggacga

SEQ ID NO: 39736 - DNA, 596 bp, Artificial Sequence
  chemically treated genomic DNA (Homo sapiens) CpG-island No: 39736
tcgtccgcgatccctatcacccaaacgataccaaaaaaccccaacccgaaccccgaaccccgaccccgccgctcgtccactcccgccccctcctcacacctctaatcccgctatcgaactaaatctaaccccgttcccttctcataaccgctcctccgtcgccgccgcaacaacaaccgccgccgccaccgaatcctccatccccgccgaaaccacataaaacaaccaaaccaaccacgacgctcgcgataaccgaaatctacaacccctcaaacgaacgacgcccctcacgcccaccccctccctaacaaatcgccccgcgaccgtcccccaccctaccaaaccctaccaaaaccaccgctcaacgcccaacaccccctcccccgcctttctcctccgccaccatcatcattacctcccccgccgcacctctcacactaaccctacccacgacaactcaacctccaccgccccgccgccattaaccaaaccccgcgcgtaccccgcccacctcgacgaccgaatcttacaacgactaaaacacctcattaataaaactacctacccatcacaaaaactccgccttacccttactc

SEQ ID NO: 39737 - DNA, 893 bp, Artificial Sequence
  chemically treated genomic DNA (Homo sapiens) CpG-island No: 39737
gtcgttcgttttttcgttattatttaagtcgtatgcgcgcgtcggggtcgacgggcgttaggttttatcgagttattttcgtcgtggcggtttttcgtgtttttgcggagggaaggtcgtcggtttcgttagggggcgcgcgtcggggtcgcggttttttgaattcggttttacgaggggacgcgttatcggtttcgtggtttgcgtggcgtcgtagtaacgagttggtcgtttcggggcgttgtttagttcgggtttcgttgcgagtttgtgggcgaggcgggaggtgtttttttggttaggcgggtggaggaaggtgtgggcgtcgtattttagcgtcgcggagtttttaggcgcgggtaggcgagattggcgtgtagcgcgacggtttagtttcggcgttttatcgttttttattttcgtaggcgtcgagtcgatttagtcgcgcggttgtagtgatatttagcggtcgtcgcgggaagtgcggtcgtcgcggttaggttttcggggtttttgtttttcgaggtttttatttcggttacgcgcgggtatttcggaggagagcggtcgcgcgttgtagatgttcgcgggggtattttttttgtttttttttcgtttttttttcgtaggcgttcgagcgtcgggagattttgcgtagcggtagtgttcggaagggcggggcggggtgtagtagcggcgttgggttgtgattcgggtagttttatttttggattttgttcgggttgtgataggatagcgcgggggtagcgggggaatacgcgggtacgtcgagattcggcgttcgggatttcgatgaggggaggttttttatttttggggtgttacgcgatttacgtttttttttatgtttatttttattttttatgggtttt

SEQ ID NO: 39738 - DNA, 893 bp, Artificial Sequence
  chemically treated genomic DNA (Homo sapiens) CpG-island No: 39738
aaaacccataaaaaataaaaataaacataaaaaaaaacgtaaatcgcgtaacaccccaaaaataaaaaacctcccctcatcgaaatcccgaacgccgaatctcgacgtacccgcgtattcccccgctacccccgcgctatcctatcacaacccgaacaaaatccaaaaataaaactacccgaatcacaacccaacgccgctactacaccccgccccgcccttccgaacactaccgctacgcaaaatctcccgacgctcgaacgcctacgaaaaaaaaacgaaaaaaaaacaaaaaaaatacccccgcgaacatctacaacgcgcgaccgctctcctccgaaatacccgcgcgtaaccgaaataaaaacctcgaaaaacaaaaaccccgaaaacctaaccgcgacgaccgcacttcccgcgacgaccgctaaatatcactacaaccgcgcgactaaatcgactcgacgcctacgaaaataaaaaacgataaaacgccgaaactaaaccgtcgcgctacacgccaatctcgcctacccgcgcctaaaaactccgcgacgctaaaatacgacgcccacaccttcctccacccgcctaaccaaaaaaacacctcccgcctcgcccacaaactcgcaacgaaacccgaactaaacaacgccccgaaacgaccaactcgttactacgacgccacgcaaaccacgaaaccgataacgcgtcccctcgtaaaaccgaattcaaaaaaccgcgaccccgacgcgcgccccctaacgaaaccgacgaccttccctccgcaaaaacacgaaaaaccgccacgacgaaaataactcgataaaacctaacgcccgtcgaccccgacgcgcgcatacgacttaaataataacgaaaaaacgaacgac

SEQ ID NO: 39739 - DNA, 893 bp, Artificial Sequence
  chemically treated genomic DNA (Homo sapiens) CpG-island No: 39739
ggaatttatggggggtgggagtggatatggaggaaagcgtgggtcgcgtgatattttaggagtgaaaggtttttttttatcggggtttcgagcgtcggatttcggcgtgttcgcgtgttttttcgttgttttcgcgttgttttattatagttcgagtaggatttagaagtgaaattgttcgggttatagtttagcgtcgttgttgtatttcgtttcgttttttcgggtattgtcgttgcgtaggatttttcggcgttcgggcgtttgcggggaggaaacgggggaggggtaggggaagtgttttcgcgggtatttgtagcgcgcggtcgttttttttcggggtgttcgcgcgtaatcggggtgggaatttcgagagataggagtttcggaggtttggtcgcggcgatcgtatttttcgcgacggtcgttgggtgttattgtagtcgcgcggttgaatcggttcggcgtttgcgggagtgggggacggtgggacgtcgggattaggtcgtcgcgttgtacgttagtttcgtttgttcgcgtttggaggtttcgcgacgttgggatgcggcgtttatatttttttttattcgtttggttaaggaagtatttttcgtttcgtttatagattcgtagcgaggttcggattaagtaacgtttcggggcgattagttcgttgttgcggcgttacgtaagttacgaaatcgatggcgcgttttttcgtggggtcgagtttaaagagtcgcgatttcgacgcgcgttttttggcgaagtcggcggtttttttttcgtagaggtacgaggggtcgttacgacgagggtggttcggtggagtttggcgttcgtcggtttcggcgcgcgtatgcgatttgggtggtggcggaagggcgggcggt

SEQ ID NO: 39740 - DNA, 893 bp, Artificial Sequence
  chemically treated genomic DNA (Homo sapiens) CpG-island No: 39740
accgcccgcccttccgccaccacccaaatcgcatacgcgcgccgaaaccgacgaacgccaaactccaccgaaccaccctcgtcgtaacgacccctcgtacctctacgaaaaaaaaaccgccgacttcgccaaaaaacgcgcgtcgaaatcgcgactctttaaactcgaccccacgaaaaaacgcgccatcgatttcgtaacttacgtaacgccgcaacaacgaactaatcgccccgaaacgttacttaatccgaacctcgctacgaatctataaacgaaacgaaaaatacttccttaaccaaacgaataaaaaaaaatataaacgccgcatcccaacgtcgcgaaacctccaaacgcgaacaaacgaaactaacgtacaacgcgacgacctaatcccgacgtcccaccgtcccccactcccgcaaacgccgaaccgattcaaccgcgcgactacaataacacccaacgaccgtcgcgaaaaatacgatcgccgcgaccaaacctccgaaactcctatctctcgaaattcccaccccgattacgcgcgaacaccccgaaaaaaaacgaccgcgcgctacaaatacccgcgaaaacacttcccctacccctcccccgtttcctccccgcaaacgcccgaacgccgaaaaatcctacgcaacgacaatacccgaaaaaacgaaacgaaatacaacaacgacgctaaactataacccgaacaatttcacttctaaatcctactcgaactataataaaacaacgcgaaaacaacgaaaaaacacgcgaacacgccgaaatccgacgctcgaaaccccgataaaaaaaaacctttcactcctaaaatatcacgcgacccacgctttcctccatatccactcccaccccccataaattcc

SEQ ID NO: 39741 - DNA, 607 bp, Artificial Sequence
  chemically treated genomic DNA (Homo sapiens) CpG-island No: 39741
ttatacgcggtttcgcgtttcgttttgatcgaggtagagttcggttttttttgcgtttttatttttaggttagttcggtcggggtagcgttttgggagggcgaagaagtttcgcggggtgtgtcgggtacgttgtcggggtggggtacgggttttttattatttttatttggcgggggtcgagttggttagggggcgcgggtatcgagaattggatttttttgcggtttttggggtttatggcgcgcggggtgggcggtggggttggggtgcgcgattcggggtttcggcggcggtttgtgttgggttttttcgcgtaggcggcgggttgtgcggcgagaggaggaggagggttgttcgcgtacggataaaaatatcgtgttcgtcgaggggagggcgcgggagcgggaggagggtcggcgttcgggttgggcgcgtttttaggttttcgggattcggggttcgtttttcgcgttcgttgagttaggtttgtgtttcgttttttcgcgtttttcggtttgggtgtttttgcgtttcggtgtttttttttttttgagtgtttttgcgtttcggtgtttttttttttttgagtgtttttgcgtgttttt

SEQ ID NO: 39742 - DNA, 607 bp, Artificial Sequence
  chemically treated genomic DNA (Homo sapiens) CpG-island No: 39742
aaaaacacgcaaaaacactcaaaaaaaaaaaaacaccgaaacgcaaaaacactcaaaaaaaaaaaaacaccgaaacgcaaaaacacccaaaccgaaaaacgcgaaaaaacgaaacacaaacctaactcaacgaacgcgaaaaacgaaccccgaatcccgaaaacctaaaaacgcgcccaacccgaacgccgaccctcctcccgctcccgcgccctcccctcgacgaacacgatatttttatccgtacgcgaacaaccctcctcctcctctcgccgcacaacccgccgcctacgcgaaaaaacccaacacaaaccgccgccgaaaccccgaatcgcgcaccccaaccccaccgcccaccccgcgcgccataaaccccaaaaaccgcaaaaaaatccaattctcgatacccgcgccccctaaccaactcgacccccgccaaataaaaataataaaaaacccgtaccccaccccgacaacgtacccgacacaccccgcgaaacttcttcgccctcccaaaacgctaccccgaccgaactaacctaaaaataaaaacgcaaaaaaaaccgaactctacctcgatcaaaacgaaacgcgaaaccgcgtataa

SEQ ID NO: 39743 - DNA, 607 bp, Artificial Sequence
  chemically treated genomic DNA (Homo sapiens) CpG-island No: 39743
ggagatacgtagagatatttaggaggggagagatatcgagacgtagagatatttaggaggggagagatatcgagacgtagagatatttaggtcggggagcgcgagggagcgaggtatagatttggtttagcgagcgcggggggcgagtttcgagtttcgagagtttgggggcgcgtttagttcgggcgtcgatttttttttcgttttcgcgtttttttttcggcgggtacggtatttttattcgtgcgcgaatagtttttttttttttttcgtcgtatagttcgtcgtttgcgcgggggagtttagtatagatcgtcgtcgggatttcgagtcgcgtattttagttttatcgtttatttcgcgcgttatggattttaaggatcgtaagaagatttagttttcggtgttcgcgttttttagttagttcgattttcgttaggtggagatggtaaggggttcgtgttttatttcggtagcgtattcgatatatttcgcggggttttttcgtttttttaaggcgttgtttcggtcggattggtttgggggtgggggcgtaaggagagtcgggttttgtttcggttaggacggggcgcggggtcgcgtgtga

SEQ ID NO: 39744 - DNA, 607 bp, Artificial Sequence
  chemically treated genomic DNA (Homo sapiens) CpG-island No: 39744
tcacacgcgaccccgcgccccgtcctaaccgaaacaaaacccgactctccttacgcccccacccccaaaccaatccgaccgaaacaacgccttaaaaaaacgaaaaaaccccgcgaaatatatcgaatacgctaccgaaataaaacacgaaccccttaccatctccacctaacgaaaatcgaactaactaaaaaacgcgaacaccgaaaactaaatcttcttacgatccttaaaatccataacgcgcgaaataaacgataaaactaaaatacgcgactcgaaatcccgacgacgatctatactaaactcccccgcgcaaacgacgaactatacgacgaaaaaaaaaaaaaaactattcgcgcacgaataaaaataccgtacccgccgaaaaaaaaacgcgaaaacgaaaaaaaaatcgacgcccgaactaaacgcgcccccaaactctcgaaactcgaaactcgccccccgcgctcgctaaaccaaatctatacctcgctccctcgcgctccccgacctaaatatctctacgtctcgatatctctcccctcctaaatatctctacgtctcgatatctctcccctcctaaatatctctacgtatctcc

SEQ ID NO: 39745 - DNA, 683 bp, Artificial Sequence
  chemically treated genomic DNA (Homo sapiens) CpG-island No: 39745
aaggcgtcgacggtgtcggtcgtttttacggttcgggcggttcgttcgttatgtatttttattcgtattcgtgttcgcgtttggcgggcgtatagtgttaggcggtcggcggtttgggcggcggcgcggcgtacgttttgcggatttacggtttttgcgtcgtttacgagacgttgtatgcggcggtaggcggtggcggcgcgagttcggattataatagtttcgagtacgagggttcgtttagtttttcgttttgttttaatggtaattttttatttaagtaggatttttcgttcgattacgagaaaagttattattattttatgtattattcggcgttgttcggttcgcggtttacgggttacgggttagttttcggttcgtcggttgtgcgcgggggcgtttattcggagaattttttgttttacgatatgtatttttattacgatcggggttttatgtacgaggagtttaatgcgtttttttataattgagatttcgcgtcggttttttttttttttttttgtttttgttcgtttttttgtttttagtttttagagcgtagggatatttttattttatttcggcgtcgggcgcggggagcgggttatcggttttgtcgtttttttggggtagcgtagttttgttatttgtgggtggtttgttttaggggtttcgttttt

SEQ ID NO: 39746 - DNA, 683 bp, Artificial Sequence
  chemically treated genomic DNA (Homo sapiens) CpG-island No: 39746
aaaaacgaaacccctaaaacaaaccacccacaaataacaaaactacgctaccccaaaaaaacgacaaaaccgataacccgctccccgcgcccgacgccgaaataaaataaaaatatccctacgctctaaaaactaaaaacaaaaaaacgaacaaaaacaaaaaaaaaaaaaaaaaaccgacgcgaaatctcaattataaaaaaacgcattaaactcctcgtacataaaaccccgatcgtaataaaaatacatatcgtaaaacaaaaaattctccgaataaacgcccccgcgcacaaccgacgaaccgaaaactaacccgtaacccgtaaaccgcgaaccgaacaacgccgaataatacataaaataataataacttttctcgtaatcgaacgaaaaatcctacttaaataaaaaattaccattaaaacaaaacgaaaaactaaacgaaccctcgtactcgaaactattataatccgaactcgcgccgccaccgcctaccgccgcatacaacgtctcgtaaacgacgcaaaaaccgtaaatccgcaaaacgtacgccgcgccgccgcccaaaccgccgaccgcctaacactatacgcccgccaaacgcgaacacgaatacgaataaaaatacataacgaacgaaccgcccgaaccgtaaaaacgaccgacaccgtcgacgcctt

SEQ ID NO: 39747 - DNA, 683 bp, Artificial Sequence
  chemically treated genomic DNA (Homo sapiens) CpG-island No: 39747
ggaagcgaggtttttgggataggttatttataggtaataggattgcgttgttttaggagagcggtaggatcggtggttcgtttttcgcgttcggcgtcggggtaggatgggggtgtttttgcgttttgggggttggggataggggggcgggtaaaggtaaaagaaaaagaagggagtcggcgcgaagttttagttatgaaaaaacgtattgagtttttcgtatatggggtttcggtcgtggtgaaggtgtatatcgtaagataagagatttttcgagtggacgttttcgcgtatagtcgacgagtcgaagattagttcgtggttcgtgggtcgcgaatcgggtagcgtcgagtagtgtatagagtagtggtagtttttttcgtggtcgggcgaggagttttgtttgagtgagaagttgttattgagatagagcggggggttgagcgggttttcgtattcggagttgttgtagttcgggttcgcgtcgttatcgtttgtcgtcgtatatagcgtttcgtaagcggcgtaggggtcgtgggttcgtagggcgtgcgtcgcgtcgtcgtttaggtcgtcggtcgtttggtattgtgcgttcgttaggcgcgagtacgggtacgggtaggggtgtatggcgaacgggtcgttcgagtcgtggaagcggtcggtatcgtcggcgtttt

SEQ ID NO: 39748 - DNA, 683 bp, Artificial Sequence
  chemically treated genomic DNA (Homo sapiens) CpG-island No: 39748
aaaacgccgacgataccgaccgcttccacgactcgaacgacccgttcgccatacacccctacccgtacccgtactcgcgcctaacgaacgcacaataccaaacgaccgacgacctaaacgacgacgcgacgcacgccctacgaacccacgacccctacgccgcttacgaaacgctatatacgacgacaaacgataacgacgcgaacccgaactacaacaactccgaatacgaaaacccgctcaaccccccgctctatctcaataacaacttctcactcaaacaaaactcctcgcccgaccacgaaaaaaactaccactactctatacactactcgacgctacccgattcgcgacccacgaaccacgaactaatcttcgactcgtcgactatacgcgaaaacgtccactcgaaaaatctcttatcttacgatatacaccttcaccacgaccgaaaccccatatacgaaaaactcaatacgttttttcataactaaaacttcgcgccgactcccttctttttcttttacctttacccgcccccctatccccaacccccaaaacgcaaaaacacccccatcctaccccgacgccgaacgcgaaaaacgaaccaccgatcctaccgctctcctaaaacaacgcaatcctattacctataaataacctatcccaaaaacctcgcttcc

SEQ ID NO: 39749 - DNA, 695 bp, Artificial Sequence
  chemically treated genomic DNA (Homo sapiens) CpG-island No: 39749
tcggcgggggtgagggggtttaaagattgtgggggtgaggaattgagggtggggggcgtttagaggcgggattcggggcggggtaggcgaggcggagggcgagggttgcgggagtaagtacggagtcgggggtgtgggggacgattgtcgttgtagtcgtcgttttatttattttcggtgtgtttgtagttcggatattaagggagatggatgaatgggtggggaggatgcggcgtatatggtttcgggcggttcggcggttagttgtcgtttttttagcggatcggtcggggcgggggtcgggcggtagaaaaaagggtcgcgaggcgagcggggtattgggcggatcgcggcggtagtatgagcggcgtagatcgtagttttaatgcgggcgtagtttttgattcggtttcgggttaggcggcggtggtttcggtttattagcgtttcgagtcgcgcgtttattttcgtaataattacgcgttttttcgcggggatttgtgtaattcgaacggcgtcgggtcgtggaagttgcgttgtttggcgtagattttcgttatcggtgagcgggggaaattgaggtacgagggataagaggtcgtcggggagtgaaagtaggcgtagggaaataaaaagaaggaaagggagatagattaggcgtttaatagatggggattaagaaataagagatagtt

SEQ ID NO: 39750 - DNA, 695 bp, Artificial Sequence
  chemically treated genomic DNA (Homo sapiens) CpG-island No: 39750
aactatctcttatttcttaatccccatctattaaacgcctaatctatctccctttccttctttttatttccctacgcctactttcactccccgacgacctcttatccctcgtacctcaatttcccccgctcaccgataacgaaaatctacgccaaacaacgcaacttccacgacccgacgccgttcgaattacacaaatccccgcgaaaaaacgcgtaattattacgaaaataaacgcgcgactcgaaacgctaataaaccgaaaccaccgccgcctaacccgaaaccgaatcaaaaactacgcccgcattaaaactacgatctacgccgctcatactaccgccgcgatccgcccaataccccgctcgcctcgcgacccttttttctaccgcccgacccccgccccgaccgatccgctaaaaaaacgacaactaaccgccgaaccgcccgaaaccatatacgccgcatcctccccacccattcatccatctcccttaatatccgaactacaaacacaccgaaaataaataaaacgacgactacaacgacaatcgtcccccacacccccgactccgtacttactcccgcaaccctcgccctccgcctcgcctaccccgccccgaatcccgcctctaaacgccccccaccctcaattcctcacccccacaatctttaaaccccctcacccccgccga

SEQ ID NO: 39751 - DNA, 695 bp, Artificial Sequence
  chemically treated genomic DNA (Homo sapiens) CpG-island No: 39751
agttattttttgttttttggtttttatttgttaggcgtttggtttgtttttttttttttttttttatttttttgcgtttgtttttatttttcgacgattttttgtttttcgtgttttagtttttttcgtttatcggtggcgaaggtttgcgttaagtagcgtagtttttacggttcgacgtcgttcgggttgtataggttttcgcgagggggcgcgtagttgttgcggaggtaggcgcgcggttcgaagcgttggtaggtcgaagttatcgtcgtttggttcggggtcgagttaggggttgcgttcgtattggggttacggtttgcgtcgtttatgttgtcgtcgcggttcgtttagtgtttcgttcgtttcgcggtttttttttttatcgttcgattttcgtttcgatcggttcgttgggggggcggtagttgatcgtcgagtcgttcggggttatgtgcgtcgtattttttttatttatttatttattttttttagtgttcgggttgtagatatatcggaggtgagtggggcggcggttgtagcggtaatcgttttttatattttcggtttcgtatttgttttcgtagttttcgtttttcgtttcgtttgtttcgtttcgagtttcgtttttgggcgttttttatttttagttttttatttttataatttttagatttttttattttcgtcgg

SEQ ID NO: 39752 - DNA, 695 bp, Artificial Sequence
  chemically treated genomic DNA (Homo sapiens) CpG-island No: 39752
ccgacgaaaataaaaaaatctaaaaattataaaaataaaaaactaaaaataaaaaacgcccaaaaacgaaactcgaaacgaaacaaacgaaacgaaaaacgaaaactacgaaaacaaatacgaaaccgaaaatataaaaaacgattaccgctacaaccgccgccccactcacctccgatatatctacaacccgaacactaaaaaaaataaataaataaataaaaaaaatacgacgcacataaccccgaacgactcgacgatcaactaccgcccccccaacgaaccgatcgaaacgaaaatcgaacgataaaaaaaaaaaccgcgaaacgaacgaaacactaaacgaaccgcgacgacaacataaacgacgcaaaccgtaaccccaatacgaacgcaacccctaactcgaccccgaaccaaacgacgataacttcgacctaccaacgcttcgaaccgcgcgcctacctccgcaacaactacgcgccccctcgcgaaaacctatacaacccgaacgacgtcgaaccgtaaaaactacgctacttaacgcaaaccttcgccaccgataaacgaaaaaaactaaaacacgaaaaacaaaaaatcgtcgaaaaataaaaacaaacgcaaaaaaataaaaaaaaaaaaaaaaaaacaaaccaaacgcctaacaaataaaaaccaaaaaacaaaaaataact

SEQ ID NO: 39753 - DNA, 534 bp, Artificial Sequence
  chemically treated genomic DNA (Homo sapiens) CpG-island No: 39753
gacgttttcgtaaagtatttttagtcggggaataaagtacggaaagttgttgggtagagcggtcgggaggagatatcgggagtcgggtgggcggtggggtggtcggtgggttgtttcgggttcgggagttcgttcgtagcgcgttttgttagtaaggggagagggacggtgggaagcggtcgtttttcgggtttgggtcggggatggggatggttaagttattcgagttttcgtttttcgtcggtaggtattattcgggggtcgtgtaattcgggcgtttattgataggtattttacgttcgcgaggggttgtttcggttttaattgcggcgttgcgttttttttttaggacgtaggttaatgttcgttcgttcgtttttagtcgggcgtagagttgttagatttcgggcgttttagcgttcgttttggggttaacgggcgggagggggcggttaagttcgtaggcggttttttcggttttggtttagtttttttcggttggtttttggagacgttgtgttcggtagagaagta

SEQ ID NO: 39754 - DNA, 534 bp, Artificial Sequence
  chemically treated genomic DNA (Homo sapiens) CpG-island No: 39754
tacttctctaccgaacacaacgtctccaaaaaccaaccgaaaaaaactaaaccaaaaccgaaaaaaccgcctacgaacttaaccgccccctcccgcccgttaaccccaaaacgaacgctaaaacgcccgaaatctaacaactctacgcccgactaaaaacgaacgaacgaacattaacctacgtcctaaaaaaaaaacgcaacgccgcaattaaaaccgaaacaacccctcgcgaacgtaaaatacctatcaataaacgcccgaattacacgacccccgaataatacctaccgacgaaaaacgaaaactcgaataacttaaccatccccatccccgacccaaacccgaaaaacgaccgcttcccaccgtccctctccccttactaacaaaacgcgctacgaacgaactcccgaacccgaaacaacccaccgaccaccccaccgcccacccgactcccgatatctcctcccgaccgctctacccaacaactttccgtactttattccccgactaaaaatactttacgaaaacgtc

SEQ ID NO: 39755 - DNA, 534 bp, Artificial Sequence
  chemically treated genomic DNA (Homo sapiens) CpG-island No: 39755
tgtttttttgtcgggtatagcgtttttaggagttagtcggggagagttgagttaaggtcgaaggagtcgtttgcgggtttagtcgttttttttcgttcgttggttttagagcggacgttgggacgttcggggtttggtagttttgcgttcggttaggagcgggcgggcgagtattagtttgcgttttggagaaggggcgtagcgtcgtagttgaggtcggagtagtttttcgcgggcgtaggatatttgttagtgagcgttcggattgtacggttttcgggtagtgtttgtcggcgaggggcgggagttcgggtgatttggttatttttattttcggtttaggttcggagggcggtcgttttttatcgtttttttttttttattggtagagcgcgttgcgggcggattttcgggttcggagtagtttatcggttattttatcgtttattcggttttcggtgttttttttcggtcgttttatttagtaatttttcgtgttttgtttttcgattggaaatgttttacggaagcgtt

SEQ ID NO: 39756 - DNA, 534 bp, Artificial Sequence
  chemically treated genomic DNA (Homo sapiens) CpG-island No: 39756
aacgcttccgtaaaacatttccaatcgaaaaacaaaacacgaaaaattactaaataaaacgaccgaaaaaaaacaccgaaaaccgaataaacgataaaataaccgataaactactccgaacccgaaaatccgcccgcaacgcgctctaccaataaaaaaaaaaaaacgataaaaaacgaccgccctccgaacctaaaccgaaaataaaaataaccaaatcacccgaactcccgcccctcgccgacaaacactacccgaaaaccgtacaatccgaacgctcactaacaaatatcctacgcccgcgaaaaactactccgacctcaactacgacgctacgccccttctccaaaacgcaaactaatactcgcccgcccgctcctaaccgaacgcaaaactaccaaaccccgaacgtcccaacgtccgctctaaaaccaacgaacgaaaaaaaacgactaaacccgcaaacgactccttcgaccttaactcaactctccccgactaactcctaaaaacgctatacccgacaaaaaaaca

SEQ ID NO: 39757 - DNA, 773 bp, Artificial Sequence
  chemically treated genomic DNA (Homo sapiens) CpG-island No: 39757
gttcgcgtagatttcgcgtcgcgtatcgcggtcggcggggggcgttcgggtcgtatcgagagtagcgcgggtagttagcgtcgggtcgtagtcgattcgtagagtttttcgcgtttttcgaggaaataaagtgtatttttgttcgcggttcgaggcgtcgcgtgggagacgttgggtaggggttaggtcgggtcggtcgtcgtcgcgtgcggggattttgggcgcgcgttattgattcgggatttagattttcgcgggtttggcgcggatcggaggaagcgggttgtggcgcgcggtcgagttggtagtttttttatttcgagtacggttcgggattcgtattggtttttgtcgggtcgcggcgttttacgcgtcgttatcggggttcgtgtatttcgtttttcgggttggcgacggggcgggaagggggtaagcgggagtttgcgggggggtgttggggatttcggtttggttgggtcgtttttgagtcgtttgtcggtcgggcggtgttcgttttcgttttcggtgtcgtttcggggcgggttttcgtttcgatagtcgcgcgttagtttagtttagtttcggcgtcgcgcggtcgggaggattttagtttttagtaggtttcgcgtcgcgagtatcgaggtaggaggcgcgtttgggtcggcgtttgcgtagtgcggtcgttcgagtttgttagtattatattttcgggagggattgaggggaggtagaagtattcgaggtattaaagtattcgagggagtcggagggga

SEQ ID NO: 39758 - DNA, 773 bp, Artificial Sequence
  chemically treated genomic DNA (Homo sapiens) CpG-island No: 39758
tcccctccgactccctcgaatactttaatacctcgaatacttctacctcccctcaatccctcccgaaaatataatactaacaaactcgaacgaccgcactacgcaaacgccgacccaaacgcgcctcctacctcgatactcgcgacgcgaaacctactaaaaactaaaatcctcccgaccgcgcgacgccgaaactaaactaaactaacgcgcgactatcgaaacgaaaacccgccccgaaacgacaccgaaaacgaaaacgaacaccgcccgaccgacaaacgactcaaaaacgacccaaccaaaccgaaatccccaacacccccccgcaaactcccgcttacccccttcccgccccgtcgccaacccgaaaaacgaaatacacgaaccccgataacgacgcgtaaaacgccgcgacccgacaaaaaccaatacgaatcccgaaccgtactcgaaataaaaaaactaccaactcgaccgcgcgccacaacccgcttcctccgatccgcgccaaacccgcgaaaatctaaatcccgaatcaataacgcgcgcccaaaatccccgcacgcgacgacgaccgacccgacctaacccctacccaacgtctcccacgcgacgcctcgaaccgcgaacaaaaatacactttatttcctcgaaaaacgcgaaaaactctacgaatcgactacgacccgacgctaactacccgcgctactctcgatacgacccgaacgccccccgccgaccgcgatacgcgacgcgaaatctacgcgaac

SEQ ID NO: 39759 - DNA, 773 bp, Artificial Sequence
  chemically treated genomic DNA (Homo sapiens) CpG-island No: 39759
tttttttcggttttttcggatgttttaatgtttcggatgtttttgtttttttttagtttttttcgggggtgtggtattagtaggttcgggcggtcgtattgcgtaagcgtcggtttaggcgcgttttttgtttcggtgttcgcggcgcggggtttgttgggagttggagttttttcggtcgcgcggcgtcggggttgagttgggttggcgcgcggttgtcggagcgaggattcgtttcgggacggtatcgaaagcgaaggcgggtatcgttcggtcgataggcgatttaaaggcggtttagttaagtcgaagtttttagtattttttcgtaggttttcgtttgtttttttttcgtttcgtcgttagttcggaaagcggagtgtacgggtttcggtgacggcgcgtgaagcgtcgcggttcggtaggagttagtgcgggtttcgagtcgtgttcggagtgggagggttgttagttcggtcgcgcgttatagttcgtttttttcggttcgcgttaggttcgcgagggtttgagtttcgggttagtgacgcgcgtttagggttttcgtacgcggcggcggtcggttcggtttggtttttgtttagcgttttttacgcggcgtttcgggtcgcggataaagatgtattttgttttttcggagggcgcgaagggttttgcgggtcggttgcgattcggcgttggttgttcgcgttgttttcggtgcgattcgagcgtttttcgtcggtcgcggtgcgcggcgcggggtttacgcggat

SEQ ID NO: 39760 - DNA, 773 bp, Artificial Sequence
  chemically treated genomic DNA (Homo sapiens) CpG-island No: 39760
atccgcgtaaaccccgcgccgcgcaccgcgaccgacgaaaaacgctcgaatcgcaccgaaaacaacgcgaacaaccaacgccgaatcgcaaccgacccgcaaaacccttcgcgccctccgaaaaaacaaaatacatctttatccgcgacccgaaacgccgcgtaaaaaacgctaaacaaaaaccaaaccgaaccgaccgccgccgcgtacgaaaaccctaaacgcgcgtcactaacccgaaactcaaaccctcgcgaacctaacgcgaaccgaaaaaaacgaactataacgcgcgaccgaactaacaaccctcccactccgaacacgactcgaaacccgcactaactcctaccgaaccgcgacgcttcacgcgccgtcaccgaaacccgtacactccgctttccgaactaacgacgaaacgaaaaaaaaacaaacgaaaacctacgaaaaaatactaaaaacttcgacttaactaaaccgcctttaaatcgcctatcgaccgaacgatacccgccttcgctttcgataccgtcccgaaacgaatcctcgctccgacaaccgcgcgccaacccaactcaaccccgacgccgcgcgaccgaaaaaactccaactcccaacaaaccccgcgccgcgaacaccgaaacaaaaaacgcgcctaaaccgacgcttacgcaatacgaccgcccgaacctactaataccacacccccgaaaaaaactaaaaaaaaacaaaaacatccgaaacattaaaacatccgaaaaaaccgaaaaaaa

SEQ ID NO: 39761 - DNA, 556 bp, Artificial Sequence
  chemically treated genomic DNA (Homo sapiens) CpG-island No: 39761
gaagtcggtgtcgcgtcgtcgaacgtataacgcggcgtcgtaggttcgtagttttttttcgtcggcgttattgcgttttttcgcgtcgcgtaaggttagtaagtagttgcggtcgcgggggagatacggcgagcgcgttcggcggggagatattgtcgtttttcgttcggtcggggaagagtagtcgcgtagaagttcgtcgcgagagggcgggtgggcggtcgggtggggaggggtttcgaggcgtcggtaatggttgttacgtcgtttaggtggatcgtcgtttatcgtttttttttaagttcgtcggttgttcgttacgatttttgtttcgttttcgagtttcgtttcggcgcggcggttcgggggatttgagttcgcgggcgtttttatttttttcgttttcgttttttcgttggagagtaagttttgttcggtcggttcggttgttttcggtcgtttattttttaagtttcgttcgagagcgggtcgtggtttttattttttttattagggggtttttggaggagtaagttttttttcgagtgtcgggttt

SEQ ID NO: 39762 - DNA, 556 bp, Artificial Sequence
  chemically treated genomic DNA (Homo sapiens) CpG-island No: 39762
aaacccgacactcgaaaaaaaacttactcctccaaaaaccccctaataaaaaaaataaaaaccacgacccgctctcgaacgaaacttaaaaaataaacgaccgaaaacaaccgaaccgaccgaacaaaacttactctccaacgaaaaaacgaaaacgaaaaaaataaaaacgcccgcgaactcaaatcccccgaaccgccgcgccgaaacgaaactcgaaaacgaaacaaaaatcgtaacgaacaaccgacgaacttaaaaaaaaacgataaacgacgatccacctaaacgacgtaacaaccattaccgacgcctcgaaacccctccccacccgaccgcccacccgccctctcgcgacgaacttctacgcgactactcttccccgaccgaacgaaaaacgacaatatctccccgccgaacgcgctcgccgtatctcccccgcgaccgcaactacttactaaccttacgcgacgcgaaaaaacgcaataacgccgacgaaaaaaaactacgaacctacgacgccgcgttatacgttcgacgacgcgacaccgacttc

SEQ ID NO: 39763 - DNA, 556 bp, Artificial Sequence
  chemically treated genomic DNA (Homo sapiens) CpG-island No: 39763
gaattcgatattcgaagaagggtttgtttttttagggattttttgataagaaaagtggggattacggttcgttttcgggcgagatttggggggtgggcgatcggaagtagtcgaatcggtcgggtagggtttgttttttaacgggagagcgggagcgggagaggtgggagcgttcgcgggtttaagtttttcgggtcgtcgcgtcgaggcggagttcggggacgaagtagaggtcgtggcggatagtcggcgggtttgggggggggcggtgggcggcgatttatttgggcgacgtggtagttattgtcggcgtttcgagatttttttttattcggtcgtttattcgttttttcgcggcgggtttttgcgcggttgttttttttcggtcggacggagagcggtagtgttttttcgtcgggcgcgttcgtcgtgtttttttcgcggtcgtagttgtttgttagttttgcgcggcgcgggagagcgtagtggcgtcggcgggaaagggttgcggatttgcggcgtcgcgttgtgcgttcgacgacgcggtatcggtttt

SEQ ID NO: 39764 - DNA, 556 bp, Artificial Sequence
  chemically treated genomic DNA (Homo sapiens) CpG-island No: 39764
aaaaccgataccgcgtcgtcgaacgcacaacgcgacgccgcaaatccgcaaccctttcccgccgacgccactacgctctcccgcgccgcgcaaaactaacaaacaactacgaccgcgaaaaaaacacgacgaacgcgcccgacgaaaaaacactaccgctctccgtccgaccgaaaaaaaacaaccgcgcaaaaacccgccgcgaaaaaacgaataaacgaccgaataaaaaaaaatctcgaaacgccgacaataactaccacgtcgcccaaataaatcgccgcccaccgcccccccccaaacccgccgactatccgccacgacctctacttcgtccccgaactccgcctcgacgcgacgacccgaaaaacttaaacccgcgaacgctcccacctctcccgctcccgctctcccgttaaaaaacaaaccctacccgaccgattcgactacttccgatcgcccaccccccaaatctcgcccgaaaacgaaccgtaatccccacttttcttatcaaaaaatccctaaaaaaacaaacccttcttcgaatatcgaattc

SEQ ID NO: 39765 - DNA, 540 bp, Artificial Sequence
  chemically treated genomic DNA (Homo sapiens) CpG-island No: 39765
tgttaaaataagcggcgcggtaaattatagttgtttttagttttcggtattttttcgagttttaaaaaataaaataaatataaggtcggtttcgcggggtgaggggagaaaggaaagtagagttgggacgagttttgacgcgcgcggggtttaggttgtaagttgggagggacggcgaggcgagcgatcggtttcggtattgtttgattagggtcgtggtcgttgcggcgggtacgggaattcgttttttcgcgcgcggttttttcgcggggggttttcgggcgcgcggtttcggagttttacgggaagataaaggggtaggcgattgttacggggtggagggaggtcgtttagttttatcggttttgttagcgtgcggtttgagttcggggaatgtgtgcgttttagtcggtggaatcgtagtcgttggtttttgtttttagttcgagtttgagttttcggatgttaagaaaaagtaaagacgtgttttttttttttgcgatcgttgtagtatgagttcgtttttaagtttgtattatt

SEQ ID NO: 39766 - DNA, 540 bp, Artificial Sequence
  chemically treated genomic DNA (Homo sapiens) CpG-island No: 39766
aataatacaaacttaaaaacgaactcatactacaacgatcgcaaaaaaaaaaaacacgtctttactttttcttaacatccgaaaactcaaactcgaactaaaaacaaaaaccaacgactacgattccaccgactaaaacgcacacattccccgaactcaaaccgcacgctaacaaaaccgataaaactaaacgacctccctccaccccgtaacaatcgcctacccctttatcttcccgtaaaactccgaaaccgcgcgcccgaaaaccccccgcgaaaaaaccgcgcgcgaaaaaacgaattcccgtacccgccgcaacgaccacgaccctaatcaaacaataccgaaaccgatcgctcgcctcgccgtccctcccaacttacaacctaaaccccgcgcgcgtcaaaactcgtcccaactctactttcctttctcccctcaccccgcgaaaccgaccttatatttattttattttttaaaactcgaaaaaataccgaaaactaaaaacaactataatttaccgcgccgcttattttaaca

SEQ ID NO: 39767 - DNA, 540 bp, Artificial Sequence
  chemically treated genomic DNA (Homo sapiens) CpG-island No: 39767
aatggtgtaggtttggggacggatttatattatagcggtcgtaagagggaagagtacgtttttgtttttttttggtattcgaaaatttaagttcgaattgggggtaaaggttagcggttgcggttttatcggttaaggcgtatatatttttcgagtttagatcgtacgttggtagggtcgatggggttgggcggtttttttttatttcgtggtagtcgtttatttttttgttttttcgtggggtttcgaggtcgcgcgttcggaagtttttcgcgggagggtcgcgcgcgagaaggcgggttttcgtgttcgtcgtagcggttacggttttagttaggtaatgtcgaggtcggtcgttcgtttcgtcgttttttttaatttgtagtttggatttcgcgcgcgttagggttcgttttagttttgtttttttttttttttttatttcgcgaggtcgattttgtgtttgttttgttttttggggttcgggagagtgtcgagggttagaaatagttgtggtttatcgcgtcgtttattttggta

SEQ ID NO: 39768 - DNA, 540 bp, Artificial Sequence
  chemically treated genomic DNA (Homo sapiens) CpG-island No: 39768
taccaaaataaacgacgcgataaaccacaactatttctaaccctcgacactctcccgaaccccaaaaaacaaaacaaacacaaaatcgacctcgcgaaataaaaaaaaaaaaaaaaacaaaactaaaacgaaccctaacgcgcgcgaaatccaaactacaaattaaaaaaaacgacgaaacgaacgaccgacctcgacattacctaactaaaaccgtaaccgctacgacgaacacgaaaacccgccttctcgcgcgcgaccctcccgcgaaaaacttccgaacgcgcgacctcgaaaccccacgaaaaaacaaaaaaataaacgactaccacgaaataaaaaaaaaccgcccaaccccatcgaccctaccaacgtacgatctaaactcgaaaaatatatacgccttaaccgataaaaccgcaaccgctaacctttacccccaattcgaacttaaattttcgaataccaaaaaaaaacaaaaacgtactcttccctcttacgaccgctataatataaatccgtccccaaacctacaccatt

SEQ ID NO: 39769 - DNA, 551 bp, Artificial Sequence
  chemically treated genomic DNA (Homo sapiens) CpG-island No: 39769
ttttaggttatcgcgtcgttgttatggtagtaggggggcgcggttgacgtgcggcggtgttttcgggaagatggcggttgtcgaagcggttgtagagtcggtaacggtggtggcggttgttgggttaaaggcgaaagacgaagaggaggaggaagaggagtcgttgttatcgtgcgaggcggtgcgttgggttttagtgggggcggtggcggaggttcggtttggggtaatcgcgtttttagaagaggcgacggtcgaggagtttggcgcggtttcgggtttttcgtcggattcgtcgggtcggacgttgcggcggttgcgggtagagcggcggcggttggattcggcgttgttggcgttgttttcgtatttcgcgtaggtgtagtttcgtttgcgttaggtggtgcgcggggcgtcggcggagtagtagcgttttttgcgggagttcgaagatttcgtttttcgcggttgtttttacgttttaggttacgaagggttcggcgatttcgttagcgatgagggcgatgggttgttaggggatcggttacggt

SEQ ID NO: 39770 - DNA, 551 bp, Artificial Sequence
  chemically treated genomic DNA (Homo sapiens) CpG-island No: 39770
accgtaaccgatcccctaacaacccatcgccctcatcgctaacgaaatcgccgaacccttcgtaacctaaaacgtaaaaacaaccgcgaaaaacgaaatcttcgaactcccgcaaaaaacgctactactccgccgacgccccgcgcaccacctaacgcaaacgaaactacacctacgcgaaatacgaaaacaacgccaacaacgccgaatccaaccgccgccgctctacccgcaaccgccgcaacgtccgacccgacgaatccgacgaaaaacccgaaaccgcgccaaactcctcgaccgtcgcctcttctaaaaacgcgattaccccaaaccgaacctccgccaccgcccccactaaaacccaacgcaccgcctcgcacgataacaacgactcctcttcctcctcctcttcgtctttcgcctttaacccaacaaccgccaccaccgttaccgactctacaaccgcttcgacaaccgccatcttcccgaaaacaccgccgcacgtcaaccgcgcccccctactaccataacaacgacgcgataacctaaaa

SEQ ID NO: 39771 - DNA, 551 bp, Artificial Sequence
  chemically treated genomic DNA (Homo sapiens) CpG-island No: 39771
atcgtggtcggttttttggtagtttatcgtttttatcgttggcggggtcgtcgggtttttcgtaatttaagacgtgagggtagtcgcggaaggcgaagttttcgagttttcgtagaaggcgttgttgtttcgtcggcgtttcgcgtattatttggcgtaggcggaattgtatttgcgcgaagtgcgaggatagcgttagtagcgtcgagtttagtcgtcgtcgttttgttcgtagtcgtcgtagcgttcggttcggcgaattcggcggggagttcggggtcgcgttaggtttttcggtcgtcgttttttttaaaaacgcggttgttttaggtcgggttttcgttatcgtttttattggggtttagcgtatcgtttcgtacggtggtagcggttttttttttttttttttttcgtttttcgtttttggtttaatagtcgttattatcgttatcggttttgtagtcgtttcgatagtcgttattttttcggaaatatcgtcgtacgttagtcgcgtttttttgttgttatggtaacggcgcggtggtttggaa

SEQ ID NO: 39772 - DNA, 551 bp, Artificial Sequence
  chemically treated genomic DNA (Homo sapiens) CpG-island No: 39772
ttccaaaccaccgcgccgttaccataacaacaaaaaaacgcgactaacgtacgacgatatttccgaaaaaataacgactatcgaaacgactacaaaaccgataacgataataacgactattaaaccaaaaacgaaaaacgaaaaaaaaaaaaaaaaaaaaccgctaccaccgtacgaaacgatacgctaaaccccaataaaaacgataacgaaaacccgacctaaaacaaccgcgtttttaaaaaaaacgacgaccgaaaaacctaacgcgaccccgaactccccgccgaattcgccgaaccgaacgctacgacgactacgaacaaaacgacgacgactaaactcgacgctactaacgctatcctcgcacttcgcgcaaatacaattccgcctacgccaaataatacgcgaaacgccgacgaaacaacaacgccttctacgaaaactcgaaaacttcgccttccgcgactaccctcacgtcttaaattacgaaaaacccgacgaccccgccaacgataaaaacgataaactaccaaaaaaccgaccacgat

SEQ ID NO: 39773 - DNA, 798 bp, Artificial Sequence
  chemically treated genomic DNA (Homo sapiens) CpG-island No: 39773
gtcgttttcgtcggcgttgggtttcggggatatgttagtcgtttttttcggggtcgcgggtttttgggtgatgtcggtggaggttgggggcgagtgtggcggtattagcgcgggggtttcggagttcgcgggtcgcgagtttagtagttggcgtagttgggggtttaggtagtgggttgtcggttttgaggtttggtcggcggggggtcgtaagtcgatgattaggttcgtgatgagttcgtttagttgttttaggattcgttggcggttagaggtggggtcgtcgggggtcgtatgaggaagtggtcgcgtgtagttttcgggtaatttttaggttttggtgcgcgttcggtggcgtgtaggttattgttagtgatggtgatttcgggtattacgtattagttgcggttcgggtttttattcgcgcggttttttttcgttagcgacgtttcggatagggatagtggggtatagcgtttgggcgaggtggataggtttacgacgataggtgggtattagttttcgggggatacgtttcgcggttttcgtattttacgttttagtaggtttttatagttgcggttacggttttattggtttcggtacggttttattggtttcggtacggttcggggttagaatgttgttttaggagtacgagtagtggcggttgtcggtggttagtcggggtggattggtgtcggtgtcgttatgttaggaggcgagtaatcggtcggggttagaggattgtattatttgtagggtgcggtagggtcgtaggttttagttcgtttaggt

SEQ ID NO: 39774 - DNA, 798 bp, Artificial Sequence
  chemically treated genomic DNA (Homo sapiens) CpG-island No: 39774
acctaaacgaactaaaacctacgaccctaccgcaccctacaaataatacaatcctctaaccccgaccgattactcgcctcctaacataacgacaccgacaccaatccaccccgactaaccaccgacaaccgccactactcgtactcctaaaacaacattctaaccccgaaccgtaccgaaaccaataaaaccgtaccgaaaccaataaaaccgtaaccgcaactataaaaacctactaaaacgtaaaatacgaaaaccgcgaaacgtatcccccgaaaactaatacccacctatcgtcgtaaacctatccacctcgcccaaacgctataccccactatccctatccgaaacgtcgctaacgaaaaaaaaccgcgcgaataaaaacccgaaccgcaactaatacgtaatacccgaaatcaccatcactaacaataacctacacgccaccgaacgcgcaccaaaacctaaaaattacccgaaaactacacgcgaccacttcctcatacgacccccgacgaccccacctctaaccgccaacgaatcctaaaacaactaaacgaactcatcacgaacctaatcatcgacttacgaccccccgccgaccaaacctcaaaaccgacaacccactacctaaacccccaactacgccaactactaaactcgcgacccgcgaactccgaaacccccgcgctaataccgccacactcgcccccaacctccaccgacatcacccaaaaacccgcgaccccgaaaaaaacgactaacatatccccgaaacccaacgccgacgaaaacgac

SEQ ID NO: 39775 - DNA, 798 bp, Artificial Sequence
  chemically treated genomic DNA (Homo sapiens) CpG-island No: 39775
gtttgggcggattggggtttgcgattttatcgtattttgtaagtggtgtagttttttaatttcgatcggttgttcgttttttggtatggcggtatcggtattagtttatttcggttggttatcgatagtcgttattattcgtgtttttgggataatattttggtttcgggtcgtgtcgagattagtggggtcgtgtcgagattagtggggtcgtggtcgtagttatgagaatttgttggggcgtgaggtgcgggagtcgcgaggcgtgtttttcgaaggttggtgtttatttgtcgtcgtgaatttgtttatttcgtttagacgttatgttttattgtttttgttcgagacgtcgttgacggagaagggtcgcgcgggtgagggttcgggtcgtaattggtacgtgatgttcgagattattattattgataatgatttgtacgttatcgagcgcgtattagggtttgggagttgttcgggggttgtacgcggttatttttttatgcggttttcgacggttttatttttggtcgttagcggattttagagtagttggacgagtttattacggatttggttatcgatttgcgatttttcgtcggttaggttttagagtcggtagtttattgtttgggtttttaattgcgttaattgttggattcgcggttcgcgggtttcggggttttcgcgttggtgtcgttatattcgtttttagtttttatcggtattatttaggagttcgcggtttcgggagaggcggttgatatgttttcggaatttagcgtcgacgaagacgat

SEQ ID NO: 39776 - DNA, 798 bp, Artificial Sequence
  chemically treated genomic DNA (Homo sapiens) CpG-island No: 39776
atcgtcttcgtcgacgctaaattccgaaaacatatcaaccgcctctcccgaaaccgcgaactcctaaataataccgataaaaactaaaaacgaatataacgacaccaacgcgaaaaccccgaaacccgcgaaccgcgaatccaacaattaacgcaattaaaaacccaaacaataaactaccgactctaaaacctaaccgacgaaaaatcgcaaatcgataaccaaatccgtaataaactcgtccaactactctaaaatccgctaacgaccaaaaataaaaccgtcgaaaaccgcataaaaaaataaccgcgtacaacccccgaacaactcccaaaccctaatacgcgctcgataacgtacaaatcattatcaataataataatctcgaacatcacgtaccaattacgacccgaaccctcacccgcgcgacccttctccgtcaacgacgtctcgaacaaaaacaataaaacataacgtctaaacgaaataaacaaattcacgacgacaaataaacaccaaccttcgaaaaacacgcctcgcgactcccgcacctcacgccccaacaaattctcataactacgaccacgaccccactaatctcgacacgaccccactaatctcgacacgacccgaaaccaaaatattatcccaaaaacacgaataataacgactatcgataaccaaccgaaataaactaataccgataccgccataccaaaaaacgaacaaccgatcgaaattaaaaaactacaccacttacaaaatacgataaaatcgcaaaccccaatccgcccaaac

SEQ ID NO: 39777 - DNA, 810 bp, Artificial Sequence
  chemically treated genomic DNA (Homo sapiens) CpG-island No: 39777
cggcgtttagcgtagttacggggtttaggtaggggttcgtcgtagtagaacgttcggggattcgtacggtatgagtcgtttggcgtcggggtgtgcgatagcgttatatggcggggttcgggtatcgtgaggtcgtggaattgcggggcggggcgggttcgtaggatcgtaagttttaggcggcgtgttggagtattgcgttttttggtttgatgttcggaaggagcgtacgtaggggtagggattcgcgggtggttcgggaggtgcgtagcggttcgcggcggcgtataggggcgcgatgtggtcggggtcgtttagttgcggttgtaatttgatgggacgtagttagttggtaagggcgcggcgatgtttcggttcgcgtcgtacgttgggtttttcgttttcggttgggtaatatttgtagtaaggcgggcgcgggcgttaggttcgggggcgcgcggggcgcgtttttggagtgggcgcggcggtgtggttcggtttcgcgggttcgggcgcgcggtatagcgggttttaggggcggtggtttcggtagggtttttatggttggtcggtttagcgtttttaggaagtcgaagttgtcgtagtggcgtttgttgaaaggcgcgggtttagtaggtcgagttagggatcgtttatatggcgagcgtttggacgcgggtttcggggtcgttattttgatgttttggtatacggtcgatattagtaggttcggagcgttcgtatgggttattttaaaagaggtttttaggttggcggttttagtttatattgttttgcggggtttttgtt

SEQ ID NO: 39778 - DNA, 810 bp, Artificial Sequence
  chemically treated genomic DNA (Homo sapiens) CpG-island No: 39778
aacaaaaaccccgcaaaacaatataaactaaaaccgccaacctaaaaacctcttttaaaataacccatacgaacgctccgaacctactaatatcgaccgtataccaaaacatcaaaataacgaccccgaaacccgcgtccaaacgctcgccatataaacgatccctaactcgacctactaaacccgcgcctttcaacaaacgccactacgacaacttcgacttcctaaaaacgctaaaccgaccaaccataaaaaccctaccgaaaccaccgcccctaaaacccgctataccgcgcgcccgaacccgcgaaaccgaaccacaccgccgcgcccactccaaaaacgcgccccgcgcgcccccgaacctaacgcccgcgcccgccttactacaaatattacccaaccgaaaacgaaaaacccaacgtacgacgcgaaccgaaacatcgccgcgcccttaccaactaactacgtcccatcaaattacaaccgcaactaaacgaccccgaccacatcgcgcccctatacgccgccgcgaaccgctacgcacctcccgaaccacccgcgaatccctacccctacgtacgctccttccgaacatcaaaccaaaaaacgcaatactccaacacgccgcctaaaacttacgatcctacgaacccgccccgccccgcaattccacgacctcacgatacccgaaccccgccatataacgctatcgcacaccccgacgccaaacgactcataccgtacgaatccccgaacgttctactacgacgaacccctacctaaaccccgtaactacgctaaacgccg

SEQ ID NO: 39779 - DNA, 810 bp, Artificial Sequence
  chemically treated genomic DNA (Homo sapiens) CpG-island No: 39779
ggtaaaagtttcgtaaggtagtgtgagttggagtcgttagtttgaggattttttttaagatgatttatacggacgtttcggatttgttggtgtcgatcgtgtattaggatattaaggtggcgatttcgggattcgcgtttaagcgttcgttatgtgagcgatttttggttcggtttgttgagttcgcgttttttaataagcgttattgcggtagtttcgattttttggaggcgttggatcggttaattatggagattttgtcggagttatcgtttttggagttcgttgtgtcgcgcgttcggattcgcgaggtcgagttatatcgtcgcgtttattttaagagcgcgtttcgcgcgttttcgggtttgacgttcgcgttcgttttgttgtaggtgttgtttagtcgagggcgggaggtttagcgtgcggcgcgggtcgaggtatcgtcgcgtttttgttaattagttgcgttttattaagttgtagtcgtagttgggcggtttcggttatatcgcgtttttgtgcgtcgtcgcgggtcgttgcgtatttttcgagttattcgcgggtttttatttttacgtgcgtttttttcggatattaagttagaggacgtagtgttttagtacgtcgtttggggtttgcggttttgcgggttcgtttcgtttcgtagttttacggttttacggtgttcgggtttcgttatatggcgttgtcgtatatttcgacgttaagcgatttatatcgtgcggattttcgggcgttttattgcgacgagtttttgtttgggtttcgtgattacgttgagcgtcg

SEQ ID NO: 39780 - DNA, 810 bp, Artificial Sequence
  chemically treated genomic DNA (Homo sapiens) CpG-island No: 39780
cgacgctcaacgtaatcacgaaacccaaacaaaaactcgtcgcaataaaacgcccgaaaatccgcacgatataaatcgcttaacgtcgaaatatacgacaacgccatataacgaaacccgaacaccgtaaaaccgtaaaactacgaaacgaaacgaacccgcaaaaccgcaaaccccaaacgacgtactaaaacactacgtcctctaacttaatatccgaaaaaaacgcacgtaaaaataaaaacccgcgaataactcgaaaaatacgcaacgacccgcgacgacgcacaaaaacgcgatataaccgaaaccgcccaactacgactacaacttaataaaacgcaactaattaacaaaaacgcgacgatacctcgacccgcgccgcacgctaaacctcccgccctcgactaaacaacacctacaacaaaacgaacgcgaacgtcaaacccgaaaacgcgcgaaacgcgctcttaaaataaacgcgacgatataactcgacctcgcgaatccgaacgcgcgacacaacgaactccaaaaacgataactccgacaaaatctccataattaaccgatccaacgcctccaaaaaatcgaaactaccgcaataacgcttattaaaaaacgcgaactcaacaaaccgaaccaaaaatcgctcacataacgaacgcttaaacgcgaatcccgaaatcgccaccttaatatcctaatacacgatcgacaccaacaaatccgaaacgtccgtataaatcatcttaaaaaaaatcctcaaactaacgactccaactcacactaccttacgaaacttttacc

SEQ ID NO: 39781 - DNA, 1173 bp, Artificial Sequence
  chemically treated genomic DNA (Homo sapiens) CpG-island No: 39781
ttttcgtttaaacgttgggttaattttacgaattggcggtggtaaggttttgggtatcggtgaagttttcgtggtagcgtagatcggcgatttttttttttttcgcgtttagacggcggcggtagtagtacgttttcgggttgttggagtcggtagcgcgcgaggtcggagttcgggtagttaggttgggtgggggaggggcggcggtagcggagtcgggagcgtgcgcgcgtattttatatttcgtcgttcggggacgtttattcgcgagtcggggtcggtacggtcggttcgggttttatcgttttcgtttttcggttttttttcggcgtgagtttaacgggtgtcggtttagtagttgttgcgtttattaggtttggggaggtagggtacggggatcgggtcgtagtttcgagcggcgtgggcgcgttgtttttttggtagtcgtcgttagagttagtagttgcgagttatcggaggcggcgcggaggaggttttcgcggtcgggtaggaaggagacgcggtcgatttttgttcgttcgagggcggttgttttcgcgcgtttaggttttttcgtcgttttagggttgagtgaggaatgagtcggcgtttatttcgggttttcggagcgtgggtttcggttcggttttttaggcgcgagggttcggttattgcggtcggcggtttagttcggggagtaggcgtcggggtttattgaatcggtcgcggagaggaggaggaggaggaggaagaggaggaggaggaggaggaggagttcggcgggggcggtcgtcgcgtttttttttttttaggatacgtcggggttttttagtggtcgtcggaggaggaagtttcgttttttgatagattcgtgcggtagtaatagcggcggcggtcgcggcggttggtcggatttaggtgtttcggacgttattgtttttcgcgttagtcgtcgagtgggtagtagcgggatttagtcgggcgttaggtttttgttaggtagcgtcgggaagcgcgggcggtcgagaatttttttttgttatttcgtttagcgtcgttgtttcggttttttagcgaagtgggagatttttttttttgtttgtagacgttcgtgggagatttttattttttttatcgttaaggttaagagattttggaatagaagcgtcgaag

SEQ ID NO: 39782 - DNA, 1173 bp, Artificial Sequence
  chemically treated genomic DNA (Homo sapiens) CpG-island No: 39782
cttcgacgcttctattccaaaatctcttaaccttaacgataaaaaaaataaaaatctcccacgaacgtctacaaacaaaaaaaaaaatctcccacttcgctaaaaaaccgaaacaacgacgctaaacgaaataacaaaaaaaaattctcgaccgcccgcgcttcccgacgctacctaacaaaaacctaacgcccgactaaatcccgctactacccactcgacgactaacgcgaaaaacaataacgtccgaaacacctaaatccgaccaaccgccgcgaccgccgccgctattactaccgcacgaatctatcaaaaaacgaaacttcctcctccgacgaccactaaaaaaccccgacgtatcctaaaaaaaaaaaaacgcgacgaccgcccccgccgaactcctcctcctcctcctcctcctcttcctcctcctcctcctcctctccgcgaccgattcaataaaccccgacgcctactccccgaactaaaccgccgaccgcaataaccgaaccctcgcgcctaaaaaaccgaaccgaaacccacgctccgaaaacccgaaataaacgccgactcattcctcactcaaccctaaaacgacgaaaaaacctaaacgcgcgaaaacaaccgccctcgaacgaacaaaaatcgaccgcgtctccttcctacccgaccgcgaaaacctcctccgcgccgcctccgataactcgcaactactaactctaacgacgactaccaaaaaaacaacgcgcccacgccgctcgaaactacgacccgatccccgtaccctacctccccaaacctaataaacgcaacaactactaaaccgacacccgttaaactcacgccgaaaaaaaaccgaaaaacgaaaacgataaaacccgaaccgaccgtaccgaccccgactcgcgaataaacgtccccgaacgacgaaatataaaatacgcgcgcacgctcccgactccgctaccgccgcccctcccccacccaacctaactacccgaactccgacctcgcgcgctaccgactccaacaacccgaaaacgtactactaccgccgccgtctaaacgcgaaaaaaaaaaaaatcgccgatctacgctaccacgaaaacttcaccgatacccaaaaccttaccaccgccaattcgtaaaattaacccaacgtttaaacgaaaa

SEQ ID NO: 39783 - DNA, 1173 bp, Artificial Sequence
  chemically treated genomic DNA (Homo sapiens) CpG-island No: 39783
tttcgacgtttttattttagaattttttaattttagcggtggaaaaaataagggttttttacggacgtttgtaaatagggaggaaggttttttatttcgttgggaagtcgaagtagcggcgttgggcgaagtagtaggaaggagttttcggtcgttcgcgtttttcggcgttgtttggtaggaatttggcgttcggttgagtttcgttgttgtttattcgacggttggcgcgaagggtaatagcgttcgaaatatttgagttcggttagtcgtcgcggtcgtcgtcgttgttgttatcgtacgggtttgttagggagcggaattttttttttcggcggttattgagaagtttcggcgtgttttgggggaggggaggcgcggcggtcgttttcgtcgagtttttttttttttttttttttttttttttttttttttttttttttttcgcggtcggtttagtgaatttcggcgtttgtttttcgagttaggtcgtcggtcgtagtggtcgagttttcgcgtttaagaagtcgagtcggggtttacgtttcgagagttcggggtaggcgtcggtttattttttatttagttttggagcggcgggagggtttgggcgcgcgggagtagtcgttttcgggcgggtagaggtcggtcgcgttttttttttgttcggtcgcgggggtttttttcgcgtcgttttcggtggttcgtagttgttggttttggcggcggttgttagagaggtagcgcgtttacgtcgttcggggttgcggttcggttttcgtattttgtttttttaggtttggtgagcgtagtagttgttgggtcgatattcgttgggtttacgtcggagaggaatcggagggcgggggcgatgggattcgggtcggtcgtatcggtttcggttcgcgagtgggcgttttcgggcggcggagtgtgaggtgcgcgcgtacgttttcggtttcgttgtcgtcgttttttttttatttagtttggttgttcgggtttcggtttcgcgcgttgtcggttttagtagttcgaaagcgtattgttgtcgtcgtcgtttgagcgcgaaagaagagaaggtcgtcgatttgcgttgttacgagaattttatcggtgtttagggttttgttatcgttagttcgtggggttgatttagcgtttgggcgagag

SEQ ID NO: 39784 - DNA, 1173 bp, Artificial Sequence
  chemically treated genomic DNA (Homo sapiens) CpG-island No: 39784
ctctcgcccaaacgctaaatcaaccccacgaactaacgataacaaaaccctaaacaccgataaaattctcgtaacaacgcaaatcgacgaccttctcttctttcgcgctcaaacgacgacgacaacaatacgctttcgaactactaaaaccgacaacgcgcgaaaccgaaacccgaacaaccaaactaaataaaaaaaaaacgacgacaacgaaaccgaaaacgtacgcgcgcacctcacactccgccgcccgaaaacgcccactcgcgaaccgaaaccgatacgaccgacccgaatcccatcgcccccgccctccgattcctctccgacgtaaacccaacgaatatcgacccaacaactactacgctcaccaaacctaaaaaaacaaaatacgaaaaccgaaccgcaaccccgaacgacgtaaacgcgctacctctctaacaaccgccgccaaaaccaacaactacgaaccaccgaaaacgacgcgaaaaaaacccccgcgaccgaacaaaaaaaaaacgcgaccgacctctacccgcccgaaaacgactactcccgcgcgcccaaaccctcccgccgctccaaaactaaataaaaaataaaccgacgcctaccccgaactctcgaaacgtaaaccccgactcgacttcttaaacgcgaaaactcgaccactacgaccgacgacctaactcgaaaaacaaacgccgaaattcactaaaccgaccgcgaaaaaaaaaaaaaaaaaaaaaaaaaaaaaaaaaaaaaaaaaaaaaaactcgacgaaaacgaccgccgcgcctcccctcccccaaaacacgccgaaacttctcaataaccgccgaaaaaaaaaattccgctccctaacaaacccgtacgataacaacaacgacgacgaccgcgacgactaaccgaactcaaatatttcgaacgctattacccttcgcgccaaccgtcgaataaacaacaacgaaactcaaccgaacgccaaattcctaccaaacaacgccgaaaaacgcgaacgaccgaaaactccttcctactacttcgcccaacgccgctacttcgacttcccaacgaaataaaaaaccttcctccctatttacaaacgtccgtaaaaaacccttattttttccaccgctaaaattaaaaaattctaaaataaaaacgtcgaaa

SEQ ID NO: 39785 - DNA, 596 bp, Artificial Sequence
  chemically treated genomic DNA (Homo sapiens) CpG-island No: 39785
ggttcggtttcgttcgttttgggttatgtagttgtatacgtcggcgttttgcgtttcgtagcgtcgtagttataggagttgggttcgggggtcggcgcgggtaggagttgttatttcggaattagcggaggttggttggggcgtttcgtttattattattcgtagtcgtacgtcgttgttcgcgtatatcgtcgcgttttttaggggtcgtagaagattggcggtcggtacgttataggagtttcgtcgtcggtttttattttggtttttttcgggggtatttcggggttggggggtgttttcgtgttcgtattttcgtttcgcgtgtttcgggttttttgtatggttattgagagttgggttggggggacgtcggaattgggcggttacgggggtattcgcgggacggtgttttaggagataagtttggggggtcggcgttgtttttttgttgttcgttcgttttcggtttgtgttatttagaaggttatcggggcggtcggcgattgcgtttgggggttatttttaggtttttcggttcgggttgcgagggagtcgtggagggagggggtagtaggggagggatttgattttat

SEQ ID NO: 39786 - DNA, 596 bp, Artificial Sequence
  chemically treated genomic DNA (Homo sapiens) CpG-island No: 39786
ataaaatcaaatccctcccctactaccccctccctccacgactccctcgcaacccgaaccgaaaaacctaaaaataacccccaaacgcaatcgccgaccgccccgataaccttctaaataacacaaaccgaaaacgaacgaacaacaaaaaaacaacgccgaccccccaaacttatctcctaaaacaccgtcccgcgaatacccccgtaaccgcccaattccgacgtccccccaacccaactctcaataaccatacaaaaaacccgaaacacgcgaaacgaaaatacgaacacgaaaacaccccccaaccccgaaatacccccgaaaaaaaccaaaataaaaaccgacgacgaaactcctataacgtaccgaccgccaatcttctacgacccctaaaaaacgcgacgatatacgcgaacaacgacgtacgactacgaataataataaacgaaacgccccaaccaacctccgctaattccgaaataacaactcctacccgcgccgacccccgaacccaactcctataactacgacgctacgaaacgcaaaacgccgacgtatacaactacataacccaaaacgaacgaaaccgaacc

SEQ ID NO: 39787 - DNA, 596 bp, Artificial Sequence
  chemically treated genomic DNA (Homo sapiens) CpG-island No: 39787
gtggagttaagttttttttttgttgttttttttttttacggttttttcgtaattcgagtcggggggtttaaaaatagtttttaggcgtaatcgtcggtcgtttcggtgattttttgggtagtataggtcgaaggcgggcgggtagtaggaaggtagcgtcggttttttagatttgttttttagggtatcgtttcgcgggtgttttcgtggtcgtttagtttcggcgtttttttagtttagtttttagtggttatgtagaaagttcggggtacgcgaggcgaggatgcgggtacgagggtattttttagtttcggagtgttttcgaaaagggttaaggtgggggtcggcggcggggtttttgtggcgtgtcggtcgttagttttttgcggtttttgaagaacgcggcggtgtgcgcgggtagcgacgtgcggttgcgggtggtggtgagcgggacgttttagttagttttcgttggtttcgggatggtagtttttgttcgcgtcggttttcgagtttagtttttgtggttgcggcgttgcggggcgtaggacgtcggcgtgtatagttgtatggtttagaacgagcggggtcgggtt

SEQ ID NO: 39788 - DNA, 596 bp, Artificial Sequence
  chemically treated genomic DNA (Homo sapiens) CpG-island No: 39788
aacccgaccccgctcgttctaaaccatacaactatacacgccgacgtcctacgccccgcaacgccgcaaccacaaaaactaaactcgaaaaccgacgcgaacaaaaactaccatcccgaaaccaacgaaaactaactaaaacgtcccgctcaccaccacccgcaaccgcacgtcgctacccgcgcacaccgccgcgttcttcaaaaaccgcaaaaaactaacgaccgacacgccacaaaaaccccgccgccgacccccaccttaacccttttcgaaaacactccgaaactaaaaaataccctcgtacccgcatcctcgcctcgcgtaccccgaactttctacataaccactaaaaactaaactaaaaaaacgccgaaactaaacgaccacgaaaacacccgcgaaacgataccctaaaaaacaaatctaaaaaaccgacgctaccttcctactacccgcccgccttcgacctatactacccaaaaaatcaccgaaacgaccgacgattacgcctaaaaactatttttaaaccccccgactcgaattacgaaaaaaccgtaaaaaaaaaaaacaacaaaaaaaaaacttaactccac

SEQ ID NO: 39789 - DNA, 880 bp, Artificial Sequence
  chemically treated genomic DNA (Homo sapiens) CpG-island No: 39789
tcgggggtgcgttcgtttcggtgtttagtttcggtttttagttttgggtttatcgttagtcggtgttagtagatttacgtcgtattttttatttatggcggggtaggcgcggacgaggattcgagtaaggaaaaggcgtaggggtttcgtgattattttacgaggttgggaggcgtttttgggtcgaaggaaaggggaagagaaagagaggaaaatggagttggtataaggcgagatcgatcgttattttagacgggaagagaagaattgggcggggagaggaggggagggagcgaggaggggagggttgtgattgagttttcgtagtcggggcgcggtttgtaggcgtcgtaagggcgttaaattaggcgttttacgtttttaattggttacgttttcgtcgttcgtataattatttttttttttcgttttcgcgagaggaaaagggcgggcgttttattttggttttcggtttttttgcgtttttgttacggtggttcgggaggcgcgcgcgagtcggagtggaggtgtacggagcgcgggcggggattgttggttattatcgttttagaattcgtcgtcggggcgggagttcgttcggtttaaggttttagagtcggatcgtcgtttttggattttgagcgggcgcgtgcggcggttacgtgggcgaggagcgcgggtcgggttgtttttcgggggtggcggttttggtttttttcgcggggttgggtttgtcggggttcggagttcgtcgggaagagttcggaaattatacgtgttttttttttcgttttgtgttttttttgtttagtgcgttgtcggtgggcgttttaggaaattggtaggaggaaaagcggttttttttgaaaaggtaattttt

SEQ ID NO: 39790 - DNA, 880 bp, Artificial Sequence
  chemically treated genomic DNA (Homo sapiens) CpG-island No: 39790
aaaaattaccttttcaaaaaaaaccgcttttcctcctaccaatttcctaaaacgcccaccgacaacgcactaaacaaaaaaaacacaaaacgaaaaaaaaaacacgtataatttccgaactcttcccgacgaactccgaaccccgacaaacccaaccccgcgaaaaaaaccaaaaccgccacccccgaaaaacaacccgacccgcgctcctcgcccacgtaaccgccgcacgcgcccgctcaaaatccaaaaacgacgatccgactctaaaaccttaaaccgaacgaactcccgccccgacgacgaattctaaaacgataataaccaacaatccccgcccgcgctccgtacacctccactccgactcgcgcgcgcctcccgaaccaccgtaacaaaaacgcaaaaaaaccgaaaaccaaaataaaacgcccgcccttttcctctcgcgaaaacgaaaaaaaaaaataattatacgaacgacgaaaacgtaaccaattaaaaacgtaaaacgcctaatttaacgcccttacgacgcctacaaaccgcgccccgactacgaaaactcaatcacaaccctcccctcctcgctccctcccctcctctccccgcccaattcttctcttcccgtctaaaataacgatcgatctcgccttataccaactccattttcctctctttctcttcccctttccttcgacccaaaaacgcctcccaacctcgtaaaataatcacgaaacccctacgccttttccttactcgaatcctcgtccgcgcctaccccgccataaataaaaaatacgacgtaaatctactaacaccgactaacgataaacccaaaactaaaaaccgaaactaaacaccgaaacgaacgcacccccga

SEQ ID NO: 39791 - DNA, 880 bp, Artificial Sequence
  chemically treated genomic DNA (Homo sapiens) CpG-island No: 39791
aagggttatttttttaaaagaagtcgtttttttttttattaattttttaaagcgtttatcggtaacgtattaaataaggagggtatagagcgggaaaaaggatacgtgtgattttcgaatttttttcggcgggtttcgggtttcggtaagtttagtttcgcgggaggaattaaggtcgttattttcgagaggtagttcggttcgcgtttttcgtttacgtggtcgtcgtacgcgttcgtttaaagtttaagggcggcgattcggttttgggattttggatcgagcgagttttcgtttcgacggcgagttttagaacggtggtggttagtagttttcgttcgcgtttcgtgtatttttatttcggttcgcgcgcgtttttcgaattatcgtggtagaggcgtaagggaatcggaagttaaaatgggacgttcgttttttttttttcgcgagggcggggaaggaaaatagttgtgcgagcgacggggacgtaattaattagaagcgtgaagcgtttgatttggcgtttttgcggcgtttgtaagtcgcgtttcggttgcggaggtttagttatagttttttttttttcgtttttttttttttttttttcgtttagttttttttttttcgtttgaggtggcggtcggtttcgttttgtgttagttttatttttttttttttttttttttttttttttcggtttaagagcgttttttagtttcgtagggtggttacggagtttttgcgttttttttttgttcgggttttcgttcgcgtttgtttcgttatgaatgaggagtacgacgtgagtttgttggtatcggttgacggtgggtttagggttgagggtcggggttgagtatcggggcgggcgtattttcgg

SEQ ID NO: 39792 - DNA, 880 bp, Artificial Sequence
  chemically treated genomic DNA (Homo sapiens) CpG-island No: 39792
ccgaaaatacgcccgccccgatactcaaccccgaccctcaaccctaaacccaccgtcaaccgataccaacaaactcacgtcgtactcctcattcataacgaaacaaacgcgaacgaaaacccgaacaaaaaaaaaacgcaaaaactccgtaaccaccctacgaaactaaaaaacgctcttaaaccgaaaaaaaaaaaaaaaaaaaaaaaaaaaaataaaactaacacaaaacgaaaccgaccgccacctcaaacgaaaaaaaaaaaactaaacgaaaaaaaaaaaaaaaaaaacgaaaaaaaaaaaactataactaaacctccgcaaccgaaacgcgacttacaaacgccgcaaaaacgccaaatcaaacgcttcacgcttctaattaattacgtccccgtcgctcgcacaactattttccttccccgccctcgcgaaaaaaaaaaaacgaacgtcccattttaacttccgattcccttacgcctctaccacgataattcgaaaaacgcgcgcgaaccgaaataaaaatacacgaaacgcgaacgaaaactactaaccaccaccgttctaaaactcgccgtcgaaacgaaaactcgctcgatccaaaatcccaaaaccgaatcgccgcccttaaactttaaacgaacgcgtacgacgaccacgtaaacgaaaaacgcgaaccgaactacctctcgaaaataacgaccttaattcctcccgcgaaactaaacttaccgaaacccgaaacccgccgaaaaaaattcgaaaatcacacgtatcctttttcccgctctataccctccttatttaatacgttaccgataaacgctttaaaaaattaataaaaaaaaaaacgacttcttttaaaaaaataaccctt

SEQ ID NO: 39793 - DNA, 515 bp, Artificial Sequence
  chemically treated genomic DNA (Homo sapiens) CpG-island No: 39793
taggtcggtatttagttcgtatggttcgcggcgtgagattcggggcgaggttttcggtaaatttcgtttttcgtttcggtatttgcggggtcgagcgttatttcggcgggtcgagaagaacgtagtcgtttgcgtatcggggtacgtaggaaggggagtggaggggaggggtttgggttcggacgtacgtgcgattttcgggagtttttcgtaatagaaatacgggttttttgtaaagtatcgttaggattcgttttttttttttttttaggtttttattttcgtcgttcgttgcgtttgtcgttttttggtttcgtttaattttgtaattagagtggaattgatttcgtagggggaatgattaggaaagggggcgtgtttgcgtgtttttggggcgggatcgtgtaggacgcgcgtacgttcgttttaggaggtttgtgtattagttgtagattcgggtcggtcgtgattggaggcggatttgtaggattttgggattgtgttttattcggtga

SEQ ID NO: 39794 - DNA, 515 bp, Artificial Sequence
  chemically treated genomic DNA (Homo sapiens) CpG-island No: 39794
tcaccgaataaaacacaatcccaaaatcctacaaatccgcctccaatcacgaccgacccgaatctacaactaatacacaaacctcctaaaacgaacgtacgcgcgtcctacacgatcccgccccaaaaacacgcaaacacgccccctttcctaatcattccccctacgaaatcaattccactctaattacaaaattaaacgaaaccaaaaaacgacaaacgcaacgaacgacgaaaataaaaacctaaaaaaaaaaaaaaaacgaatcctaacgatactttacaaaaaacccgtatttctattacgaaaaactcccgaaaatcgcacgtacgtccgaacccaaacccctcccctccactccccttcctacgtaccccgatacgcaaacgactacgttcttctcgacccgccgaaataacgctcgaccccgcaaataccgaaacgaaaaacgaaatttaccgaaaacctcgccccgaatctcacgccgcgaaccatacgaactaaataccgaccta

SEQ ID NO: 39795 - DNA, 515 bp, Artificial Sequence
  chemically treated genomic DNA (Homo sapiens) CpG-island No: 39795
ttatcgagtgaggtatagttttaaagttttgtaggttcgtttttagttacggtcgattcgggtttgtaattggtgtataagttttttgaagcgagcgtgcgcgcgttttgtacggtttcgttttaaaggtacgtagatacgtttttttttttggttattttttttgcgaagttagttttattttagttataggattgggcggggttagaaagcggtaggcgtaacgggcggcggaagtaggagtttgggaaggaagagggaacgggttttggcggtgttttgtaaagggttcgtgtttttgttgcgggaagttttcgggggtcgtacgtgcgttcgagtttaagttttttttttttatttttttttttgcgtgtttcggtacgtaagcggttacgtttttttcggttcgtcgagatggcgttcgatttcgtaggtatcggggcgggaagcggggtttgtcgagggtttcgtttcgggttttacgtcgcgggttatgcgggttggatgtcgatttg

SEQ ID NO: 39796 - DNA, 515 bp, Artificial Sequence
  chemically treated genomic DNA (Homo sapiens) CpG-island No: 39796
caaatcgacatccaacccgcataacccgcgacgtaaaacccgaaacgaaaccctcgacaaaccccgcttcccgccccgatacctacgaaatcgaacgccatctcgacgaaccgaaaaaaacgtaaccgcttacgtaccgaaacacgcaaaaaaaaaaataaaaaaaaaaaacttaaactcgaacgcacgtacgacccccgaaaacttcccgcaacaaaaacacgaaccctttacaaaacaccgccaaaacccgttccctcttccttcccaaactcctacttccgccgcccgttacgcctaccgctttctaaccccgcccaatcctataactaaaataaaactaacttcgcaaaaaaaataaccaaaaaaaaaaacgtatctacgtacctttaaaacgaaaccgtacaaaacgcgcgcacgctcgcttcaaaaaacttatacaccaattacaaacccgaatcgaccgtaactaaaaacgaacctacaaaactttaaaactatacctcactcgataa

SEQ ID NO: 39797 - DNA, 1035 bp, Artificial Sequence
  chemically treated genomic DNA (Homo sapiens) CpG-island No: 39797
  unsure (340, 456)
gcggaatagagttgggcgtggtagtgtttgcgagttagcgttacgtaattagaggcgttcgtattaatttgatttttaagagagattaagcgtagggaatagcgggtgcggatattacggcggaaggttttggaggaagtagaagtgaaggatttcgtagttttgggacggtggggtatagagagagaaagggagtttcgggcgcggcgcggtgaggatgcgagtagaggaaggatacgcggcgtcgggtatttgtcgggagcgtcggatttaatgggaggagggttcgcgtcgtattttaatttggtagaggacgttacgacgttaaggcggtcgcgangttaatgggaggtcgtcgcgggtagggacggggtcgggaagagtcggggttgggtcgcgcgaggtagttggttgattttagtttagtcgtcgtcggagaggacgggcgtcgagcgngggttgcggatttcggtttgtttttattttattttcgttgtttgtatttttcggatggtgttgattgttttttaagcggcggcgtcggcgagtcgtgaggacgcgtcggaggttgttcggggtcgaggtttttcgtcgtcggtatttttttttgcggcgttcgtgcgtgtcggttcgtaggcgggaatggcggtcgtgttttcggggaacggtcgcgtatcggtttcggttgtttttgttttttttggtttcgttgttgtgggtttcggttgcggttcggtcggtttagatgaagattttagttatcggaataaagaatcgtcggcgtcggttagtagttgtagtcgtagtttgtggttgtgtagggtttcgagtcggttcgggtcgaggtgagcgggtcgggatggggcgagcgaggttgtagggtcggttgcgtagttaattaggttttaggattttgatagcgtcgtatttcgtcggtttcgttggggggaggggagtcggtttttgttttcggggtggagggcggtcggttgcgttgtttttcggtgaggttttggtttgttcgtttttttaggg

SEQ ID NO: 39798 - DNA, 1035 bp, Artificial Sequence
  chemically treated genomic DNA (Homo sapiens) CpG-island No: 39798
  unsure (580, 696)
ccctaaaaaaacgaacaaaccaaaacctcaccgaaaaacaacgcaaccgaccgccctccaccccgaaaacaaaaaccgactcccctccccccaacgaaaccgacgaaatacgacgctatcaaaatcctaaaacctaattaactacgcaaccgaccctacaacctcgctcgccccatcccgacccgctcacctcgacccgaaccgactcgaaaccctacacaaccacaaactacgactacaactactaaccgacgccgacgattctttattccgataactaaaatcttcatctaaaccgaccgaaccgcaaccgaaacccacaacaacgaaaccaaaaaaaacaaaaacaaccgaaaccgatacgcgaccgttccccgaaaacacgaccgccattcccgcctacgaaccgacacgcacgaacgccgcaaaaaaaaataccgacgacgaaaaacctcgaccccgaacaacctccgacgcgtcctcacgactcgccgacgccgccgcttaaaaaacaatcaacaccatccgaaaaatacaaacaacgaaaataaaataaaaacaaaccgaaatccgcaacccncgctcgacgcccgtcctctccgacgacgactaaactaaaatcaaccaactacctcgcgcgacccaaccccgactcttcccgaccccgtccctacccgcgacgacctcccattaacntcgcgaccgccttaacgtcgtaacgtcctctaccaaattaaaatacgacgcgaaccctcctcccattaaatccgacgctcccgacaaatacccgacgccgcgtatccttcctctactcgcatcctcaccgcgccgcgcccgaaactccctttctctctctataccccaccgtcccaaaactacgaaatccttcacttctacttcctccaaaaccttccgccgtaatatccgcacccgctattccctacgcttaatctctcttaaaaatcaaattaatacgaacgcctctaattacgtaacgctaactcgcaaacactaccacgcccaactctattccgc

SEQ ID NO: 39799 - DNA, 1035 bp, Artificial Sequence
  chemically treated genomic DNA (Homo sapiens) CpG-island No: 39799
  unsure (580, 696)
ttttaaaggagcgggtagattaaggttttatcggaaaatagcgtagtcgatcgttttttatttcgggagtaggggtcggtttttttttttttagcgaggtcggcggagtgcggcgttattaaagttttggagtttggttaattgcgtagtcggttttgtagtttcgttcgttttatttcggttcgtttatttcgattcgggtcggttcggggttttgtatagttataggttgcggttgtagttgttggtcggcgtcggcggttttttgtttcggtggttaaggtttttatttgggtcggtcggatcgtagtcggggtttatagtagcggaattagaaagagtagaagtagtcggggtcgatgcgcggtcgtttttcggagatacggtcgttattttcgtttgcgggtcggtacgtacgggcgtcgtaagaggaagtgtcggcgacgggaagtttcgatttcgaatagttttcggcgcgtttttacgattcgtcgacgtcgtcgtttagggagtagttagtattattcgggaggtgtaagtagcgggagtgaggtgagggtaggtcgaagttcgtagtttncgttcggcgttcgtttttttcggcggcggttaaattggagttagttagttgtttcgcgcggtttagtttcgatttttttcggtttcgtttttgttcgcgacggttttttattggtntcgcgatcgttttggcgtcgtgacgttttttgttaggttgaggtgcggcgcgggttttttttttattggattcggcgttttcggtaggtattcggcgtcgcgtgttttttttttgttcgtatttttatcgcgtcgcgttcggggttttttttttttttttgtgttttatcgttttaggattgcgaggttttttatttttgttttttttagagtttttcgtcgtaatgttcgtattcgttgttttttgcgtttagttttttttagaggttaaattagtgcgagcgtttttggttacgtggcgttgattcgtaggtattgttacgtttagttttgtttcgt

SEQ ID NO: 39800 - DNA, 1035 bp, Artificial Sequence
  chemically treated genomic DNA (Homo sapiens) CpG-island No: 39800
  unsure (340, 456)
acgaaacaaaactaaacgtaacaatacctacgaatcaacgccacgtaaccaaaaacgctcgcactaatttaacctctaaaaaaaactaaacgcaaaaaacaacgaatacgaacattacgacgaaaaactctaaaaaaaacaaaaataaaaaacctcgcaatcctaaaacgataaaacacaaaaaaaaaaaaaaaaccccgaacgcgacgcgataaaaatacgaacaaaaaaaaaacacgcgacgccgaatacctaccgaaaacgccgaatccaataaaaaaaaaacccgcgccgcacctcaacctaacaaaaaacgtcacgacgccaaaacgatcgcganaccaataaaaaaccgtcgcgaacaaaaacgaaaccgaaaaaaatcgaaactaaaccgcgcgaaacaactaactaactccaatttaaccgccgccgaaaaaaacgaacgccgaacgnaaactacgaacttcgacctaccctcacctcactcccgctacttacacctcccgaataatactaactactccctaaacgacgacgtcgacgaatcgtaaaaacgcgccgaaaactattcgaaatcgaaacttcccgtcgccgacacttcctcttacgacgcccgtacgtaccgacccgcaaacgaaaataacgaccgtatctccgaaaaacgaccgcgcatcgaccccgactacttctactctttctaattccgctactataaaccccgactacgatccgaccgacccaaataaaaaccttaaccaccgaaacaaaaaaccgccgacgccgaccaacaactacaaccgcaacctataactatacaaaaccccgaaccgacccgaatcgaaataaacgaaccgaaataaaacgaacgaaactacaaaaccgactacgcaattaaccaaactccaaaactttaataacgccgcactccgccgacctcgctaaaaaaaaaaaaaccgacccctactcccgaaataaaaaacgatcgactacgctattttccgataaaaccttaatctacccgctcctttaaaa

SEQ ID NO: 39801 - DNA, 526 bp, Artificial Sequence
  chemically treated genomic DNA (Homo sapiens) CpG-island No: 39801
  unsure (171)
ggttaggggttcgtcgattttttttagcgtttcgggcggcggggttcgagaattaaggtggttttcgcggtttcgtcgcgcgttttttttttttttttcgcggatttcgcgggtcgtcgtttatttcgcgtatttcgttttttggaaatttagtagtcggggggcgaatantgcggcgtttttatgggaatttggtttcgggtttagagcgcgggtagttggtagagtttggggggcgcggcggcggtagtagtaggttggagggcgcgcggcgggggttaaggggatttggtcggcgttcggagtcggagtcggagttcgagtcggagttggaggcgttcggagtcgtcgacgttaaatttcgagtagatggtggcgggggcggggcgggcgggggtacgggggggttttcgggttcgcgttgttaatcgcgttaagttcggttttttttttttcgcgatttcgtcgttttcgttgaggtggaggagggtcgtggggagatgggggggtgggagaggtgggggtg

SEQ ID NO: 39802 - DNA, 526 bp, Artificial Sequence
  chemically treated genomic DNA (Homo sapiens) CpG-island No: 39802
  unsure (356)
cacccccacctctcccacccccccatctccccacgaccctcctccacctcaacgaaaacgacgaaatcgcgaaaaaaaaaaaaccgaacttaacgcgattaacaacgcgaacccgaaaacccccccgtacccccgcccgccccgcccccgccaccatctactcgaaatttaacgtcgacgactccgaacgcctccaactccgactcgaactccgactccgactccgaacgccgaccaaatccccttaacccccgccgcgcgccctccaacctactactaccgccgccgcgccccccaaactctaccaactacccgcgctctaaacccgaaaccaaattcccataaaaacgccgcantattcgccccccgactactaaatttccaaaaaacgaaatacgcgaaataaacgacgacccgcgaaatccgcgaaaaaaaaaaaaaaaacgcgcgacgaaaccgcgaaaaccaccttaattctcgaaccccgccgcccgaaacgctaaaaaaaatcgacgaacccctaacc

SEQ ID NO: 39803 - DNA, 526 bp, Artificial Sequence
  chemically treated genomic DNA (Homo sapiens) CpG-island No: 39803
  unsure (356)
tatttttattttttttatttttttatttttttacgatttttttttattttagcggaggcggcggggtcgcgggagggagggggtcgggtttagcgcgattggtagcgcgagttcgggagttttttcgtgttttcgttcgtttcgttttcgttattatttgttcgggatttggcgtcggcggtttcgggcgtttttagtttcggttcgggtttcggtttcggtttcgggcgtcgattaggtttttttggttttcgtcgcgcgttttttaatttgttgttgtcgtcgtcgcgttttttaggttttgttagttattcgcgttttgagttcggggttagatttttatggaagcgtcgtantgttcgtttttcggttgttggatttttagaagacgaaatacgcgaggtgagcggcggttcgcgaggttcgcggggagggagggaggggcgcgcggcggggtcgcggaggttattttggttttcgggtttcgtcgttcggagcgttagaggggatcggcggatttttgatt

SEQ ID NO: 39804 - DNA, 526 bp, Artificial Sequence
  chemically treated genomic DNA (Homo sapiens) CpG-island No: 39804
  unsure (171)
aatcaaaaatccgccgatcccctctaacgctccgaacgacgaaacccgaaaaccaaaataacctccgcgaccccgccgcgcgcccctccctccctccccgcgaacctcgcgaaccgccgctcacctcgcgtatttcgtcttctaaaaatccaacaaccgaaaaacgaacantacgacgcttccataaaaatctaaccccgaactcaaaacgcgaataactaacaaaacctaaaaaacgcgacgacgacaacaacaaattaaaaaacgcgcgacgaaaaccaaaaaaacctaatcgacgcccgaaaccgaaaccgaaacccgaaccgaaactaaaaacgcccgaaaccgccgacgccaaatcccgaacaaataataacgaaaacgaaacgaacgaaaacacgaaaaaactcccgaactcgcgctaccaatcgcgctaaacccgaccccctccctcccgcgaccccgccgcctccgctaaaataaaaaaaaatcgtaaaaaaataaaaaaataaaaaaaataaaaata

SEQ ID NO: 39805 - DNA, 637 bp, Artificial Sequence
  chemically treated genomic DNA (Homo sapiens) CpG-island No: 39805
  unsure (139)
cggatgtatttcgcgatttttttcgtagtcgttgtcggggttatagcgaggttatgacgttcgtgacgtatacgtagttagtacgtacgcgcgcgcgtggttcgttttttttttttatttcggagcggggtcgtgagtnttcgttcgtttcggagcgtacgtttttttcgggtttcgtttttagttcgtttaggatcgtttggagtcgtagttcgtttgttaaattcggttgggaacgtttggtagtttttaggaggggcgggttcgggggtggtggttttaggagcggttgtcgcggggatcgggtagtgacgcgtttaagggcggaagtgagaaagttgtttgcgtttcgaggcgagttggcggagttgtggcgcggcggggcgatggggggttcgggtagtcgtttgtttaaggagttgttggtcgagtattaggtgcgcgggacgtttggttttggggagttcgcgtgcgggttttttttcgggagtagggttcgggagttggttgcggggacgtcgcggttttttagcggttcgttaattttcgttttggttttgttttttaggatttgacgtttttgacgaagtaggagatttttttgtaagtgttgttttgaattttgttttcgatttcg

SEQ ID NO: 39806 - DNA, 637 bp, Artificial Sequence
  chemically treated genomic DNA (Homo sapiens) CpG-island No: 39806
  unsure (499)
cgaaatcgaaaacaaaattcaaaacaacacttacaaaaaaatctcctacttcgtcaaaaacgtcaaatcctaaaaaacaaaaccaaaacgaaaattaacgaaccgctaaaaaaccgcgacgtccccgcaaccaactcccgaaccctactcccgaaaaaaaacccgcacgcgaactccccaaaaccaaacgtcccgcgcacctaatactcgaccaacaactccttaaacaaacgactacccgaaccccccatcgccccgccgcgccacaactccgccaactcgcctcgaaacgcaaacaactttctcacttccgcccttaaacgcgtcactacccgatccccgcgacaaccgctcctaaaaccaccacccccgaacccgcccctcctaaaaactaccaaacgttcccaaccgaatttaacaaacgaactacgactccaaacgatcctaaacgaactaaaaacgaaacccgaaaaaaacgtacgctccgaaacgaacgaanactcacgaccccgctccgaaataaaaaaaaaaaacgaaccacgcgcgcgcgtacgtactaactacgtatacgtcacgaacgtcataacctcgctataaccccgacaacgactacgaaaaaaatcgcgaaatacatccg

SEQ ID NO: 39807 - DNA, 637 bp, Artificial Sequence
  chemically treated genomic DNA (Homo sapiens) CpG-island No: 39807
  unsure (499)
cggggtcggaggtagggtttaaggtagtatttataggaggattttttgtttcgttaggaacgttaagttttggaaggtaaagttagagcggggattagcggatcgttgggaggtcgcggcgttttcgtagttagttttcggattttgttttcgagaagaggttcgtacgcgagttttttagggttaggcgtttcgcgtatttggtattcggttagtagttttttggataggcgattgttcgagttttttatcgtttcgtcgcgttatagtttcgttaattcgtttcgagacgtagataatttttttattttcgtttttgggcgcgttattgttcggttttcgcggtaatcgtttttggggttattattttcgggttcgttttttttaaaagttgttaggcgtttttagtcgggtttggtaggcgagttgcggttttaagcggttttaggcgagttggaggcggggttcggggagggcgtacgtttcggggcggacgganatttacggtttcgtttcggggtgggaggggggggcgggttacgcgcgcgcgtgcgtgttggttgcgtatgcgttacgggcgttatgatttcgttgtggtttcggtagcggttgcggggaaagtcgcgaggtgtattcg

SEQ ID NO: 39808 - DNA, 637 bp, Artificial Sequence
  chemically treated genomic DNA (Homo sapiens) CpG-island No: 39808
  unsure (139)
cgaatacacctcgcgactttccccgcaaccgctaccgaaaccacaacgaaatcataacgcccgtaacgcatacgcaaccaacacgcacgcgcgcgcgtaacccgcccccccctcccaccccgaaacgaaaccgtaaatntccgtccgccccgaaacgtacgccctccccgaaccccgcctccaactcgcctaaaaccgcttaaaaccgcaactcgcctaccaaacccgactaaaaacgcctaacaacttttaaaaaaaacgaacccgaaaataataaccccaaaaacgattaccgcgaaaaccgaacaataacgcgcccaaaaacgaaaataaaaaaattatctacgtctcgaaacgaattaacgaaactataacgcgacgaaacgataaaaaactcgaacaatcgcctatccaaaaaactactaaccgaataccaaatacgcgaaacgcctaaccctaaaaaactcgcgtacgaacctcttctcgaaaacaaaatccgaaaactaactacgaaaacgccgcgacctcccaacgatccgctaatccccgctctaactttaccttccaaaacttaacgttcctaacgaaacaaaaaatcctcctataaatactaccttaaaccctacctccgaccccg

SEQ ID NO: 39809 - DNA, 539 bp, Artificial Sequence
  chemically treated genomic DNA (Homo sapiens) CpG-island No: 39809
cggttattttcgtacgaggtacgttttcggtagttttttttttttcggttcgcgttttcgggttttcggtatttatttagaggtaggttgtattcgggggttgagcgttaggatcggaggcggcggttttatttgagttgtaatgagcgagtagtagttcgttgcgcgatagttattcgtttttttggggatgtttatattttattagtttatcgcgttggtatattcggagagttcgatatcgttgttcgttgtttattttattttgttatcgttttttattttcgtattacgttttcgtttcgttttcgattcgttcgcgttcgtcgtttttcgttttcgcgtttttatttcgtatttacgttatcgttttttttttatatttttttttatttttgtattcgtttttttttttttggttatttttcgtttattatttatttttttatattcgttattaagtcgttacgcgttgttagtttatttttattttcgcgttcgtcgcgttttttcgtttatttttttttgtcgaggcgcgt

SEQ ID NO: 39810 - DNA, 539 bp, Artificial Sequence
  chemically treated genomic DNA (Homo sapiens) CpG-island No: 39810
acgcgcctcgacaaaaaaaaataaacgaaaaaacgcgacgaacgcgaaaataaaaataaactaacaacgcgtaacgacttaataacgaatataaaaaaataaataataaacgaaaaataaccaaaaaaaaaaaaacgaatacaaaaataaaaaaaaatataaaaaaaaaacgataacgtaaatacgaaataaaaacgcgaaaacgaaaaacgacgaacgcgaacgaatcgaaaacgaaacgaaaacgtaatacgaaaataaaaaacgataacaaaataaaataaacaacgaacaacgatatcgaactctccgaatataccaacgcgataaactaataaaatataaacatccccaaaaaaacgaataactatcgcgcaacgaactactactcgctcattacaactcaaataaaaccgccgcctccgatcctaacgctcaacccccgaatacaacctacctctaaataaataccgaaaacccgaaaacgcgaaccgaaaaaaaaaaaactaccgaaaacgtacctcgtacgaaaataaccg

SEQ ID NO: 39811 - DNA, 539 bp, Artificial Sequence
  chemically treated genomic DNA (Homo sapiens) CpG-island No: 39811
gcgcgtttcggtagggagagatgagcgagggagcgcggcgagcgcgagggtgggggtggattggtagcgcgtggcggtttgatggcgggtgtgggggggtgagtggtgggcggggagtggttaggggggaggaagcgggtgtaggggtaggggggagtgtggagggggagcggtagcgtgggtgcgaggtgggggcgcgagggcgggaggcggcggacgcgggcgagtcgggggcgggacgggggcgtagtgcgagagtgagggacggtagtaggatggggtgggtagcggataacggtgtcgggtttttcgaatgtgttagcgcgatgggttgatggagtgtgggtatttttagaggggcgagtggttgtcgcgtaacgggttattgttcgtttattgtagtttaggtggagtcgtcgttttcgattttggcgtttagttttcggatgtagtttgtttttgggtgagtgtcggggattcggggacgcgggtcgggggaaggaaggttgtcggggacgtgtttcgtgcggaggtggtcg

SEQ ID NO: 39812 - DNA, 539 bp, Artificial Sequence
  chemically treated genomic DNA (Homo sapiens) CpG-island No: 39812
cgaccacctccgcacgaaacacgtccccgacaaccttccttcccccgacccgcgtccccgaatccccgacactcacccaaaaacaaactacatccgaaaactaaacgccaaaatcgaaaacgacgactccacctaaactacaataaacgaacaataacccgttacgcgacaaccactcgcccctctaaaaatacccacactccatcaacccatcgcgctaacacattcgaaaaacccgacaccgttatccgctacccaccccatcctactaccgtccctcactctcgcactacgcccccgtcccgcccccgactcgcccgcgtccgccgcctcccgccctcgcgcccccacctcgcacccacgctaccgctccccctccacactcccccctacccctacacccgcttcctcccccctaaccactccccgcccaccactcacccccccacacccgccatcaaaccgccacgcgctaccaatccacccccaccctcgcgctcgccgcgctccctcgctcatctctccctaccgaaacgcgc

SEQ ID NO: 39813 - DNA, 668 bp, Artificial Sequence
  chemically treated genomic DNA (Homo sapiens) CpG-island No: 39813
gcggtcgtggggaggcggattcgataggttagggtggtcgtggtatcgagtttatcgttggtgtaaaatgtcgggggtcggtggcggtggtggggcgggggtacggttcgtattaggtaaatttcggaggcgttttttggataattttcgtaaatacgggtagagcggggcggggttgggcggggtttggcgggggtttagtattttcggggacgtcgcgtcggattgaggttgtgcgttcgagatttcgggtttttaggggttgcgcgggtcggtttggtaagggggacgagttagtggatattttaggaagagcggtttcgcggggggaatgtatcgtgcgttgattttgatttattttaggtaggcgcggggggtgtttggcgaggtgggagtcgttgttcgggaggtggcggattaggcgaaaatcgtcgcgtagcggttgtttttatttttggattcgtatttatcgatcggtttttttttttagaaggcgttatttgtacgttttgatgggtattggggtcgtcgttcggggagtttgttgttatagtacgtaggaggttgggtcgcgtttttatagttatcgggggtttttgagtagcgtttatatcgcgttagtgtattatttttatttttaaattcgggatttggtattggggggaagt

SEQ ID NO: 39814 - DNA, 668 bp, Artificial Sequence
  chemically treated genomic DNA (Homo sapiens) CpG-island No: 39814
acttccccccaataccaaatcccgaatttaaaaataaaaataatacactaacgcgatataaacgctactcaaaaacccccgataactataaaaacgcgacccaacctcctacgtactataacaacaaactccccgaacgacgaccccaatacccatcaaaacgtacaaataacgccttctaaaaaaaaaaaccgatcgataaatacgaatccaaaaataaaaacaaccgctacgcgacgattttcgcctaatccgccacctcccgaacaacgactcccacctcgccaaacaccccccgcgcctacctaaaataaatcaaaatcaacgcacgatacattccccccgcgaaaccgctcttcctaaaatatccactaactcgtcccccttaccaaaccgacccgcgcaacccctaaaaacccgaaatctcgaacgcacaacctcaatccgacgcgacgtccccgaaaatactaaacccccgccaaaccccgcccaaccccgccccgctctacccgtatttacgaaaattatccaaaaaacgcctccgaaatttacctaatacgaaccgtacccccgccccaccaccgccaccgacccccgacattttacaccaacgataaactcgataccacgaccaccctaacctatcgaatccgcctccccacgaccgc

SEQ ID NO: 39815 - DNA, 668 bp, Artificial Sequence
  chemically treated genomic DNA (Homo sapiens) CpG-island No: 39815
atttttttttagtattaggtttcgggtttaggagtaggggtggtgtattggcgcgatgtgaacgttgtttaaaggttttcggtggttatgggaacgcggtttagttttttgcgtgttatggtaataggtttttcgggcggcggttttagtgtttattagagcgtgtaggtggcgttttttggggagagggatcggtcggtaggtgcgagtttaagaatgggggtagtcgttgcgcggcggttttcgtttggttcgttatttttcgggtagcggtttttatttcgttaggtatttttcgcgtttatttggagtgagttagggttagcgtacggtatatttttttcgcggggtcgttttttttggagtgtttattgattcgttttttttgttaggtcggttcgcgtagtttttggggattcggagtttcgggcgtatagttttagttcggcgcggcgttttcggaaatgttgggttttcgttaagtttcgtttagtttcgtttcgttttgttcgtgtttacgggaattgtttagagggcgttttcgggatttgtttgatgcgggtcgtgttttcgttttattatcgttatcggttttcggtattttgtattaacgatggattcgatgttacgattattttggtttgtcgggttcgtttttttacgatcgt

SEQ ID NO: 39816 - DNA, 668 bp, Artificial Sequence
  chemically treated genomic DNA (Homo sapiens) CpG-island No: 39816
acgatcgtaaaaaaacgaacccgacaaaccaaaataatcgtaacatcgaatccatcgttaatacaaaataccgaaaaccgataacgataataaaacgaaaacacgacccgcatcaaacaaatcccgaaaacgccctctaaacaattcccgtaaacacgaacaaaacgaaacgaaactaaacgaaacttaacgaaaacccaacatttccgaaaacgccgcgccgaactaaaactatacgcccgaaactccgaatccccaaaaactacgcgaaccgacctaacaaaaaaaacgaatcaataaacactccaaaaaaaacgaccccgcgaaaaaaatataccgtacgctaaccctaactcactccaaataaacgcgaaaaatacctaacgaaataaaaaccgctacccgaaaaataacgaaccaaacgaaaaccgccgcgcaacgactacccccattcttaaactcgcacctaccgaccgatccctctccccaaaaaacgccacctacacgctctaataaacactaaaaccgccgcccgaaaaacctattaccataacacgcaaaaaactaaaccgcgttcccataaccaccgaaaacctttaaacaacgttcacatcgcgccaatacaccacccctactcctaaacccgaaacctaatactaaaaaaaaat

SEQ ID NO: 39817 - DNA, 546 bp, Artificial Sequence
  chemically treated genomic DNA (Homo sapiens) CpG-island No: 39817
  unsure (228..)
ttttgtagtttttcggttcgttttcgcgtttttttttacgtttcgtgtttgtttttttttttatttttgtagcgaggaggttaagagtattatttggttgtatttcgttatcggcgaggcggtggttatcggatatcggcggtagagtataggtaacgtcgggtttaaacggagttggttcgtttggaggaggcggtagagttcgggcgttcggtttttcgtaatttnngttttcgcgggtttcgggaggcggcgaggcggggcggaggtcgggcgggagcggtcgtaggtagaggggttacggggatttcgtcgtcgggagttttttttagtttcggggcgtttttttttttttagttttttattagtatttggagacggcgttttttttttgcgttttttttttttattttagtttagacgattttcgcgattttagagtggcgacgtttttttttttgaaatttggagttttgagtttttttttcgcggtcgttatttatttttcggtgatttttagttgtcgttttgttttttagtaatttt

SEQ ID NO: 39818 - DNA, 546 bp, Artificial Sequence
  chemically treated genomic DNA (Homo sapiens) CpG-island No: 39818
  unsure (318..)
aaaattactaaaaaacaaaacgacaactaaaaatcaccgaaaaataaataacgaccgcgaaaaaaaaactcaaaactccaaatttcaaaaaaaaaaacgtcgccactctaaaatcgcgaaaatcgtctaaactaaaataaaaaaaaaaaacgcaaaaaaaaaacgccgtctccaaatactaataaaaaactaaaaaaaaaaaaacgccccgaaactaaaaaaaactcccgacgacgaaatccccgtaacccctctacctacgaccgctcccgcccgacctccgccccgcctcgccgcctcccgaaacccgcgaaaacnnaaattacgaaaaaccgaacgcccgaactctaccgcctcctccaaacgaaccaactccgtttaaacccgacgttacctatactctaccgccgatatccgataaccaccgcctcgccgataacgaaatacaaccaaataatactcttaacctcctcgctacaaaaataaaaaaaaaaacaaacacgaaacgtaaaaaaaaacgcgaaaacgaaccgaaaaactacaaaa

SEQ ID NO: 39819 - DNA, 546 bp, Artificial Sequence
  chemically treated genomic DNA (Homo sapiens) CpG-island No: 39819
  unsure (318..)
aagattgttggggggtaagacggtagttgggggttatcggggagtgagtagcggtcgcggaggaaaaatttaggattttaggttttagggaggggagcgtcgttattttagggtcgcgagggtcgtttaggttgggatggggggagaaggcgtaggaagagggcgtcgtttttaagtgttgatgaaaggttgaggagaaagaggcgtttcgagattggagagaattttcggcggcggagttttcgtggtttttttatttgcggtcgttttcgttcggttttcgtttcgtttcgtcgtttttcggggttcgcgggggtnnaggttgcggggagtcgggcgttcgggttttgtcgttttttttaggcgagttaatttcgtttgggttcggcgttatttgtgttttgtcgtcggtgttcggtgattatcgtttcgtcggtgacggggtgtagttaggtggtgtttttggttttttcgttgtaggggtgagagaaggggtagatacggagcgtgagaggggacgcgggggcgagtcgaggggttgtagga

SEQ ID NO: 39820 - DNA, 546 bp, Artificial Sequence
  chemically treated genomic DNA (Homo sapiens) CpG-island No: 39820
  unsure (228..)
tcctacaacccctcgactcgcccccgcgtcccctctcacgctccgtatctaccccttctctcacccctacaacgaaaaaaccaaaaacaccacctaactacaccccgtcaccgacgaaacgataatcaccgaacaccgacgacaaaacacaaataacgccgaacccaaacgaaattaactcgcctaaaaaaaacgacaaaacccgaacgcccgactccccgcaacctnnacccccgcgaaccccgaaaaacgacgaaacgaaacgaaaaccgaacgaaaacgaccgcaaataaaaaaaccacgaaaactccgccgccgaaaattctctccaatctcgaaacgcctctttctcctcaacctttcatcaacacttaaaaacgacgccctcttcctacgccttctccccccatcccaacctaaacgaccctcgcgaccctaaaataacgacgctcccctccctaaaacctaaaatcctaaatttttcctccgcgaccgctactcactccccgataacccccaactaccgtcttaccccccaacaatctt

SEQ ID NO: 39821 - DNA, 579 bp, Artificial Sequence
  chemically treated genomic DNA (Homo sapiens) CpG-island No: 39821
gcgagcgtttgaatttcgcgttgttttttagttttatcgagacgtaggttaaaatttggttttagaatcgtaggattaagtggaagaagtagaattcgggtgtcgatagcggcgtaggtggggggtggcgttttagttaggcggggggcggcggcggcggcggttcggggggtagttttggtttttcggtatcggcgttttgtatttttagattttttttttttatttcgcggttaatgtttttttttcgttcgtcgtttttttttcgttgacggttgtcgttttcgggagttttttcgcgtcgttttttgggtttttttatttgatttttttttacgtttcgcgtttatgaattcggagttttttggttttttttcgcgggatttacgagggattggtatcgtcgtgtgttttcggtttttttatcgggggtgtaggtgcgcgggtgttagcgtacgttcgtgttcgtcgcgttagacgattttcgcgggttattaaggggttagggatttgtcgttttttaaagtgttcggggacggaggttgattttaagttttgtcgtttttggattttgttgtt

SEQ ID NO: 39822 - DNA, 579 bp, Artificial Sequence
  chemically treated genomic DNA (Homo sapiens) CpG-island No: 39822
aacaacaaaatccaaaaacgacaaaacttaaaatcaacctccgtccccgaacactttaaaaaacgacaaatccctaaccccttaataacccgcgaaaatcgtctaacgcgacgaacacgaacgtacgctaacacccgcgcacctacacccccgataaaaaaaccgaaaacacacgacgataccaatccctcgtaaatcccgcgaaaaaaaaccaaaaaactccgaattcataaacgcgaaacgtaaaaaaaaatcaaataaaaaaacccaaaaaacgacgcgaaaaaactcccgaaaacgacaaccgtcaacgaaaaaaaaacgacgaacgaaaaaaaaacattaaccgcgaaataaaaaaaaaaaatctaaaaatacaaaacgccgataccgaaaaaccaaaactaccccccgaaccgccgccgccgccgccccccgcctaactaaaacgccaccccccacctacgccgctatcgacacccgaattctacttcttccacttaatcctacgattctaaaaccaaattttaacctacgtctcgataaaactaaaaaacaacgcgaaattcaaacgctcgc

SEQ ID NO: 39823 - DNA, 579 bp, Artificial Sequence
  chemically treated genomic DNA (Homo sapiens) CpG-island No: 39823
aatagtaaggtttagaaacggtaaggtttgaggttagttttcgttttcggatattttgaaggacggtagatttttgattttttggtggttcgcgagagtcgtttagcgcggcgggtacgggcgtgcgttgatattcgcgtatttgtattttcggtggaggagtcgagggtatacgacgatgttaatttttcgtgaatttcgcgaaagagggttagggggtttcggatttatagacgcggggcgtagaagggggttaggtaggaaggtttaaggaacggcgcgaaagggttttcgggggcggtagtcgttagcgggaaggaggcggcggacgggaagaggatattggtcgcggagtaggaggggaaagtttggaagtgtagagcgtcggtgtcgggaggttaggattgtttttcgagtcgtcgtcgtcgtcgtttttcgtttggttggggcgttattttttatttgcgtcgttgtcggtattcgggttttgttttttttatttggttttgcgattttggaattagattttgatttgcgtttcggtgaggttgagagatagcgcgaggtttaggcgttcgt

SEQ ID NO: 39824 - DNA, 579 bp, Artificial Sequence
  chemically treated genomic DNA (Homo sapiens) CpG-island No: 39824
acgaacgcctaaacctcgcgctatctctcaacctcaccgaaacgcaaatcaaaatctaattccaaaatcgcaaaaccaaataaaaaaaacaaaacccgaataccgacaacgacgcaaataaaaaataacgccccaaccaaacgaaaaacgacgacgacgacgactcgaaaaacaatcctaacctcccgacaccgacgctctacacttccaaactttcccctcctactccgcgaccaatatcctcttcccgtccgccgcctccttcccgctaacgactaccgcccccgaaaaccctttcgcgccgttccttaaaccttcctacctaacccccttctacgccccgcgtctataaatccgaaaccccctaaccctctttcgcgaaattcacgaaaaattaacatcgtcgtataccctcgactcctccaccgaaaatacaaatacgcgaatatcaacgcacgcccgtacccgccgcgctaaacgactctcgcgaaccaccaaaaaatcaaaaatctaccgtccttcaaaatatccgaaaacgaaaactaacctcaaaccttaccgtttctaaaccttactatt

SEQ ID NO: 39825 - DNA, 509 bp, Artificial Sequence
  chemically treated genomic DNA (Homo sapiens) CpG-island No: 39825
tatcggggtgggaagggggagatcgaggcggggttgcgcggtttttatgtcgtttcgttttttgtcggtagttagggagcgggttgagtttagagttcggcgattttagcggcgtttcggggtttatttatttggttatcgtttttatcgagtcggcgatggcgtgtcgtcgttcgcgtcgttgtcgtatagtacgttcgagatgttaagtagtatttcgcgtacgttagttagtcgtttgttttacggtgttatggcgttcggttttgttttttagtttcgcgttttaatcgacgtttgcgtcggcgtcgcggtcgcgtaggggcgtttgggaattgtagtttcgcgagcggggtagggtaagaagacgggtgtaaattcggaagttggggcgcggtttgggtatttacgcgttattcgtttttgaaacggtgtttttttcggaagttttttttttaggagattagcggataaagagtaggaaaagtagaaaataagtttttaagaaa

SEQ ID NO: 39826 - DNA, 509 bp, Artificial Sequence
  chemically treated genomic DNA (Homo sapiens) CpG-island No: 39826
tttcttaaaaacttattttctacttttcctactctttatccgctaatctcctaaaaaaaaaacttccgaaaaaaacaccgtttcaaaaacgaataacgcgtaaatacccaaaccgcgccccaacttccgaatttacacccgtcttcttaccctaccccgctcgcgaaactacaattcccaaacgcccctacgcgaccgcgacgccgacgcaaacgtcgattaaaacgcgaaactaaaaaacaaaaccgaacgccataacaccgtaaaacaaacgactaactaacgtacgcgaaatactacttaacatctcgaacgtactatacgacaacgacgcgaacgacgacacgccatcgccgactcgataaaaacgataaccaaataaataaaccccgaaacgccgctaaaatcgccgaactctaaactcaacccgctccctaactaccgacaaaaaacgaaacgacataaaaaccgcgcaaccccgcctcgatctcccccttcccaccccgata

SEQ ID NO: 39827 - DNA, 509 bp, Artificial Sequence
  chemically treated genomic DNA (Homo sapiens) CpG-island No: 39827
ttttttagggatttgttttttgttttttttgttttttgttcgttgattttttgggaagaaagttttcgaaaaggatatcgttttaggggcgagtgacgcgtgggtgtttaggtcgcgttttagttttcgggtttgtattcgtttttttgttttgtttcgttcgcgggattatagtttttaggcgtttttgcgcggtcgcggcgtcggcgtaggcgtcggttgggacgcggagttgaggagtagggtcgggcgttatggtatcgtggggtaagcggttggttggcgtgcgcggggtgttgtttgatatttcgggcgtgttgtacgatagcggcgcgggcggcggtacgttatcgtcggttcggtggaggcggtggttaggtgagtgggtttcgggacgtcgttggggtcgtcgagttttaagtttagttcgttttttggttgtcggtagggggcggggcggtatgagggtcgcgtagtttcgtttcggtttttttttttttatttcggtg

SEQ ID NO: 39828 - DNA, 509 bp, Artificial Sequence
  chemically treated genomic DNA (Homo sapiens) CpG-island No: 39828
caccgaaataaaaaaaaaaaaaccgaaacgaaactacgcgaccctcataccgccccgccccctaccgacaaccaaaaaacgaactaaacttaaaactcgacgaccccaacgacgtcccgaaacccactcacctaaccaccgcctccaccgaaccgacgataacgtaccgccgcccgcgccgctatcgtacaacacgcccgaaatatcaaacaacaccccgcgcacgccaaccaaccgcttaccccacgataccataacgcccgaccctactcctcaactccgcgtcccaaccgacgcctacgccgacgccgcgaccgcgcaaaaacgcctaaaaactataatcccgcgaacgaaacaaaacaaaaaaacgaatacaaacccgaaaactaaaacgcgacctaaacacccacgcgtcactcgcccctaaaacgatatccttttcgaaaactttcttcccaaaaaatcaacgaacaaaaaacaaaaaaaacaaaaaacaaatccctaaaaaa

SEQ ID NO: 39829 - DNA, 570 bp, Artificial Sequence
  chemically treated genomic DNA (Homo sapiens) CpG-island No: 39829
gcgtgtatattcggcgagatttttttaggaaagtcggggagtcgcgcgggatttagttttgcgtttagttcggcggacgttagttgtagtggtcgtattcgtcggttcgcgttggttggttttgtcgttacgtcgtgcgggataatttcgggcgtttattggtcggtcggcggggggggcgggacggggggcggaatcggaatcggtagtggtttgggggcgggatttcgcggattgttgtggcggtacgtggagcggcggtcgcgatggtagaatcgggggcggttttgtagtttggagttttatagtgcggggtcgcggtaggttataggaagagttcgaggttcgggcgtatcggttgagtgtgcggtttcgcggttcggagtcgcgtcgtttatcgagttttttcggcgcgaggtcggcgcgtatggggtttttgtttcggagcgagatatgtgtttggcgtattttttttgtagtcgggttacgattaacgagtgttttagcgattttgggtagaatagggttttttttagtttcggagagttgaatgttattcggggagaacgg

SEQ ID NO: 39830 - DNA, 570 bp, Artificial Sequence
  chemically treated genomic DNA (Homo sapiens) CpG-island No: 39830
ccgttctccccgaataacattcaactctccgaaactaaaaaaaaccctattctacccaaaatcgctaaaacactcgttaatcgtaacccgactacaaaaaaaatacgccaaacacatatctcgctccgaaacaaaaaccccatacgcgccgacctcgcgccgaaaaaactcgataaacgacgcgactccgaaccgcgaaaccgcacactcaaccgatacgcccgaacctcgaactcttcctataacctaccgcgaccccgcactataaaactccaaactacaaaaccgcccccgattctaccatcgcgaccgccgctccacgtaccgccacaacaatccgcgaaatcccgcccccaaaccactaccgattccgattccgccccccgtcccgccccccccgccgaccgaccaataaacgcccgaaattatcccgcacgacgtaacgacaaaaccaaccaacgcgaaccgacgaatacgaccactacaactaacgtccgccgaactaaacgcaaaactaaatcccgcgcgactccccgactttcctaaaaaaatctcgccgaatatacacgc

SEQ ID NO: 39831 - DNA, 570 bp, Artificial Sequence
  chemically treated genomic DNA (Homo sapiens) CpG-island No: 39831
tcgtttttttcgggtgatatttaatttttcggaattggaggaggttttattttgtttagggtcgttgaggtattcgttagtcgtggttcgattgtaggaagagtgcgttaggtatatgtttcgtttcggaatagggattttatgcgcgtcgatttcgcgtcggaggggttcgatgggcggcgcggtttcgagtcgcggggtcgtatatttagtcggtgcgttcgggtttcgagttttttttgtggtttgtcgcggtttcgtattatggggttttagattgtagggtcgttttcggttttgttatcgcggtcgtcgttttacgtgtcgttatagtagttcgcgaggtttcgtttttaagttattgtcggtttcggtttcgtttttcgtttcgtttttttcgtcggtcgattaatggacgttcgaggttgtttcgtacgacgtggcggtagggttaattagcgcgaatcggcgggtacgattattgtagttggcgttcgtcggattggacgtagagttaaatttcgcgcggtttttcggtttttttggaggagtttcgtcgagtgtgtacgt

SEQ ID NO: 39832 - DNA, 570 bp, Artificial Sequence
  chemically treated genomic DNA (Homo sapiens) CpG-island No: 39832
acgtacacactcgacgaaactcctccaaaaaaaccgaaaaaccgcgcgaaatttaactctacgtccaatccgacgaacgccaactacaataatcgtacccgccgattcgcgctaattaaccctaccgccacgtcgtacgaaacaacctcgaacgtccattaatcgaccgacgaaaaaaacgaaacgaaaaacgaaaccgaaaccgacaataacttaaaaacgaaacctcgcgaactactataacgacacgtaaaacgacgaccgcgataacaaaaccgaaaacgaccctacaatctaaaaccccataatacgaaaccgcgacaaaccacaaaaaaaactcgaaacccgaacgcaccgactaaatatacgaccccgcgactcgaaaccgcgccgcccatcgaacccctccgacgcgaaatcgacgcgcataaaatccctattccgaaacgaaacatatacctaacgcactcttcctacaatcgaaccacgactaacgaatacctcaacgaccctaaacaaaataaaacctcctccaattccgaaaaattaaatatcacccgaaaaaaacga

SEQ ID NO: 39833 - DNA, 755 bp, Artificial Sequence
  chemically treated genomic DNA (Homo sapiens) CpG-island No: 39833
ggcgggcggtagcgtttgtggatagtatttgaggtcggggcggacgatgggtaggttttagtagtttcggcgttcgcgagataggtcgggacgggtaggagggaagttcggggaagggagcggcgcgtcgaggtttattaatttttatttttatttttttcggtattatagtgcggtagatgaagagcgtcgagggtttttttttttcgttcgtttggttgaggaagtgtaagatgaggttttcgttttggtcgtcgtcgcggttgagtaggttttcgaaaagttgggggtcggtgatgtcgaaagtcgtatatacgcggtcgcgtatttatagtattcgtaggtcgtttatggcgtcgcgtagtgtagagggagtcgggcgtagggcgggcgttcgtggtaacggcggttttagtaatgggcgtttcggaaacggtcgtagttcgtttcgtcgacggttcggcgtttgggggttgtaagttcggtagtgtttcgcgttcggtttttcgatttcgaattcgcgattcgtagtttacgttcggtttcgggatttcggaggcgcgtattaggttttcgggtcgtcgaggtaggttggttgttttttggtttcggtagcgcgtacgtttttggatgcggagcggattttcgtcgttaggagtcgtttcgggtcgttgtagtcgagggtgcgattttattttacgtcgatcggtttgtaagtagttcgtttattttgtagatgaagttggggttagaga

SEQ ID NO: 39834 - DNA, 755 bp, Artificial Sequence
  chemically treated genomic DNA (Homo sapiens) CpG-island No: 39834
tctctaaccccaacttcatctacaaaataaacgaactacttacaaaccgatcgacgtaaaataaaatcgcaccctcgactacaacgacccgaaacgactcctaacgacgaaaatccgctccgcatccaaaaacgtacgcgctaccgaaaccaaaaaacaaccaacctacctcgacgacccgaaaacctaatacgcgcctccgaaatcccgaaaccgaacgtaaactacgaatcgcgaattcgaaatcgaaaaaccgaacgcgaaacactaccgaacttacaacccccaaacgccgaaccgtcgacgaaacgaactacgaccgtttccgaaacgcccattactaaaaccgccgttaccacgaacgcccgccctacgcccgactccctctacactacgcgacgccataaacgacctacgaatactataaatacgcgaccgcgtatatacgactttcgacatcaccgacccccaacttttcgaaaacctactcaaccgcgacgacgaccaaaacgaaaacctcatcttacacttcctcaaccaaacgaacgaaaaaaaaaaaccctcgacgctcttcatctaccgcactataataccgaaaaaaataaaaataaaaattaataaacctcgacgcgccgctcccttccccgaacttccctcctacccgtcccgacctatctcgcgaacgccgaaactactaaaacctacccatcgtccgccccgacctcaaatactatccacaaacgctaccgcccgcc

SEQ ID NO: 39835 - DNA, 755 bp, Artificial Sequence
  chemically treated genomic DNA (Homo sapiens) CpG-island No: 39835
tttttagttttagttttatttgtaaggtgggcgggttgtttgtaaatcggtcggcgtggggtggggtcgtattttcggttgtagcggttcgaggcggtttttggcggcgagggttcgtttcgtatttaggggcgtgcgcgttgtcggggttagggagtaattagtttatttcggcggttcgggggtttggtgcgcgttttcgagatttcggggtcgggcgtgggttgcggatcgcgggttcgggatcgaggggtcgggcgcggggtattgtcgagtttgtagtttttagacgtcgggtcgtcggcggggcgagttgcggtcgttttcggggcgtttattgttagggtcgtcgttgttacggacgttcgttttgcgttcggttttttttgtattgcgcggcgttatggacgatttgcgggtgttgtggatgcgcgatcgcgtgtatgcggttttcggtattatcgatttttagtttttcgaggatttgtttaatcgcgacgacggttagggcgaggattttattttgtatttttttaattaggcgagcgaggaggaggggttttcggcgttttttatttatcgtattatggtgtcggaggaggtggaggtggagattggtgagtttcgacgcgtcgttttttttttcgggttttttttttgttcgtttcggtttatttcgcgggcgtcggggttgttagagtttgtttatcgttcgtttcggttttaggtgttgtttataaacgttgtcgttcgtt

SEQ ID NO: 39836 - DNA, 755 bp, Artificial Sequence
  chemically treated genomic DNA (Homo sapiens) CpG-island No: 39836
aacgaacgacaacgtttataaacaacacctaaaaccgaaacgaacgataaacaaactctaacaaccccgacgcccgcgaaataaaccgaaacgaacaaaaaaaaaacccgaaaaaaaaaacgacgcgtcgaaactcaccaatctccacctccacctcctccgacaccataatacgataaataaaaaacgccgaaaacccctcctcctcgctcgcctaattaaaaaaatacaaaataaaatcctcgccctaaccgtcgtcgcgattaaacaaatcctcgaaaaactaaaaatcgataataccgaaaaccgcatacacgcgatcgcgcatccacaacacccgcaaatcgtccataacgccgcgcaatacaaaaaaaaccgaacgcaaaacgaacgtccgtaacaacgacgaccctaacaataaacgccccgaaaacgaccgcaactcgccccgccgacgacccgacgtctaaaaactacaaactcgacaataccccgcgcccgacccctcgatcccgaacccgcgatccgcaacccacgcccgaccccgaaatctcgaaaacgcgcaccaaacccccgaaccgccgaaataaactaattactccctaaccccgacaacgcgcacgcccctaaatacgaaacgaaccctcgccgccaaaaaccgcctcgaaccgctacaaccgaaaatacgaccccaccccacgccgaccgatttacaaacaacccgcccaccttacaaataaaactaaaactaaaaa

SEQ ID NO: 39837 - DNA, 724 bp, Artificial Sequence
  chemically treated genomic DNA (Homo sapiens) CpG-island No: 39837
gattattcggcgtttttttaggtattgcgtcgtgattagacgagcggtgagcgatcgatatttttatgttagtttttggttttttaggggatatagtcgagtggtcggattaaacgtaacgagttttcgttagtttaaaggcgattcgatatcgttttagttgaagagaggttagtttgagtaattcgagagcggagttagttttagttttttagaagtggagaggtcgggtttagaggtatagatcgcgtaggcgttatgtgaagtagttaagttcggtttcgcgcgtgcgttttggaaaatttcgagggtggttcgagttgtttatgcgttttgagaatgtaatttagttcgtcgtcggtttgtttgcgggaggataaagggaaaggtttcgcgcgtgcgtatgttcgttttttggtagtggttttgcgtatgcgtgagggtaggtttttacggcgggttgttgtgcgttttagcggtttttggcgtcgcgttggtgtaggtttagtgcgtttgcgcgggttttatattttgttatatgtgtgttcgttgtttttaggtaattagtcgttgtttttgggtcgtaaggtaggttggaaacgatttcgtcgttaggttttaaatatgagtcgcgagaaatgtagtttcggggaaggcgttgaggagggaagggggtttgaggtttcggggtttaaggttagtgcggggtacgggggatttttgg

SEQ ID NO: 39838 - DNA, 724 bp, Artificial Sequence
  chemically treated genomic DNA (Homo sapiens) CpG-island No: 39838
ccaaaaatcccccgtaccccgcactaaccttaaaccccgaaacctcaaacccccttccctcctcaacgccttccccgaaactacatttctcgcgactcatatttaaaacctaacgacgaaatcgtttccaacctaccttacgacccaaaaacaacgactaattacctaaaaacaacgaacacacatataacaaaatataaaacccgcgcaaacgcactaaacctacaccaacgcgacgccaaaaaccgctaaaacgcacaacaacccgccgtaaaaacctaccctcacgcatacgcaaaaccactaccaaaaaacgaacatacgcacgcgcgaaacctttccctttatcctcccgcaaacaaaccgacgacgaactaaattacattctcaaaacgcataaacaactcgaaccaccctcgaaattttccaaaacgcacgcgcgaaaccgaacttaactacttcacataacgcctacgcgatctatacctctaaacccgacctctccacttctaaaaaactaaaactaactccgctctcgaattactcaaactaacctctcttcaactaaaacgatatcgaatcgcctttaaactaacgaaaactcgttacgtttaatccgaccactcgactatatcccctaaaaaaccaaaaactaacataaaaatatcgatcgctcaccgctcgtctaatcacgacgcaatacctaaaaaaacgccgaataatc

SEQ ID NO: 39839 - DNA, 724 bp, Artificial Sequence
  chemically treated genomic DNA (Homo sapiens) CpG-island No: 39839
ttagaggtttttcgtatttcgtattggttttgagtttcgaggttttagatttttttttttttttagcgtttttttcggggttgtatttttcgcggtttatatttgggatttgacggcggaatcgtttttagtttgttttgcggtttaggggtagcggttggttgtttaaaagtagcggatatatatatagtagagtataaaattcgcgtaggcgtattaggtttatattaacgcgacgttaagaatcgttaaagcgtatagtagttcgtcgtaagggtttgtttttacgtatgcgtaaaattattgttaagagacgagtatacgtacgcgcggaatttttttttttattttttcgtaggtaggtcggcgacgagttaaattgtatttttagagcgtatgggtaattcgagttattttcggggttttttaaggcgtacgcgcgaggtcgggtttggttgttttatatgacgtttgcgcggtttatgtttttgaattcggtttttttatttttgaggaattggagttgatttcgttttcgagttgtttagattaatttttttttagttgggacggtgtcgagtcgtttttgggttggcgaagattcgttgcgtttggttcgattattcggttgtgttttttgaggagttagaggttagtataggagtatcgatcgtttatcgttcgtttgattacgacgtagtgtttggaggagcgtcgagtgatt

SEQ ID NO: 39840 - DNA, 724 bp, Artificial Sequence
  chemically treated genomic DNA (Homo sapiens) CpG-island No: 39840
aatcactcgacgctcctccaaacactacgtcgtaatcaaacgaacgataaacgatcgatactcctatactaacctctaactcctcaaaaaacacaaccgaataatcgaaccaaacgcaacgaatcttcgccaacccaaaaacgactcgacaccgtcccaactaaaaaaaaattaatctaaacaactcgaaaacgaaatcaactccaattcctcaaaaataaaaaaaccgaattcaaaaacataaaccgcgcaaacgtcatataaaacaaccaaacccgacctcgcgcgtacgccttaaaaaaccccgaaaataactcgaattacccatacgctctaaaaatacaatttaactcgtcgccgacctacctacgaaaaaataaaaaaaaaaattccgcgcgtacgtatactcgtctcttaacaataattttacgcatacgtaaaaacaaacccttacgacgaactactatacgctttaacgattcttaacgtcgcgttaatataaacctaatacgcctacgcgaattttatactctactatatatatatccgctacttttaaacaaccaaccgctacccctaaaccgcaaaacaaactaaaaacgattccgccgtcaaatcccaaatataaaccgcgaaaaatacaaccccgaaaaaaacgctaaaaaaaaaaaaaaatctaaaacctcgaaactcaaaaccaatacgaaatacgaaaaacctctaa

SEQ ID NO: 39841 - DNA, 628 bp, Artificial Sequence
  chemically treated genomic DNA (Homo sapiens) CpG-island No: 39841
gcgggttagttttcggttttgttggtagttttcgggtttcgggtgggtttggtcggcgtagttttacgggtcgtattttttttcggcgagaggacgggaagcggggtcgggtagggagggcgttggtagggaaggaagtggtattagttgttcgtttacggttttgtcgtggaggggaagagcggttaagttcgcgttttttcggttcgcgttgggtagagggagtcgagcgcggagaggtggggtcgcgggaggggttggaggagtcgggtttcggttttttatttcgttcggagttcgcgggtcgttttttttgagtcgcggtttagggagcgagtgttttcggtcgttagaggcgcgggatggaagtttagggcggtttcgagtttggggacgacggggcggtcgttagttcgtaggcggtggtttatttttcgcgggaaagcgggcgtaagagcggaggcgcggggcgtacggaggtcggggagcgcgggtaggagttgggggcgtattacgtgattcgcgttcgcgcgtcgttgtaattttatatttagggttcgtttttcggggtggaagttgaggaatgttttttgtgtggataagttttttagaggagtcgtcgtttttt

SEQ ID NO: 39842 - DNA, 628 bp, Artificial Sequence
  chemically treated genomic DNA (Homo sapiens) CpG-island No: 39842
aaaaaacgacgactcctctaaaaaacttatccacacaaaaaacattcctcaacttccaccccgaaaaacgaaccctaaatataaaattacaacgacgcgcgaacgcgaatcacgtaatacgcccccaactcctacccgcgctccccgacctccgtacgccccgcgcctccgctcttacgcccgctttcccgcgaaaaataaaccaccgcctacgaactaacgaccgccccgtcgtccccaaactcgaaaccgccctaaacttccatcccgcgcctctaacgaccgaaaacactcgctccctaaaccgcgactcaaaaaaaacgacccgcgaactccgaacgaaataaaaaaccgaaacccgactcctccaacccctcccgcgaccccacctctccgcgctcgactccctctacccaacgcgaaccgaaaaaacgcgaacttaaccgctcttcccctccacgacaaaaccgtaaacgaacaactaataccacttccttccctaccaacgccctccctacccgaccccgcttcccgtcctctcgccgaaaaaaaatacgacccgtaaaactacgccgaccaaacccacccgaaacccgaaaactaccaacaaaaccgaaaactaacccgc

SEQ ID NO: 39843 - DNA, 628 bp, Artificial Sequence
  chemically treated genomic DNA (Homo sapiens) CpG-island No: 39843
gagaggcggcggtttttttggaaaatttgtttatataaaaggtattttttagtttttatttcgaaaggcgagttttgggtgtagggttatagcggcgcgcggacgcggattacgtggtgcgtttttagtttttgttcgcgtttttcggttttcgtgcgtttcgcgttttcgtttttgcgttcgttttttcgcgggaagtgggttatcgtttgcgagttggcggtcgtttcgtcgtttttaagttcggggtcgttttggatttttatttcgcgtttttgacggtcggggatattcgttttttgggtcgcggtttaggagaggcggttcgcgggtttcgggcggggtgggaggtcgaggttcggtttttttagtttttttcgcggttttattttttcgcgttcggttttttttgtttagcgcgggtcgggaaggcgcgggtttggtcgttttttttttttacggtaaagtcgtgaacggatagttgatgttatttttttttttgttagcgttttttttgttcgatttcgtttttcgttttttcgtcgggagggagtgcggttcgtggggttgcgtcggttagatttattcggggttcgggggttgttagtagagtcgggagttggttcgt

SEQ ID NO: 39844 - DNA, 628 bp, Artificial Sequence
  chemically treated genomic DNA (Homo sapiens) CpG-island No: 39844
acgaaccaactcccgactctactaacaacccccgaaccccgaataaatctaaccgacgcaaccccacgaaccgcactccctcccgacgaaaaaacgaaaaacgaaatcgaacaaaaaaaacgctaacaaaaaaaaaaataacatcaactatccgttcacgactttaccgtaaaaaaaaaaaacgaccaaacccgcgccttcccgacccgcgctaaacaaaaaaaaccgaacgcgaaaaaataaaaccgcgaaaaaaactaaaaaaaccgaacctcgacctcccaccccgcccgaaacccgcgaaccgcctctcctaaaccgcgacccaaaaaacgaatatccccgaccgtcaaaaacgcgaaataaaaatccaaaacgaccccgaacttaaaaacgacgaaacgaccgccaactcgcaaacgataacccacttcccgcgaaaaaacgaacgcaaaaacgaaaacgcgaaacgcacgaaaaccgaaaaacgcgaacaaaaactaaaaacgcaccacgtaatccgcgtccgcgcgccgctataaccctacacccaaaactcgcctttcgaaataaaaactaaaaaataccttttatataaacaaattttccaaaaaaaccgccgcctctc

SEQ ID NO: 39845 - DNA, 681 bp, Artificial Sequence
  chemically treated genomic DNA (Homo sapiens) CpG-island No: 39845
  unsure (438, 551)
tgtattttattcgttttcgtttttattttcgttttagttcgtagcggttatagttcgggaggttttaagggaattttcgtacgtttgcgcgcgtaattacgggacggcgggtcggcgtggcgcgcgtaattgttttggaaattacggcgcgcgtacgcgtaaacgcgggtgatggggggaagaaagattgagttgagagttttgtcgcggggggagggttttatttcgttttttcgcggtgggcgcgcgcgttggttcgtttttttgttgtacgttttcggttcgcgcgtttttttcggtgttttttttcgttttataagtatttttgttttttcgtatttgtgcgtcggtgtagtaggtagtgggaatattcgggtattttcgtagttgagcggcgattcgggcggcggcggcggtcgaggagtttttatggtaggnacgaggcggagggaaggcgaaaggggggcgaggaagtaaattagagttttcgcgggggcggttttcgagggaggtatagagggaaacggtttttttaattcgaggagggttangcgcggagttttgtcgtattttttcgcgtatttttgtttagtttcgggtttcggagatgtatttgtattaggtttttatcggagttgttaattttggagataattgttatttcgtgggtagcgtcgggga

SEQ ID NO: 39846 - DNA, 681 bp, Artificial Sequence
  chemically treated genomic DNA (Homo sapiens) CpG-island No: 39846
  unsure (131, 244)
tccccgacgctacccacgaaataacaattatctccaaaattaacaactccgataaaaacctaatacaaatacatctccgaaacccgaaactaaacaaaaatacgcgaaaaaatacgacaaaactccgcgcntaaccctcctcgaattaaaaaaaccgtttccctctatacctccctcgaaaaccgcccccgcgaaaactctaatttacttcctcgcccccctttcgccttccctccgcctcgtncctaccataaaaactcctcgaccgccgccgccgcccgaatcgccgctcaactacgaaaatacccgaatattcccactacctactacaccgacgcacaaatacgaaaaaacaaaaatacttataaaacgaaaaaaaacaccgaaaaaaacgcgcgaaccgaaaacgtacaacaaaaaaacgaaccaacgcgcgcgcccaccgcgaaaaaacgaaataaaaccctccccccgcgacaaaactctcaactcaatctttcttccccccatcacccgcgtttacgcgtacgcgcgccgtaatttccaaaacaattacgcgcgccacgccgacccgccgtcccgtaattacgcgcgcaaacgtacgaaaattcccttaaaacctcccgaactataaccgctacgaactaaaacgaaaataaaaacgaaaacgaataaaataca

SEQ ID NO: 39847 - DNA, 681 bp, Artificial Sequence
  chemically treated genomic DNA (Homo sapiens) CpG-island No: 39847
  unsure (131, 244)
ttttcgacgttgtttacggagtagtagttgtttttagggttgatagtttcggtgaggatttgatgtagatgtattttcggagttcggggttgaatagaaatgcgcgggagggtgcgataaagtttcgcgtntgatttttttcgggttgagagagtcgtttttttttgtgtttttttcgaaaatcgttttcgcgaaggttttggtttattttttcgtttttttttcgtttttttttcgtttcgtntttgttatgggagtttttcgatcgtcgtcgtcgttcgggtcgtcgtttagttgcggaaatgttcggatgtttttattgtttgttgtatcggcgtataaatgcgggagggtaagggtgtttgtgaggcgggggagggtatcggggggaacgcgcgagtcgggagcgtgtagtaagggagcgggttagcgcgcgcgtttatcgcgggggagcgaggtagagtttttttttcgcggtaaagtttttagtttagttttttttttttttattattcgcgtttgcgcgtgcgcgcgtcgtggtttttagggtaattgcgcgcgttacgtcgattcgtcgtttcgtgattgcgcgcgtagacgtgcgggagtttttttggagtttttcgggttgtagtcgttgcggattggggcggaggtgggggcgggggcgagtggggtgta

SEQ ID NO: 39848 - DNA, 681 bp, Artificial Sequence
  chemically treated genomic DNA (Homo sapiens) CpG-island No: 39848
  unsure (438, 551)
tacaccccactcgcccccgcccccacctccgccccaatccgcaacgactacaacccgaaaaactccaaaaaaactcccgcacgtctacgcgcgcaatcacgaaacgacgaatcgacgtaacgcgcgcaattaccctaaaaaccacgacgcgcgcacgcgcaaacgcgaataataaaaaaaaaaaaaactaaactaaaaactttaccgcgaaaaaaaaactctacctcgctcccccgcgataaacgcgcgcgctaacccgctcccttactacacgctcccgactcgcgcgttccccccgataccctcccccgcctcacaaacacccttaccctcccgcatttatacgccgatacaacaaacaataaaaacatccgaacatttccgcaactaaacgacgacccgaacgacgacgacgatcgaaaaactcccataacaaanacgaaacgaaaaaaaaacgaaaaaaaaacgaaaaaataaaccaaaaccttcgcgaaaacgattttcgaaaaaaacacaaaaaaaaacgactctctcaacccgaaaaaaatcanacgcgaaactttatcgcaccctcccgcgcatttctattcaaccccgaactccgaaaatacatctacatcaaatcctcaccgaaactatcaaccctaaaaacaactactactccgtaaacaacgtcgaaaa

SEQ ID NO: 39849 - DNA, 836 bp, Artificial Sequence
  chemically treated genomic DNA (Homo sapiens) CpG-island No: 39849
tcggttaagtcgaatatcggttatacgtaagcggcggcgggtgtggttggtgtgattaagatggtgatggcgatgcggtacgggtagttgttacgtacgttgtacgtggaatcgtcgtcgtcggaggtggattggtcggcggggacggtttaattttttacggagaatacgttttggtttaggagtggtcgtgttcgtcgggtgggggtgtcgtcgttcgggattagtggtattaacgcgtacgttattttcgaatagttttcgggagtgtcgagttagtttgcggggtcgggttcgggttttgtcgtggatgtttcggtggtgtcgtggatggtgtcgggtaaaatattcgaagcgttattcgcgtaggtaacgggcgttgatgatttatttggacgagcgatttgatgttttttcgttggatgttgggtattcgttggcgttgatacggtcggcgttggatgagcgagcggtggtgttggggtcggatcgtgaaacgtttgtttgtcggggtgaaatcgttggtttgttcgttttgatggtttttgggattggcggttcgtttttttggggtgtggtggtcggcggcgttcgcgtgtcgtggcgcgcgcgtttgcgttttgcgcgggtgttttttgcgtcgtggggttgtttcgggtttgtgcgcgttgcgtcgcggttgttcgcgtcgcgcgtttttttgcgtttttcgcggtgggtggtcgcggtcgcgtcgcgtgggtgtttttgttcgcgtcgtcgtttgtgtttgttgtcgcgtcgtttttttttcgcgttttgtttttcgtttttttcgttttcggcggtttcggtgt

SEQ ID NO: 39850 - DNA, 836 bp, Artificial Sequence
  chemically treated genomic DNA (Homo sapiens) CpG-island No: 39850
acaccgaaaccgccgaaaacgaaaaaaacgaaaaacaaaacgcgaaaaaaaaacgacgcgacaacaaacacaaacgacgacgcgaacaaaaacacccacgcgacgcgaccgcgaccacccaccgcgaaaaacgcaaaaaaacgcgcgacgcgaacaaccgcgacgcaacgcgcacaaacccgaaacaaccccacgacgcaaaaaacacccgcgcaaaacgcaaacgcgcgcgccacgacacgcgaacgccgccgaccaccacaccccaaaaaaacgaaccgccaatcccaaaaaccatcaaaacgaacaaaccaacgatttcaccccgacaaacaaacgtttcacgatccgaccccaacaccaccgctcgctcatccaacgccgaccgtatcaacgccaacgaatacccaacatccaacgaaaaaacatcaaatcgctcgtccaaataaatcatcaacgcccgttacctacgcgaataacgcttcgaatattttacccgacaccatccacgacaccaccgaaacatccacgacaaaacccgaacccgaccccgcaaactaactcgacactcccgaaaactattcgaaaataacgtacgcgttaataccactaatcccgaacgacgacacccccacccgacgaacacgaccactcctaaaccaaaacgtattctccgtaaaaaattaaaccgtccccgccgaccaatccacctccgacgacgacgattccacgtacaacgtacgtaacaactacccgtaccgcatcgccatcaccatcttaatcacaccaaccacacccgccgccgcttacgtataaccgatattcgacttaaccga

SEQ ID NO: 39851 - DNA, 836 bp, Artificial Sequence
  chemically treated genomic DNA (Homo sapiens) CpG-island No: 39851
atatcggaatcgtcgggagcggggagggcgaaaaatagggcgcgagaaaggaacggcgcgataataaatataaacgacggcgcgagtaaaggtatttacgcggcgcgatcgcgattatttatcgcgaaaagcgtaagaaaacgcgcggcgcgaataatcgcggcgtaacgcgtataaattcgaggtagttttacggcgtaggagatattcgcgtaagacgtaaacgcgcgcgttacgatacgcgggcgtcgtcgattattatattttagaggagcgggtcgttaattttagaaattattagagcgggtaaattaacggttttatttcggtaaataaacgttttacggttcgattttagtattatcgttcgtttatttagcgtcgatcgtgttaacgttagcgagtatttaatatttagcgaggagatattaggtcgttcgtttagataggttattaacgttcgttgtttgcgcggatagcgtttcgggtgttttgttcgatattatttacggtattatcggaatatttacgatagaattcgaattcggtttcgtagattgattcggtattttcgggggttgttcgaggatgacgtgcgcgttagtattattgatttcgaacgacgatatttttattcgacgaatacgattatttttgggttagggcgtgtttttcgtaaggagttgaatcgttttcgtcgattaatttattttcggcgacggcgattttacgtgtaacgtgcgtggtagttgttcgtgtcgtatcgttattattattttgattatattagttatattcgtcgtcgtttgcgtatgatcgatgttcgatttgatcga

SEQ ID NO: 39852 - DNA, 836 bp, Artificial Sequence
  chemically treated genomic DNA (Homo sapiens) CpG-island No: 39852
tcgatcaaatcgaacatcgatcatacgcaaacgacgacgaatataactaatataatcaaaataataataacgatacgacacgaacaactaccacgcacgttacacgtaaaatcgccgtcgccgaaaataaattaatcgacgaaaacgattcaactccttacgaaaaacacgccctaacccaaaaataatcgtattcgtcgaataaaaatatcgtcgttcgaaatcaataatactaacgcgcacgtcatcctcgaacaacccccgaaaataccgaatcaatctacgaaaccgaattcgaattctatcgtaaatattccgataataccgtaaataatatcgaacaaaacacccgaaacgctatccgcgcaaacaacgaacgttaataacctatctaaacgaacgacctaatatctcctcgctaaatattaaatactcgctaacgttaacacgatcgacgctaaataaacgaacgataatactaaaatcgaaccgtaaaacgtttatttaccgaaataaaaccgttaatttacccgctctaataatttctaaaattaacgacccgctcctctaaaatataataatcgacgacgcccgcgtatcgtaacgcgcgcgtttacgtcttacgcgaatatctcctacgccgtaaaactacctcgaatttatacgcgttacgccgcgattattcgcgccgcgcgttttcttacgcttttcgcgataaataatcgcgatcgcgccgcgtaaatacctttactcgcgccgtcgtttatatttattatcgcgccgttcctttctcgcgccctatttttcgccctccccgctcccgacgattccgatat

SEQ ID NO: 39853 - DNA, 615 bp, Artificial Sequence
  chemically treated genomic DNA (Homo sapiens) CpG-island No: 39853
ttcggtgcgtgttcgtttttttgttgaaacggattttagtggttttcgggtttttcgggcgtttttttttagtttcgttagtttgagggtcgcgtttagagagcggggagtttttttcggggcgtcgattaggttttcgcgtcgtagtcgtcgttttcggcgttttttaggttcggtttttgtcgagttcgttgcggtttacgtggtttggtagagttaaattcggtttgtaggaagttcggagttaagggaaagtcgagttaagttggggtgggcggggtcgaacggaggcgtagagtcgggaggggcgggtattgggcggaggaaggggagggtcgcgcgtaggggaggcggtggttgggttttggcgcgttttggtattcggtttcggtcggttagggaaggcggttttttttcggtcgtttcgttttttattttcgttatattcgggggaaggtgttttcgagtttttttttatttttatttcgttttttcgttttttcggttttagttttcgtcggcggagtttattatgttagatagtttcgatattttgtaaagataaagagttttagatcggagggaggaggaggaggaagaagagcggagagagaa

SEQ ID NO: 39854 - DNA, 615 bp, Artificial Sequence
  chemically treated genomic DNA (Homo sapiens) CpG-island No: 39854
ttctctctccgctcttcttcctcctcctcctccctccgatctaaaactctttatctttacaaaatatcgaaactatctaacataataaactccgccgacgaaaactaaaaccgaaaaaacgaaaaaacgaaataaaaataaaaaaaaactcgaaaacaccttcccccgaatataacgaaaataaaaaacgaaacgaccgaaaaaaaaccgccttccctaaccgaccgaaaccgaataccaaaacgcgccaaaacccaaccaccgcctcccctacgcgcgaccctccccttcctccgcccaatacccgcccctcccgactctacgcctccgttcgaccccgcccaccccaacttaactcgactttcccttaactccgaacttcctacaaaccgaatttaactctaccaaaccacgtaaaccgcaacgaactcgacaaaaaccgaacctaaaaaacgccgaaaacgacgactacgacgcgaaaacctaatcgacgccccgaaaaaaactccccgctctctaaacgcgaccctcaaactaacgaaactaaaaaaaaacgcccgaaaaacccgaaaaccactaaaatccgtttcaacaaaaaaacgaacacgcaccgaa

SEQ ID NO: 39855 - DNA, 615 bp, Artificial Sequence
  chemically treated genomic DNA (Homo sapiens) CpG-island No: 39855
tttttttttcgtttttttttttttttttttttttttcggtttagggttttttgtttttgtaaagtgtcgaaattgtttggtatagtgggtttcgtcggcggaggttggagtcgaggaagcgaggaggcgggatgagggtgggagagggttcgggaatattttttttcgggtgtaacgggagtgaaaggcggggcgatcgaggaggggtcgttttttttggtcggtcggggtcgggtgttagggcgcgttagagtttagttatcgttttttttgcgcgcggttttttttttttttcgtttagtgttcgtttttttcgattttgcgttttcgttcggtttcgtttattttaatttggttcggtttttttttggtttcgggttttttgtaagtcgaatttagttttgttaagttacgtggatcgtagcgggttcggtagaggtcgagtttgggagacgtcggaggcggcggttgcggcgcggggatttgatcggcgtttcgagaggagtttttcgttttttggacgcggtttttaagttggcggggttaaggaagagcgttcgggaggttcgggagttattggggttcgttttagtaggaagacgggtacgtatcgag

SEQ ID NO: 39856 - DNA, 615 bp, Artificial Sequence
  chemically treated genomic DNA (Homo sapiens) CpG-island No: 39856
ctcgatacgtacccgtcttcctactaaaacgaaccccaataactcccgaacctcccgaacgctcttccttaaccccgccaacttaaaaaccgcgtccaaaaaacgaaaaactcctctcgaaacgccgatcaaatccccgcgccgcaaccgccgcctccgacgtctcccaaactcgacctctaccgaacccgctacgatccacgtaacttaacaaaactaaattcgacttacaaaaaacccgaaaccaaaaaaaaaccgaaccaaattaaaataaacgaaaccgaacgaaaacgcaaaatcgaaaaaaacgaacactaaacgaaaaaaaaaaaaaaccgcgcgcaaaaaaaacgataactaaactctaacgcgccctaacacccgaccccgaccgaccaaaaaaaacgacccctcctcgatcgccccgcctttcactcccgttacacccgaaaaaaaatattcccgaaccctctcccaccctcatcccgcctcctcgcttcctcgactccaacctccgccgacgaaacccactataccaaacaatttcgacactttacaaaaacaaaaaaccctaaaccgaaaaaaaaaaaaaaaaaaaaaaaaacgaaaaaaaaa

SEQ ID NO: 39857 - DNA, 674 bp, Artificial Sequence
  chemically treated genomic DNA (Homo sapiens) CpG-island No: 39857
  unsure (305)
ttgtcgtatattttatttttttatatgtagtttacgggtgttacggatatatatttgcgttgcgtttaggttgcgcgttattcgttgtatgaagtggtttgcgtaggcgtaataatcggttttcgcgttcggcgggtgcgttttttcgcgcggttcgcgtcgcgcgcgtcgcgttgggcggcgcgtttcgcgcgtcggtcgtcgcgcgggtcgcggcgggacgcgcgcgcggtcgcggcgcgcgatcgttcgttgggtcgcgcgtcgtgcgcgcggtcgcggtcgtcgttcggcgtacgcgcggntcgcgttcggtcgcgcgcgggcggcgcggcgggcgaggtcgcgacgggtcgcgcgaggtcgagattcgcgcgcggcgcgtttcgttcgcggtcgcgcgttttgtcgcgttcggttttcgcgttcgcgttcgcgttcgcgtttcgcgtcggcgcgcgcgggtcgcgcgtcgcgtcgtcgcgagcggttttggttgtaggggcgatatttgttgggttttcggtgttgcgtggtcgtgttcgcgttattggcgcgtggttcgattttgcgcgttcgtcggcgcgttcgttgcgtattttaagcgttgtcgtatttttttcggttttttttgtcgtttttgtttattatttcggttagtgtttagatgttcg

SEQ ID NO: 39858 - DNA, 674 bp, Artificial Sequence
  chemically treated genomic DNA (Homo sapiens) CpG-island No: 39858
  unsure (370)
cgaacatctaaacactaaccgaaataataaacaaaaacgacaaaaaaaaccgaaaaaaatacgacaacgcttaaaatacgcaacgaacgcgccgacgaacgcgcaaaatcgaaccacgcgccaataacgcgaacacgaccacgcaacaccgaaaacccaacaaatatcgcccctacaaccaaaaccgctcgcgacgacgcgacgcgcgacccgcgcgcgccgacgcgaaacgcgaacgcgaacgcgaacgcgaaaaccgaacgcgacaaaacgcgcgaccgcgaacgaaacgcgccgcgcgcgaatctcgacctcgcgcgacccgtcgcgacctcgcccgccgcgccgcccgcgcgcgaccgaacgcganccgcgcgtacgccgaacgacgaccgcgaccgcgcgcacgacgcgcgacccaacgaacgatcgcgcgccgcgaccgcgcgcgcgtcccgccgcgacccgcgcgacgaccgacgcgcgaaacgcgccgcccaacgcgacgcgcgcgacgcgaaccgcgcgaaaaaacgcacccgccgaacgcgaaaaccgattattacgcctacgcaaaccacttcatacaacgaataacgcgcaacctaaacgcaacgcaaatatatatccgtaacacccgtaaactacatataaaaaaataaaatatacgacaa

SEQ ID NO: 39859 - DNA, 674 bp, Artificial Sequence
  chemically treated genomic DNA (Homo sapiens) CpG-island No: 39859
  unsure (370)
cgagtatttaagtattagtcgaagtaatggataagggcgataagagagatcggggagagtgcggtagcgtttaagatgcgtagcgggcgcgtcggcgagcgcgtagggtcgggttacgcgttagtaacgcgggtacggttacgtagtatcgggggtttagtagatgtcgtttttgtagttaaggtcgttcgcggcggcgcggcgcgcggttcgcgcgcgtcggcgcgaggcgcgggcgcgggcgcgggcgcgggggtcgggcgcggtagagcgcgcggtcgcgggcggggcgcgtcgcgcgcgggtttcggtttcgcgcggttcgtcgcggtttcgttcgtcgcgtcgttcgcgcgcggtcgggcgcggntcgcgcgtgcgtcgagcggcggtcgcggtcgcgcgtacggcgcgcggtttagcggacggtcgcgcgtcgcggtcgcgcgcgcgtttcgtcgcggttcgcgcggcgatcggcgcgcgaggcgcgtcgtttagcgcggcgcgcgcgacgcggatcgcgcggagaggcgtattcgtcgggcgcgagggtcggttgttgcgtttgcgtaggttattttatgtagcgagtggcgcgtagtttaaacgtaacgtaggtatgtgttcgtggtattcgtgggttgtatgtggaggggtggaatgtgcggtaa

SEQ ID NO: 39860 - DNA, 674 bp, Artificial Sequence
  chemically treated genomic DNA (Homo sapiens) CpG-island No: 39860
  unsure (305)
ttaccgcacattccacccctccacatacaacccacgaataccacgaacacatacctacgttacgtttaaactacgcgccactcgctacataaaataacctacgcaaacgcaacaaccgaccctcgcgcccgacgaatacgcctctccgcgcgatccgcgtcgcgcgcgccgcgctaaacgacgcgcctcgcgcgccgatcgccgcgcgaaccgcgacgaaacgcgcgcgcgaccgcgacgcgcgaccgtccgctaaaccgcgcgccgtacgcgcgaccgcgaccgccgctcgacgcacgcgcganccgcgcccgaccgcgcgcgaacgacgcgacgaacgaaaccgcgacgaaccgcgcgaaaccgaaacccgcgcgcgacgcgccccgcccgcgaccgcgcgctctaccgcgcccgacccccgcgcccgcgcccgcgcccgcgcctcgcgccgacgcgcgcgaaccgcgcgccgcgccgccgcgaacgaccttaactacaaaaacgacatctactaaacccccgatactacgtaaccgtacccgcgttactaacgcgtaacccgaccctacgcgctcgccgacgcgcccgctacgcatcttaaacgctaccgcactctccccgatctctcttatcgcccttatccattacttcgactaatacttaaatactcg

SEQ ID NO: 39861 - DNA, 666 bp, Artificial Sequence
  chemically treated genomic DNA (Homo sapiens) CpG-island No: 39861
tatttcgggttttgatttttcggggcgtcgacgcgaggggattcggttttcgtttttatttttatttttgtatgtgttagaaattttcgggcggattttcgcgtttgtcggttagtttttttgaattttttttcgcgggggttcgggagaaagagttgtttcgagtttttaaagtttttttgagtttttgcgttcgtcgggaggggtcgtttttcgggagtttttttttatatttcgaggtttttttattacgttttagttcgcgtttttttttggagcgtcggaagtttcgggtgttcgaggtcgttttttttaagaagttttttagattttttcgtttgcgttttagtgttagtttttttcgtcgtttttattcgatttcgagtttttgtttttttcgttttattgtttcggagtcgtaggtttaggtatatttttagtttcgggatttgtttagtcgggtcgcggcgttttcggattttcgttcgtttttggtttttatagcggggttttatcggtgcgtagagttaggagtagttatagagtttcgttcggatttcgtatggcgtcgtcggggttggttggggtcgggttggggttgggttcgggttcgaggaggttcgtagtagtcgggttttttttttgttttttttcgcgttggttcga

SEQ ID NO: 39862 - DNA, 666 bp, Artificial Sequence
  chemically treated genomic DNA (Homo sapiens) CpG-island No: 39862
tcgaaccaacgcgaaaaaaaacaaaaaaaaaacccgactactacgaacctcctcgaacccgaacccaaccccaacccgaccccaaccaaccccgacgacgccatacgaaatccgaacgaaactctataactactcctaactctacgcaccgataaaaccccgctataaaaaccaaaaacgaacgaaaatccgaaaacgccgcgacccgactaaacaaatcccgaaactaaaaatatacctaaacctacgactccgaaacaataaaacgaaaaaaacaaaaactcgaaatcgaataaaaacgacgaaaaaaactaacactaaaacgcaaacgaaaaaatctaaaaaacttcttaaaaaaaacgacctcgaacacccgaaacttccgacgctccaaaaaaaaacgcgaactaaaacgtaataaaaaaacctcgaaatataaaaaaaaactcccgaaaaacgacccctcccgacgaacgcaaaaactcaaaaaaactttaaaaactcgaaacaactctttctcccgaacccccgcgaaaaaaaattcaaaaaaactaaccgacaaacgcgaaaatccgcccgaaaatttctaacacatacaaaaataaaaataaaaacgaaaaccgaatcccctcgcgtcgacgccccgaaaaatcaaaacccgaaata

SEQ ID NO: 39863 - DNA, 666 bp, Artificial Sequence
  chemically treated genomic DNA (Homo sapiens) CpG-island No: 39863
tcgggttagcgcgagggggagtagggaggaagttcggttgttgcggattttttcggattcggatttagttttagttcggttttagttagtttcgacggcgttatgcggggttcgagcggggttttgtggttgtttttggttttgcgtatcggtgaggtttcgttgtgagagttaaaggcgggcgggggttcgggggcgtcgcggttcggttgagtaggtttcggggttggaaatgtgtttgagtttgcggtttcggggtagtgagacgggggaggtaggggttcggggtcgagtgaggacggcggagggaattagtattgaagcgtagacggggaagtttggaaggttttttggaggaggcggtttcgaatattcgaggttttcgacgttttaaggagaagcgcgggttgaggcgtggtggggaggtttcggggtgtggagaggagttttcggagggcggtttttttcgacgggcgtaggaatttaggaagattttgggggttcggagtagttttttttttcgagttttcgcgggagaagatttagagggattgatcggtaggcgcgggagttcgttcgggggtttttggtatatgtagggatggaggtggagacggaggtcgggttttttcgcgtcggcgtttcggggagttagggttcgggatg

SEQ ID NO: 39864 - DNA, 666 bp, Artificial Sequence
  chemically treated genomic DNA (Homo sapiens) CpG-island No: 39864
catcccgaaccctaactccccgaaacgccgacgcgaaaaaacccgacctccgtctccacctccatccctacatataccaaaaacccccgaacgaactcccgcgcctaccgatcaatccctctaaatcttctcccgcgaaaactcgaaaaaaaaaactactccgaacccccaaaatcttcctaaattcctacgcccgtcgaaaaaaaccgccctccgaaaactcctctccacaccccgaaacctccccaccacgcctcaacccgcgcttctccttaaaacgtcgaaaacctcgaatattcgaaaccgcctcctccaaaaaaccttccaaacttccccgtctacgcttcaatactaattccctccgccgtcctcactcgaccccgaacccctacctcccccgtctcactaccccgaaaccgcaaactcaaacacatttccaaccccgaaacctactcaaccgaaccgcgacgcccccgaacccccgcccgcctttaactctcacaacgaaacctcaccgatacgcaaaaccaaaaacaaccacaaaaccccgctcgaaccccgcataacgccgtcgaaactaactaaaaccgaactaaaactaaatccgaatccgaaaaaatccgcaacaaccgaacttcctccctactccccctcgcgctaacccga

SEQ ID NO: 39865 - DNA, 586 bp, Artificial Sequence
  chemically treated genomic DNA (Homo sapiens) CpG-island No: 39865
gataggcgcggcgacgaaaaaacggggtcgaggataacgggggagaaggcggaggggtaaaagatacggcggcgaggcgagggaaaaacggagcggcggggcggaggtaggaagatgcggagtcgaggggcgagggcgacggagacggggaaaaaggtgagagtggggggaagtagaaaggcgcgggacgcggcgcgcgcggggggaaatagagggaagagaggggcgggcggggcggacgaagagtgagggagggggcgcgggaggggaaacgtcgatagggggcgggaggaaggagtagtaatgacggaaagcggacgggaagggggaaaaagagagagaggggttggagcgggggggggagaaaaggggggggcggggcgagaggaaacggagggacggaagcggggggcgaagaggggggggggaaggggggggaaagggaaggggcggagagaggaaaggggaggggtaaaggaggaggaagggggggggggagaggcgggtaacgtaggaatggggtagtgttaaacggatgttatgtatagagcgggggtattatatttttgttatgttggagtagaga

SEQ ID NO: 39866 - DNA, 586 bp, Artificial Sequence
  chemically treated genomic DNA (Homo sapiens) CpG-island No: 39866
tctctactccaacataacaaaaatataatacccccgctctatacataacatccgtttaacactaccccattcctacgttacccgcctctcccccccccccttcctcctcctttacccctcccctttcctctctccgccccttccctttccccccccttcccccccccctcttcgccccccgcttccgtccctccgtttcctctcgccccgccccccccttttctcccccccccgctccaacccctctctctctttttcccccttcccgtccgctttccgtcattactactccttcctcccgccccctatcgacgtttcccctcccgcgccccctccctcactcttcgtccgccccgcccgcccctctcttccctctatttccccccgcgcgcgccgcgtcccgcgcctttctacttccccccactctcacctttttccccgtctccgtcgccctcgcccctcgactccgcatcttcctacctccgccccgccgctccgtttttccctcgcctcgccgccgtatcttttacccctccgccttctcccccgttatcctcgaccccgttttttcgtcgccgcgcctatc

SEQ ID NO: 39867 - DNA, 586 bp, Artificial Sequence
  chemically treated genomic DNA (Homo sapiens) CpG-island No: 39867
tttttattttaatataataaaagtataatgttttcgttttatgtatagtattcgtttaatattgttttatttttacgttattcgtttttttttttttttttttttttttttttgttttttttttttttttttttcgttttttttttttttttttttttttttttttttttttcgtttttcgttttcgttttttcgttttttttcgtttcgttttttttttttttttttttttcgttttagttttttttttttttttttttttttttcgttcgtttttcgttattgttgtttttttttttcgttttttgtcggcgttttttttttcgcgtttttttttttatttttcgttcgtttcgttcgttttttttttttttttgttttttttcgcgcgcgtcgcgtttcgcgtttttttgtttttttttatttttattttttttttcgttttcgtcgttttcgtttttcggtttcgtatttttttgttttcgtttcgtcgtttcgtttttttttcgtttcgtcgtcgtattttttgttttttcgttttttttttcgttgttttcgatttcgttttttcgtcgtcgcgtttgtt

SEQ ID NO: 39868 - DNA, 586 bp, Artificial Sequence
  chemically treated genomic DNA (Homo sapiens) CpG-island No: 39868
aacaaacgcgacgacgaaaaaacgaaatcgaaaacaacgaaaaaaaaaacgaaaaaacaaaaaatacgacgacgaaacgaaaaaaaaacgaaacgacgaaacgaaaacaaaaaaatacgaaaccgaaaaacgaaaacgacgaaaacgaaaaaaaaaataaaaataaaaaaaaacaaaaaaacgcgaaacgcgacgcgcgcgaaaaaaaacaaaaaaaaaaaaaaaacgaacgaaacgaacgaaaaataaaaaaaaaaacgcgaaaaaaaaaacgccgacaaaaaacgaaaaaaaaaaacaacaataacgaaaaacgaacgaaaaaaaaaaaaaaaaaaaaaaaaaactaaaacgaaaaaaaaaaaaaaaaaaaaaacgaaacgaaaaaaaacgaaaaaacgaaaacgaaaaacgaaaaaaaaaaaaaaaaaaaaaaaaaaaaaaaaaaaacgaaaaaaaaaaaaaaaaaaaacaaaaaaaaaaaaaaaaaaaaaaaaaaaaacgaataacgtaaaaataaaacaatattaaacgaatactatacataaaacgaaaacattatacttttattatattaaaataaaaa

SEQ ID NO: 39869 - DNA, 580 bp, Artificial Sequence
  chemically treated genomic DNA (Homo sapiens) CpG-island No: 39869
tttgtttttttttttcgttttttttttcgtttcgttcgttttttcgtttttttcggttgcgtttttttcgtgtttttttcgttttcggtttttcgtttttttcgttttcgtttcgcgtgtcgtttttgggcgcgtttttcgtttcgtttggtttttttcggattcggtcgttgtttttgtttttttcgcgtttcgttcgtaattttttcggagtcgtgcgtttaacgtttcggttcggttatttcgttttttttcgtttttcgtatttttgtttttttttttttcgtttttttcgaggtttttcgtcggagttttcgtcgtttgcgttttttttcgttttttttcgatttttttttcggtatttttttatttttttcgttcggttcgtttgtcgtcgcgtcgtcgtcgcgtttttgtttttttcgtcgtgcgttttgtttcgtcgcggtttcgttttgtgttttacgcgtatttgcgagttcggtcgtcgttcgttttcgtttttttcgtttttttcgttttcgttttcggtgatgatcgtttgcgttttttcgcgacgatcgagttttgcgaaggtgcg

SEQ ID NO: 39870 - DNA, 580 bp, Artificial Sequence
  chemically treated genomic DNA (Homo sapiens) CpG-island No: 39870
cgcaccttcgcaaaactcgatcgtcgcgaaaaaacgcaaacgatcatcaccgaaaacgaaaacgaaaaaaacgaaaaaaacgaaaacgaacgacgaccgaactcgcaaatacgcgtaaaacacaaaacgaaaccgcgacgaaacaaaacgcacgacgaaaaaaacaaaaacgcgacgacgacgcgacgacaaacgaaccgaacgaaaaaaataaaaaaataccgaaaaaaaaatcgaaaaaaaacgaaaaaaaacgcaaacgacgaaaactccgacgaaaaacctcgaaaaaaacgaaaaaaaaaaaaacaaaaatacgaaaaacgaaaaaaaacgaaataaccgaaccgaaacgttaaacgcacgactccgaaaaaattacgaacgaaacgcgaaaaaaacaaaaacaacgaccgaatccgaaaaaaaccaaacgaaacgaaaaacgcgcccaaaaacgacacgcgaaacgaaaacgaaaaaaacgaaaaaccgaaaacgaaaaaaacacgaaaaaaacgcaaccgaaaaaaacgaaaaaacgaacgaaacgaaaaaaaaaacgaaaaaaaaaaacaaa

SEQ ID NO: 39871 - DNA, 580 bp, Artificial Sequence
  chemically treated genomic DNA (Homo sapiens) CpG-island No: 39871
cgtattttcgtaaggttcgatcgtcgcgggaaggcgtagacggttattatcggaggcgggagcggggggggcggggagagcgaaagcgggcggcggtcgggttcgtaaatgcgcgtgaagtataagacggagtcgcggcgaggtagagcgtacggcggggggggtaaaaacgcggcggcggcgcggcggtagacgagtcggacggagggggtggggaagtatcgggggaaagatcgagagagggcggggggagacgtaggcgacggggatttcggcggggagtttcggggaaggcgggggggggggaggtaggaatgcggggagcggaggagagcggagtagtcgaatcggggcgttaaacgtacgatttcgggagaattgcggacgggacgcggggaaggtaaagatagcggtcgggttcggggggggttaaacggggcggggagcgcgtttaggaacggtacgcgggacgagggcggggggagcgggggatcgggaacggggggggtacgggaagggcgtagtcgggggaagcggaggggcgaacggggcgaaggggggggcggggaggggggataaa

SEQ ID NO: 39872 - DNA, 580 bp, Artificial Sequence
  chemically treated genomic DNA (Homo sapiens) CpG-island No: 39872
tttatcccccctccccgccccccccttcgccccgttcgcccctccgcttcccccgactacgcccttcccgtaccccccccgttcccgatcccccgctccccccgccctcgtcccgcgtaccgttcctaaacgcgctccccgccccgtttaaccccccccgaacccgaccgctatctttaccttccccgcgtcccgtccgcaattctcccgaaatcgtacgtttaacgccccgattcgactactccgctctcctccgctccccgcattcctacctcccccccccccgccttccccgaaactccccgccgaaatccccgtcgcctacgtctccccccgccctctctcgatctttcccccgatacttccccaccccctccgtccgactcgtctaccgccgcgccgccgccgcgtttttaccccccccgccgtacgctctacctcgccgcgactccgtcttatacttcacgcgcatttacgaacccgaccgccgcccgctttcgctctccccgccccccccgctcccgcctccgataataaccgtctacgccttcccgcgacgatcgaaccttacgaaaatacg

SEQ ID NO: 39873 - DNA, 691 bp, Artificial Sequence
  chemically treated genomic DNA (Homo sapiens) CpG-island No: 39873
  unsure (496, 612, 631)
gtcggttaagtcgaatatcggttatacgtaagcggcggcgggtgtggttggtgtgattaagatggtgatggcgatgcggtacgggtagttgttacgtacgttgtacgtggaatcgtcgtcgtcggaggtggattggtcggcggggacggtttaattttttacggagaatacgttttggtttaggagtggtcgtgttcgtcgggtgggggtgtcgtcgttcgggattagtggtattaacgcgtacgttattttcgaatagttttcgggagtgtcgagttagtttgcggggtcgggttcgggttttgtcgtggatgtttcggtggtgtcgtggatggtgtcgggtaaaatattcgaagcgttattcgcgtaggtaacggcgttgatgatttatttggacgagcgatttgatgttttttcgttggatgttgcgtattcgttggcgttgatacggtcggcgttggatgagcgagcggtggtgtttgggtcggatcgtganacgttgttgtgcggtgtgaaagcgttgtttgtcggttatgaggttttttggttgttgatcggatttgtgggggttggggtcgtatcgggtttgggtttttcggttagggtggttantgggttgggaatgagtcgngggttttatcgggttttttcggtgtttttgttgtttttgataaatttgggtcgagttgga

SEQ ID NO: 39874 - DNA, 691 bp, Artificial Sequence
  chemically treated genomic DNA (Homo sapiens) CpG-island No: 39874
  unsure (61, 80, 196)
tccaactcgacccaaatttatcaaaaacaacaaaaacaccgaaaaaacccgataaaacccncgactcattcccaacccantaaccaccctaaccgaaaaacccaaacccgatacgaccccaacccccacaaatccgatcaacaaccaaaaaacctcataaccgacaaacaacgctttcacaccgcacaacaacgtntcacgatccgacccaaacaccaccgctcgctcatccaacgccgaccgtatcaacgccaacgaatacgcaacatccaacgaaaaaacatcaaatcgctcgtccaaataaatcatcaacgccgttacctacgcgaataacgcttcgaatattttacccgacaccatccacgacaccaccgaaacatccacgacaaaacccgaacccgaccccgcaaactaactcgacactcccgaaaactattcgaaaataacgtacgcgttaataccactaatcccgaacgacgacacccccacccgacgaacacgaccactcctaaaccaaaacgtattctccgtaaaaaattaaaccgtccccgccgaccaatccacctccgacgacgacgattccacgtacaacgtacgtaacaactacccgtaccgcatcgccatcaccatcttaatcacaccaaccacacccgccgccgcttacgtataaccgatattcgacttaaccgac

SEQ ID NO: 39875 - DNA, 691 bp, Artificial Sequence
  chemically treated genomic DNA (Homo sapiens) CpG-island No: 39875
  unsure (61, 80, 196)
tttagttcggtttaggtttgttaaaggtaatagggatatcggaaaaattcggtaaagtttncggtttatttttaatttantgattattttgatcggaaaatttaaattcgatgcggttttagtttttatagattcggttaataattaagaagttttatgatcggtagatagcgtttttatatcgtataataacgtnttacggttcgatttaagtattatcgttcgtttatttagcgtcgatcgtgttaacgttagcgagtacgtaatatttagcgaggagatattaggtcgttcgtttagataggttattaacgtcgttgtttgcgcggatagcgtttcgggtgttttgttcgatattatttacggtattatcggaatatttacgatagaattcgaattcggtttcgtagattgattcggtattttcgggggttgttcgaggatgacgtgcgcgttagtattattgatttcgaacgacgatatttttattcgacgaatacgattatttttgggttagggcgtgtttttcgtaaggagttgaatcgttttcgtcgattaatttattttcggcgacggcgattttacgtgtaacgtgcgtggtagttgttcgtgtcgtatcgttattattattttgattatattagttatattcgtcgtcgtttgcgtatgatcgatgttcgatttgatcgat

SEQ ID NO: 39876 - DNA, 691 bp, Artificial Sequence
  chemically treated genomic DNA (Homo sapiens) CpG-island No: 39876
  unsure (496, 612, 631)
atcgatcaaatcgaacatcgatcatacgcaaacgacgacgaatataactaatataatcaaaataataataacgatacgacacgaacaactaccacgcacgttacacgtaaaatcgccgtcgccgaaaataaattaatcgacgaaaacgattcaactccttacgaaaaacacgccctaacccaaaaataatcgtattcgtcgaataaaaatatcgtcgttcgaaatcaataatactaacgcgcacgtcatcctcgaacaacccccgaaaataccgaatcaatctacgaaaccgaattcgaattctatcgtaaatattccgataataccgtaaataatatcgaacaaaacacccgaaacgctatccgcgcaaacaacgacgttaataacctatctaaacgaacgacctaatatctcctcgctaaatattacgtactcgctaacgttaacacgatcgacgctaaataaacgaacgataatacttaaatcgaaccgtaanacgttattatacgatataaaaacgctatctaccgatcataaaacttcttaattattaaccgaatctataaaaactaaaaccgcatcgaatttaaattttccgatcaaaataatcantaaattaaaaataaaccgnaaactttaccgaatttttccgatatccctattacctttaacaaacctaaaccgaactaaa

SEQ ID NO: 39877 - DNA, 608 bp, Artificial Sequence
  chemically treated genomic DNA (Homo sapiens) CpG-island No: 39877
ggggtcggttaagtcgaatatcggttatacgtaagcggcggcgggtgtggttggtgtgattaagatggtgatggcgatgcggtacgggtagttgttacgtacgttgtacgtggaatcgtcgtcgtcggaggtggattggtcggcggggacggtttaattttttacggagaatacgttttggtttaggagtggtcgtgttcgtcgggtgggggtgtcgtcgttcgggattagtggtattaacgcgtacgttattttcgaatagttttcgggagtgtcgagttagtttgcggggtcgggttcgggttttgtcgtggatgtttcggtggtgtcgtggatggtgtcgggtaaaatattcgaagcgttattcgcgtaggtaacggggttgatgatttatttggacgagcgatttgatgttttttcgttggatgttgggtattcgttggcgttgatacggattgggttggatgagcgagcggtggtgttggggtcgatcgtgaacgttgttgtgcggtggaaagcgttgtttgtcgttatgaggtttttgggttgggatcggatttgtggggttggggttcgataggttttgtgttttcgttaggggttagtgt

SEQ ID NO: 39878 - DNA, 608 bp, Artificial Sequence
  chemically treated genomic DNA (Homo sapiens) CpG-island No: 39878
acactaacccctaacgaaaacacaaaacctatcgaaccccaaccccacaaatccgatcccaacccaaaaacctcataacgacaaacaacgctttccaccgcacaacaacgttcacgatcgaccccaacaccaccgctcgctcatccaacccaatccgtatcaacgccaacgaatacccaacatccaacgaaaaaacatcaaatcgctcgtccaaataaatcatcaaccccgttacctacgcgaataacgcttcgaatattttacccgacaccatccacgacaccaccgaaacatccacgacaaaacccgaacccgaccccgcaaactaactcgacactcccgaaaactattcgaaaataacgtacgcgttaataccactaatcccgaacgacgacacccccacccgacgaacacgaccactcctaaaccaaaacgtattctccgtaaaaaattaaaccgtccccgccgaccaatccacctccgacgacgacgattccacgtacaacgtacgtaacaactacccgtaccgcatcgccatcaccatcttaatcacaccaaccacacccgccgccgcttacgtataaccgatattcgacttaaccgacccc

SEQ ID NO: 39879 - DNA, 608 bp, Artificial Sequence
  chemically treated genomic DNA (Homo sapiens) CpG-island No: 39879
gtattgatttttggcggaaatataaaatttatcgggttttagttttatagattcggttttaatttagaagttttatgacggtagatagcgttttttatcgtataataacgtttacggtcgattttagtattatcgttcgtttatttagtttagttcgtgttaacgttagcgagtatttaatatttagcgaggagatattaggtcgttcgtttagataggttattaatttcgttgtttgcgcggatagcgtttcgggtgttttgttcgatattatttacggtattatcggaatatttacgatagaattcgaattcggtttcgtagattgattcggtattttcgggggttgttcgaggatgacgtgcgcgttagtattattgatttcgaacgacgatatttttattcgacgaatacgattatttttgggttagggcgtgtttttcgtaaggagttgaatcgttttcgtcgattaatttattttcggcgacggcgattttacgtgtaacgtgcgtggtagttgttcgtgtcgtatcgttattattattttgattatattagttatattcgtcgtcgtttgcgtatgatcgatgttcgatttgatcgatttt

SEQ ID NO: 39880 - DNA, 608 bp, Artificial Sequence
  chemically treated genomic DNA (Homo sapiens) CpG-island No: 39880
aaaatcgatcaaatcgaacatcgatcatacgcaaacgacgacgaatataactaatataatcaaaataataataacgatacgacacgaacaactaccacgcacgttacacgtaaaatcgccgtcgccgaaaataaattaatcgacgaaaacgattcaactccttacgaaaaacacgccctaacccaaaaataatcgtattcgtcgaataaaaatatcgtcgttcgaaatcaataatactaacgcgcacgtcatcctcgaacaacccccgaaaataccgaatcaatctacgaaaccgaattcgaattctatcgtaaatattccgataataccgtaaataatatcgaacaaaacacccgaaacgctatccgcgcaaacaacgaaattaataacctatctaaacgaacgacctaatatctcctcgctaaatattaaatactcgctaacgttaacacgaactaaactaaataaacgaacgataatactaaaatcgaccgtaaacgttattatacgataaaaaacgctatctaccgtcataaaacttctaaattaaaaccgaatctataaaactaaaacccgataaattttatatttccgccaaaaatcaatac

SEQ ID NO: 39881 - DNA, 873 bp, Artificial Sequence
  chemically treated genomic DNA (Homo sapiens) CpG-island No: 39881
cggtaaaagtcggtttttttcggtagggatcgttgtagtggtcgttggcggtcggcgcggcgatgtttcgttttcggcgcgagtttcggagttttcgggttggtaggtcgagtcggcggtttcgcgggggaggggcgggtcggggggcggtgcgaggtttagtcgggcgtttcgttggcgggtcgcgcgcgcgttcgcgtattttttttgttttcgaggcgcgtcgcgtttttttttttattcgttcgcgtaggttatcgttcgttgcgcgttttgtttcgcgtttcgtttcgttcgttttttgattggtcgtttttgttttttttttcgtttttttttttttttttttgcggtttgaagatgttttcggttattagttatagcgggagcggtagtaagtcgttcggatcgttatcgtcgtcgggttttttcgggagtgaggcggtcgcgggagtcggggtcgtcgcgtcggttttttagtatttcgtaatcggtatcggcgttgtttagatcgaggttatgaagtagattttcggggtgatcgataagaaatttcggaatttggagaagaaaaaggtgttaggagttggcggggaagggaggggtggttgcggtcgggttttgcggttttttcgattttggtcgttggagttttcgttttttttcgtttcgggagcgttattaggttttttttttttattttttggtttatacgtttcgtttttacgtttagcgggagtttcgtgtttagaaaacgggtttttggaagaggtatttgttatttgattcggacgcggtattgtattttaggtttttttattattttttcgttgtgggttcggttttttggtttttaggagtgggatatgtgag

SEQ ID NO: 39882 - DNA, 873 bp, Artificial Sequence
  chemically treated genomic DNA (Homo sapiens) CpG-island No: 39882
ctcacatatcccactcctaaaaaccaaaaaaccgaacccacaacgaaaaaataataaaaaaacctaaaatacaataccgcgtccgaatcaaataacaaatacctcttccaaaaacccgttttctaaacacgaaactcccgctaaacgtaaaaacgaaacgtataaaccaaaaaataaaaaaaaaaaacctaataacgctcccgaaacgaaaaaaaacgaaaactccaacgaccaaaatcgaaaaaaccgcaaaacccgaccgcaaccacccctcccttccccgccaactcctaacacctttttcttctccaaattccgaaatttcttatcgatcaccccgaaaatctacttcataacctcgatctaaacaacgccgataccgattacgaaatactaaaaaaccgacgcgacgaccccgactcccgcgaccgcctcactcccgaaaaaacccgacgacgataacgatccgaacgacttactaccgctcccgctataactaataaccgaaaacatcttcaaaccgcaaaaaaaaaaaaaaaaaaacgaaaaaaaaaacaaaaacgaccaatcaaaaaacgaacgaaacgaaacgcgaaacaaaacgcgcaacgaacgataacctacgcgaacgaataaaaaaaaaaacgcgacgcgcctcgaaaacaaaaaaaatacgcgaacgcgcgcgcgacccgccaacgaaacgcccgactaaacctcgcaccgccccccgacccgcccctcccccgcgaaaccgccgactcgacctaccaacccgaaaactccgaaactcgcgccgaaaacgaaacatcgccgcgccgaccgccaacgaccactacaacgatccctaccgaaaaaaaccgacttttaccg

SEQ ID NO: 39883 - DNA, 873 bp, Artificial Sequence
  chemically treated genomic DNA (Homo sapiens) CpG-island No: 39883
tttatatgttttatttttaaaggttaaaaagtcggatttatagcggaagagtaataaagaggtttggggtatagtgtcgcgttcgagttaggtgataagtgttttttttaagagttcgttttttgggtacgaagttttcgttgaacgtggagacggggcgtgtgggttagggggtgggaggaggggatttagtaacgttttcgagacgaaaagaagcgaaggttttagcgattagggtcggaggggtcgtagagttcggtcgtagttatttttttttttttcgttaatttttggtattttttttttttttaggtttcgaagttttttgtcgattatttcgagaatttgttttatggtttcggtttggatagcgtcggtgtcggttgcggggtgttgagaagtcggcgcggcggtttcggttttcgcggtcgttttattttcggaggaattcgacggcggtggcggttcggacgatttgttgtcgttttcgttgtggttggtggtcgagggtatttttagatcgtaaggagagagaagaaaaagcgggaggaaggataagagcggttagttaggagacggacggggcgagacgcgggataaaacgcgtagcgagcggtagtttacgcgagcgggtgggggagggggcgcggcgcgtttcgagggtaggaagagtgcgcgggcgcgcgcgcgattcgttagcggggcgttcggttgggtttcgtatcgtttttcgattcgtttttttttcgcggagtcgtcggttcggtttattagttcgggggtttcgaggttcgcgtcggaggcggggtatcgtcgcgtcggtcgttaacggttattgtaacggtttttatcggggagggtcggtttttgtcg

SEQ ID NO: 39884 - DNA, 873 bp, Artificial Sequence
  chemically treated genomic DNA (Homo sapiens) CpG-island No: 39884
cgacaaaaaccgaccctccccgataaaaaccgttacaataaccgttaacgaccgacgcgacgataccccgcctccgacgcgaacctcgaaacccccgaactaataaaccgaaccgacgactccgcgaaaaaaaaacgaatcgaaaaacgatacgaaacccaaccgaacgccccgctaacgaatcgcgcgcgcgcccgcgcactcttcctaccctcgaaacgcgccgcgccccctcccccacccgctcgcgtaaactaccgctcgctacgcgttttatcccgcgtctcgccccgtccgtctcctaactaaccgctcttatccttcctcccgctttttcttctctctccttacgatctaaaaataccctcgaccaccaaccacaacgaaaacgacaacaaatcgtccgaaccgccaccgccgtcgaattcctccgaaaataaaacgaccgcgaaaaccgaaaccgccgcgccgacttctcaacaccccgcaaccgacaccgacgctatccaaaccgaaaccataaaacaaattctcgaaataatcgacaaaaaacttcgaaacctaaaaaaaaaaaaaataccaaaaattaacgaaaaaaaaaaaaataactacgaccgaactctacgacccctccgaccctaatcgctaaaaccttcgcttcttttcgtctcgaaaacgttactaaatcccctcctcccaccccctaacccacacgccccgtctccacgttcaacgaaaacttcgtacccaaaaaacgaactcttaaaaaaaacacttatcacctaactcgaacgcgacactataccccaaacctctttattactcttccgctataaatccgactttttaacctttaaaaataaaacatataaa

SEQ ID NO: 39885 - DNA, 535 bp, Artificial Sequence
  chemically treated genomic DNA (Homo sapiens) CpG-island No: 39885
  unsure (451)
cgtcgttttttatttttttttcgttatttgtttaattttaattggaatcgtgagtagcgttttttttttcgttttagtggagtggacgatttttcgcggttttgttttttcgttcgtgtcgtcgcgtatttttgtttttacgtcgtcgtcgcgcgttttttcggttttagttcgtacgcgtttcgcgttcggtttcggttggtttttattcgttgtggttttttttttttttcgcgggcggtttttttttttttttttttttttttcgttttttcggtcgcggtacgtgggtcgtgttcggcggtttgtcgcgtggacgtggtcgtcgcgttttcgttcgcgttgttgcgttttcgtcggcgcgggtgtcgtcgcgtcgcgcgcgttttcgtcggcggtttcgcgtcgttttatttgcgggtcgggcgcgcgtcgcgatttttcggtgcgncgttttttcgcgggtgtcgcgtttgcgttttgttttcgcgtcgcgggttcgatacggtgattgcgtggatttttttttgtgttt

SEQ ID NO: 39886 - DNA, 535 bp, Artificial Sequence
  chemically treated genomic DNA (Homo sapiens) CpG-island No: 39886
  unsure (85)
aaacacaaaaaaaaatccacgcaatcaccgtatcgaacccgcgacgcgaaaacaaaacgcaaacgcgacacccgcgaaaaaacgncgcaccgaaaaatcgcgacgcgcgcccgacccgcaaataaaacgacgcgaaaccgccgacgaaaacgcgcgcgacgcgacgacacccgcgccgacgaaaacgcaacaacgcgaacgaaaacgcgacgaccacgtccacgcgacaaaccgccgaacacgacccacgtaccgcgaccgaaaaaacgaaaaaaaaaaaaaaaaaaaaaaaaaccgcccgcgaaaaaaaaaaaaaaccacaacgaataaaaaccaaccgaaaccgaacgcgaaacgcgtacgaactaaaaccgaaaaaacgcgcgacgacgacgtaaaaacaaaaatacgcgacgacacgaacgaaaaaacaaaaccgcgaaaaatcgtccactccactaaaacgaaaaaaaaaacgctactcacgattccaattaaaattaaacaaataacgaaaaaaaaataaaaaacgacg

SEQ ID NO: 39887 - DNA, 535 bp, Artificial Sequence
  chemically treated genomic DNA (Homo sapiens) CpG-island No: 39887
  unsure (85)
gggtatagagagggatttacgtaattatcgtatcgggttcgcggcgcggggatagagcgtaggcgcggtattcgcgaaggggcgncgtatcggagggtcgcggcgcgcgttcggttcgtaggtgaggcggcgcggggtcgtcggcgggggcgcgcgcgacgcggcggtattcgcgtcggcgagagcgtaatagcgcgggcggggacgcggcgattacgtttacgcggtagatcgtcggatacgatttacgtgtcgcggtcggagaggcggggggggggggggaaagagggggaatcgttcgcgggggagaagggaggttataacgggtggaggttagtcggggtcgggcgcggggcgcgtgcgggttagggtcggagaggcgcgcggcggcggcgtggaggtaggggtgcgcggcggtacgggcgaggggatagagtcgcgggaagtcgtttattttattgaggcggagggaagaacgttatttacggttttagttaagattgagtaggtggcggggaggggatagggggcggcg

SEQ ID NO: 39888 - DNA, 535 bp, Artificial Sequence
  chemically treated genomic DNA (Homo sapiens) CpG-island No: 39888
  unsure (451)
cgccgccccctatcccctccccgccacctactcaatcttaactaaaaccgtaaataacgttcttccctccgcctcaataaaataaacgacttcccgcgactctatcccctcgcccgtaccgccgcgcacccctacctccacgccgccgccgcgcgcctctccgaccctaacccgcacgcgccccgcgcccgaccccgactaacctccacccgttataacctcccttctcccccgcgaacgattccccctctttccccccccccccccgcctctccgaccgcgacacgtaaatcgtatccgacgatctaccgcgtaaacgtaatcgccgcgtccccgcccgcgctattacgctctcgccgacgcgaataccgccgcgtcgcgcgcgcccccgccgacgaccccgcgccgcctcacctacgaaccgaacgcgcgccgcgaccctccgatacgncgccccttcgcgaataccgcgcctacgctctatccccgcgccgcgaacccgatacgataattacgtaaatccctctctataccc

SEQ ID NO: 39889 - DNA, 642 bp, Artificial Sequence
  chemically treated genomic DNA (Homo sapiens) CpG-island No: 39889
  unsure (441, 523)
tcgtttttttgttcggcgtatcgtcgcgggtgtgttttattatagttgaaagttcggtttcgcgtttttatttcgttttttttttttcggcggcggcggcgtttcgcgcgtttttcgtcgttatcgtcggttttttcgttttttttttcgcgggtcggtcgcggggcgtttcgttttcgcgttcgggtcgtcgtcgcgcggcgttttttcgcggcgcgtcgttttgtttttcggatttcgtattacgcggcgcgtttttcggtttcggcgcgttcggtttattggacgcgtggattcgtttgattcgtcgtcgggtcgtttcgcgattttttcgtttgggcgcgtttatcgagtatttcggcgttttacggcgcgcgggcgtcggtcgcgcgcgtcgcgtttcgtcgcgtgggcggtcgttcgtgacgagtaaattagttngcggcgcgtttcggtcgagttttttagttatattacgagtttgtattcggtacgtatattttttacggtatatcgaggtcgntaatagtattattttatcgtattcgcgatacgggttagtacgttatacgcgcggcgttcgcgagtcgcgcgagcgggcgcgttcggagttcgtcggcggttttacgtcgcgatcgcgtt

SEQ ID NO: 39890 - DNA, 642 bp, Artificial Sequence
  chemically treated genomic DNA (Homo sapiens) CpG-island No: 39890
  unsure (120, 202)
aacgcgatcgcgacgtaaaaccgccgacgaactccgaacgcgcccgctcgcgcgactcgcgaacgccgcgcgtataacgtactaacccgtatcgcgaatacgataaaataatactattancgacctcgatataccgtaaaaaatatacgtaccgaatacaaactcgtaatataactaaaaaactcgaccgaaacgcgccgcnaactaatttactcgtcacgaacgaccgcccacgcgacgaaacgcgacgcgcgcgaccgacgcccgcgcgccgtaaaacgccgaaatactcgataaacgcgcccaaacgaaaaaatcgcgaaacgacccgacgacgaatcaaacgaatccacgcgtccaataaaccgaacgcgccgaaaccgaaaaacgcgccgcgtaatacgaaatccgaaaaacaaaacgacgcgccgcgaaaaaacgccgcgcgacgacgacccgaacgcgaaaacgaaacgccccgcgaccgacccgcgaaaaaaaaaacgaaaaaaccgacgataacgacgaaaaacgcgcgaaacgccgccgccgccgaaaaaaaaaaaacgaaataaaaacgcgaaaccgaactttcaactataataaaacacacccgcgacgatacgccgaacaaaaaaacga

SEQ ID NO: 39891 - DNA, 642 bp, Artificial Sequence
  chemically treated genomic DNA (Homo sapiens) CpG-island No: 39891
  unsure (120, 202)
ggcgcggtcgcggcgtggggtcgtcggcgggtttcgggcgcgttcgttcgcgcggttcgcgggcgtcgcgcgtgtggcgtgttggttcgtgtcgcgggtgcggtggggtggtgttattgncggtttcggtgtgtcgtggggggtatacgtatcggatgtaggttcgtggtatggttaaggagttcggtcgaggcgcgtcgtnggttggtttgttcgttacgagcgatcgtttacgcggcggggcgcgacgcgcgcggtcggcgttcgcgcgtcgtagggcgtcgaggtattcggtgggcgcgtttagacggagaagtcgcggggcggttcggcggcgggttagacgggtttacgcgtttagtgggtcgggcgcgtcggagtcgggaggcgcgtcgcgtgatgcggggttcggggagtagggcggcgcgtcgcgggggggcgtcgcgcggcggcggttcgggcgcgggggcggggcgtttcgcggtcggttcgcgggagggggggcgggggggtcggcggtggcggcggggggcgcgcggggcgtcgtcgtcgtcggagggaggggagcgaagtgagggcgcgaggtcgggtttttagttataatgaaatatattcgcggcggtgcgtcgggtagaggaacga

SEQ ID NO: 39892 - DNA, 642 bp, Artificial Sequence
  chemically treated genomic DNA (Homo sapiens) CpG-island No: 39892
  unsure (441, 523)
tcgttcctctacccgacgcaccgccgcgaatatatttcattataactaaaaacccgacctcgcgccctcacttcgctcccctccctccgacgacgacgacgccccgcgcgccccccgccgccaccgccgacccccccgccccccctcccgcgaaccgaccgcgaaacgccccgcccccgcgcccgaaccgccgccgcgcgacgcccccccgcgacgcgccgccctactccccgaaccccgcatcacgcgacgcgcctcccgactccgacgcgcccgacccactaaacgcgtaaacccgtctaacccgccgccgaaccgccccgcgacttctccgtctaaacgcgcccaccgaatacctcgacgccctacgacgcgcgaacgccgaccgcgcgcgtcgcgccccgccgcgtaaacgatcgctcgtaacgaacaaaccaaccnacgacgcgcctcgaccgaactccttaaccataccacgaacctacatccgatacgtataccccccacgacacaccgaaaccgncaataacaccaccccaccgcacccgcgacacgaaccaacacgccacacgcgcgacgcccgcgaaccgcgcgaacgaacgcgcccgaaacccgccgacgaccccacgccgcgaccgcgcc

SEQ ID NO: 39893 - DNA, 791 bp, Artificial Sequence
  chemically treated genomic DNA (Homo sapiens) CpG-island No: 39893
tcggttaagtcgaatatcggttatacgtaagcggcggcgggtgtggttggtgtgattaagatggtgatggcgatgcggtacgggtagttgttacgtacgttgtacgtggaatcgtcgtcgtcggaggtggattggtcggcggggacggtttaattttttacggagaatacgttttggtttaggagtggtcgtgttcgtcgggtgggggtgtcgtcgttcgggattagtggtattaacgcgtacgttattttcgaatagttttcgggagtgtcgagttagtttgcggggtcgggttcgggttttgtcgtggatgtttcggtggtgtcgtggatggtgtcgggtaaaatattcgaagcgttatttcggtaggtaacggcgttgatgatttatttggacgagcgaattgatgttttttcgttggatgttgggtattcgttggcgttgttacggtcggcgtttgatgatcgagcgggggtgtttgggttcgattttgaaattttttgggcgggtgaaaatttttttggcggtattgaggtttgggttggggatcgaatttgggggtttggggtcgatttggtttgggtttttcgtattgaggataagaataaaatggaatagcgcgttattttttttaatatagtcgtttttttttcgtttcgttcggttcgatttcgtttttcgtcgttcgatcggttagttattcgttatattcgagatagttttttttttatttacgtatatttttttatttatagataattcgttttataaatattttcgagatttatttt

SEQ ID NO: 39894 - DNA, 791 bp, Artificial Sequence
  chemically treated genomic DNA (Homo sapiens) CpG-island No: 39894
aaaataaatctcgaaaatatttataaaacgaattatctataaataaaaaaatatacgtaaataaaaaaaaaactatctcgaatataacgaataactaaccgatcgaacgacgaaaaacgaaatcgaaccgaacgaaacgaaaaaaaaacgactatattaaaaaaaataacgcgctattccattttattcttatcctcaatacgaaaaacccaaaccaaatcgaccccaaacccccaaattcgatccccaacccaaacctcaataccgccaaaaaaattttcacccgcccaaaaaatttcaaaatcgaacccaaacacccccgctcgatcatcaaacgccgaccgtaacaacgccaacgaatacccaacatccaacgaaaaaacatcaattcgctcgtccaaataaatcatcaacgccgttacctaccgaaataacgcttcgaatattttacccgacaccatccacgacaccaccgaaacatccacgacaaaacccgaacccgaccccgcaaactaactcgacactcccgaaaactattcgaaaataacgtacgcgttaataccactaatcccgaacgacgacacccccacccgacgaacacgaccactcctaaaccaaaacgtattctccgtaaaaaattaaaccgtccccgccgaccaatccacctccgacgacgacgattccacgtacaacgtacgtaacaactacccgtaccgcatcgccatcaccatcttaatcacaccaaccacacccgccgccgcttacgtataaccgatattcgacttaaccga

SEQ ID NO: 39895 - DNA, 791 bp, Artificial Sequence
  chemically treated genomic DNA (Homo sapiens) CpG-island No: 39895
gggatgggtttcggaggtgtttgtggggcgagttatttgtgggtggaggggtgtgcgtgagtaaaaagaagattatttcgagtgtagcgggtgattggtcggtcgagcggcggggggcggggtcggatcgggcggggcggagaggaagcggttgtgttaaagggggtgacgcgttgttttattttatttttatttttagtgcgagaaatttaaattaagtcggttttaggtttttaaattcggtttttaatttaaattttaatgtcgttagaagggtttttattcgtttaaaaagttttagggtcggatttaagtattttcgttcggttattaagcgtcgatcgtggtaacgttagcgagtatttaatatttagcgaggagatattagttcgttcgtttagataggttattaacgtcgttgtttgtcggaatagcgtttcgggtgttttgttcgatattatttacggtattatcggaatatttacgatagaattcgaattcggtttcgtagattgattcggtattttcgggggttgttcgaggatgacgtgcgcgttagtattattgatttcgaacgacgatatttttattcgacgaatacgattatttttgggttagggcgtgtttttcgtaaggagttgaatcgttttcgtcgattaatttattttcggcgacggcgattttacgtgtaacgtgcgtggtagttgttcgtgtcgtatcgttattattattttgattatattagttatattcgtcgtcgtttgcgtatgatcgatgttcgatttgatcga

SEQ ID NO: 39896 - DNA, 791 bp, Artificial Sequence
  chemically treated genomic DNA (Homo sapiens) CpG-island No: 39896
tcgatcaaatcgaacatcgatcatacgcaaacgacgacgaatataactaatataatcaaaataataataacgatacgacacgaacaactaccacgcacgttacacgtaaaatcgccgtcgccgaaaataaattaatcgacgaaaacgattcaactccttacgaaaaacacgccctaacccaaaaataatcgtattcgtcgaataaaaatatcgtcgttcgaaatcaataatactaacgcgcacgtcatcctcgaacaacccccgaaaataccgaatcaatctacgaaaccgaattcgaattctatcgtaaatattccgataataccgtaaataatatcgaacaaaacacccgaaacgctattccgacaaacaacgacgttaataacctatctaaacgaacgaactaatatctcctcgctaaatattaaatactcgctaacgttaccacgatcgacgcttaataaccgaacgaaaatacttaaatccgaccctaaaactttttaaacgaataaaaacccttctaacgacattaaaatttaaattaaaaaccgaatttaaaaacctaaaaccgacttaatttaaatttctcgcactaaaaataaaaataaaataaaacaacgcgtcaccccctttaacacaaccgcttcctctccgccccgcccgatccgaccccgccccccgccgctcgaccgaccaatcacccgctacactcgaaataatcttctttttactcacgcacacccctccacccacaaataactcgccccacaaacacctccgaaacccatccc

SEQ ID NO: 39897 - DNA, 1024 bp, Artificial Sequence
  chemically treated genomic DNA (Homo sapiens) CpG-island No: 39897
tcgggtatcgcggggtttagggttcgcggggtttttgagttgaggcggtttaatgtattttttgtttttttttagatttattatgaaattcgaggtagtttgggcgattttagcggcgttcgttcgtcgtagtttttcgatcgtcggttattcgttagttacgcgcgtttagataggagggcggtcgggcgttcggcggggcggggttgtcgggggcggggtttgcgggcggggcggggcgcgggagggcggggtcggcgcggcgagcgtattagtagtattttggtttagtcgcggcggtggcgggggcgtaattagcgggtcgaggcggcggcgttagcggggttttaaatagtatttagagtcggcgcggggtagggagtgggttgtagtgatagtcggcggcggagcggtcggtttacggaggaggtgagtgcgttcgtcgtgcggagtcgcgtttgttttcgcggcggtgttcgggtttcggtcgaggcgtcggttgacgttgttttttagggtcgagttcggagtagcggtcgtcgcggaggcgcgtgagttattttaggttcgtggggtcgcgtcgttttttcggttttttgttcgcggtttcgtttttttcggtagtcggaggttttcggggtgttcgtgttgtcgtagttttttgtgtttgagtcgcgggcggcgcgggcgcggggttggtgcgcggtcggggatgcgcgcgggatcgatttttgtgtgtgcggcggcggggatcggttcggcgaagtagtcggaggtcgcgtttcggttgggaggaggtggtttagttgggtcgttgacgttgttttcgttcgcggttttcgtttgtttagaggtcgggttcgcgggcgttcggatcgcgcgtggggcgagattgtattcgcgttcgttgagatgtcggttttacgtagcgcggcggtacgaggtttataggtagtttagaggtcgttgttagaggtagatattttttcggtgattttagaggagtgttcgtggtttttgtatt

SEQ ID NO: 39898 - DNA, 1024 bp, Artificial Sequence
  chemically treated genomic DNA (Homo sapiens) CpG-island No: 39898
aatacaaaaaccacgaacactcctctaaaatcaccgaaaaaatatctacctctaacaacgacctctaaactacctataaacctcgtaccgccgcgctacgtaaaaccgacatctcaacgaacgcgaatacaatctcgccccacgcgcgatccgaacgcccgcgaacccgacctctaaacaaacgaaaaccgcgaacgaaaacaacgtcaacgacccaactaaaccacctcctcccaaccgaaacgcgacctccgactacttcgccgaaccgatccccgccgccgcacacacaaaaatcgatcccgcgcgcatccccgaccgcgcaccaaccccgcgcccgcgccgcccgcgactcaaacacaaaaaactacgacaacacgaacaccccgaaaacctccgactaccgaaaaaaacgaaaccgcgaacaaaaaaccgaaaaaacgacgcgaccccacgaacctaaaataactcacgcgcctccgcgacgaccgctactccgaactcgaccctaaaaaacaacgtcaaccgacgcctcgaccgaaacccgaacaccgccgcgaaaacaaacgcgactccgcacgacgaacgcactcacctcctccgtaaaccgaccgctccgccgccgactatcactacaacccactccctaccccgcgccgactctaaatactatttaaaaccccgctaacgccgccgcctcgacccgctaattacgcccccgccaccgccgcgactaaaccaaaatactactaatacgctcgccgcgccgaccccgccctcccgcgccccgccccgcccgcaaaccccgcccccgacaaccccgccccgccgaacgcccgaccgccctcctatctaaacgcgcgtaactaacgaataaccgacgatcgaaaaactacgacgaacgaacgccgctaaaatcgcccaaactacctcgaatttcataataaatctaaaaaaaaacaaaaaatacattaaaccgcctcaactcaaaaaccccgcgaaccctaaaccccgcgatacccga

SEQ ID NO: 39899 - DNA, 1024 bp, Artificial Sequence
  chemically treated genomic DNA (Homo sapiens) CpG-island No: 39899
agtgtaagggttacgggtatttttttggagttatcgagagaatgtttgtttttggtagcggtttttgagttgtttgtgggtttcgtgtcgtcgcgttgcgtggggtcggtattttagcgggcgcgagtgtagtttcgttttacgcgcggttcgaacgttcgcgagttcggtttttgggtaggcgggggtcgcggacgagggtaacgttagcggtttagttgggttatttttttttagtcgaagcgcggttttcggttgtttcgtcgggtcggttttcgtcgtcgtatatataagggtcggtttcgcgcgtattttcggtcgcgtattagtttcgcgttcgcgtcgttcgcgatttagatataggaagttgcggtagtacgggtatttcggaggttttcggttgtcgagggaagcggggtcgcgggtaggaggtcggaaaggcggcgcggttttacgagtttggggtggtttacgcgttttcgcggcggtcgttgtttcgggttcggttttgaagggtaacgttagtcggcgtttcggtcggggttcgggtatcgtcgcgggagtaggcgcggtttcgtacggcgggcgtatttatttttttcgtggatcggtcgtttcgtcgtcggttgttattgtagtttattttttgtttcgcgtcggttttggatgttatttaaggtttcgttggcgtcgtcgtttcggttcgttggttgcgttttcgttatcgtcgcggttgagttaggatgttgttggtgcgttcgtcgcgtcggtttcgttttttcgcgtttcgtttcgttcgtaggtttcgttttcggtagtttcgtttcgtcgagcgttcggtcgtttttttgtttgggcgcgcgtggttggcgggtggtcggcggtcgagaggttgcggcgggcgaacgtcgttggagtcgtttagattgtttcggattttataatgaatttgaggaaggataaagggtatattggatcgttttagtttagaggtttcgcggattttgggtttcgcgatgttcga

SEQ ID NO: 39900 - DNA, 1024 bp, Artificial Sequence
  chemically treated genomic DNA (Homo sapiens) CpG-island No: 39900
tcgaacatcgcgaaacccaaaatccgcgaaacctctaaactaaaacgatccaatataccctttatccttcctcaaattcattataaaatccgaaacaatctaaacgactccaacgacgttcgcccgccgcaacctctcgaccgccgaccacccgccaaccacgcgcgcccaaacaaaaaaacgaccgaacgctcgacgaaacgaaactaccgaaaacgaaacctacgaacgaaacgaaacgcgaaaaaacgaaaccgacgcgacgaacgcaccaacaacatcctaactcaaccgcgacgataacgaaaacgcaaccaacgaaccgaaacgacgacgccaacgaaaccttaaataacatccaaaaccgacgcgaaacaaaaaataaactacaataacaaccgacgacgaaacgaccgatccacgaaaaaaataaatacgcccgccgtacgaaaccgcgcctactcccgcgacgatacccgaaccccgaccgaaacgccgactaacgttacccttcaaaaccgaacccgaaacaacgaccgccgcgaaaacgcgtaaaccaccccaaactcgtaaaaccgcgccgcctttccgacctcctacccgcgaccccgcttccctcgacaaccgaaaacctccgaaatacccgtactaccgcaacttcctatatctaaatcgcgaacgacgcgaacgcgaaactaatacgcgaccgaaaatacgcgcgaaaccgacccttatatatacgacgacgaaaaccgacccgacgaaacaaccgaaaaccgcgcttcgactaaaaaaaaataacccaactaaaccgctaacgttaccctcgtccgcgacccccgcctacccaaaaaccgaactcgcgaacgttcgaaccgcgcgtaaaacgaaactacactcgcgcccgctaaaataccgaccccacgcaacgcgacgacacgaaacccacaaacaactcaaaaaccgctaccaaaaacaaacattctctcgataactccaaaaaaatacccgtaacccttacact

SEQ ID NO: 39901 - DNA, 514 bp, Artificial Sequence
  chemically treated genomic DNA (Homo sapiens) CpG-island No: 39901
  unsure (51, 264, 493)
tcgtacgttttttttcgacgttgatttaggaacgcgttcggcgggattttngttagttttagcgttgtcgcgttttttcgtttcgatcgttttcgtcgcgcgtttggtgttcggcgcgtttagggtcggcgcgttttgtgttcggcgttttcgggagggcgcggcggtcgcgcgcggcgggcgcgcggtggcgcgtttagtacgcgttgcgtgttttttagcgcgagtggcgttatcgttcgatcgcgcgcgttttttttttgntcgtattttcgcgttttcggtcggttttttattttttcgtttttttcgcgtttttcgtatcgtttatatcgttttagcgcggttgtttcgtgttcgtcgtcgtttatgttttcgttattttcgtttttcggtttttttcggtttgttattacgggcgtttcgtcgcgtacggggtcgttcggtgcgttagcgaattggagatataggacgtgtttcgagtattgttttntgtcgttacgtcgtcggtcga

SEQ ID NO: 39902 - DNA, 514 bp, Artificial Sequence
  chemically treated genomic DNA (Homo sapiens) CpG-island No: 39902
  unsure (22, 251, 464)
tcgaccgacgacgtaacgacanaaaacaatactcgaaacacgtcctatatctccaattcgctaacgcaccgaacgaccccgtacgcgacgaaacgcccgtaataacaaaccgaaaaaaaccgaaaaacgaaaataacgaaaacataaacgacgacgaacacgaaacaaccgcgctaaaacgatataaacgatacgaaaaacgcgaaaaaaacgaaaaaataaaaaaccgaccgaaaacgcgaaaatacgancaaaaaaaaaacgcgcgcgatcgaacgataacgccactcgcgctaaaaaacacgcaacgcgtactaaacgcgccaccgcgcgcccgccgcgcgcgaccgccgcgccctcccgaaaacgccgaacacaaaacgcgccgaccctaaacgcgccgaacaccaaacgcgcgacgaaaacgatcgaaacgaaaaaacgcgacaacgctaaaactaacnaaaatcccgccgaacgcgttcctaaatcaacgtcgaaaaaaaacgtacga

SEQ ID NO: 39903 - DNA, 514 bp, Artificial Sequence
  chemically treated genomic DNA (Homo sapiens) CpG-island No: 39903
  unsure (22, 251, 464)
tcggtcggcgacgtggcggtangaggtaatgttcgaagtacgttttatatttttagttcgttggcgtatcggacggtttcgtacgcggcgggacgttcgtggtagtaggtcgaggggggtcgaggaacgggggtgacgagggtataaacggcggcggatacggagtagtcgcgttggagcgatgtgagcgatgcggggggcgcgaggggggcggagaggtagagaatcggtcgggagcgcgagagtgcgantagaggaaaggcgcgcgcgatcgggcgatggcgttattcgcgttggaggatacgtaacgcgtgttaagcgcgttatcgcgcgttcgtcgcgcgcggtcgtcgcgttttttcgggggcgtcgggtatagggcgcgtcggttttgagcgcgtcggatattaggcgcgcgacgagggcggtcggaacgagagggcgcggtagcgttggggttggtnggggtttcgtcgagcgcgtttttgagttagcgtcgagagaggacgtgcgg

SEQ ID NO: 39904 - DNA, 514 bp, Artificial Sequence
  chemically treated genomic DNA (Homo sapiens) CpG-island No: 39904
  unsure (51, 264, 493)
ccgcacgtcctctctcgacgctaactcaaaaacgcgctcgacgaaaccccnaccaaccccaacgctaccgcgccctctcgttccgaccgccctcgtcgcgcgcctaatatccgacgcgctcaaaaccgacgcgccctatacccgacgcccccgaaaaaacgcgacgaccgcgcgcgacgaacgcgcgataacgcgcttaacacgcgttacgtatcctccaacgcgaataacgccatcgcccgatcgcgcgcgcctttcctctantcgcactctcgcgctcccgaccgattctctacctctccgcccccctcgcgccccccgcatcgctcacatcgctccaacgcgactactccgtatccgccgccgtttataccctcgtcacccccgttcctcgacccccctcgacctactaccacgaacgtcccgccgcgtacgaaaccgtccgatacgccaacgaactaaaaatataaaacgtacttcgaacattacctcntaccgccacgtcgccgaccga

SEQ ID NO: 39905 - DNA, 772 bp, Artificial Sequence
  chemically treated genomic DNA (Homo sapiens) CpG-island No: 39905
tttatttagtcgggagtttgcgcggttcgggttcgggagcgtttcggtgtttttcggcgtacgcggtttttgggggtttcgagtttattgttttcgggcgtttcggttcggttcgggcgatttaagttttagtttttcgggtttttacggtttttaaatttttcggggttcgggggagcgtaacgtttaggtgagcgcggtcgcgtttggttgtagttcgcggggacgtagtgtcgttataggttgttttttgtcggggcgagggtcgtttttcggttttttagaggttgaggggtcgtagcggagatcgttgggcggaggcgaaaggtttttgtcgggtttagtttatgaagttgacggtgcgattgggcgtattcggagtgaaagcgataatttcgttcgggttttgtagtttagaatttgggttaggtaggagaggttgtttaaggttcgggagtagcgacgtttgaatatttagcggcgttgtttaagttaatttttcgtagcggcggcggtttttttttttcggagttttgcggggtttatcgttttagattcgtaattgtacggtcggagtcgtagtttcgggttcggttattttttcgttttttagacgttagtagttgcgaggttgggatttcgaattttgaatttggtttcggggagtttcggttttgatcgcggcgtttttgggatattttttttagggttttttgttacgttttggaaagttttgagtttcgataatttggaaagaaattattttttataa

SEQ ID NO: 39906 - DNA, 772 bp, Artificial Sequence
  chemically treated genomic DNA (Homo sapiens) CpG-island No: 39906
ttataaaaaataatttctttccaaattatcgaaactcaaaactttccaaaacgtaacaaaaaaccctaaaaaaaatatcccaaaaacgccgcgatcaaaaccgaaactccccgaaaccaaattcaaaattcgaaatcccaacctcgcaactactaacgtctaaaaaacgaaaaaataaccgaacccgaaactacgactccgaccgtacaattacgaatctaaaacgataaaccccgcaaaactccgaaaaaaaaaaaccgccgccgctacgaaaaattaacttaaacaacgccgctaaatattcaaacgtcgctactcccgaaccttaaacaacctctcctacctaacccaaattctaaactacaaaacccgaacgaaattatcgctttcactccgaatacgcccaatcgcaccgtcaacttcataaactaaacccgacaaaaacctttcgcctccgcccaacgatctccgctacgacccctcaacctctaaaaaaccgaaaaacgaccctcgccccgacaaaaaacaacctataacgacactacgtccccgcgaactacaaccaaacgcgaccgcgctcacctaaacgttacgctcccccgaaccccgaaaaatttaaaaaccgtaaaaacccgaaaaactaaaacttaaatcgcccgaaccgaaccgaaacgcccgaaaacaataaactcgaaacccccaaaaaccgcgtacgccgaaaaacaccgaaacgctcccgaacccgaaccgcgcaaactcccgactaaataaa

SEQ ID NO: 39907 - DNA, 772 bp, Artificial Sequence
  chemically treated genomic DNA (Homo sapiens) CpG-island No: 39907
ttgtgaggagtgatttttttttagattatcgagatttaagattttttagaacgtggtaaagagttttggaagaaatgttttaggaacgtcgcggttaggatcgaggtttttcggggttaggtttagggttcgaggttttagtttcgtaattgttggcgtttggagggcgggagagtggtcgggttcgaagttgcggtttcgatcgtatagttgcgagtttggggcggtgggtttcgtagagtttcgggggaagggagtcgtcgtcgttgcggggaattggtttgggtaacgtcgttgagtgtttaaacgtcgttgttttcgggttttgggtagttttttttatttgatttaaattttgggttgtaaagttcgggcgaagttgtcgtttttatttcgaatacgtttagtcgtatcgttaattttataggttgggttcggtagaggtttttcgttttcgtttagcggttttcgttgcggttttttagtttttggagagtcggggggcggttttcgtttcggtagaaagtaatttgtggcggtattgcgttttcgcgagttataattagacgcggtcgcgtttatttgggcgttgcgttttttcgagtttcggagagtttagaagtcgtaaaagttcggggagttggagtttaaatcgttcggatcgggtcggggcgttcgaaagtagtgaattcgagatttttaggaatcgcgtgcgtcgggaggtatcgggacgttttcgggttcgagtcgcgtaggttttcggttgggtggg

SEQ ID NO: 39908 - DNA, 772 bp, Artificial Sequence
  chemically treated genomic DNA (Homo sapiens) CpG-island No: 39908
cccacccaaccgaaaacctacgcgactcgaacccgaaaacgtcccgatacctcccgacgcacgcgattcctaaaaatctcgaattcactactttcgaacgccccgacccgatccgaacgatttaaactccaactccccgaacttttacgacttctaaactctccgaaactcgaaaaaacgcaacgcccaaataaacgcgaccgcgtctaattataactcgcgaaaacgcaataccgccacaaattactttctaccgaaacgaaaaccgccccccgactctccaaaaactaaaaaaccgcaacgaaaaccgctaaacgaaaacgaaaaacctctaccgaacccaacctataaaattaacgatacgactaaacgtattcgaaataaaaacgacaacttcgcccgaactttacaacccaaaatttaaatcaaataaaaaaaactacccaaaacccgaaaacaacgacgtttaaacactcaacgacgttacccaaaccaattccccgcaacgacgacgactcccttcccccgaaactctacgaaacccaccgccccaaactcgcaactatacgatcgaaaccgcaacttcgaacccgaccactctcccgccctccaaacgccaacaattacgaaactaaaacctcgaaccctaaacctaaccccgaaaaacctcgatcctaaccgcgacgttcctaaaacatttcttccaaaactctttaccacgttctaaaaaatcttaaatctcgataatctaaaaaaaaatcactcctcacaa

SEQ ID NO: 39909 - DNA, 502 bp, Artificial Sequence
  chemically treated genomic DNA (Homo sapiens) CpG-island No: 39909
ttcgatttcgtagtttttttattatttattttgtaaagtcgagttcggaaatgagcggttcgaggttcgaggtggggcgtgagtgacgtgtagaggtttaagcgagcgttgtaaggagcgagggttaaaggagttttcggcgtttattttgtttttagttttcgtatttttcgtttcgtttttttgggttatgtaatttacgcgaaattcgaagttaggttttttaaagcggttttggattttcgacgtttgttagattgcggcgtgcggttaggtttagcggcgttcgggtaattaagcgtcgattttagtttttgttcgcgtttttttagacgtatggattcggttttcgttttatttcggtttcgcgggtttaaaattttattttcggttcgggttttatgttttaattttttttgttcgggttttattttttcgttttcgggttcgggttttatttttttgttttttcgaatcggagttttttttattatttacgggt

SEQ ID NO: 39910 - DNA, 502 bp, Artificial Sequence
  chemically treated genomic DNA (Homo sapiens) CpG-island No: 39910
acccgtaaataataaaaaaaactccgattcgaaaaaacaaaaaaataaaacccgaacccgaaaacgaaaaaataaaacccgaacaaaaaaaattaaaacataaaacccgaaccgaaaataaaattttaaacccgcgaaaccgaaataaaacgaaaaccgaatccatacgtctaaaaaaacgcgaacaaaaactaaaatcgacgcttaattacccgaacgccgctaaacctaaccgcacgccgcaatctaacaaacgtcgaaaatccaaaaccgctttaaaaaacctaacttcgaatttcgcgtaaattacataacccaaaaaaacgaaacgaaaaatacgaaaactaaaaacaaaataaacgccgaaaactcctttaaccctcgctccttacaacgctcgcttaaacctctacacgtcactcacgccccacctcgaacctcgaaccgctcatttccgaactcgactttacaaaataaataataaaaaaactacgaaatcgaa

SEQ ID NO: 39911 - DNA, 502 bp, Artificial Sequence
  chemically treated genomic DNA (Homo sapiens) CpG-island No: 39911
gttcgtgggtggtgaggggggtttcggttcggggaagtaagggggtgaggttcgggttcgagggcgagagagtgaggttcgggtaaagagggttgaggtatgaaattcgggtcgggagtgaggttttgggttcgcggggtcggggtgaggcggaggtcgaatttatgcgtttgaggagacgcgggtaagagttggggtcggcgtttgattattcggacgtcgttggatttggtcgtacgtcgtaatttagtaggcgtcggggatttagggtcgttttgaggagtttggtttcggatttcgcgtaggttgtatggtttaaggggacggggcggaaagtgcggaggttgaggataaaatgggcgtcggagatttttttagttttcgttttttgtagcgttcgtttgggtttttgtacgttatttacgttttatttcggatttcgggtcgtttattttcgggttcggttttgtaaggtgggtggtaagggggttacgggatcgag

SEQ ID NO: 39912 - DNA, 502 bp, Artificial Sequence
  chemically treated genomic DNA (Homo sapiens) CpG-island No: 39912
ctcgatcccgtaacccccttaccacccaccttacaaaaccgaacccgaaaataaacgacccgaaatccgaaataaaacgtaaataacgtacaaaaacccaaacgaacgctacaaaaaacgaaaactaaaaaaatctccgacgcccattttatcctcaacctccgcactttccgccccgtccccttaaaccatacaacctacgcgaaatccgaaaccaaactcctcaaaacgaccctaaatccccgacgcctactaaattacgacgtacgaccaaatccaacgacgtccgaataatcaaacgccgaccccaactcttacccgcgtctcctcaaacgcataaattcgacctccgcctcaccccgaccccgcgaacccaaaacctcactcccgacccgaatttcatacctcaaccctctttacccgaacctcactctctcgccctcgaacccgaacctcacccccttacttccccgaaccgaaacccccctcaccacccacgaac

SEQ ID NO: 39913 - DNA, 714 bp, Artificial Sequence
  chemically treated genomic DNA (Homo sapiens) CpG-island No: 39913
aggtcgtataggagcgggtcgtcggcgtcgagtagtaggagtaggcggcggcggcgtagcgtttgttcgtttagggtttcgacgtcgtagtcgacgaagtagagcggtaggagtagcgcggttaggacgatgggcgtgtgcgcgcggtgtaggcgttgtagttagtggcggtttaggcgcgttagcgagtttttgaaggggtgtagaaaagtgtcgtatagtacggtttagagtagcggtcgtaggaaggtttttaggatgaagtagattagtattgcggcgtcgtagtataggtatacgaatagtacggtttcggtgttgtagaaggtttgtttaatgggtttgtcgaagcgtagcgttagcgtcgcgggtttcggggttttttcgttatcgttattcggttcgatcgcgcgcgggattcgcggcgtcggttcgggagagtttcgtaggtttggcgcgtttttagggtcgtcgtcgtcggttatcgttttttcgttatagtcgttttcgaggggcggtaatgggagtcgggttagaaacgcgggcgggaggtagggcgggaggcgcgcgagattgtgggagttgtagtttttcgttggtttatagatttattaagcgtttgtaggaaattataattttcgaaggggaaatggggaaaacgttttcgtttttttggtgttcgtaaggttttgttaataagtttgtagggtttat

SEQ ID NO: 39914 - DNA, 714 bp, Artificial Sequence
  chemically treated genomic DNA (Homo sapiens) CpG-island No: 39914
ataaaccctacaaacttattaacaaaaccttacgaacaccaaaaaaacgaaaacgttttccccatttccccttcgaaaattataatttcctacaaacgcttaataaatctataaaccaacgaaaaactacaactcccacaatctcgcgcgcctcccgccctacctcccgcccgcgtttctaacccgactcccattaccgcccctcgaaaacgactataacgaaaaaacgataaccgacgacgacgaccctaaaaacgcgccaaacctacgaaactctcccgaaccgacgccgcgaatcccgcgcgcgatcgaaccgaataacgataacgaaaaaaccccgaaacccgcgacgctaacgctacgcttcgacaaacccattaaacaaaccttctacaacaccgaaaccgtactattcgtatacctatactacgacgccgcaatactaatctacttcatcctaaaaaccttcctacgaccgctactctaaaccgtactatacgacacttttctacaccccttcaaaaactcgctaacgcgcctaaaccgccactaactacaacgcctacaccgcgcgcacacgcccatcgtcctaaccgcgctactcctaccgctctacttcgtcgactacgacgtcgaaaccctaaacgaacaaacgctacgccgccgccgcctactcctactactcgacgccgacgacccgctcctatacgacct

SEQ ID NO: 39915 - DNA, 714 bp, Artificial Sequence
  chemically treated genomic DNA (Homo sapiens) CpG-island No: 39915
atagattttgtaaatttgttagtaggattttgcggatattaaggaggcggaggcgttttttttatttttttttcgggagttgtagttttttgtaagcgtttggtgggtttgtaaattagcggggaattataatttttataatttcgcgcgtttttcgttttgtttttcgttcgcgtttttagttcgatttttattatcgtttttcgggggcggttgtggcggaggaacgatggtcgacggcggcggttttaaggacgcgttaagtttgcggagttttttcgggtcggcgtcgcgggtttcgcgcgcggtcgggtcgagtggcggtggcggggagatttcgggattcgcggcgttggcgttgcgtttcgataagtttattaagtaggttttttataatatcggggtcgtgttgttcgtgtgtttgtgttgcggcgtcgtagtgttggtttattttattttggaggtttttttgcggtcgttgttttgggtcgtgttatgcggtatttttttgtatttttttaagagttcgttgacgcgtttgggtcgttattggttgtagcgtttgtatcgcgcgtatacgtttatcgttttggtcgcgttgtttttgtcgttttgtttcgtcgattacggcgtcgaggttttgggcgagtaggcgttgcgtcgtcgtcgtttgtttttgttgttcggcgtcggcggttcgtttttgtacggttt

SEQ ID NO: 39916 - DNA, 714 bp, Artificial Sequence
  chemically treated genomic DNA (Homo sapiens) CpG-island No: 39916
aaaccgtacaaaaacgaaccgccgacgccgaacaacaaaaacaaacgacgacgacgcaacgcctactcgcccaaaacctcgacgccgtaatcgacgaaacaaaacgacaaaaacaacgcgaccaaaacgataaacgtatacgcgcgatacaaacgctacaaccaataacgacccaaacgcgtcaacgaactcttaaaaaaatacaaaaaaataccgcataacacgacccaaaacaacgaccgcaaaaaaacctccaaaataaaataaaccaacactacgacgccgcaacacaaacacacgaacaacacgaccccgatattataaaaaacctacttaataaacttatcgaaacgcaacgccaacgccgcgaatcccgaaatctccccgccaccgccactcgacccgaccgcgcgcgaaacccgcgacgccgacccgaaaaaactccgcaaacttaacgcgtccttaaaaccgccgccgtcgaccatcgttcctccgccacaaccgcccccgaaaaacgataataaaaatcgaactaaaaacgcgaacgaaaaacaaaacgaaaaacgcgcgaaattataaaaattataattccccgctaatttacaaacccaccaaacgcttacaaaaaactacaactcccgaaaaaaaaataaaaaaaacgcctccgcctccttaatatccgcaaaatcctactaacaaatttacaaaatctat

SEQ ID NO: 39917 - DNA, 814 bp, Artificial Sequence
  chemically treated genomic DNA (Homo sapiens) CpG-island No: 39917
gcgggaggcgggacgacggttattgatttgttagcgtgacgtcggtttgcgattggttagtgtcgttttgggcgtgtcggtaggacggggttgcgacggttttttataggttggtatagaaaggggcggggaaataagagtgtaacgttattaatcggtatgcgggacgtaacgtaattttttttttcgattggttcgtgaagttcgggaggtcgttgggggttcgattttgggatagaacgtttgttttttattggttaatatttttcgggtcgggtaatgtggtttttcgaggttgtttgcgattggtgaacgcgtcgcggttcggggcggatttgcggattgaagatttttatgcgattggtcggggagtcggaggggcgggtaatttgggatcgatagtgattcgcgattggtcggcgcggcgaaagtagagcggcgcgtcggttttttggtttttgagggcgatggcgcggggtggttggcgtcggttacgtcgtttgttattcgcggggtagtttttattttagggtcgcgcgttgttcgttattaatacgttgggttgcggcgcgtttatggcggtcggtgatggcgtgcgttagttttgggagattcgcgttcggttcggttaggttttcgatttacggcgtttcggtgaggacgttacgttgtttagttttttatttcgggcgatttttgatttcgatattcgattgcgggtcgtgatttttgattcgtggttttagtttttcgtaggatttttgttttgatcgcgttttttttcgggtgtttgttttttcgtagttttgggttt

SEQ ID NO: 39918 - DNA, 814 bp, Artificial Sequence
  chemically treated genomic DNA (Homo sapiens) CpG-island No: 39918
aaacccaaaactacgaaaaaacaaacacccgaaaaaaaacgcgatcaaaacaaaaatcctacgaaaaactaaaaccacgaatcaaaaatcacgacccgcaatcgaatatcgaaatcaaaaatcgcccgaaataaaaaactaaacaacgtaacgtcctcaccgaaacgccgtaaatcgaaaacctaaccgaaccgaacgcgaatctcccaaaactaacgcacgccatcaccgaccgccataaacgcgccgcaacccaacgtattaataacgaacaacgcgcgaccctaaaataaaaactaccccgcgaataacaaacgacgtaaccgacgccaaccaccccgcgccatcgccctcaaaaaccaaaaaaccgacgcgccgctctactttcgccgcgccgaccaatcgcgaatcactatcgatcccaaattacccgcccctccgactccccgaccaatcgcataaaaatcttcaatccgcaaatccgccccgaaccgcgacgcgttcaccaatcgcaaacaacctcgaaaaaccacattacccgacccgaaaaatattaaccaataaaaaacaaacgttctatcccaaaatcgaacccccaacgacctcccgaacttcacgaaccaatcgaaaaaaaaaattacgttacgtcccgcataccgattaataacgttacactcttatttccccgcccctttctataccaacctataaaaaaccgtcgcaaccccgtcctaccgacacgcccaaaacgacactaaccaatcgcaaaccgacgtcacgctaacaaatcaataaccgtcgtcccgcctcccgc

SEQ ID NO: 39919 - DNA, 814 bp, Artificial Sequence
  chemically treated genomic DNA (Homo sapiens) CpG-island No: 39919
agatttagagttgcggggagatagatattcggggagaggcgcggttagggtaagggttttgcgggggattgaggttacgggttaggggttacggttcgtagtcgggtgtcgggattaaaggtcgttcggggtgaaggattaagtagcgtggcgtttttatcggagcgtcgtgggtcgaaaatttggtcgggtcgggcgcggattttttaggattggcgtacgttattatcggtcgttatgagcgcgtcgtagtttagcgtgttagtgacgagtagcgcgcggttttggaatagaagttgtttcgcggataataggcggcgtagtcggcgttagttatttcgcgttatcgtttttaggaattaaggaatcggcgcgtcgttttgttttcgtcgcgtcgattagtcgcgagttattgtcgattttaaattgttcgttttttcggtttttcggttaatcgtataaggatttttagttcgtaggttcgtttcgagtcgcgacgcgtttattaatcgtaggtagtttcggggagttatattgttcggttcgaagagtattgattaataaaaggtaggcgttttattttaaggtcgagtttttaacgatttttcgagttttacggattaatcggaaaaaagaattgcgttacgtttcgtatgtcgattggtaacgttgtatttttgttttttcgtttttttttgtgttagtttatgggaaatcgtcgtagtttcgttttatcgatacgtttaggacggtattggttagtcgtagatcggcgttacgttggtaaattagtgatcgtcgtttcgtttttcgt

SEQ ID NO: 39920 - DNA, 814 bp, Artificial Sequence
  chemically treated genomic DNA (Homo sapiens) CpG-island No: 39920
acgaaaaacgaaacgacgatcactaatttaccaacgtaacgccgatctacgactaaccaataccgtcctaaacgtatcgataaaacgaaactacgacgatttcccataaactaacacaaaaaaaaacgaaaaaacaaaaatacaacgttaccaatcgacatacgaaacgtaacgcaattcttttttccgattaatccgtaaaactcgaaaaatcgttaaaaactcgaccttaaaataaaacgcctaccttttattaatcaatactcttcgaaccgaacaatataactccccgaaactacctacgattaataaacgcgtcgcgactcgaaacgaacctacgaactaaaaatccttatacgattaaccgaaaaaccgaaaaaacgaacaatttaaaatcgacaataactcgcgactaatcgacgcgacgaaaacaaaacgacgcgccgattccttaattcctaaaaacgataacgcgaaataactaacgccgactacgccgcctattatccgcgaaacaacttctattccaaaaccgcgcgctactcgtcactaacacgctaaactacgacgcgctcataacgaccgataataacgtacgccaatcctaaaaaatccgcgcccgacccgaccaaattttcgacccacgacgctccgataaaaacgccacgctacttaatccttcaccccgaacgacctttaatcccgacacccgactacgaaccgtaacccctaacccgtaacctcaatcccccgcaaaacccttaccctaaccgcgcctctccccgaatatctatctccccgcaactctaaatct

SEQ ID NO: 39921 - DNA, 611 bp, Artificial Sequence
  chemically treated genomic DNA (Homo sapiens) CpG-island No: 39921
cgttcgcgggttacgaggcggggagcgacggttatttttttcggttattcggagtatttgggcgggaacgggtagttcgcgggagagacgggtttttgggcgagggttgcgttttagtcgttttgttttttagttttcgaggtttcgcgtgttacgtgttagtatcgttcgggggcgttagtatgattcgaggttgtaggaatcgtgaattttttgtttcgcgggtttaggtgatcgcgggcggcgttttttcgcgcgcggggggcggggtttttttcggttgtttatttagttattatagcgacgtaaaatggtgttcgttaggcgttttaggacggttttttgagggattggagggtttcgatagacggaaagtttgtttcgttttttggtcggtataggtacgacggcggggagtttagaagtttcgaattttaagggtcgaagtatagttaaatattttacggaatttaataaatgtttgtggggagaacgtcgaaaacgcggggaggcggggttggcgtatagttattttttcgcgatatttaagtgacgttttatagtaagtacgtgttttagattttaatttttagttagttttttacgttata

SEQ ID NO: 39922 - DNA, 611 bp, Artificial Sequence
  chemically treated genomic DNA (Homo sapiens) CpG-island No: 39922
tataacgtaaaaaactaactaaaaattaaaatctaaaacacgtacttactataaaacgtcacttaaatatcgcgaaaaaataactatacgccaaccccgcctccccgcgttttcgacgttctccccacaaacatttattaaattccgtaaaatatttaactatacttcgacccttaaaattcgaaacttctaaactccccgccgtcgtacctataccgaccaaaaaacgaaacaaactttccgtctatcgaaaccctccaatccctcaaaaaaccgtcctaaaacgcctaacgaacaccattttacgtcgctataataactaaataaacaaccgaaaaaaaccccgccccccgcgcgcgaaaaaacgccgcccgcgatcacctaaacccgcgaaacaaaaaattcacgattcctacaacctcgaatcatactaacgcccccgaacgatactaacacgtaacacgcgaaacctcgaaaactaaaaaacaaaacgactaaaacgcaaccctcgcccaaaaacccgtctctcccgcgaactacccgttcccgcccaaatactccgaataaccgaaaaaaataaccgtcgctccccgcctcgtaacccgcgaacg

SEQ ID NO: 39923 - DNA, 611 bp, Artificial Sequence
  chemically treated genomic DNA (Homo sapiens) CpG-island No: 39923
tataacgtagaagattgattgaaggttaaagtttagaatacgtgtttattgtgagacgttatttagatgtcgcgagagggtgattgtgcgttagtttcgttttttcgcgttttcggcgttttttttataaatatttgttaagtttcgtggggtgtttggttgtgtttcggtttttggagttcgaaatttttgagtttttcgtcgtcgtatttgtgtcggttaaggggcggggtaggtttttcgtttgtcggggttttttagttttttaggaagtcgttttgggacgtttagcggatattattttacgtcgttgtggtagttgagtgaatagtcggggggagtttcgtttttcgcgcgcgggagagcgtcgttcgcggttatttgggttcgcggggtagagagtttacggtttttgtagtttcgggttatgttgacgttttcgggcggtgttaatacgtaatacgcgggatttcgagagttaagaagtagggcgattaagacgtagttttcgtttaggagttcgtttttttcgcgagttattcgttttcgtttaagtatttcgggtaatcgaggggagtgatcgtcgtttttcgtttcgtggttcgcgggcg

SEQ ID NO: 39924 - DNA, 611 bp, Artificial Sequence
  chemically treated genomic DNA (Homo sapiens) CpG-island No: 39924
cgcccgcgaaccacgaaacgaaaaacgacgatcactcccctcgattacccgaaatacttaaacgaaaacgaataactcgcgaaaaaaacgaactcctaaacgaaaactacgtcttaatcgccctacttcttaactctcgaaatcccgcgtattacgtattaacaccgcccgaaaacgtcaacataacccgaaactacaaaaaccgtaaactctctaccccgcgaacccaaataaccgcgaacgacgctctcccgcgcgcgaaaaacgaaactccccccgactattcactcaactaccacaacgacgtaaaataatatccgctaaacgtcccaaaacgacttcctaaaaaactaaaaaaccccgacaaacgaaaaacctaccccgccccttaaccgacacaaatacgacgacgaaaaactcaaaaatttcgaactccaaaaaccgaaacacaaccaaacaccccacgaaacttaacaaatatttataaaaaaaacgccgaaaacgcgaaaaaacgaaactaacgcacaatcaccctctcgcgacatctaaataacgtctcacaataaacacgtattctaaactttaaccttcaatcaatcttctacgttata

SEQ ID NO: 39925 - DNA, 527 bp, Artificial Sequence
  chemically treated genomic DNA (Homo sapiens) CpG-island No: 39925
gaggattgcggggcgggattttgtgtcgcggcggagtttaagatggcggcgtgcggtttcgttgtgtgaaacgagcgcggggcggcgggttatttagtttcgcggagacgattttcgacgattcgtaataatgaagggaaaagagcgttcgttagtgaaggttaaacgttttcgtggtggtgaggattcgatttttcgcggtgagcggagtaagaagttagggggttttggtggtagtaatgggagtagtagcggaaagatcgatagcggcggtgggtcgcggcggagtttttatttggataagtttagtagtcgaggtggtagtcgcgagtatgatatcggtgggggtagttttagtagtcgtttgtatagttatagtttttcgagtattaaaaatttttcgggcgggggcgagtcgcgtagtagttttcggggtggaggcggggagttacgtttttttggggtcgtttttttagttttcggcggcggggacggcgcggaatataagattttgaagataagcgagt

SEQ ID NO: 39926 - DNA, 527 bp, Artificial Sequence
  chemically treated genomic DNA (Homo sapiens) CpG-island No: 39926
actcgcttatcttcaaaatcttatattccgcgccgtccccgccgccgaaaactaaaaaaacgaccccaaaaaaacgtaactccccgcctccaccccgaaaactactacgcgactcgcccccgcccgaaaaatttttaatactcgaaaaactataactatacaaacgactactaaaactacccccaccgatatcatactcgcgactaccacctcgactactaaacttatccaaataaaaactccgccgcgacccaccgccgctatcgatctttccgctactactcccattactaccaccaaaaccccctaacttcttactccgctcaccgcgaaaaatcgaatcctcaccaccacgaaaacgtttaaccttcactaacgaacgctcttttcccttcattattacgaatcgtcgaaaatcgtctccgcgaaactaaataacccgccgccccgcgctcgtttcacacaacgaaaccgcacgccgccatcttaaactccgccgcgacacaaaatcccgccccgcaatcctc

SEQ ID NO: 39927 - DNA, 527 bp, Artificial Sequence
  chemically treated genomic DNA (Homo sapiens) CpG-island No: 39927
attcgtttatttttagagttttgtatttcgcgtcgttttcgtcgtcgggagttgaggaggcggttttagaggaacgtgatttttcgtttttatttcgggagttgttgcgcgattcgttttcgttcgaagaatttttggtgttcggggagttataattatgtaagcggttattggagttgtttttatcggtattatattcgcggttgttatttcgattgttggatttgtttaggtggagatttcgtcgcgatttatcgtcgttatcggttttttcgttgttgtttttattgttgttattagagttttttaattttttgtttcgtttatcgcgggaagtcgagtttttattattacgggagcgtttggtttttattggcgagcgtttttttttttttattgttgcgggtcgtcggaggtcgttttcgcggagttgagtaattcgtcgtttcgcgttcgttttatatagcggaatcgtacgtcgttattttggatttcgtcgcggtatagggtttcgtttcgtagttttt

SEQ ID NO: 39928 - DNA, 527 bp, Artificial Sequence
  chemically treated genomic DNA (Homo sapiens) CpG-island No: 39928
aaaaactacgaaacgaaaccctataccgcgacgaaatccaaaataacgacgtacgattccgctatataaaacgaacgcgaaacgacgaattactcaactccgcgaaaacgacctccgacgacccgcaacaataaaaaaaaaaaaacgctcgccaataaaaaccaaacgctcccgtaataataaaaactcgacttcccgcgataaacgaaacaaaaaattaaaaaactctaataacaacaataaaaacaacaacgaaaaaaccgataacgacgataaatcgcgacgaaatctccacctaaacaaatccaacaatcgaaataacaaccgcgaatataataccgataaaaacaactccaataaccgcttacataattataactccccgaacaccaaaaattcttcgaacgaaaacgaatcgcgcaacaactcccgaaataaaaacgaaaaatcacgttcctctaaaaccgcctcctcaactcccgacgacgaaaacgacgcgaaatacaaaactctaaaaataaacgaat

SEQ ID NO: 39929 - DNA, 629 bp, Artificial Sequence
  chemically treated genomic DNA (Homo sapiens) CpG-island No: 39929
gatagcgttcggtcgttgttcgggttttaggcgcggtcggacggtttagtttggagggttcggggcggaggttcgggggggtgcgcgcgttcggggttcggttttttattcgtttttttttcgttcgtagtcgtagggtcgtaggtagttatggcgtttagtcggaatggtatggttttgaagttttatttttataaggattggtagcggcgcgtggttacgtggtttaattagtcggttcgtaagattcgtaggtgagttttgcgttcggggttgtttttggggttcgtgttcgcggttgcgttttggtttgcgggtggtcgatgttagggcggggggcgttgtttgtaatcgtcgcggagcgttggtttggcggttttaggtaagggtgatcgtcgttgcgtttttttttattagacgtaagggttcggtaagttaaggcgcgtcgtatcgtttcgcgtttcgcgtcgggttttattcggtttatcgtgcgttgttttacggttcggtattatacgaaggtgcgcgtcggtcgcggttttagtttggaggagttttagggtgagtattggtagcgttgcggtgttaggaaggtttcgaagttttttttgttggttttagtcgcgtga

SEQ ID NO: 39930 - DNA, 629 bp, Artificial Sequence
  chemically treated genomic DNA (Homo sapiens) CpG-island No: 39930
tcacgcgactaaaaccaacaaaaaaaacttcgaaaccttcctaacaccgcaacgctaccaatactcaccctaaaactcctccaaactaaaaccgcgaccgacgcgcaccttcgtataataccgaaccgtaaaacaacgcacgataaaccgaataaaacccgacgcgaaacgcgaaacgatacgacgcgccttaacttaccgaacccttacgtctaataaaaaaaaacgcaacgacgatcacccttacctaaaaccgccaaaccaacgctccgcgacgattacaaacaacgccccccgccctaacatcgaccacccgcaaaccaaaacgcaaccgcgaacacgaaccccaaaaacaaccccgaacgcaaaactcacctacgaatcttacgaaccgactaattaaaccacgtaaccacgcgccgctaccaatccttataaaaataaaacttcaaaaccataccattccgactaaacgccataactacctacgaccctacgactacgaacgaaaaaaaaacgaataaaaaaccgaaccccgaacgcgcgcacccccccgaacctccgccccgaaccctccaaactaaaccgtccgaccgcgcctaaaacccgaacaacgaccgaacgctatc

SEQ ID NO: 39931 - DNA, 629 bp, Artificial Sequence
  chemically treated genomic DNA (Homo sapiens) CpG-island No: 39931
ttacgcgattgaggttaatagaggggatttcggggtttttttgatatcgtagcgttgttagtatttattttggagtttttttaggttgaagtcgcggtcggcgcgtattttcgtgtggtatcgaatcgtggggtagcgtacgatgggtcggatgggattcgacgcggggcgcggagcgatgcggcgcgttttggtttgtcgggtttttacgtttggtggagagaagcgtagcggcggttatttttgtttaaggtcgttaggttagcgtttcgcgacggttgtagatagcgtttttcgttttggtatcggttattcgtaagttaaggcgtagtcgcgggtacgagttttaggggtagtttcgagcgtagggtttatttgcggattttacgggtcggttggttgaattacgtggttacgcgtcgttgttagtttttgtggaagtggggttttaagattatgttatttcggttgggcgttatggttgtttacggttttgcggttgcggacgagaggggagcgagtgagaggtcggatttcgggcgcgcgtattttttcgggttttcgtttcgaattttttagattgggtcgttcggtcgcgtttagagttcgggtagcggtcgaacgttgtt

SEQ ID NO: 39932 - DNA, 629 bp, Artificial Sequence
  chemically treated genomic DNA (Homo sapiens) CpG-island No: 39932
aacaacgttcgaccgctacccgaactctaaacgcgaccgaacgacccaatctaaaaaattcgaaacgaaaacccgaaaaaatacgcgcgcccgaaatccgacctctcactcgctcccctctcgtccgcaaccgcaaaaccgtaaacaaccataacgcccaaccgaaataacataatcttaaaaccccacttccacaaaaactaacaacgacgcgtaaccacgtaattcaaccaaccgacccgtaaaatccgcaaataaaccctacgctcgaaactacccctaaaactcgtacccgcgactacgccttaacttacgaataaccgataccaaaacgaaaaacgctatctacaaccgtcgcgaaacgctaacctaacgaccttaaacaaaaataaccgccgctacgcttctctccaccaaacgtaaaaacccgacaaaccaaaacgcgccgcatcgctccgcgccccgcgtcgaatcccatccgacccatcgtacgctaccccacgattcgataccacacgaaaatacgcgccgaccgcgacttcaacctaaaaaaactccaaaataaatactaacaacgctacgatatcaaaaaaaccccgaaatcccctctattaacctcaatcgcgtaa

SEQ ID NO: 39933 - DNA, 919 bp, Artificial Sequence
  chemically treated genomic DNA (Homo sapiens) CpG-island No: 39933
tatattttcgcggtcgcggagtcgggagcgatttataaaaggttttcgcgttagcggcgtgcgttattatggcgatcgcgcgtcgcgtagtcgcgtttcgtttttttggcgggatcggttattattttttcgcgagagtatttcgtgcgatcggaagtggggcggcgatttcggaagttttcgtcgggtgtagtttggtcggttcgatcgtcgtcgggatttgatatcgttcggagttggcgtttttttttttttttcgagtgttgtttttgttattgtggttatggacggtaagaggtcgcggtcgtttttcggggattcgcgcgcggggcggggtcgttttttttattggcgtgggtttcgtttatttggggtcgcgggtaggatttaggagagttcgggtttcgatcgtcgatttttcgggattttatttttagggtttcgattatcgatttgggattttttttttcggtcgtcgtttttcgattttcgattcggattttatttttagggtttcgattatcgatttgggattttttttttcgagtttcgtttttcgatattcgattcggaattttttttttagggtttagattattaattcgggattttttttttcgggtttcgattttcgattttcgattcggaattttttttttagggtttttattatcgattcgggattttttttttcgggtttcgattttcgattatcgatcgggattttttttaggttttcgatttttaattcgagattttttatttcgggtttcgattttcgattcgggatttttttttttaggtttcgattttcgattttcgattcgggatttttttttcggggtttttatttttaaattttaattcggtatgtttttttcggggtttcgatttttgatttttaattatggattcggga

SEQ ID NO: 39934 - DNA, 919 bp, Artificial Sequence
  chemically treated genomic DNA (Homo sapiens) CpG-island No: 39934
tcccgaatccataattaaaaatcaaaaatcgaaaccccgaaaaaaacataccgaattaaaatttaaaaataaaaaccccgaaaaaaaaatcccgaatcgaaaatcgaaaatcgaaacctaaaaaaaaaaatcccgaatcgaaaatcgaaacccgaaataaaaaatctcgaattaaaaatcgaaaacctaaaaaaaatcccgatcgataatcgaaaatcgaaacccgaaaaaaaaaatcccgaatcgataataaaaaccctaaaaaaaaaattccgaatcgaaaatcgaaaatcgaaacccgaaaaaaaaaatcccgaattaataatctaaaccctaaaaaaaaaattccgaatcgaatatcgaaaaacgaaactcgaaaaaaaaaatcccaaatcgataatcgaaaccctaaaaataaaatccgaatcgaaaatcgaaaaacgacgaccgaaaaaaaaaatcccaaatcgataatcgaaaccctaaaaataaaatcccgaaaaatcgacgatcgaaacccgaactctcctaaatcctacccgcgaccccaaataaacgaaacccacgccaataaaaaaaacgaccccgccccgcgcgcgaatccccgaaaaacgaccgcgacctcttaccgtccataaccacaataacaaaaacaacactcgaaaaaaaaaaaaaaacgccaactccgaacgatatcaaatcccgacgacgatcgaaccgaccaaactacacccgacgaaaacttccgaaatcgccgccccacttccgatcgcacgaaatactctcgcgaaaaaataataaccgatcccgccaaaaaaacgaaacgcgactacgcgacgcgcgatcgccataataacgcacgccgctaacgcgaaaaccttttataaatcgctcccgactccgcgaccgcgaaaatata

SEQ ID NO: 39935 - DNA, 919 bp, Artificial Sequence
  chemically treated genomic DNA (Homo sapiens) CpG-island No: 39935
tttcgggtttatggttgggggttagaggtcgaggtttcggggaaggtatatcgggttgagatttggggatggaggtttcggggaaggggtttcgaatcgggggtcggggatcgaggtttggggggaggggtttcgggtcgagggtcgaggttcggggtaaaggatttcgggttgggggtcgggggtttgggaagggtttcggtcggtggtcgggggtcgaggttcgggagaaggggtttcgggtcggtggtagaggttttggggaaggggtttcgggtcggggatcgagggtcgaggttcgggaaaaggggtttcgggttggtggtttaggttttggggaaggggtttcgggtcgggtatcgggggacgaggttcgggaaaaggggttttaggtcggtggtcgaggttttggggatggggttcgggtcggggatcgggggacgacgatcgggaaaaggggttttaggtcggtggtcgaggttttggggatggggtttcgggggatcgacggtcgaggttcgagtttttttgagttttgttcgcggttttaggtgggcggagtttacgttagtgggagaagcggtttcgtttcgcgcgcgagttttcggaggacggtcgcgattttttatcgtttatggttataatgataggagtagtattcggagagggagaagggacgttaatttcgggcggtgttaggtttcggcggcgatcgaatcgattaagttgtattcggcggggattttcggggtcgtcgttttattttcggtcgtacgggatgttttcgcgagaggatggtggtcggtttcgttagaggggcggggcgcggttgcgcggcgcgcggtcgttatggtgacgtacgtcgttggcgcgaggattttttgtgagtcgttttcggtttcgcggtcgcggaggtgtg

SEQ ID NO: 39936 - DNA, 919 bp, Artificial Sequence
  chemically treated genomic DNA (Homo sapiens) CpG-island No: 39936
cacacctccgcgaccgcgaaaccgaaaacgactcacaaaaaatcctcgcgccaacgacgtacgtcaccataacgaccgcgcgccgcgcaaccgcgccccgcccctctaacgaaaccgaccaccatcctctcgcgaaaacatcccgtacgaccgaaaataaaacgacgaccccgaaaatccccgccgaatacaacttaatcgattcgatcgccgccgaaacctaacaccgcccgaaattaacgtcccttctccctctccgaatactactcctatcattataaccataaacgataaaaaatcgcgaccgtcctccgaaaactcgcgcgcgaaacgaaaccgcttctcccactaacgtaaactccgcccacctaaaaccgcgaacaaaactcaaaaaaactcgaacctcgaccgtcgatcccccgaaaccccatccccaaaacctcgaccaccgacctaaaaccccttttcccgatcgtcgtcccccgatccccgacccgaaccccatccccaaaacctcgaccaccgacctaaaaccccttttcccgaacctcgtcccccgatacccgacccgaaaccccttccccaaaacctaaaccaccaacccgaaaccccttttcccgaacctcgaccctcgatccccgacccgaaaccccttccccaaaacctctaccaccgacccgaaaccccttctcccgaacctcgacccccgaccaccgaccgaaacccttcccaaacccccgacccccaacccgaaatcctttaccccgaacctcgaccctcgacccgaaacccctccccccaaacctcgatccccgacccccgattcgaaaccccttccccgaaacctccatccccaaatctcaacccgatataccttccccgaaacctcgacctctaacccccaaccataaacccgaaa

SEQ ID NO: 39937 - DNA, 1131 bp, Artificial Sequence
  chemically treated genomic DNA (Homo sapiens) CpG-island No: 39937
ggatgttttatgtgatgggtgattagatatttcgtgttagcgggagacggaatgtttcgtgtgacgggtgacgggatgttttatgtgatgggtgagatgttttgtgtgattggtgagatgttttatgtgacgggtgatgggatgtttcgtgtgataggtgacgggatgttttatgtgatgggttacgggatgtttcgtgtgacgggtgacgggatgtttcgtgtgataggtgatgggatgtttcgtgtgacgggtgagatgttttatgttagcgggtgacgggatgtttcgtgtgatgggtgagatgttttatgtgacgggtgatgggatgtttcgtgtgacgggtgatggtatgtttcgtgtgacgggtgatgggatgtttcgtgtgatgggtgatcgggatgtttcgtgttatttacggtgacggtatgtttcgtgtgacgggtgagatgttttgtgttagcggtgatgggatgttttcgtgtgatgggtgagatgttttgtgttagcgggtgacgggatgtttcgtgtgatatggtgagatgtttcgtgtgatgggtgatgggatgttttatgtgacgggtgatgggatgtttcgtgtgacgggtgagatgtttcgtgttagtaggtgacgggatgtttcgtgtgatgggtgagatgtttcgtgtgatgggtgatgggatgttttatgtgacgggtgatgggatgtttcgtgtgacgggtgagatgttttgtgttagcgggtgttcgggatgtttcgtgtgatgggtgagatgtttcgtgtgatgggtgagatgtttcgtgtgatgggtgatgggatgtttcgtgtgatgggtgatgggatgttttatgtgacgggtgatgggatgtttcgtgtgacgggtgatgggatgtttcgtgtgacgggtgagatgttttgtgttagcgggtgacgggatgtttcgtgtgatgggtgagatgttttgtgtttgtaggtgatgggatgtttcgtgtgacgggtgagatgtttcgtgttagcgggtgacgggatgtttcgtgtgatgggtgagatgttttgtgtgatgggtgatgggatgtttcgtgtgatgggtgatgggatgttttatgtgagtagatgacgggatgttttat

SEQ ID NO: 39938 - DNA, 1131 bp, Artificial Sequence
  chemically treated genomic DNA (Homo sapiens) CpG-island No: 39938
ataaaacatcccgtcatctactcacataaaacatcccatcacccatcacacgaaacatcccatcacccatcacacaaaacatctcacccatcacacgaaacatcccgtcacccgctaacacgaaacatctcacccgtcacacgaaacatcccatcacctacaaacacaaaacatctcacccatcacacgaaacatcccgtcacccgctaacacaaaacatctcacccgtcacacgaaacatcccatcacccgtcacacgaaacatcccatcacccgtcacataaaacatcccatcacccatcacacgaaacatcccatcacccatcacacgaaacatctcacccatcacacgaaacatctcacccatcacacgaaacatcccgaacacccgctaacacaaaacatctcacccgtcacacgaaacatcccatcacccgtcacataaaacatcccatcacccatcacacgaaacatctcacccatcacacgaaacatcccgtcacctactaacacgaaacatctcacccgtcacacgaaacatcccatcacccgtcacataaaacatcccatcacccatcacacgaaacatctcaccatatcacacgaaacatcccgtcacccgctaacacaaaacatctcacccatcacacgaaaacatcccatcaccgctaacacaaaacatctcacccgtcacacgaaacataccgtcaccgtaaataacacgaaacatcccgatcacccatcacacgaaacatcccatcacccgtcacacgaaacataccatcacccgtcacacgaaacatcccatcacccgtcacataaaacatctcacccatcacacgaaacatcccgtcacccgctaacataaaacatctcacccgtcacacgaaacatcccatcacctatcacacgaaacatcccgtcacccgtcacacgaaacatcccgtaacccatcacataaaacatcccgtcacctatcacacgaaacatcccatcacccgtcacataaaacatctcaccaatcacacaaaacatctcacccatcacataaaacatcccgtcacccgtcacacgaaacattccgtctcccgctaacacgaaatatctaatcacccatcacataaaacatcc

SEQ ID NO: 39939 - DNA, 1131 bp, Artificial Sequence
  chemically treated genomic DNA (Homo sapiens) CpG-island No: 39939
atggaatatttcgttatttgtttatatggaatattttattatttattatacggaatattttattatttattatatagaatattttatttattatacggaatatttcgttattcgttgatacggaatattttattcgttatacggaatattttattatttgtagatatagaatattttatttattatacggaatatttcgttattcgttgatatagaatattttattcgttatacggaatattttattattcgttatacggaatattttattattcgttatatggaatattttattatttattatacggaatattttattatttattatacggaatattttatttattatacggaatattttatttattatacggaatatttcgaatattcgttgatatagaatattttattcgttatacggaatattttattattcgttatatggaatattttattatttattatacggaatattttatttattatacggaatatttcgttatttgttgatacggaatattttattcgttatacggaatattttattattcgttatatggaatattttattatttattatacggaatattttattatgttatacggaatatttcgttattcgttgatatagaatattttatttattatacgggaatattttattatcgttgatatagaatattttattcgttatacggaatatatcgttatcgtgaataatacggaatatttcggttatttattatacggaatattttattattcgttatacggaatatgttattattcgttatacggaatattttattattcgttatatggaatattttatttattatacggaatatttcgttattcgttgatatggaatattttattcgttatacggaatattttattatttgttatacggaatatttcgttattcgttatacggaatatttcgtaatttattatatggaatatttcgttatttgttatacggaatattttattattcgttatatggaatattttattaattatatagaatattttatttattatatggaatatttcgttattcgttatacggaatatttcgtttttcgttgatacggaatatttgattatttattatatggaatattt

SEQ ID NO: 39940 - DNA, 1131 bp, Artificial Sequence
  chemically treated genomic DNA (Homo sapiens) CpG-island No: 39940
aaatattccatataataaataatcaaatattccgtatcaacgaaaaacgaaatattccgtataacgaataacgaaatattccatataataaataaaatattctatataattaataaaatattccatataacgaataataaaatattccgtataacaaataacgaaatattccatataataaattacgaaatattccgtataacgaataacgaaatattccgtataacaaataataaaatattccgtataacgaataaaatattccatatcaacgaataacgaaatattccgtataataaataaaatattccatataacgaataataaaatattccgtataacgaataataacatattccgtataacgaataataaaatattccgtataataaataaccgaaatattccgtattattcacgataacgatatattccgtataacgaataaaatattctatatcaacgataataaaatattcccgtataataaataaaatattctatatcaacgaataacgaaatattccgtataacataataaaatattccgtataataaataataaaatattccatataacgaataataaaatattccgtataacgaataaaatattccgtatcaacaaataacgaaatattccgtataataaataaaatattccgtataataaataataaaatattccatataacgaataataaaatattccgtataacgaataaaatattctatatcaacgaatattcgaaatattccgtataataaataaaatattccgtataataaataaaatattccgtataataaataataaaatattccgtataataaataataaaatattccatataacgaataataaaatattccgtataacgaataataaaatattccgtataacgaataaaatattctatatcaacgaataacgaaatattccgtataataaataaaatattctatatctacaaataataaaatattccgtataacgaataaaatattccgtatcaacgaataacgaaatattccgtataataaataaaatattctatataataaataataaaatattccgtataataaataataaaatattccatataaacaaataacgaaatattccat

SEQ ID NO: 39941 - DNA, 1531 bp, Artificial Sequence
  chemically treated genomic DNA (Homo sapiens) CpG-island No: 39941
gtcgacgcggagatttagcgcggggttagtggagaaaaggtcgtcgacgtggagatttagcgcggggtcggtggagaaaaggtcgtcgacgtggagatttagcgcggggtcggtggagaaaaggtcgtcgacgtggagatttagcgcggggtcggtggagaaaaggtcgtcgacgtggagatttagcgcggggtcggtggagaaaaggtcgtcgacgtggagatttagcgcggggtcggtggagaaaaggtcgtcgacgtggagatttagcgcggggtcggtggagaaaaggtcgtcgacgtggagatttagcgcggggtcggtggagaaaaggtcgtcgacgtggagatttagcgcggggtcggtggagaaaaggtcgtcgacgtggagatttagcgcggggtcggtggagaaaaggtcgtcgacgtggagatttagcgcggggtcggtggagaaaaggtcgtcgacgtggagatttagcgcggggtcggtggagaaaaggtcgtcgacgtggagatttagcgcggggtcggtggagaaaaggtcgcgacgtggagatttagcgcggggtcggtggagaaaaggtcgcgacgtggagatttagcgcggggtcggtggagaaaaggtcgcgacgtggagatttagcgcggggtcggtggagaaaaggtcgcgacgtggagatttagcgcggggtcggtggagaaaaggtcgtcgacgtggagatttagcgcggggtcggtggagaaaaggtcgcgacgtggagatttagcgcggggtcggtggagaaaaggtcgtcgacggtggagatttagcgcggggtcggtggagaaaaggtcgcgacgtggggatttagcgcggggttagtggagaataggtcgtcgatttggggatttagcgcgggtcgttggagaaaaggtcgtcgacgtggagatttagtcgcggggtcggttggagaaaaggtacgtcgacgtggagatttagcgcggggtcggtggagaaaaggtcgtcgacgtgggagatttagcgcggggtcggtggagaaaaggtcgtcgacgtggggatttagcgcggggtcggtggagaaaaggtcgtcgaacgtggggatttagcgcggggtcggtggagaaaaggtcgtcgacgtggaggatttagcgcggggtcggttggagaaaaggtcgtcgacgtggatatttagcgcggggtcggtggagaaaaggtcgtcgacgtggagatttagcgcggggtcggtggagaaaaggtcgtcgacgtggagatttagcgcggggtcggtggagaaaaggtcgtcgacgtggagatttagcgcggggtcggtggagaaaaggtcgtcgacgtggggatttagcgcggggttcgtggagaaaaggtcgtcgacgtggatatttagcgcggggttcgtggagaaaaggtcgtcgacgtggatatttagcgcggggttcgtggagaaaaggtcgtcgacgtggggtttttaggattgttgtgtttttttggtttatttgtattgtgtgaagga

SEQ ID NO: 39942 - DNA, 1531 bp, Artificial Sequence
  chemically treated genomic DNA (Homo sapiens) CpG-island No: 39942
tccttcacacaatacaaataaaccaaaaaaacacaacaatcctaaaaaccccacgtcgacgaccttttctccacgaaccccgcgctaaatatccacgtcgacgaccttttctccacgaaccccgcgctaaatatccacgtcgacgaccttttctccacgaaccccgcgctaaatccccacgtcgacgaccttttctccaccgaccccgcgctaaatctccacgtcgacgaccttttctccaccgaccccgcgctaaatctccacgtcgacgaccttttctccaccgaccccgcgctaaatctccacgtcgacgaccttttctccaccgaccccgcgctaaatatccacgtcgacgaccttttctccaaccgaccccgcgctaaatcctccacgtcgacgaccttttctccaccgaccccgcgctaaatccccacgttcgacgaccttttctccaccgaccccgcgctaaatccccacgtcgacgaccttttctccaccgaccccgcgctaaatctcccacgtcgacgaccttttctccaccgaccccgcgctaaatctccacgtcgacgtaccttttctccaaccgaccccgcgactaaatctccacgtcgacgaccttttctccaacgacccgcgctaaatccccaaatcgacgacctattctccactaaccccgcgctaaatccccacgtcgcgaccttttctccaccgaccccgcgctaaatctccaccgtcgacgaccttttctccaccgaccccgcgctaaatctccacgtcgcgaccttttctccaccgaccccgcgctaaatctccacgtcgacgaccttttctccaccgaccccgcgctaaatctccacgtcgcgaccttttctccaccgaccccgcgctaaatctccacgtcgcgaccttttctccaccgaccccgcgctaaatctccacgtcgcgaccttttctccaccgaccccgcgctaaatctccacgtcgcgaccttttctccaccgaccccgcgctaaatctccacgtcgacgaccttttctccaccgaccccgcgctaaatctccacgtcgacgaccttttctccaccgaccccgcgctaaatctccacgtcgacgaccttttctccaccgaccccgcgctaaatctccacgtcgacgaccttttctccaccgaccccgcgctaaatctccacgtcgacgaccttttctccaccgaccccgcgctaaatctccacgtcgacgaccttttctccaccgaccccgcgctaaatctccacgtcgacgaccttttctccaccgaccccgcgctaaatctccacgtcgacgaccttttctccaccgaccccgcgctaaatctccacgtcgacgaccttttctccaccgaccccgcgctaaatctccacgtcgacgaccttttctccaccgaccccgcgctaaatctccacgtcgacgaccttttctccaccgaccccgcgctaaatctccacgtcgacgaccttttctccactaaccccgcgctaaatctccgcgtcgac

SEQ ID NO: 39943 - DNA, 1531 bp, Artificial Sequence
  chemically treated genomic DNA (Homo sapiens) CpG-island No: 39943
ttttttatatagtgtaggtgggttaggagggtatagtagttttggagattttacgtcggcggttttttttttacggatttcgcgttgggtgtttacgtcggcggttttttttttacggatttcgcgttgggtgtttacgtcggcggttttttttttacggatttcgcgttgggtttttacgtcggcggttttttttttatcgatttcgcgttgggtttttacgtcggcggttttttttttatcgatttcgcgttgggtttttacgtcggcggttttttttttatcgatttcgcgttgggtttttacgtcggcggttttttttttatcgatttcgcgttgggtgtttacgtcggcggttttttttttagtcgatttcgcgttgggttttttacgtcggcggttttttttttatcgatttcgcgttgggtttttacgttcggcggttttttttttatcgatttcgcgttgggtttttacgtcggcggttttttttttatcgatttcgcgttgggttttttacgtcggcggttttttttttatcgatttcgcgttgggtttttacgtcggcgtgttttttttttagtcgatttcgcgattgggtttttacgtcggcggttttttttttagcgattcgcgttgggtttttaagtcggcggtttgttttttattgatttcgcgttgggtttttacgtcgcggttttttttttatcgatttcgcgttgggtttttatcgtcggcggttttttttttatcgatttcgcgttgggtttttacgtcgcggttttttttttatcgatttcgcgttgggtttttacgtcggcggttttttttttatcgatttcgcgttgggtttttacgtcgcggttttttttttatcgatttcgcgttgggtttttacgtcgcggttttttttttatcgatttcgcgttgggtttttacgtcgcggttttttttttatcgatttcgcgttgggtttttacgtcgcggttttttttttatcgatttcgcgttgggtttttacgtcggcggttttttttttatcgatttcgcgttgggtttttacgtcggcggttttttttttatcgatttcgcgttgggtttttacgtcggcggttttttttttatcgatttcgcgttgggtttttacgtcggcggttttttttttatcgatttcgcgttgggtttttacgtcggcggttttttttttatcgatttcgcgttgggtttttacgtcggcggttttttttttatcgatttcgcgttgggtttttacgtcggcggttttttttttatcgatttcgcgttgggtttttacgtcggcggttttttttttatcgatttcgcgttgggtttttacgtcggcggttttttttttatcgatttcgcgttgggtttttacgtcggcggttttttttttatcgatttcgcgttgggtttttacgtcggcggttttttttttatcgatttcgcgttgggtttttacgtcggcggttttttttttattgatttcgcgttgggttttcgcgtcggt

SEQ ID NO: 39944 - DNA, 1531 bp, Artificial Sequence
  chemically treated genomic DNA (Homo sapiens) CpG-island No: 39944
accgacgcgaaaacccaacgcgaaatcaataaaaaaaaaaccgccgacgtaaaaacccaacgcgaaatcgataaaaaaaaaaccgccgacgtaaaaacccaacgcgaaatcgataaaaaaaaaaccgccgacgtaaaaacccaacgcgaaatcgataaaaaaaaaaccgccgacgtaaaaacccaacgcgaaatcgataaaaaaaaaaccgccgacgtaaaaacccaacgcgaaatcgataaaaaaaaaaccgccgacgtaaaaacccaacgcgaaatcgataaaaaaaaaaccgccgacgtaaaaacccaacgcgaaatcgataaaaaaaaaaccgccgacgtaaaaacccaacgcgaaatcgataaaaaaaaaaccgccgacgtaaaaacccaacgcgaaatcgataaaaaaaaaaccgccgacgtaaaaacccaacgcgaaatcgataaaaaaaaaaccgccgacgtaaaaacccaacgcgaaatcgataaaaaaaaaaccgccgacgtaaaaacccaacgcgaaatcgataaaaaaaaaaccgcgacgtaaaaacccaacgcgaaatcgataaaaaaaaaaccgcgacgtaaaaacccaacgcgaaatcgataaaaaaaaaaccgcgacgtaaaaacccaacgcgaaatcgataaaaaaaaaaccgcgacgtaaaaacccaacgcgaaatcgataaaaaaaaaaccgccgacgtaaaaacccaacgcgaaatcgataaaaaaaaaaccgcgacgtaaaaacccaacgcgaaatcgataaaaaaaaaaccgccgacgataaaaacccaacgcgaaatcgataaaaaaaaaaccgcgacgtaaaaacccaacgcgaaatcaataaaaaacaaaccgccgacttaaaaacccaacgcgaatcgctaaaaaaaaaaccgccgacgtaaaaacccaatcgcgaaatcgactaaaaaaaaaacacgccgacgtaaaaacccaacgcgaaatcgataaaaaaaaaaccgccgacgtaaaaaacccaacgcgaaatcgataaaaaaaaaaccgccgacgtaaaaacccaacgcgaaatcgataaaaaaaaaaccgccgaacgtaaaaacccaacgcgaaatcgataaaaaaaaaaccgccgacgtaaaaaacccaacgcgaaatcgactaaaaaaaaaaccgccgacgtaaacacccaacgcgaaatcgataaaaaaaaaaccgccgacgtaaaaacccaacgcgaaatcgataaaaaaaaaaccgccgacgtaaaaacccaacgcgaaatcgataaaaaaaaaaccgccgacgtaaaaacccaacgcgaaatcgataaaaaaaaaaccgccgacgtaaaaacccaacgcgaaatccgtaaaaaaaaaaccgccgacgtaaacacccaacgcgaaatccgtaaaaaaaaaaccgccgacgtaaacacccaacgcgaaatccgtaaaaaaaaaaccgccgacgtaaaatctccaaaactactataccctcctaacccacctacactatataaaaaa

SEQ ID NO: 39945 - DNA, 531 bp, Artificial Sequence
  chemically treated genomic DNA (Homo sapiens) CpG-island No: 39945
ggtttcgtttttcggtcgcgttttattttttgtagttttcgcgtcgcggtcgttcgagttacgtgcgttcgcgttcggtaggcgtttagggaagcgcggttacgtttgggtcggttattatttttcgggcgtcgcggcggcgtcgattcgcgggtagcggttttttagtgcgtttagtcgggttttcgaacgtcgggagtatgagcgcgggttcggagcgcggggcggcggtaattttcgggggtttgttcgcgttttgcgtttcgaaggtggagttgcggtttagttgtcggtatttgttggatcgcgattcgtttattaagttcgattttagcgtggcgttgttgtagtaggcgtagggttagtgggtgtaggtagggtcggggcgtggaggtcgagaggttatcgggtcggggttggcgtcgagttggggatgcggagattagagcggcgcgttgaggttagtggggcgtaaggcggggtttttcggagttggggtttagttcggggttagggttgggggttattagg

SEQ ID NO: 39946 - DNA, 531 bp, Artificial Sequence
  chemically treated genomic DNA (Homo sapiens) CpG-island No: 39946
cctaataacccccaaccctaaccccgaactaaaccccaactccgaaaaaccccgccttacgccccactaacctcaacgcgccgctctaatctccgcatccccaactcgacgccaaccccgacccgataacctctcgacctccacgccccgaccctacctacacccactaaccctacgcctactacaacaacgccacgctaaaatcgaacttaataaacgaatcgcgatccaacaaataccgacaactaaaccgcaactccaccttcgaaacgcaaaacgcgaacaaacccccgaaaattaccgccgccccgcgctccgaacccgcgctcatactcccgacgttcgaaaacccgactaaacgcactaaaaaaccgctacccgcgaatcgacgccgccgcgacgcccgaaaaataataaccgacccaaacgtaaccgcgcttccctaaacgcctaccgaacgcgaacgcacgtaactcgaacgaccgcgacgcgaaaactacaaaaaataaaacgcgaccgaaaaacgaaacc

SEQ ID NO: 39947 - DNA, 531 bp, Artificial Sequence
  chemically treated genomic DNA (Homo sapiens) CpG-island No: 39947
tttggtaatttttaattttgatttcgagttgagttttagtttcggggggtttcgttttgcgttttattggttttagcgcgtcgttttggttttcgtatttttagttcggcgttagtttcggttcggtggtttttcggtttttacgtttcggttttatttgtatttattggttttgcgtttgttgtagtaacgttacgttggggtcggatttggtgagcgggtcgcggtttagtaggtgtcggtagttgagtcgtagttttattttcgaggcgtagggcgcgggtaaattttcgggggttgtcgtcgtttcgcgtttcgagttcgcgtttatgttttcggcgttcgggggttcggttgggcgtattgaggggtcgttgttcgcgagtcggcgtcgtcgcggcgttcgggaaatggtggtcggtttaggcgtggtcgcgtttttttgaacgtttgtcgggcgcgggcgtacgtggttcgggcggtcgcggcgcggggattgtagggggtggggcgcggtcggggggcggggtt

SEQ ID NO: 39948 - DNA, 531 bp, Artificial Sequence
  chemically treated genomic DNA (Homo sapiens) CpG-island No: 39948
aaccccgccccccgaccgcgccccaccccctacaatccccgcgccgcgaccgcccgaaccacgtacgcccgcgcccgacaaacgttcaaaaaaacgcgaccacgcctaaaccgaccaccatttcccgaacgccgcgacgacgccgactcgcgaacaacgacccctcaatacgcccaaccgaacccccgaacgccgaaaacataaacgcgaactcgaaacgcgaaacgacgacaacccccgaaaatttacccgcgccctacgcctcgaaaataaaactacgactcaactaccgacacctactaaaccgcgacccgctcaccaaatccgaccccaacgtaacgttactacaacaaacgcaaaaccaataaatacaaataaaaccgaaacgtaaaaaccgaaaaaccaccgaaccgaaactaacgccgaactaaaaatacgaaaaccaaaacgacgcgctaaaaccaataaaacgcaaaacgaaaccccccgaaactaaaactcaactcgaaatcaaaattaaaaattaccaaa

SEQ ID NO: 39949 - DNA, 554 bp, Artificial Sequence
  chemically treated genomic DNA (Homo sapiens) CpG-island No: 39949
agggagttcggttggtgtggtggaataaatatttcgttgtcgaggcggggcgtttcgtttaaattaaaagcggtggacggtaatacgttcggcgagtttttattttttagtaggaaatgtgagaggtggttagcgtggagtgtgggattaagaagggcgttacgacgttggggtgtgtggtgagaagggttcgttaaacgttcgagattcgtcgttgttttttcgattttagagtgtaatttgtcgggtttgttgtcgtacggagtcggtgtggcgcgcggggaaatgggagcgaagggttcggttgggggggcgcgtttgcgcggttcggggaatacgtgtcggggcgtgcgtggatatataattaagttacggggggttcgggatgtgttatttgtatttaaacggtttagaaaaaaagggtgtttgcgtggtggggtaggggggaggggcggttcgcggcgtagcgatatattttttttttttttgtatatttggattagtttagtaacgttatatatttatgtagttttatcgcggagtttttatttaag

SEQ ID NO: 39950 - DNA, 554 bp, Artificial Sequence
  chemically treated genomic DNA (Homo sapiens) CpG-island No: 39950
cttaaataaaaactccgcgataaaactacataaatatataacgttactaaactaatccaaatatacaaaaaaaaaaaaaatatatcgctacgccgcgaaccgcccctcccccctaccccaccacgcaaacaccctttttttctaaaccgtttaaatacaaataacacatcccgaaccccccgtaacttaattatatatccacgcacgccccgacacgtattccccgaaccgcgcaaacgcgcccccccaaccgaacccttcgctcccatttccccgcgcgccacaccgactccgtacgacaacaaacccgacaaattacactctaaaatcgaaaaaacaacgacgaatctcgaacgtttaacgaacccttctcaccacacaccccaacgtcgtaacgcccttcttaatcccacactccacgctaaccacctctcacatttcctactaaaaaataaaaactcgccgaacgtattaccgtccaccgcttttaatttaaacgaaacgccccgcctcgacaacgaaatatttattccaccacaccaaccgaactccct

SEQ ID NO: 39951 - DNA, 554 bp, Artificial Sequence
  chemically treated genomic DNA (Homo sapiens) CpG-island No: 39951
tttaagtgaaggtttcgcgatggaattgtataaatgtgtggcgttgttgagttggtttagatgtataaagaggggaaaggtgtgtcgttgcgtcgcgggtcgttttttttttttattttattacgtaaatattttttttttttggatcgtttgagtatagataatatatttcgggtttttcgtaatttagttatatatttacgtacgtttcgatacgtgtttttcgggtcgcgtaagcgcgtttttttaatcgggtttttcgtttttattttttcgcgcgttatatcgatttcgtacgataataggttcggtagattatattttagagtcggaggggtagcggcgagtttcgagcgtttggcgaattttttttattatatattttagcgtcgtgacgttttttttgattttatattttacgttgattattttttatattttttgttaagaagtgaaggttcgtcgagcgtgttgtcgtttatcgtttttggtttgggcggagcgtttcgtttcggtagcggggtatttattttattatattagtcggatttttt

SEQ ID NO: 39952 - DNA, 554 bp, Artificial Sequence
  chemically treated genomic DNA (Homo sapiens) CpG-island No: 39952
aaaaaatccgactaatataataaaataaataccccgctaccgaaacgaaacgctccgcccaaaccaaaaacgataaacgacaacacgctcgacgaaccttcacttcttaacaaaaaatataaaaaataatcaacgtaaaatataaaatcaaaaaaaacgtcacgacgctaaaatatataataaaaaaaattcgccaaacgctcgaaactcgccgctacccctccgactctaaaatataatctaccgaacctattatcgtacgaaatcgatataacgcgcgaaaaaataaaaacgaaaaacccgattaaaaaaacgcgcttacgcgacccgaaaaacacgtatcgaaacgtacgtaaatatataactaaattacgaaaaacccgaaatatattatctatactcaaacgatccaaaaaaaaaaaatatttacgtaataaaataaaaaaaaaaaacgacccgcgacgcaacgacacacctttcccctctttatacatctaaaccaactcaacaacgccacacatttatacaattccatcgcgaaaccttcacttaaa

SEQ ID NO: 39953 - DNA, 651 bp, Artificial Sequence
  chemically treated genomic DNA (Homo sapiens) CpG-island No: 39953
  unsure (50)
aatttcgacggggcgtggttttcgggtagtagtcggttcgttggtttttncgggaggaaggcgagttaaagttcggcggttattcggattgttacgcgtatttaatttcgcggagtgcggggcgttggggtgtagaggggttttcgttcggcgttatttaggtttttaggcgggaagcggtttaattgggaaagtagtcggcgttcgtggttttcgggtcggtcgttcgcgttttttcggttagtttttcgcggaggggaggggcgtcgacgtcgcgttttcggggtttcgtagtcggcggaagggtcgcgtatcgcggaagcgcggcggtagttgaggattagttgttggaggaggcggagaggtagagggaggagtttcggggggaaggagagggaggggatcgttaggaagtcgcgaacgtcgtcgagtgtttgtatatttcgttttgtttgttatggttggttaaagaattattcggatcgtagcgcggggggagggtcgggtggggggagtagcggtcgcgcgtgaggtcgagggaggggcggcggcgcgagcggcggcggcggcggttttagtatgaagaggagagttggtttggggggtagtatgaggttagtggtgggttttttgttttagcggggtttgtat

SEQ ID NO: 39954 - DNA, 651 bp, Artificial Sequence
  chemically treated genomic DNA (Homo sapiens) CpG-island No: 39954
  unsure (602)
atacaaaccccgctaaaacaaaaaacccaccactaacctcatactaccccccaaaccaactctcctcttcatactaaaaccgccgccgccgccgctcgcgccgccgcccctccctcgacctcacgcgcgaccgctactccccccacccgaccctccccccgcgctacgatccgaataattctttaaccaaccataacaaacaaaacgaaatatacaaacactcgacgacgttcgcgacttcctaacgatcccctccctctccttccccccgaaactcctccctctacctctccgcctcctccaacaactaatcctcaactaccgccgcgcttccgcgatacgcgacccttccgccgactacgaaaccccgaaaacgcgacgtcgacgcccctcccctccgcgaaaaactaaccgaaaaaacgcgaacgaccgacccgaaaaccacgaacgccgactactttcccaattaaaccgcttcccgcctaaaaacctaaataacgccgaacgaaaacccctctacaccccaacgccccgcactccgcgaaattaaatacgcgtaacaatccgaataaccgccgaactttaactcgccttcctcccgnaaaaaccaacgaaccgactactacccgaaaaccacgccccgtcgaaatt

SEQ ID NO: 39955 - DNA, 651 bp, Artificial Sequence
  chemically treated genomic DNA (Homo sapiens) CpG-island No: 39955
  unsure (602)
atgtaagtttcgttgggataagaagtttattattgattttatgttgttttttaggttagtttttttttttatgttggaatcgtcgtcgtcgtcgttcgcgtcgtcgtttttttttcggttttacgcgcggtcgttgttttttttattcggtttttttttcgcgttgcgattcggatggttttttaattagttatggtaggtagagcgaggtgtgtagatattcggcggcgttcgcggttttttgacggtttttttttttttttttttttcgaggtttttttttttgttttttcgttttttttagtagttgatttttagttgtcgtcgcgttttcgcgatgcgcggttttttcgtcggttgcggggtttcgagaacgcggcgtcggcgtttttttttttcgcggggggttggtcggaagaacgcgggcggtcggttcggagattacgggcgtcggttgtttttttagttgagtcgtttttcgtttggggatttgggtggcgtcgggcggagatttttttgtattttagcgtttcgtatttcgcggagttgaatgcgcgtaataattcgagtggtcgtcgggttttggttcgtttttttttcgnagggattagcgggtcggttgttgttcggaggttacgtttcgtcgaggtt

SEQ ID NO: 39956 - DNA, 651 bp, Artificial Sequence
  chemically treated genomic DNA (Homo sapiens) CpG-island No: 39956
  unsure (50)
aacctcgacgaaacgtaacctccgaacaacaaccgacccgctaatccctncgaaaaaaaaacgaaccaaaacccgacgaccactcgaattattacgcgcattcaactccgcgaaatacgaaacgctaaaatacaaaaaaatctccgcccgacgccacccaaatccccaaacgaaaaacgactcaactaaaaaaacaaccgacgcccgtaatctccgaaccgaccgcccgcgttcttccgaccaaccccccgcgaaaaaaaaaaacgccgacgccgcgttctcgaaaccccgcaaccgacgaaaaaaccgcgcatcgcgaaaacgcgacgacaactaaaaatcaactactaaaaaaaacgaaaaaacaaaaaaaaaaacctcgaaaaaaaaaaaaaaaaaaaaaccgtcaaaaaaccgcgaacgccgccgaatatctacacacctcgctctacctaccataactaattaaaaaaccatccgaatcgcaacgcgaaaaaaaaaccgaataaaaaaaacaacgaccgcgcgtaaaaccgaaaaaaaaacgacgacgcgaacgacgacgacgacgattccaacataaaaaaaaaaactaacctaaaaaacaacataaaatcaataataaacttcttatcccaacgaaacttacat

SEQ ID NO: 39957 - DNA, 614 bp, Artificial Sequence
  chemically treated genomic DNA (Homo sapiens) CpG-island No: 39957
  unsure (439)
ttttttgtcgtagtaaaaaaaagagtattagtcgtttttttgtatcgttttttattgttcgcgtgcggtacgttaattcgggtgttcgatcgacgttttttcgttttatttttacgtttttttcgtttttttcgttttttttgtcgtttcgttttcggtgtacggtcgagtcgttgcgtttttttatgattcgttttgttttcggtcgtatcgagtatgtgtttttttagttcgttttttcgttcgacgtatattattttattatttttttcggttcgtcgttttagtatttagtcgggtcgttttcgtaagttggagtagagtcgcgggtttcgggtgttggtttaataaatttttagatgatatcgggcgtcgagtgtttcgtttttcgtttgtttcgtcgttcgaaatagacgagtgtttagttggggcgttcgtnaggtcgttgtacgttcgcggatgtttcgttcgttattatggtagcgagggaggatagtcgattcgttcggaggtttacgttataaaataagacgcgttagtatggttagtttaaacgtttcgaggggtcgggagcggaagtagtgtggagtaaaatgtagggaagtttgagttgt

SEQ ID NO: 39958 - DNA, 614 bp, Artificial Sequence
  chemically treated genomic DNA (Homo sapiens) CpG-island No: 39958
  unsure (176)
acaactcaaacttccctacattttactccacactacttccgctcccgacccctcgaaacgtttaaactaaccatactaacgcgtcttattttataacgtaaacctccgaacgaatcgactatcctccctcgctaccataataacgaacgaaacatccgcgaacgtacaacgacctnacgaacgccccaactaaacactcgtctatttcgaacgacgaaacaaacgaaaaacgaaacactcgacgcccgatatcatctaaaaatttattaaaccaacacccgaaacccgcgactctactccaacttacgaaaacgacccgactaaatactaaaacgacgaaccgaaaaaaataataaaataatatacgtcgaacgaaaaaacgaactaaaaaaacacatactcgatacgaccgaaaacaaaacgaatcataaaaaaacgcaacgactcgaccgtacaccgaaaacgaaacgacaaaaaaaacgaaaaaaacgaaaaaaacgtaaaaataaaacgaaaaaacgtcgatcgaacacccgaattaacgtaccgcacgcgaacaataaaaaacgatacaaaaaaacgactaatactcttttttttactacgacaaaaaa

SEQ ID NO: 39959 - DNA, 614 bp, Artificial Sequence
  chemically treated genomic DNA (Homo sapiens) CpG-island No: 39959
  unsure (176)
gtaatttaagtttttttgtattttgttttatattgttttcgttttcggtttttcggagcgtttagattaattatattggcgcgttttattttgtaacgtgaattttcgagcgaatcggttattttttttcgttattataatggcgggcgggatattcgcggacgtatagcgatttngcgggcgttttaattggatattcgtttatttcgggcgacggaatagacgaaaggcggggtattcggcgttcggtgttatttgggggtttgttgggttaatattcggggttcgcggttttgttttagtttacgggggcgattcggttaagtgttagggcggcgggtcggggggggtaatgagatggtatgcgtcgggcgggaaggcgggttaaaggggtatatgttcggtacggtcggggataaaacgaattatggggaagcgtaacggttcggtcgtatatcggaaacggaacggtaggaaaggcgggggaaacggggaaagcgtgggggtggggcgggaggacgtcggtcgggtattcgggttggcgtatcgtacgcgggtaatggggggcggtgtaagggggcgattggtgtttttttttttgttgcgatagaggg

SEQ ID NO: 39960 - DNA, 614 bp, Artificial Sequence
  chemically treated genomic DNA (Homo sapiens) CpG-island No: 39960
  unsure (439)
ccctctatcgcaacaaaaaaaaaaacaccaatcgcccccttacaccgccccccattacccgcgtacgatacgccaacccgaatacccgaccgacgtcctcccgccccacccccacgctttccccgtttcccccgcctttcctaccgttccgtttccgatatacgaccgaaccgttacgcttccccataattcgttttatccccgaccgtaccgaacatatacccctttaacccgccttcccgcccgacgcataccatctcattaccccccccgacccgccgccctaacacttaaccgaatcgcccccgtaaactaaaacaaaaccgcgaaccccgaatattaacccaacaaacccccaaataacaccgaacgccgaataccccgcctttcgtctattccgtcgcccgaaataaacgaatatccaattaaaacgcccgcnaaatcgctatacgtccgcgaatatcccgcccgccattataataacgaaaaaaaataaccgattcgctcgaaaattcacgttacaaaataaaacgcgccaatataattaatctaaacgctccgaaaaaccgaaaacgaaaacaatataaaacaaaatacaaaaaaacttaaattac

SEQ ID NO: 39961 - DNA, 556 bp, Artificial Sequence
  chemically treated genomic DNA (Homo sapiens) CpG-island No: 39961
tgcgtcggcggaacgttcgttttttcgttcgtttcggtttttcggggacggtcgtagcgggtcgggtgtcgcgatcgtggtaaataaaggttcgtaggggacgggggcgggggtaacggttaggtgatagtgtcgagtgtatttcgtaatcgttttaatggggttttacgggttcgcggttttggggattttattttgatttcgttatttttttcggatagaatcgacggtcgttttattaaataagaaggttggatttgaggcggtcgtattttttcgggttttttgaaataaaaagtagcgtttcgttcgtagtttatcggtaataagtagtattcgtttgtttagtcgtttttttcggcggcgttcggtttcgcggcgattaagtttatcgtatttgcggttatttttagtttcggtaattatttcgttttagttaggtcgtattagtcgcgtcgcggtttcgggtcgtagtgttaggaggcgcgcgcgtttttttttagggttgtagttattaagcgggggaggaagattttttaggtgaattttggaggtt

SEQ ID NO: 39962 - DNA, 556 bp, Artificial Sequence
  chemically treated genomic DNA (Homo sapiens) CpG-island No: 39962
aacctccaaaattcacctaaaaaatcttcctcccccgcttaataactacaaccctaaaaaaaaacgcgcgcgcctcctaacactacgacccgaaaccgcgacgcgactaatacgacctaactaaaacgaaataattaccgaaactaaaaataaccgcaaatacgataaacttaatcgccgcgaaaccgaacgccgccgaaaaaaacgactaaacaaacgaatactacttattaccgataaactacgaacgaaacgctactttttatttcaaaaaacccgaaaaaatacgaccgcctcaaatccaaccttcttatttaataaaacgaccgtcgattctatccgaaaaaaataacgaaatcaaaataaaatccccaaaaccgcgaacccgtaaaaccccattaaaacgattacgaaatacactcgacactatcacctaaccgttacccccgcccccgtcccctacgaacctttatttaccacgatcgcgacacccgacccgctacgaccgtccccgaaaaaccgaaacgaacgaaaaaacgaacgttccgccgacgca

SEQ ID NO: 39963 - DNA, 556 bp, Artificial Sequence
  chemically treated genomic DNA (Homo sapiens) CpG-island No: 39963
ggtttttagggtttatttggggggtttttttttttcgtttggtagttatagttttgagggagggcgcgcgcgttttttggtattacggttcggaatcgcggcgcggttggtgcggtttggttagggcggggtggttgtcgggattgggggtagtcgtaggtgcggtaggtttagtcgtcgcggggtcgggcgtcgtcgggggaggcggttgggtagacgggtgttgtttgttgtcgatgggttgcgaacggggcgttgttttttattttaggaagttcgggggagtgcgatcgttttaaatttagtttttttgtttggtgggacgatcgtcggttttgttcgggaggaatgacggggttaaggtggggtttttagggtcgcgggttcgtgaagttttattaaagcgattgcgaaatgtattcggtattgttatttgatcgttattttcgttttcgttttttgcgagtttttgtttattacgatcgcgatattcggttcgttgcggtcgttttcggggagtcggggcgggcgggggagcgggcgtttcgtcggcgta

SEQ ID NO: 39964 - DNA, 556 bp, Artificial Sequence
  chemically treated genomic DNA (Homo sapiens) CpG-island No: 39964
tacgccgacgaaacgcccgctcccccgcccgccccgactccccgaaaacgaccgcaacgaaccgaatatcgcgatcgtaataaacaaaaactcgcaaaaaacgaaaacgaaaataacgatcaaataacaataccgaatacatttcgcaatcgctttaataaaacttcacgaacccgcgaccctaaaaaccccaccttaaccccgtcattcctcccgaacaaaaccgacgatcgtcccaccaaacaaaaaaactaaatttaaaacgatcgcactcccccgaacttcctaaaataaaaaacaacgccccgttcgcaacccatcgacaacaaacaacacccgtctacccaaccgcctcccccgacgacgcccgaccccgcgacgactaaacctaccgcacctacgactacccccaatcccgacaaccaccccgccctaaccaaaccgcaccaaccgcgccgcgattccgaaccgtaataccaaaaaacgcgcgcgccctccctcaaaactataactaccaaacgaaaaaaaaaaaccccccaaataaaccctaaaaacc

SEQ ID NO: 39965 - DNA, 773 bp, Artificial Sequence
  chemically treated genomic DNA (Homo sapiens) CpG-island No: 39965
  unsure (92, 116)
tcgttcgtagatcgtttatttatagtagtgagcgaatttaaattttatacggttaagtttcgcgggttttaggaaatttcgaagaggtcggnggttaggggcgattatggcgcggnggaggttggggattgtagtttttatttgttttcggggcggtgttcgagggcggggtttttaggtcgagggggtgggtgggtcgtttagcgtttcggttcgtttcggcgttttcggtcgtaggcgggttttggaggaggaggggcgtcgcgatcgacgcgcgcgagttggtttgggatttttggcggtgcgagcgggtgcgcgcgtagcgggtcggttgtggcggcggagatggaggagggaggtcgggataaggcgtcggtgtagttttagtagtttttagcggcggttttcggcggtacggacgagaagtcgagcggtaaggagcggcgggatgtcggggataaggataaagaataggagttggtgaggcgcgatttcgagagtcggcgaaggaggttgcggggttgagttacggcggtttcgtaggttttaggttcgatatttaattattttatcgcgttagggagaggcgcggttggggcgattttcgggattttcggtattttgtttttttgttttttatttttcgtttcgcgttgttattttcgtcgtttttattaatttttattatcgtcgcgtgaagtggattcgggtaggttattgttattttcgttttttagagtggtatttaagtagaatttgatttagaatttagg

SEQ ID NO: 39966 - DNA, 773 bp, Artificial Sequence
  chemically treated genomic DNA (Homo sapiens) CpG-island No: 39966
  unsure (658, 682)
cctaaattctaaatcaaattctacttaaataccactctaaaaaacgaaaataacaataacctacccgaatccacttcacgcgacgataataaaaattaataaaaacgacgaaaataacaacgcgaaacgaaaaataaaaaacaaaaaaacaaaataccgaaaatcccgaaaatcgccccaaccgcgcctctccctaacgcgataaaataattaaatatcgaacctaaaacctacgaaaccgccgtaactcaaccccgcaacctccttcgccgactctcgaaatcgcgcctcaccaactcctattctttatccttatccccgacatcccgccgctccttaccgctcgacttctcgtccgtaccgccgaaaaccgccgctaaaaactactaaaactacaccgacgccttatcccgacctccctcctccatctccgccgccacaaccgacccgctacgcgcgcacccgctcgcaccgccaaaaatcccaaaccaactcgcgcgcgtcgatcgcgacgcccctcctcctccaaaacccgcctacgaccgaaaacgccgaaacgaaccgaaacgctaaacgacccacccaccccctcgacctaaaaaccccgccctcgaacaccgccccgaaaacaaataaaaactacaatccccaacctccnccgcgccataatcgcccctaaccnccgacctcttcgaaatttcctaaaacccgcgaaacttaaccgtataaaatttaaattcgctcactactataaataaacgatctacgaacga

SEQ ID NO: 39967 - DNA, 773 bp, Artificial Sequence
  chemically treated genomic DNA (Homo sapiens) CpG-island No: 39967
  unsure (658, 682)
tttgggttttgaattaggttttatttgaatgttattttaggaaacggaggtgataatgatttgttcgagtttattttacgcggcggtggtgagggttggtggggacggcggaggtgatagcgcggaacggagaatgaggagtagagaggtaaggtgtcgggagtttcgagggtcgttttaatcgcgtttttttttggcgcggtggggtagttgggtgtcgggtttgaggtttgcggagtcgtcgtgatttagtttcgtagtttttttcgtcgattttcggggtcgcgttttattagtttttgttttttgtttttgttttcggtatttcgtcgttttttgtcgttcggtttttcgttcgtgtcgtcgggggtcgtcgttggagattgttggggttgtatcggcgttttgtttcggttttttttttttattttcgtcgttatagtcggttcgttgcgcgcgtattcgttcgtatcgttaaaaattttagattaattcgcgcgcgtcggtcgcggcgtttttttttttttagagttcgtttgcgatcggaaacgtcggggcgagtcggggcgttaggcgatttatttattttttcggtttgagagtttcgttttcggatatcgtttcggaggtaggtggagattataatttttagtttttntcgcgttatagtcgtttttggttntcgattttttcggagttttttgaaattcgcgggatttggtcgtgtggggtttgggttcgtttattgttgtagatgggcggtttgcgagcgg

SEQ ID NO: 39968 - DNA, 773 bp, Artificial Sequence
  chemically treated genomic DNA (Homo sapiens) CpG-island No: 39968
  unsure (92, 116)
ccgctcgcaaaccgcccatctacaacaataaacgaacccaaaccccacacgaccaaatcccgcgaatttcaaaaaactccgaaaaaatcganaaccaaaaacgactataacgcganaaaaactaaaaattataatctccacctacctccgaaacgatatccgaaaacgaaactctcaaaccgaaaaaataaataaatcgcctaacgccccgactcgccccgacgtttccgatcgcaaacgaactctaaaaaaaaaaaaacgccgcgaccgacgcgcgcgaattaatctaaaatttttaacgatacgaacgaatacgcgcgcaacgaaccgactataacgacgaaaataaaaaaaaaaaaccgaaacaaaacgccgatacaaccccaacaatctccaacgacgacccccgacgacacgaacgaaaaaccgaacgacaaaaaacgacgaaataccgaaaacaaaaacaaaaaacaaaaactaataaaacgcgaccccgaaaatcgacgaaaaaaactacgaaactaaatcacgacgactccgcaaacctcaaacccgacacccaactaccccaccgcgccaaaaaaaaacgcgattaaaacgaccctcgaaactcccgacaccttacctctctactcctcattctccgttccgcgctatcacctccgccgtccccaccaaccctcaccaccgccgcgtaaaataaactcgaacaaatcattatcacctccgtttcctaaaataacattcaaataaaacctaattcaaaacccaaa

SEQ ID NO: 39969 - DNA, 504 bp, Artificial Sequence
  chemically treated genomic DNA (Homo sapiens) CpG-island No: 39969
atgtcggaggcgggtttttcggcggcgttcgatcgttttttttcgtcgtagttcggcgtttgtttttcgattaggtttgagacgttttttatcgtttatattttcgttcgggtgggtttttcgtgcgttcggtttttgagggggtcggcgtttttatgtcgtattcgcgtatgtgggtttaacgcgattttcgatattttcgtttacgtttttacgtttcgtcgtcgtaattttatttcggaaaacgtatcgggcgggcgtgggggtatttttttttttgttttacgtcgtcgttttagttttatttttaaaagtcgttcgttttgttttatttttcgcggttttcgtttcgggtagttatcgttgtgcgtttttcgcgtggtttttttttcggttttcgggcgcgtaatcgtacggtgaatatttattcgttttaaaaacgggcgcgcgtatcgtaatcgggtcggcgttcgtatgcgcgttcgaagttgttttttttttaag

SEQ ID NO: 39970 - DNA, 504 bp, Artificial Sequence
  chemically treated genomic DNA (Homo sapiens) CpG-island No: 39970
cttaaaaaaaaaacaacttcgaacgcgcatacgaacgccgacccgattacgatacgcgcgcccgtttttaaaacgaataaatattcaccgtacgattacgcgcccgaaaaccgaaaaaaaaaccacgcgaaaaacgcacaacgataactacccgaaacgaaaaccgcgaaaaataaaacaaaacgaacgacttttaaaaataaaactaaaacgacgacgtaaaacaaaaaaaaaaatacccccacgcccgcccgatacgttttccgaaataaaattacgacgacgaaacgtaaaaacgtaaacgaaaatatcgaaaatcgcgttaaacccacatacgcgaatacgacataaaaacgccgaccccctcaaaaaccgaacgcacgaaaaacccacccgaacgaaaatataaacgataaaaaacgtctcaaacctaatcgaaaaacaaacgccgaactacgacgaaaaaaaacgatcgaacgccgccgaaaaacccgcctccgacat

SEQ ID NO: 39971 - DNA, 504 bp, Artificial Sequence
  chemically treated genomic DNA (Homo sapiens) CpG-island No: 39971
tttggggggggaatagtttcgggcgcgtatgcgggcgtcgattcggttgcggtgcgcgcgttcgtttttggggcgggtgagtgtttatcgtgcgattgcgcgttcgaaaatcgggaaagaggttacgcggggggcgtatagcggtggttgttcggagcgagagtcgcggggggtggggtaaaacgggcggtttttggggatggggttgggacggcggcgtggagtagggagaaaaatatttttacgttcgttcgatgcgtttttcggggtggggttgcggcgacggggcgtaggggcgtgggcggagatgtcgggggtcgcgttgggtttatatgcgcgggtgcggtatgggggcgtcggtttttttagaggtcggacgtacggggggtttattcgggcggagatatgggcgataaagggcgttttaggtttaatcggggggtaggcgtcgagttgcggcggggggggacggtcgagcgtcgtcgggaggttcgttttcggtat

SEQ ID NO: 39972 - DNA, 504 bp, Artificial Sequence
  chemically treated genomic DNA (Homo sapiens) CpG-island No: 39972
ataccgaaaacgaacctcccgacgacgctcgaccgtccccccccgccgcaactcgacgcctaccccccgattaaacctaaaacgccctttatcgcccatatctccgcccgaataaaccccccgtacgtccgacctctaaaaaaaccgacgcccccataccgcacccgcgcatataaacccaacgcgacccccgacatctccgcccacgcccctacgccccgtcgccgcaaccccaccccgaaaaacgcatcgaacgaacgtaaaaatatttttctccctactccacgccgccgtcccaaccccatccccaaaaaccgcccgttttaccccaccccccgcgactctcgctccgaacaaccaccgctatacgccccccgcgtaacctctttcccgattttcgaacgcgcaatcgcacgataaacactcacccgccccaaaaacgaacgcgcgcaccgcaaccgaatcgacgcccgcatacgcgcccgaaactattccccccccaaa

SEQ ID NO: 39973 - DNA, 585 bp, Artificial Sequence
  chemically treated genomic DNA (Homo sapiens) CpG-island No: 39973
tttttcgaggtagtcgcgcgttcgtgggttagtgcggttggtggtattcggtagggaggcgcgtcggttacgtagcgattcgcgggcgacgttttcggaacgttttcgaggtacggtcgcgttttagcgtataacgtcgaagcgcgggacgtcgtagtaattgacggaagaggagatcgattaatatagtcgtcgacgggtatttagagtcgacgatacggcgcggtcgggttgttatagatacgcgtcggttattttcgtatcgtcggcgcgcggattatcgtacgtttcgacgacgatcgtataattcggtcggcgtcgcgtatttcgacgtatttcgggatacggcgagcgtagagcgttatttgtttttttagaatcgtcgtataacgtagtttcggcgcgttatacgcgttttcgaatcgtttatttcggtatcgtttcgttcggacgtacggtttcgttttatacgtcgaggtcggttgtgtcgtagaggtgacgcgcgagcgacggtttgcgttagaacgagcgcgacgagcggcggcgtgacgtcgtacgcgagcgcgcgcgagtcgtcgcgatcgt

SEQ ID NO: 39974 - DNA, 585 bp, Artificial Sequence
  chemically treated genomic DNA (Homo sapiens) CpG-island No: 39974
acgatcgcgacgactcgcgcgcgctcgcgtacgacgtcacgccgccgctcgtcgcgctcgttctaacgcaaaccgtcgctcgcgcgtcacctctacgacacaaccgacctcgacgtataaaacgaaaccgtacgtccgaacgaaacgataccgaaataaacgattcgaaaacgcgtataacgcgccgaaactacgttatacgacgattctaaaaaaacaaataacgctctacgctcgccgtatcccgaaatacgtcgaaatacgcgacgccgaccgaattatacgatcgtcgtcgaaacgtacgataatccgcgcgccgacgatacgaaaataaccgacgcgtatctataacaacccgaccgcgccgtatcgtcgactctaaatacccgtcgacgactatattaatcgatctcctcttccgtcaattactacgacgtcccgcgcttcgacgttatacgctaaaacgcgaccgtacctcgaaaacgttccgaaaacgtcgcccgcgaatcgctacgtaaccgacgcgcctccctaccgaataccaccaaccgcactaacccacgaacgcgcgactacctcgaaaaa

SEQ ID NO: 39975 - DNA, 585 bp, Artificial Sequence
  chemically treated genomic DNA (Homo sapiens) CpG-island No: 39975
gcggtcgcggcggttcgcgcgcgttcgcgtgcggcgttacgtcgtcgttcgtcgcgttcgttttggcgtaggtcgtcgttcgcgcgttatttttacggtatagtcggtttcggcgtgtggggcggagtcgtgcgttcgggcggggcggtgtcggggtgggcggttcggaggcgcgtgtggcgcgtcggggttgcgttgtgcggcggttttggagggataggtggcgttttgcgttcgtcgtgtttcggggtgcgtcggggtgcgcggcgtcggtcgggttgtgcggtcgtcgtcgaggcgtgcggtggttcgcgcgtcggcggtgcggaggtggtcggcgcgtgtttgtggtaattcggtcgcgtcgtgtcgtcggttttgggtgttcgtcggcggttgtgttggtcggttttttttttcgttagttgttgcggcgtttcgcgtttcggcgttgtgcgttggggcgcggtcgtgtttcgggggcgtttcgggggcgtcgttcgcgggtcgttgcgtggtcgacgcgtttttttgtcgggtgttattaatcgtattagtttacgggcgcgcggttgtttcgagggg

SEQ ID NO: 39976 - DNA, 585 bp, Artificial Sequence
  chemically treated genomic DNA (Homo sapiens) CpG-island No: 39976
cccctcgaaacaaccgcgcgcccgtaaactaatacgattaataacacccgacaaaaaaacgcgtcgaccacgcaacgacccgcgaacgacgcccccgaaacgcccccgaaacacgaccgcgccccaacgcacaacgccgaaacgcgaaacgccgcaacaactaacgaaaaaaaaaaccgaccaacacaaccgccgacgaacacccaaaaccgacgacacgacgcgaccgaattaccacaaacacgcgccgaccacctccgcaccgccgacgcgcgaaccaccgcacgcctcgacgacgaccgcacaacccgaccgacgccgcgcaccccgacgcaccccgaaacacgacgaacgcaaaacgccacctatccctccaaaaccgccgcacaacgcaaccccgacgcgccacacgcgcctccgaaccgcccaccccgacaccgccccgcccgaacgcacgactccgccccacacgccgaaaccgactataccgtaaaaataacgcgcgaacgacgacctacgccaaaacgaacgcgacgaacgacgacgtaacgccgcacgcgaacgcgcgcgaaccgccgcgaccgc

SEQ ID NO: 39977 - DNA, 531 bp, Artificial Sequence
  chemically treated genomic DNA (Homo sapiens) CpG-island No: 39977
tgtgcgggtgggggggatatatttcgggtgcgcggtaggcggaaggggtaatggtaaagtgttgttttgggtatattcgatatgtgtgtgttgtttaaaagatataaagttgttgacgaatatttttacgtcggggttgtacggggaaacggggggggcgcggggtggtgggggggcgggtaataaaatagcggtttattcgcggagggtacgtttgtcgtagacgcgttaaggtggggtgtcggagacgatatcggaaaaaaacggggtgggggatgagtaaacgaataagagtgtaatattgtgtagcggtcgaagggtacgggggcggggtcggggggggtaatcgttgatttatcgtaagaatattgtcgggggcgtgggtcgaagcgcggaaataatatggggaacggttttgcgcggtggtttttacggacgcggagacggtatagcggtaaatatgagtaatttttttcgggattaggttataaacgaggtaagtggttgtggtggtgaagataaagggaaata

SEQ ID NO: 39978 - DNA, 531 bp, Artificial Sequence
  chemically treated genomic DNA (Homo sapiens) CpG-island No: 39978
tatttccctttatcttcaccaccacaaccacttacctcgtttataacctaatcccgaaaaaaattactcatatttaccgctataccgtctccgcgtccgtaaaaaccaccgcgcaaaaccgttccccatattatttccgcgcttcgacccacgcccccgacaatattcttacgataaatcaacgattaccccccccgaccccgcccccgtacccttcgaccgctacacaatattacactcttattcgtttactcatcccccaccccgtttttttccgatatcgtctccgacaccccaccttaacgcgtctacgacaaacgtaccctccgcgaataaaccgctattttattacccgcccccccaccaccccgcgccccccccgtttccccgtacaaccccgacgtaaaaatattcgtcaacaactttatatcttttaaacaacacacacatatcgaatatacccaaaacaacactttaccattaccccttccgcctaccgcgcacccgaaatatatcccccccacccgcaca

SEQ ID NO: 39979 - DNA, 531 bp, Artificial Sequence
  chemically treated genomic DNA (Homo sapiens) CpG-island No: 39979
tatttttttttatttttattattataattatttgtttcgtttgtggtttaatttcgaagaggattatttatgtttgtcgttgtgtcgttttcgcgttcgtggggattatcgcgtagggtcgttttttatgttgttttcgcgtttcgatttacgttttcggtaatgtttttacgatggattagcggttatttttttcgatttcgttttcgtatttttcggtcgttatatagtgttatatttttattcgtttgtttattttttatttcgttttttttcggtgtcgttttcggtattttattttaacgcgtttgcgataagcgtatttttcgcgagtagatcgttgttttgttattcgtttttttattatttcgcgtttttttcgttttttcgtgtagtttcggcgtgaaagtgttcgttagtagttttgtgttttttggataatatatatatgtcgggtatgtttaagataatattttattattatttttttcgtttatcgcgtattcggaatgtattttttttattcgtata

SEQ ID NO: 39980 - DNA, 531 bp, Artificial Sequence
  chemically treated genomic DNA (Homo sapiens) CpG-island No: 39980
tatacgaataaaaaaaatacattccgaatacgcgataaacgaaaaaaataataataaaatattatcttaaacatacccgacatatatatattatccaaaaaacacaaaactactaacgaacactttcacgccgaaactacacgaaaaaacgaaaaaaacgcgaaataataaaaaaacgaataacaaaacaacgatctactcgcgaaaaatacgcttatcgcaaacgcgttaaaataaaataccgaaaacgacaccgaaaaaaaacgaaataaaaaataaacaaacgaataaaaatataacactatataacgaccgaaaaatacgaaaacgaaatcgaaaaaaataaccgctaatccatcgtaaaaacattaccgaaaacgtaaatcgaaacgcgaaaacaacataaaaaacgaccctacgcgataatccccacgaacgcgaaaacgacacaacgacaaacataaataatcctcttcgaaattaaaccacaaacgaaacaaataattataataataaaaataaaaaaaaata

SEQ ID NO: 39981 - DNA, 608 bp, Artificial Sequence
  chemically treated genomic DNA (Homo sapiens) CpG-island No: 39981
gtcgttgtggttggggtcggttaagtcgaatatcggttatacgtaagcggcggcgggtgtggttggtgtgattaagatggtgatggcgatgcggtacgggtagttgttacgtacgttgtacgtggaatcgtcgtcgtcggaggtggattggtcggcggggacggtttaattttttacggagaatacgttttggtttaggagtggtcgtgttcgtcgggtgggggtgtcgtcgttcgggattagtggtattaacgcgtacgttattttcgaatagttttcgggagtgtcgagttagtttgcggggtcgggttcgggttttgtcgtggatgtttcggtggtgtcgtggatggtgtcgggtaaaatattcgaagcgttattcgcgtaggtaacggcgttgatgatttatttggacgagcgatttgatgttttttcgttggatgttgggtattcgttggcgttgatacggtcggcgttggatgagcgagcggtggtgtttggggttcgatcgtgaaacgttgttgggcggggtgaaagcgttgtttgtcggttttggaggtttttgggttggggatcggatttgcgggcggttttatgttcgcgttcgcgtg

SEQ ID NO: 39982 - DNA, 608 bp, Artificial Sequence
  chemically treated genomic DNA (Homo sapiens) CpG-island No: 39982
cacgcgaacgcgaacataaaaccgcccgcaaatccgatccccaacccaaaaacctccaaaaccgacaaacaacgctttcaccccgcccaacaacgtttcacgatcgaaccccaaacaccaccgctcgctcatccaacgccgaccgtatcaacgccaacgaatacccaacatccaacgaaaaaacatcaaatcgctcgtccaaataaatcatcaacgccgttacctacgcgaataacgcttcgaatattttacccgacaccatccacgacaccaccgaaacatccacgacaaaacccgaacccgaccccgcaaactaactcgacactcccgaaaactattcgaaaataacgtacgcgttaataccactaatcccgaacgacgacacccccacccgacgaacacgaccactcctaaaccaaaacgtattctccgtaaaaaattaaaccgtccccgccgaccaatccacctccgacgacgacgattccacgtacaacgtacgtaacaactacccgtaccgcatcgccatcaccatcttaatcacaccaaccacacccgccgccgcttacgtataaccgatattcgacttaaccgaccccaaccacaacgac

SEQ ID NO: 39983 - DNA, 608 bp, Artificial Sequence
  chemically treated genomic DNA (Homo sapiens) CpG-island No: 39983
tacgcggacgcgggtatggagtcgttcgtagattcggtttttaatttagaaatttttaggatcggtaggtagcgtttttatttcgtttaataacgttttacggtcggattttaagtattatcgttcgtttatttagcgtcgatcgtgttaacgttagcgagtatttaatatttagcgaggagatattaggtcgttcgtttagataggttattaacgtcgttgtttgcgcggatagcgtttcgggtgttttgttcgatattatttacggtattatcggaatatttacgatagaattcgaattcggtttcgtagattgattcggtattttcgggggttgttcgaggatgacgtgcgcgttagtattattgatttcgaacgacgatatttttattcgacgaatacgattatttttgggttagggcgtgtttttcgtaaggagttgaatcgttttcgtcgattaatttattttcggcgacggcgattttacgtgtaacgtgcgtggtagttgttcgtgtcgtatcgttattattattttgattatattagttatattcgtcgtcgtttgcgtatgatcgatgttcgatttgatcgattttaattataacggt

SEQ ID NO: 39984 - DNA, 608 bp, Artificial Sequence
  chemically treated genomic DNA (Homo sapiens) CpG-island No: 39984
accgttataattaaaatcgatcaaatcgaacatcgatcatacgcaaacgacgacgaatataactaatataatcaaaataataataacgatacgacacgaacaactaccacgcacgttacacgtaaaatcgccgtcgccgaaaataaattaatcgacgaaaacgattcaactccttacgaaaaacacgccctaacccaaaaataatcgtattcgtcgaataaaaatatcgtcgttcgaaatcaataatactaacgcgcacgtcatcctcgaacaacccccgaaaataccgaatcaatctacgaaaccgaattcgaattctatcgtaaatattccgataataccgtaaataatatcgaacaaaacacccgaaacgctatccgcgcaaacaacgacgttaataacctatctaaacgaacgacctaatatctcctcgctaaatattaaatactcgctaacgttaacacgatcgacgctaaataaacgaacgataatacttaaaatccgaccgtaaaacgttattaaacgaaataaaaacgctacctaccgatcctaaaaatttctaaattaaaaaccgaatctacgaacgactccatacccgcgtccgcgta

SEQ ID NO: 39985 - DNA, 518 bp, Artificial Sequence
  chemically treated genomic DNA (Homo sapiens) CpG-island No: 39985
  unsure (370)
ttcggtagttttatttattttttttttcgcgtttttttatcgtttttcgtttttttttcggtcggcgtttttgggttattagcgttttttaattttattttgttttcgttttgtttttattttgtcgttcgtcgcgcgtcgcgtttttttttttgtgttttttttatcgtcggtatgttcgttttattacgtatcgtcggcgttttttttacgttcggtatttgtcgtaggtcgtttatagggttttttttgtaatgatcgtcggagttataggtgttatatagagcgtaggagatagattatcgcgacgtcggtgttcgtttatcgatacgtgttttacgtttcgcgtcgtcgttgttgttgcgtcgtntgtttttgtcgttttcgtttcggtattttcgatatcgtttgtgttcgcggttatttttttcgttgttgtgtcgtcgtggtttttgcggagcgcgtcgttagtgtcgttggtcgtatggtggtattcgtttatgggcgttcgttatcgt

SEQ ID NO: 39986 - DNA, 518 bp, Artificial Sequence
  chemically treated genomic DNA (Homo sapiens) CpG-island No: 39986
  unsure (149)
acgataacgaacgcccataaacgaataccaccatacgaccaacgacactaacgacgcgctccgcaaaaaccacgacgacacaacaacgaaaaaaataaccgcgaacacaaacgatatcgaaaataccgaaacgaaaacgacaaaaacanacgacgcaacaacaacgacgacgcgaaacgtaaaacacgtatcgataaacgaacaccgacgtcgcgataatctatctcctacgctctatataacacctataactccgacgatcattacaaaaaaaaccctataaacgacctacgacaaataccgaacgtaaaaaaaacgccgacgatacgtaataaaacgaacataccgacgataaaaaaaacacaaaaaaaaaaacgcgacgcgcgacgaacgacaaaataaaaacaaaacgaaaacaaaataaaattaaaaaacgctaataacccaaaaacgccgaccgaaaaaaaaacgaaaaacgataaaaaaacgcgaaaaaaaaaataaataaaactaccgaa

SEQ ID NO: 39987 - DNA, 518 bp, Artificial Sequence
  chemically treated genomic DNA (Homo sapiens) CpG-island No: 39987
  unsure (149)
acggtggcgggcgtttatgagcgggtgttattatgcggttagcggtattggcggcgcgtttcgtagggattacggcgatataatagcggagggggtggtcgcgggtataaacggtatcgggggtatcggggcgggggcgataggggtangcggcgtaataatagcggcggcgcgaggcgtagagtacgtgtcggtaggcggatatcggcgtcgcggtggtttattttttgcgttttgtgtaatatttgtaatttcggcggttattgtagggggggttttgtgggcggtttgcgataggtatcgggcgtggggggggcgtcgacggtgcgtgatagggcgggtatgtcggcggtgggaaaaatataggggggagagcgcggcgcgcggcgaacggtaaagtgggggtagggcgaaaataaagtggggttaaggggcgttggtagtttaaaggcgtcgatcggaaggggaacggaaggcggtggaaaagcgcggggggaggggtgggtaagattgtcgag

SEQ ID NO: 39988 - DNA, 518 bp, Artificial Sequence
  chemically treated genomic DNA (Homo sapiens) CpG-island No: 39988
  unsure (370)
ctcgacaatcttacccacccctccccccgcgcttttccaccgccttccgttccccttccgatcgacgcctttaaactaccaacgccccttaaccccactttattttcgccctacccccactttaccgttcgccgcgcgccgcgctctcccccctatatttttcccaccgccgacatacccgccctatcacgcaccgtcgacgccccccccacgcccgatacctatcgcaaaccgcccacaaaaccccccctacaataaccgccgaaattacaaatattacacaaaacgcaaaaaataaaccaccgcgacgccgatatccgcctaccgacacgtactctacgcctcgcgccgccgctattattacgccgcntacccctatcgcccccgccccgatacccccgataccgtttatacccgcgaccaccccctccgctattatatcgccgtaatccctacgaaacgcgccgccaataccgctaaccgcataataacacccgctcataaacgcccgccaccgt

SEQ ID NO: 39989 - DNA, 555 bp, Artificial Sequence
  chemically treated genomic DNA (Homo sapiens) CpG-island No: 39989
cgtatcggggtggttcgatttggtggatacgtcgttgcgtagggaggatgtggaggttgaattttgttttatgggtatacgcgtagttttagtatagaagacggaaagcgatatgtggggttttagttacgtcggcgatatacgtttcgacgtttttatatttattcggttatttttcggttttggtacgcgcggagcggtaggtacggttttttaagcgcggaggatagtgggtgcggttcggatcggcggtgttggcggtgcggggcgatgggagcgcggggttgtcggcggcgcgcgggcgtggcggtcgggttgggcgtgcggggcggcgcgtttcgtgtgcgtttttcgcgcgtgcggtgcgttcgtggttcgtttcgcggggggagtgggggcgttcgcgggtgttcgacgtcgagttcgagacgtattatacggcgttcgtcgcggcgtagaaagtcgtcggttagtttagggtaggggaagggaagggaagggaagggaagggaagggagaaaagaaaaagacgagtgaattttatattaaagatag

SEQ ID NO: 39990 - DNA, 555 bp, Artificial Sequence
  chemically treated genomic DNA (Homo sapiens) CpG-island No: 39990
ctatctttaatataaaattcactcgtctttttcttttctcccttcccttcccttcccttcccttcccttcccctaccctaaactaaccgacgactttctacgccgcgacgaacgccgtataatacgtctcgaactcgacgtcgaacacccgcgaacgcccccactccccccgcgaaacgaaccacgaacgcaccgcacgcgcgaaaaacgcacacgaaacgcgccgccccgcacgcccaacccgaccgccacgcccgcgcgccgccgacaaccccgcgctcccatcgccccgcaccgccaacaccgccgatccgaaccgcacccactatcctccgcgcttaaaaaaccgtacctaccgctccgcgcgtaccaaaaccgaaaaataaccgaataaatataaaaacgtcgaaacgtatatcgccgacgtaactaaaaccccacatatcgctttccgtcttctatactaaaactacgcgtatacccataaaacaaaattcaacctccacatcctccctacgcaacgacgtatccaccaaatcgaaccaccccgatacg

SEQ ID NO: 39991 - DNA, 555 bp, Artificial Sequence
  chemically treated genomic DNA (Homo sapiens) CpG-island No: 39991
ttgtttttaatgtaagatttattcgtttttttttttttttttttttttttttttttttttttttttttttttttgttttaggttggtcggcgattttttacgtcgcggcgggcgtcgtgtggtgcgtttcgggttcggcgtcgggtattcgcgggcgtttttatttttttcgcgaagcgggttacgagcgtatcgtacgcgcggggggcgtatacggggcgcgtcgtttcgtacgtttagttcggtcgttacgttcgcgcgtcgtcggtagtttcgcgtttttatcgtttcgtatcgttaatatcgtcgattcggatcgtatttattatttttcgcgtttaagaggtcgtgtttgtcgtttcgcgcgtgttagggtcggaaagtaatcgggtaggtgtgaaggcgtcgaggcgtgtgtcgtcggcgtaattggggttttatatatcgtttttcgttttttgtattgagattgcgcgtgtgtttatggaataaaatttaatttttatattttttttacgtagcggcgtgtttattaggtcggattatttcgatgcg

SEQ ID NO: 39992 - DNA, 555 bp, Artificial Sequence
  chemically treated genomic DNA (Homo sapiens) CpG-island No: 39992
cgcatcgaaataatccgacctaataaacacgccgctacgtaaaaaaaatataaaaattaaattttattccataaacacacgcgcaatctcaatacaaaaaacgaaaaacgatatataaaaccccaattacgccgacgacacacgcctcgacgccttcacacctacccgattactttccgaccctaacacgcgcgaaacgacaaacacgacctcttaaacgcgaaaaataataaatacgatccgaatcgacgatattaacgatacgaaacgataaaaacgcgaaactaccgacgacgcgcgaacgtaacgaccgaactaaacgtacgaaacgacgcgccccgtatacgccccccgcgcgtacgatacgctcgtaacccgcttcgcgaaaaaaataaaaacgcccgcgaatacccgacgccgaacccgaaacgcaccacacgacgcccgccgcgacgtaaaaaatcgccgaccaacctaaaacaaaaaaaaaaaaaaaaaaaaaaaaaaaaaaaaaaaaaaaaaaaaaaaaacgaataaatcttacattaaaaacaa

SEQ ID NO: 39993 - DNA, 679 bp, Artificial Sequence
  chemically treated genomic DNA (Homo sapiens) CpG-island No: 39993
tcggttaagtcgaatatcggttatacgtaagcggcggcgggtgtggttggtgtgattaagatggtgatggcgatgcggtacgggtagttgttacgtacgttgtacgtggaatcgtcgtcgtcggaggtggattggtcggcggggacggtttaattttttacggagaatacgttttggtttaggagtggtcgtgttcgtcgggtgggggtgtcgtcgttcgggattagtggtattaacgcgtacgttattttcgaatagttttcgggagtgtcgagttagtttgcggggtcgggttcgggttttgtcgtggatgtttcggtggtgtcgtggatggtgtcgggtaaaatattcgaagcgttattcgcgtaggtaacggcgttgatgatttatttggacgagcgatttgatgttttttcgttggatgtgggtattcgttggcgttgatacgtcggcgttggatgagcgatcggcgttgtttgggttcgatcggaaacgtttgtgtgcggggtaaagttttttttgtcggtttgaggttttgggttgggacggattttggggggttggggcgtatcgggtttgtgtttcggttaggggttatgggttgggaaggtcggggttttatcggtttttcgggttacgtgtttttttataaattttgttagtttgagttattggttag

SEQ ID NO: 39994 - DNA, 679 bp, Artificial Sequence
  chemically treated genomic DNA (Homo sapiens) CpG-island No: 39994
ctaaccaataactcaaactaacaaaatttataaaaaaacacgtaacccgaaaaaccgataaaaccccgaccttcccaacccataacccctaaccgaaacacaaacccgatacgccccaaccccccaaaatccgtcccaacccaaaacctcaaaccgacaaaaaaaactttaccccgcacacaaacgtttccgatcgaacccaaacaacgccgatcgctcatccaacgccgacgtatcaacgccaacgaatacccacatccaacgaaaaaacatcaaatcgctcgtccaaataaatcatcaacgccgttacctacgcgaataacgcttcgaatattttacccgacaccatccacgacaccaccgaaacatccacgacaaaacccgaacccgaccccgcaaactaactcgacactcccgaaaactattcgaaaataacgtacgcgttaataccactaatcccgaacgacgacacccccacccgacgaacacgaccactcctaaaccaaaacgtattctccgtaaaaaattaaaccgtccccgccgaccaatccacctccgacgacgacgattccacgtacaacgtacgtaacaactacccgtaccgcatcgccatcaccatcttaatcacaccaaccacacccgccgccgcttacgtataaccgatattcgacttaaccga

SEQ ID NO: 39995 - DNA, 679 bp, Artificial Sequence
  chemically treated genomic DNA (Homo sapiens) CpG-island No: 39995
ttggttaatggtttaagttggtaaagtttgtaaaaggatacgtaattcggaaagtcggtaaagtttcggtttttttaatttatgatttttggtcgaaatataaattcgatgcgttttagttttttaagattcgttttaatttaaaattttagatcggtagagagggttttatttcgtatataaacgttttcggtcggatttaggtaacgtcggtcgtttatttagcgtcgacgtgttaacgttagcgagtatttatatttagcgaggagatattaggtcgttcgtttagataggttattaacgtcgttgtttgcgcggatagcgtttcgggtgttttgttcgatattatttacggtattatcggaatatttacgatagaattcgaattcggtttcgtagattgattcggtattttcgggggttgttcgaggatgacgtgcgcgttagtattattgatttcgaacgacgatatttttattcgacgaatacgattatttttgggttagggcgtgtttttcgtaaggagttgaatcgttttcgtcgattaatttattttcggcgacggcgattttacgtgtaacgtgcgtggtagttgttcgtgtcgtatcgttattattattttgattatattagttatattcgtcgtcgtttgcgtatgatcgatgttcgatttgatcga

SEQ ID NO: 39996 - DNA, 679 bp, Artificial Sequence
  chemically treated genomic DNA (Homo sapiens) CpG-island No: 39996
tcgatcaaatcgaacatcgatcatacgcaaacgacgacgaatataactaatataatcaaaataataataacgatacgacacgaacaactaccacgcacgttacacgtaaaatcgccgtcgccgaaaataaattaatcgacgaaaacgattcaactccttacgaaaaacacgccctaacccaaaaataatcgtattcgtcgaataaaaatatcgtcgttcgaaatcaataatactaacgcgcacgtcatcctcgaacaacccccgaaaataccgaatcaatctacgaaaccgaattcgaattctatcgtaaatattccgataataccgtaaataatatcgaacaaaacacccgaaacgctatccgcgcaaacaacgacgttaataacctatctaaacgaacgacctaatatctcctcgctaaatataaatactcgctaacgttaacacgtcgacgctaaataaacgaccgacgttacctaaatccgaccgaaaacgtttatatacgaaataaaaccctctctaccgatctaaaattttaaattaaaacgaatcttaaaaaactaaaacgcatcgaatttatatttcgaccaaaaatcataaattaaaaaaaccgaaactttaccgactttccgaattacgtatccttttacaaactttaccaacttaaaccattaaccaa

SEQ ID NO: 39997 - DNA, 577 bp, Artificial Sequence
  chemically treated genomic DNA (Homo sapiens) CpG-island No: 39997
gtttagcgttgtggcggcgtggggatatttgcggcggtcgtagtttcgttttcgcgttttttttttttttttttttttttttttttttttttttcgcgtttttattcgcgcggttcgcgttaggtttaggttttttatgattttttcgaaggtcgtcgtttttttcgtttgtttttggttgtgtagtgcgattttttcgttaaattttcgcggattgttcgaagtcgttattttttcgtcgtttttttttttttttattttttttttattttttggttttttttattttcgggagttatcgcgtaggcgtcggtcgggtttacggtcggagagaacgcgtatgttgtaagtacggtttagagcgtggtttcggcgcgcgggagaggcgtgtggcgttggggtgaatacgtttgcgcgtgtttgggtaacgcgtcgggagtttgggaggggcgtgtttacgtaggcgtattgtagtgcgcgtggttcgttggatagcggttcgggttttgttttattagcgagggatttgagtggtagaggatacggtagaattgatgtttgtatttattggatttta

SEQ ID NO: 39998 - DNA, 577 bp, Artificial Sequence
  chemically treated genomic DNA (Homo sapiens) CpG-island No: 39998
taaaatccaataaatacaaacatcaattctaccgtatcctctaccactcaaatccctcgctaataaaacaaaacccgaaccgctatccaacgaaccacgcgcactacaatacgcctacgtaaacacgcccctcccaaactcccgacgcgttacccaaacacgcgcaaacgtattcaccccaacgccacacgcctctcccgcgcgccgaaaccacgctctaaaccgtacttacaacatacgcgttctctccgaccgtaaacccgaccgacgcctacgcgataactcccgaaaataaaaaaaaccaaaaaataaaaaaaaaataaaaaaaaaaaaaaacgacgaaaaaataacgacttcgaacaatccgcgaaaatttaacgaaaaaatcgcactacacaaccaaaaacaaacgaaaaaaacgacgaccttcgaaaaaatcataaaaaacctaaacctaacgcgaaccgcgcgaataaaaacgcgaaaaaaaaaaaaaaaaaaaaaaaaaaaaaaaaaaaaaacgcgaaaacgaaactacgaccgccgcaaatatccccacgccgccacaacgctaaac

SEQ ID NO: 39999 - DNA, 577 bp, Artificial Sequence
  chemically treated genomic DNA (Homo sapiens) CpG-island No: 39999
tggagtttagtgaatgtaggtattagttttgtcgtgttttttgttatttaagtttttcgttgatgggataggattcggatcgttgtttagcgaattacgcgtattgtagtgcgtttgcgtaggtacgttttttttaggttttcgacgcgttgtttaggtacgcgtaggcgtgtttattttaacgttatacgtttttttcgcgcgtcggagttacgttttgggtcgtgtttgtagtatgcgcgtttttttcggtcgtgggttcggtcggcgtttgcgcggtggttttcgagagtggggggggttaggaggtggaggaggagtaggagaaggaggaggcggcgagaagatggcgatttcgaataattcgcggaaatttagcgagaagatcgtattgtataattagaagtaggcggaggagacggcggttttcgaggaggttatgaaggatttgagtttgacgcgggtcgcgcgggtgagagcgcgggggaggggaggggaggagggaggggaggaggaagagacgcgggggcggggttgcggtcgtcgtaggtgtttttacgtcgttatagcgttgagt

SEQ ID NO: 40000 - DNA, 577 bp, Artificial Sequence
  chemically treated genomic DNA (Homo sapiens) CpG-island No: 40000
actcaacgctataacgacgtaaaaacacctacgacgaccgcaaccccgcccccgcgtctcttcctcctcccctccctcctcccctcccctcccccgcgctctcacccgcgcgacccgcgtcaaactcaaatccttcataacctcctcgaaaaccgccgtctcctccgcctacttctaattatacaatacgatcttctcgctaaatttccgcgaattattcgaaatcgccatcttctcgccgcctcctccttctcctactcctcctccacctcctaaccccccccactctcgaaaaccaccgcgcaaacgccgaccgaacccacgaccgaaaaaaacgcgcatactacaaacacgacccaaaacgtaactccgacgcgcgaaaaaaacgtataacgttaaaataaacacgcctacgcgtacctaaacaacgcgtcgaaaacctaaaaaaaacgtacctacgcaaacgcactacaatacgcgtaattcgctaaacaacgatccgaatcctatcccatcaacgaaaaacttaaataacaaaaaacacgacaaaactaatacctacattcactaaactcca

SEQ ID NO: 40001 - DNA, 736 bp, Artificial Sequence
  chemically treated genomic DNA (Homo sapiens) CpG-island No: 40001
tggttttcgggggtatattttatatcgatagcgatcgagttgttagtagtaaggtgttttagttatttgagttaggagtacgttattttcgcgagtttacggagatggaattgggttgtagttacgcgggcgtggttgtgttggataatttcgtgtacgtggtaggcggttagtatttgtagtatcgtagtggcgaaggcgttgtggacgtttgttatcgttatgatttatagcgtaatcgttggttgcggttgcgagtattgcgtgagagtcgcgtgtagttttagtttattgtattgggagggttgttgtatgttatcggtggtcgaaatcgcgcgggtagtttggcgtttgtggagcgttattgtttacgtcgtgatagttgggattttgtttgtttatttaagcgtcgtatttggggttatgcgggtgtcgtagttgttggtcgtttttatattttaggtggttatggcgttttagcggaggataagaaggcgttgtagtgttatgatttagtagtcgatcgttgggagtttagggcgtttatgcgtgagtttcgcgtgttgtacgtaatgttgggcgttgttggtcgtatttatgttttaggtggtcgtatggattacgtggatcgttgtttcgatgtgttggttgtggagtattacgtgtcggatgtcgattagtggattagtgtgatatttatgcgagttggttagtcggaagttggttgttgtttatt

SEQ ID NO: 40002 - DNA, 736 bp, Artificial Sequence
  chemically treated genomic DNA (Homo sapiens) CpG-island No: 40002
aataaacaacaaccaacttccgactaaccaactcgcataaatatcacactaatccactaatcgacatccgacacgtaatactccacaaccaacacatcgaaacaacgatccacgtaatccatacgaccacctaaaacataaatacgaccaacaacgcccaacattacgtacaacacgcgaaactcacgcataaacgccctaaactcccaacgatcgactactaaatcataacactacaacgccttcttatcctccgctaaaacgccataaccacctaaaatataaaaacgaccaacaactacgacacccgcataaccccaaatacgacgcttaaataaacaaacaaaatcccaactatcacgacgtaaacaataacgctccacaaacgccaaactacccgcgcgatttcgaccaccgataacatacaacaaccctcccaatacaataaactaaaactacacgcgactctcacgcaatactcgcaaccgcaaccaacgattacgctataaatcataacgataacaaacgtccacaacgccttcgccactacgatactacaaatactaaccgcctaccacgtacacgaaattatccaacacaaccacgcccgcgtaactacaacccaattccatctccgtaaactcgcgaaaataacgtactcctaactcaaataactaaaacaccttactactaacaactcgatcgctatcgatataaaatatacccccgaaaacca

SEQ ID NO: 40003 - DNA, 736 bp, Artificial Sequence
  chemically treated genomic DNA (Homo sapiens) CpG-island No: 40003
agtagatagtagttagttttcgattgattagttcgtatgggtgttatattggtttattggtcggtattcggtacgtagtattttatagttagtatatcgaagtagcggtttacgtggtttatgcggttatttagggtatagatgcggttagtagcgtttaatattgcgtgtagtacgcggggtttacgtatgggcgttttgggtttttagcggtcggttgttggattatagtattgtagcgtttttttgtttttcgttgagacgttataattatttgagatgtagaggcgattagtagttgcggtattcgtatggttttaggtacggcgtttgagtgggtaggtaaaattttagttgttacggcgtgggtagtagcgttttatagacgttaggttgttcgcgcgatttcggttatcggtggtatataatagtttttttagtgtagtgagttggaattgtacgcggtttttacgtagtgttcgtagtcgtagttagcgattgcgttgtggattatagcggtagtaggcgtttatagcgttttcgttattgcggtgttgtagatgttggtcgtttgttacgtatacgaagttatttagtatagttacgttcgcgtggttatagtttagttttattttcgtgagttcgcggaagtggcgtgtttttggtttaggtaattggaatattttgttgttgatagttcggtcgttgtcggtataaggtgtgttttcgaaggtta

SEQ ID NO: 40004 - DNA, 736 bp, Artificial Sequence
  chemically treated genomic DNA (Homo sapiens) CpG-island No: 40004
taaccttcgaaaacacaccttataccgacaacgaccgaactatcaacaacaaaatattccaattacctaaaccaaaaacacgccacttccgcgaactcacgaaaataaaactaaactataaccacgcgaacgtaactatactaaataacttcgtatacgtaacaaacgaccaacatctacaacaccgcaataacgaaaacgctataaacgcctactaccgctataatccacaacgcaatcgctaactacgactacgaacactacgtaaaaaccgcgtacaattccaactcactacactaaaaaaactattatataccaccgataaccgaaatcgcgcgaacaacctaacgtctataaaacgctactacccacgccgtaacaactaaaattttacctacccactcaaacgccgtacctaaaaccatacgaataccgcaactactaatcgcctctacatctcaaataattataacgtctcaacgaaaaacaaaaaaacgctacaatactataatccaacaaccgaccgctaaaaacccaaaacgcccatacgtaaaccccgcgtactacacgcaatattaaacgctactaaccgcatctataccctaaataaccgcataaaccacgtaaaccgctacttcgatatactaactataaaatactacgtaccgaataccgaccaataaaccaatataacacccatacgaactaatcaatcgaaaactaactactatctact

SEQ ID NO: 40005 - DNA, 536 bp, Artificial Sequence
  chemically treated genomic DNA (Homo sapiens) CpG-island No: 40005
  unsure (403, 517)
gggtttttttgcggtgggtcgttttttcgggggttcgttttcggcgtcgtcggcggtttttttttttcggggtttcgggcgttttcgtttttttcgcggcgttttttttttttttgtcgttttttttttttcgcgtttgtttttttgttttttggttttcgttttttttcgttttcgcgggcggttgtttgcggttcgcgttgttttttttttttcgtttttcgtcgcgcggtcgcgcgcgcgcgtttcgcgttgttggtcgggcgtcgtttggtcgcgggggggttgtgttggtcgcggtttttgttcgttttttcgggggtcgcggtcgcgcgtttgcgtcggcgcgtcggtcgcggggtcggcgttcggttgcgttgtcgtggttcgcgcgggttcgggncgcgtttggtggcggtggcgtggcgttcgtcgcgtttttttttgtgtcgtttttgtttcgttcgtcgggggttttcggtcgtttttcggcgttgtttcgtttttttcgggcggnggttcgtgcgggcggcgtt

SEQ ID NO: 40006 - DNA, 536 bp, Artificial Sequence
  chemically treated genomic DNA (Homo sapiens) CpG-island No: 40006
  unsure (20, 134)
aacgccgcccgcacgaaccnccgcccgaaaaaaacgaaacaacgccgaaaaacgaccgaaaacccccgacgaacgaaacaaaaacgacacaaaaaaaaacgcgacgaacgccacgccaccgccaccaaacgcgncccgaacccgcgcgaaccacgacaacgcaaccgaacgccgaccccgcgaccgacgcgccgacgcaaacgcgcgaccgcgacccccgaaaaaacgaacaaaaaccgcgaccaacacaacccccccgcgaccaaacgacgcccgaccaacaacgcgaaacgcgcgcgcgcgaccgcgcgacgaaaaacgaaaaaaaaaaaacaacgcgaaccgcaaacaaccgcccgcgaaaacgaaaaaaaacgaaaaccaaaaaacaaaaaaacaaacgcgaaaaaaaaaaaacgacaaaaaaaaaaaaaacgccgcgaaaaaaacgaaaacgcccgaaaccccgaaaaaaaaaaaccgccgacgacgccgaaaacgaacccccgaaaaaacgacccaccgcaaaaaaaccc

SEQ ID NO: 40007 - DNA, 536 bp, Artificial Sequence
  chemically treated genomic DNA (Homo sapiens) CpG-island No: 40007
  unsure (20, 134)
ggcgtcgttcgtacgggttntcgttcggagagggcgagatagcgtcgggaggcggtcggagattttcggcgagcgggataaaagcgatataaggagaggcgcggcgagcgttacgttatcgttattagacgcgnttcgggttcgcgcggattacgatagcgtagtcgggcgtcggtttcgcgatcggcgcgtcggcgtaggcgcgcgatcgcggttttcgggagggcgggtaaggatcgcggttagtataattttttcgcggttaagcggcgttcggttagtagcgcgaggcgcgcgcgcgcgatcgcgcggcggaggacgaggagagggaggtagcgcgagtcgtaggtagtcgttcgcgggagcggagaggagcgggagttagagggtagggaggtaggcgcgagaggaggagagcgataggaagaggaagaacgtcgcgaggagggcggaagcgttcggagtttcgagggagaggagtcgtcggcggcgtcggagacgaattttcggagagacggtttatcgtaggggaattt

SEQ ID NO: 40008 - DNA, 536 bp, Artificial Sequence
  chemically treated genomic DNA (Homo sapiens) CpG-island No: 40008
  unsure (403, 517)
aaattcccctacgataaaccgtctctccgaaaattcgtctccgacgccgccgacgactcctctccctcgaaactccgaacgcttccgccctcctcgcgacgttcttcctcttcctatcgctctcctcctctcgcgcctacctccctaccctctaactcccgctcctctccgctcccgcgaacgactacctacgactcgcgctacctccctctcctcgtcctccgccgcgcgatcgcgcgcgcgcgcctcgcgctactaaccgaacgccgcttaaccgcgaaaaaattatactaaccgcgatccttacccgccctcccgaaaaccgcgatcgcgcgcctacgccgacgcgccgatcgcgaaaccgacgcccgactacgctatcgtaatccgcgcgaacccgaancgcgtctaataacgataacgtaacgctcgccgcgcctctccttatatcgcttttatcccgctcgccgaaaatctccgaccgcctcccgacgctatctcgccctctccgaacganaacccgtacgaacgacgcc

SEQ ID NO: 40009 - DNA, 587 bp, Artificial Sequence
  chemically treated genomic DNA (Homo sapiens) CpG-island No: 40009
tttttttttagatttaatcggtttttttcggtatttacggttcggtttttatttttggtttcgttcggtttttttttttttttcgtttaatttttattttacgttttatttttcgttttttttcggttttcgtttcgaatagcgtttttttttttcgttttttttttttttcgttttagttcgtttttttgtttatttcgtagcggtatttttcgtttttttttttaatttttttttttcgattatttttcgttattttttcgtacgtttttttttttcgggtttttttgtttttatacgcgttttcgagattttcgatcgtatatatatattttttcgttttttttttttttttacgttttatatttatttttcgtttttttgatttttcgttttttttttttcgcgtttaggatatttttttattataaattttcgagggttttataatattttttttttttttcgaacggttttttttttttaaaatattttttataaattttttgtttagttttacgttttcgtttttttttattttttcgtttagttttttttaaaggttttttatttttttttttagcgta

SEQ ID NO: 40010 - DNA, 587 bp, Artificial Sequence
  chemically treated genomic DNA (Homo sapiens) CpG-island No: 40010
tacgctaaaaaaaaaaataaaaaacctttaaaaaaaactaaacgaaaaaataaaaaaaaacgaaaacgtaaaactaaacaaaaaatttataaaaaatattttaaaaaaaaaaaaccgttcgaaaaaaaaaaaaaatattataaaaccctcgaaaatttataataaaaaaatatcctaaacgcgaaaaaaaaaaaacgaaaaatcaaaaaaacgaaaaataaatataaaacgtaaaaaaaaaaaaaaaacgaaaaaatatatatatacgatcgaaaatctcgaaaacgcgtataaaaacaaaaaaacccgaaaaaaaaaaacgtacgaaaaaataacgaaaaataatcgaaaaaaaaaaattaaaaaaaaaaacgaaaaataccgctacgaaataaacaaaaaaacgaactaaaacgaaaaaaaaaaaaaacgaaaaaaaaaaacgctattcgaaacgaaaaccgaaaaaaaacgaaaaataaaacgtaaaataaaaattaaacgaaaaaaaaaaaaaaaccgaacgaaaccaaaaataaaaaccgaaccgtaaataccgaaaaaaaccgattaaatctaaaaaaaaa

SEQ ID NO: 40011 - DNA, 587 bp, Artificial Sequence
  chemically treated genomic DNA (Homo sapiens) CpG-island No: 40011
tgcgttgggagaagggatggggggtttttggggggggttgggcgggagagtagaggggggcgggggcgtggaattgggtaaggagtttgtggagggtgttttgggggagggaaatcgttcggggagagggagaggtgttgtggagttttcgagagtttgtggtgagagagtgttttgggcgcggggggagagaggcgggaggttagagaagcgaggggtgggtgtagggcgtaggggaggaggggggacgagagagtgtgtgtgtgcggtcgagagtttcgagagcgcgtgtgggggtagagaagttcggggagaggaggcgtgcggaaaggtggcggaaggtggtcggaggagagaggttggaggggggagcggaaagtgtcgttgcggagtggataggaagacgggttgagacggggggagggagaggcgaggaggagaggcgttgttcggggcggaggtcgaggagaggcggggggtgaagcgtggagtggaggttgggcgagggaagggggagggtcgggcggggttaggagtgaaggtcgggtcgtggatgtcgggaggggtcggttgagtttgggggaagg

SEQ ID NO: 40012 - DNA, 587 bp, Artificial Sequence
  chemically treated genomic DNA (Homo sapiens) CpG-island No: 40012
ccttcccccaaactcaaccgacccctcccgacatccacgacccgaccttcactcctaaccccgcccgaccctcccccttccctcgcccaacctccactccacgcttcaccccccgcctctcctcgacctccgccccgaacaacgcctctcctcctcgcctctccctccccccgtctcaacccgtcttcctatccactccgcaacgacactttccgctcccccctccaacctctctcctccgaccaccttccgccacctttccgcacgcctcctctccccgaacttctctacccccacacgcgctctcgaaactctcgaccgcacacacacactctctcgtcccccctcctcccctacgccctacacccacccctcgcttctctaacctcccgcctctctccccccgcgcccaaaacactctctcaccacaaactctcgaaaactccacaacacctctccctctccccgaacgatttccctcccccaaaacaccctccacaaactccttacccaattccacgcccccgcccccctctactctcccgcccaaccccccccaaaaaccccccatcccttctcccaacgca

SEQ ID NO: 40013 - DNA, 513 bp, Artificial Sequence
  chemically treated genomic DNA (Homo sapiens) CpG-island No: 40013
cgtcggtaaagggtagaattaatgaagggtttacgggggttgggatttaggcggtttgttcgtgtcgcgtattttcggttttcgtcggaagttgtttagcgtatcgtcgagtttttgggttttttacgtcgttcgttagtgcggggtttagtatagtttattttgtagttttaggtttcgttgtcgtagtttggtatttcgtttttcgatttttttgcgtaggagttttatttgtaattgcgatattttgttaggtcgtttagtcgtttgtatcgagatagatgtacgtgcgtaattgtaagtcggaagtgtatcgttggagtttgcggattcgcggggcggaaatgtttcgggcggaaatagtttttggtgagagttgggttttttttggagatcgaattttttgtagcgttttttggcgattggaggacgattcgttgtgaattcgttcgttttgttaatggttttagagttttataaattaagattgtataataaaaaagtcgattggaa

SEQ ID NO: 40014 - DNA, 513 bp, Artificial Sequence
  chemically treated genomic DNA (Homo sapiens) CpG-island No: 40014
ttccaatcgacttttttattatacaatcttaatttataaaactctaaaaccattaacaaaacgaacgaattcacaacgaatcgtcctccaatcgccaaaaaacgctacaaaaaattcgatctccaaaaaaaacccaactctcaccaaaaactatttccgcccgaaacatttccgccccgcgaatccgcaaactccaacgatacacttccgacttacaattacgcacgtacatctatctcgatacaaacgactaaacgacctaacaaaatatcgcaattacaaataaaactcctacgcaaaaaaatcgaaaaacgaaataccaaactacgacaacgaaacctaaaactacaaaataaactatactaaaccccgcactaacgaacgacgtaaaaaacccaaaaactcgacgatacgctaaacaacttccgacgaaaaccgaaaatacgcgacacgaacaaaccgcctaaatcccaacccccgtaaacccttcattaattctaccctttaccgacg

SEQ ID NO: 40015 - DNA, 513 bp, Artificial Sequence
  chemically treated genomic DNA (Homo sapiens) CpG-island No: 40015
ttttaatcggtttttttattgtgtagttttggtttgtaaaattttggggttattagtaaggcgaacgggtttataacgagtcgttttttagtcgttagggggcgttgtaggaaattcggtttttaaagggaatttagtttttattaggaattgttttcgttcgaagtattttcgtttcgcgggttcgtaggttttagcggtatattttcgatttgtaattgcgtacgtgtatttgtttcggtgtagacggttgggcggtttggtaagatgtcgtagttatagatgaaatttttgcgtaggaagatcgagaagcggaatgttaagttgcggtagcgaaatttgaagttgtaaggtgagttgtgttgaatttcgtattggcgaacgacgtggggaatttaggaattcggcggtgcgttgggtagttttcggcgggagtcggggatgcgcggtacgagtaggtcgtttgggttttagttttcgtggattttttattggttttgttttttgtcggcg

SEQ ID NO: 40016 - DNA, 513 bp, Artificial Sequence
  chemically treated genomic DNA (Homo sapiens) CpG-island No: 40016
cgccgacaaaaaacaaaaccaataaaaaatccacgaaaactaaaacccaaacgacctactcgtaccgcgcatccccgactcccgccgaaaactacccaacgcaccgccgaattcctaaattccccacgtcgttcgccaatacgaaattcaacacaactcaccttacaacttcaaatttcgctaccgcaacttaacattccgcttctcgatcttcctacgcaaaaatttcatctataactacgacatcttaccaaaccgcccaaccgtctacaccgaaacaaatacacgtacgcaattacaaatcgaaaatataccgctaaaacctacgaacccgcgaaacgaaaatacttcgaacgaaaacaattcctaataaaaactaaattccctttaaaaaccgaatttcctacaacgccccctaacgactaaaaaacgactcgttataaacccgttcgccttactaataaccccaaaattttacaaaccaaaactacacaataaaaaaaccgattaaaa

SEQ ID NO: 40017 - DNA, 523 bp, Artificial Sequence
  chemically treated genomic DNA (Homo sapiens) CpG-island No: 40017
  unsure (120, 135, 465)
tgtgtgtaggtgcgggtgtgtgggtttcgatgtgcgggtgcgggtgtgtaagtatcggtgtgcgggtatcggtgtgcgggtgtgtgaatgtgggtgcgggtgtgcgggtgtgtgaatgtngatttcggtgtgttngtgtcggggtgtcgtggtgtgggtgtcggtgtgtgggtttttaattttcggtgtttaagttcggtattgcgggttcggggttgtcggttttcgggttttttttttttcgcggtggtttttggggtttggacgcgggtagtcggtggagcgggtgatttcggttttgtttggtcgtcgcgcggttgttggttgtttttcgtttttttcgtgtttcgtattgtatttttcgggtgtcgcggcgttgtcgatagagggtgttcgggtgtgtggagcgtggtggggcgtagttggagggtggcggtgcgcgagaggcgggcgtcggttattttnacgggtttacgtcgttcgtttttcggtgaattgtgcgttgatgcggacggagcgtagg

SEQ ID NO: 40018 - DNA, 523 bp, Artificial Sequence
  chemically treated genomic DNA (Homo sapiens) CpG-island No: 40018
  unsure (59, 389, 404)
cctacgctccgtccgcatcaacgcacaattcaccgaaaaacgaacgacgtaaacccgtnaaaataaccgacgcccgcctctcgcgcaccgccaccctccaactacgccccaccacgctccacacacccgaacaccctctatcgacaacgccgcgacacccgaaaaatacaatacgaaacacgaaaaaaacgaaaaacaaccaacaaccgcgcgacgaccaaacaaaaccgaaatcacccgctccaccgactacccgcgtccaaaccccaaaaaccaccgcgaaaaaaaaaaaacccgaaaaccgacaaccccgaacccgcaataccgaacttaaacaccgaaaattaaaaacccacacaccgacacccacaccacgacaccccgacacnaacacaccgaaatcnacattcacacacccgcacacccgcacccacattcacacacccgcacaccgatacccgcacaccgatacttacacacccgcacccgcacatcgaaacccacacacccgcacctacacaca

SEQ ID NO: 40019 - DNA, 523 bp, Artificial Sequence
  chemically treated genomic DNA (Homo sapiens) CpG-island No: 40019
  unsure (59, 389, 404)
tttgcgtttcgttcgtattagcgtatagtttatcggagaacgaacggcgtagattcgtnggagtaatcggcgttcgtttttcgcgtatcgttattttttagttacgttttattacgttttatatattcggatattttttgtcgatagcgtcgcgatattcgagagatataatacgaagtacggaaggagcgaggagtagttagtagtcgcgcggcgattaggtagggtcgggattattcgttttatcggttattcgcgtttaagttttagaaattatcgcgaaagaggggggattcgagaatcggtaatttcgaattcgtaatgtcgaatttagatatcgggagttggaaatttatatatcggtatttatattacggtatttcggtatngatatatcggaattnatatttatatattcgtatattcgtatttatatttatatattcgtatatcggtattcgtatatcggtatttgtatattcgtattcgtatatcggaatttatatattcgtatttgtatata

SEQ ID NO: 40020 - DNA, 523 bp, Artificial Sequence
  chemically treated genomic DNA (Homo sapiens) CpG-island No: 40020
  unsure (120, 135, 465)
tatatacaaatacgaatatataaattccgatatacgaatacgaatatacaaataccgatatacgaataccgatatacgaatatataaatataaatacgaatatacgaatatataaatatnaattccgatatatcnataccgaaataccgtaatataaataccgatatataaatttccaactcccgatatctaaattcgacattacgaattcgaaattaccgattctcgaatcccccctctttcgcgataatttctaaaacttaaacgcgaataaccgataaaacgaataatcccgaccctacctaatcgccgcgcgactactaactactcctcgctccttccgtacttcgtattatatctctcgaatatcgcgacgctatcgacaaaaaatatccgaatatataaaacgtaataaaacgtaactaaaaaataacgatacgcgaaaaacgaacgccgattactccnacgaatctacgccgttcgttctccgataaactatacgctaatacgaacgaaacgcaaa

SEQ ID NO: 40021 - DNA, 536 bp, Artificial Sequence
  chemically treated genomic DNA (Homo sapiens) CpG-island No: 40021
cgcggtatggagtttttcgattcgatttagtttttcgagacgttcgggtttgttgtcgaaagttttataatgtttttatgtataggcgatttcgtaacgttcgtcgttaatttttacgcgtaatttagttgagtaaaatcggagttaaattatattttttggagggttaaggattagtattcgatggatatttttttgcgtaggtacgtttttcgacgattgacgcgtcgtcgcgattgaatcgtaagtaattcgcgacggtgtcgacgtatcgtatattggcgaaatataggaggtatacgaagtttgcgatagacgcgtgtataagagtttcgcgtataggttttatacgtataggttcgttcggtagtgttatagacgttcgacgcgaatagagtatacgtcgttgtttaatagatagtacgattatcgattatattacgcgtatagtagtcgtaagttcgatatgatgtcgtagcggtattcgcgttatttttacgggcggagatagtatttattattacgcggatatatat

SEQ ID NO: 40022 - DNA, 536 bp, Artificial Sequence
  chemically treated genomic DNA (Homo sapiens) CpG-island No: 40022
atatatatccgcgtaataataaatactatctccgcccgtaaaaataacgcgaataccgctacgacatcatatcgaacttacgactactatacgcgtaatataatcgataatcgtactatctattaaacaacgacgtatactctattcgcgtcgaacgtctataacactaccgaacgaacctatacgtataaaacctatacgcgaaactcttatacacgcgtctatcgcaaacttcgtatacctcctatatttcgccaatatacgatacgtcgacaccgtcgcgaattacttacgattcaatcgcgacgacgcgtcaatcgtcgaaaaacgtacctacgcaaaaaaatatccatcgaatactaatccttaaccctccaaaaaatataatttaactccgattttactcaactaaattacgcgtaaaaattaacgacgaacgttacgaaatcgcctatacataaaaacattataaaactttcgacaacaaacccgaacgtctcgaaaaactaaatcgaatcgaaaaactccataccgcg

SEQ ID NO: 40023 - DNA, 536 bp, Artificial Sequence
  chemically treated genomic DNA (Homo sapiens) CpG-island No: 40023
gtgtgtgttcgcgtggtgatagatgttgttttcgttcgtgggagtggcgcgagtatcgttgcggtattatgtcgggtttacggttattgtgcgcgtagtgtggtcggtaatcgtgttgtttgttgagtagcggcgtgtattttgttcgcgtcgagcgtttgtagtattgtcgagcgagtttgtacgtgtggaatttgtacgcgagatttttgtgtacgcgtttgtcgtaagtttcgtatgttttttgtgtttcgttagtgtgcgatgcgtcggtatcgtcgcgggttgtttacggtttaatcgcgacggcgcgttagtcgtcgaaaagcgtgtttgcgtaaaagggtgtttatcgggtgttgatttttggttttttagaaagtgtggtttgatttcgattttatttagttggattgcgcgtgaaagttgacggcgagcgttgcggggtcgtttgtgtatgggggtattgtaaggttttcgatagtaggttcgagcgtttcgaggagttaggtcgggtcgaagggttttatatcgcg

SEQ ID NO: 40024 - DNA, 536 bp, Artificial Sequence
  chemically treated genomic DNA (Homo sapiens) CpG-island No: 40024
cgcgatataaaacccttcgacccgacctaactcctcgaaacgctcgaacctactatcgaaaaccttacaatacccccatacacaaacgaccccgcaacgctcgccgtcaactttcacgcgcaatccaactaaataaaatcgaaatcaaaccacactttctaaaaaaccaaaaatcaacacccgataaacacccttttacgcaaacacgcttttcgacgactaacgcgccgtcgcgattaaaccgtaaacaacccgcgacgataccgacgcatcgcacactaacgaaacacaaaaaacatacgaaacttacgacaaacgcgtacacaaaaatctcgcgtacaaattccacacgtacaaactcgctcgacaatactacaaacgctcgacgcgaacaaaatacacgccgctactcaacaaacaacacgattaccgaccacactacgcgcacaataaccgtaaacccgacataataccgcaacgatactcgcgccactcccacgaacgaaaacaacatctatcaccacgcgaacacacac

SEQ ID NO: 40025 - DNA, 632 bp, Artificial Sequence
  chemically treated genomic DNA (Homo sapiens) CpG-island No: 40025
ttcggttaacgttgtcgtcggtgaagattttcggtagtaagatcgttttgtcgtttatggataagtttagtgttatgacgttaattatagtgttgtttgcgttcgattattttattatttataattatgagggtattcgattattttgtatttagatgtaggttacggcggaatatattaagagaggtttcgtttaagtatttgtttattattattttttcgtcggtcgtattttttgcgacgacgacggcggcgatttttatatcgattgtatcggcgaggagttcggagcgacgttcgcgtgttatcgataattagtttattgacgtcgagacggcggtggtgtagtagttcgtttttaattgtacgttcgacgacgattatttattttattgtttgttgtgggtgtaggttattacgttgttttgcggaggtttcgtcgtcggggtgatatggaattatgtcgtggttgatggtttcggtatagtatagtttatataagtcgtcggcgagttcgttcgtggtttgttatcggcgtcgttcgttattttagttaggttagatgattaaaataacgtcgtttttttttttattatggtttttatgtagttagtagataggtataaggtatt

SEQ ID NO: 40026 - DNA, 632 bp, Artificial Sequence
  chemically treated genomic DNA (Homo sapiens) CpG-island No: 40026
aataccttatacctatctactaactacataaaaaccataataaaaaaaaaaacgacgttattttaatcatctaacctaactaaaataacgaacgacgccgataacaaaccacgaacgaactcgccgacgacttatataaactatactataccgaaaccatcaaccacgacataattccatatcaccccgacgacgaaacctccgcaaaacaacgtaataacctacacccacaacaaacaataaaataaataatcgtcgtcgaacgtacaattaaaaacgaactactacaccaccgccgtctcgacgtcaataaactaattatcgataacacgcgaacgtcgctccgaactcctcgccgatacaatcgatataaaaatcgccgccgtcgtcgtcgcaaaaaatacgaccgacgaaaaaataataataaacaaatacttaaacgaaacctctcttaatatattccgccgtaacctacatctaaatacaaaataatcgaataccctcataattataaataataaaataatcgaacgcaaacaacactataattaacgtcataacactaaacttatccataaacgacaaaacgatcttactaccgaaaatcttcaccgacgacaacgttaaccgaa

SEQ ID NO: 40027 - DNA, 632 bp, Artificial Sequence
  chemically treated genomic DNA (Homo sapiens) CpG-island No: 40027
ggtattttgtgtttgtttgttaattgtatgaaggttatggtgaagggagaaacggcgttgttttggttatttaatttgattggggtgacggacggcgtcgatggtaggttacgggcgagttcgtcgacggtttgtatgaattgtgttatgtcgaaattattagttacggtatggttttatgttatttcgacgacgaagttttcgtaggatagcgtggtgatttgtatttatagtagatagtgaggtaggtggtcgtcgtcgggcgtgtagttgaaggcgagttgttgtattatcgtcgtttcggcgttagtgggttggttgtcgatgatacgcgaacgtcgtttcgagtttttcgtcggtgtagtcgatgtaaaaatcgtcgtcgtcgtcgtcgtaggaaatgcggtcggcgaaaggatagtagtggataagtgtttgagcgagattttttttgatgtatttcgtcgtggtttgtatttgaatgtaggatgatcggatgtttttatggttatggatgatgggatggtcgaacgtaagtagtattgtggttggcgttatggtattaagtttgtttataggcgatagaacgattttgttgtcggaagtttttatcggcggtagcgttggtcgga

SEQ ID NO: 40028 - DNA, 632 bp, Artificial Sequence
  chemically treated genomic DNA (Homo sapiens) CpG-island No: 40028
tccgaccaacgctaccgccgataaaaacttccgacaacaaaatcgttctatcgcctataaacaaacttaataccataacgccaaccacaatactacttacgttcgaccatcccatcatccataaccataaaaacatccgatcatcctacattcaaatacaaaccacgacgaaatacatcaaaaaaaatctcgctcaaacacttatccactactatcctttcgccgaccgcatttcctacgacgacgacgacgacgatttttacatcgactacaccgacgaaaaactcgaaacgacgttcgcgtatcatcgacaaccaacccactaacgccgaaacgacgataatacaacaactcgccttcaactacacgcccgacgacgaccacctacctcactatctactataaatacaaatcaccacgctatcctacgaaaacttcgtcgtcgaaataacataaaaccataccgtaactaataatttcgacataacacaattcatacaaaccgtcgacgaactcgcccgtaacctaccatcgacgccgtccgtcaccccaatcaaattaaataaccaaaacaacgccgtttctcccttcaccataaccttcatacaattaacaaacaaacacaaaatacc

SEQ ID NO: 40029 - DNA, 708 bp, Artificial Sequence
  chemically treated genomic DNA (Homo sapiens) CpG-island No: 40029
gcggtgggggcgcggttcggcgtcgtgggtcggttcggtagtgtgggggcgcggcggcggtgtggcggtagcggcgttgtttcgcggtggcggcgtttcgtagtagtgggggcgcggttcggcggcgtgggggtttagcggcgtgggggcgcggcggcggcggggtcgtttcgcggtggcggtatttcgcggtggtaggggcgcggttcggcggtgtgggggtttagcggcgtgggggcgcggcggcggcgtgtcgtggcggcggtatgggggttcggcggcgtgggggcgcggcggcggcgtgttacggcggcggtatggggggcgtaacggagcggttcggcggcgtacgtcggcgtcggcgtcgtcggcggtggcggtcgcgtcgaagttattcgtcggtaaaagagagagagttatatcgagagagagagagggtaggggtttttatttaagagacgtggtggcggcgtttgcggtggaggcggcgaggatcgttaggcgatggtgagagacgatggcggcgtcggtgcggggttgttttaggtagtggcggcgaaggagaagtcgatgttcgatttcgatggaaaaacgtttaagtgttggtggagaagacgagggtgtatcgggaatatatatatttttcggatttttattttcggttggtgagaagaatcgggagtaaagattcgtaataataatcgggat

SEQ ID NO: 40030 - DNA, 708 bp, Artificial Sequence
  chemically treated genomic DNA (Homo sapiens) CpG-island No: 40030
atcccgattattattacgaatctttactcccgattcttctcaccaaccgaaaataaaaatccgaaaaatatatatattcccgatacaccctcgtcttctccaccaacacttaaacgtttttccatcgaaatcgaacatcgacttctccttcgccgccactacctaaaacaaccccgcaccgacgccgccatcgtctctcaccatcgcctaacgatcctcgccgcctccaccgcaaacgccgccaccacgtctcttaaataaaaacccctaccctctctctctctcgatataactctctctcttttaccgacgaataacttcgacgcgaccgccaccgccgacgacgccgacgccgacgtacgccgccgaaccgctccgttacgccccccataccgccgccgtaacacgccgccgccgcgcccccacgccgccgaacccccataccgccgccacgacacgccgccgccgcgcccccacgccgctaaacccccacaccgccgaaccgcgcccctaccaccgcgaaataccgccaccgcgaaacgaccccgccgccgccgcgcccccacgccgctaaacccccacgccgccgaaccgcgcccccactactacgaaacgccgccaccgcgaaacaacgccgctaccgccacaccgccgccgcgcccccacactaccgaaccgacccacgacgccgaaccgcgcccccaccgc

SEQ ID NO: 40031 - DNA, 708 bp, Artificial Sequence
  chemically treated genomic DNA (Homo sapiens) CpG-island No: 40031
atttcggttgttgttacgaatttttattttcggttttttttattaatcgggagtaaagattcggggggtatatatattttcggtgtattttcgttttttttattaatatttagacgtttttttatcgagatcgagtatcggtttttttttcgtcgttattgtttagggtaatttcgtatcgacgtcgttatcgttttttattatcgtttggcggttttcgtcgtttttatcgtagacgtcgttattacgttttttgggtaagagtttttgttttttttttttttcgatgtagtttttttttttttgtcgacgaatgatttcggcgcggtcgttatcgtcgacgacgtcgacgtcgacgtacgtcgtcgggtcgtttcgttacgttttttatgtcgtcgtcgtggtacgtcgtcgtcgcgtttttacgtcgtcgggtttttatgtcgtcgttacggtacgtcgtcgtcgcgtttttacgtcgttgggtttttatatcgtcggatcgcgtttttattatcgcgagatgtcgttatcgcgagacgatttcgtcgtcgtcgcgtttttacgtcgttgggtttttacgtcgtcggatcgcgtttttattgttgcgagacgtcgttatcgcgagataacgtcgttgtcgttatatcgtcgtcgcgtttttatattgtcgggtcggtttacggcgtcggatcgcgtttttatcgt

SEQ ID NO: 40032 - DNA, 708 bp, Artificial Sequence
  chemically treated genomic DNA (Homo sapiens) CpG-island No: 40032
acgataaaaacgcgatccgacgccgtaaaccgacccgacaatataaaaacgcgacgacgatataacgacaacgacgttatctcgcgataacgacgtctcgcaacaataaaaacgcgatccgacgacgtaaaaacccaacgacgtaaaaacgcgacgacgacgaaatcgtctcgcgataacgacatctcgcgataataaaaacgcgatccgacgatataaaaacccaacgacgtaaaaacgcgacgacgacgtaccgtaacgacgacataaaaacccgacgacgtaaaaacgcgacgacgacgtaccacgacgacgacataaaaaacgtaacgaaacgacccgacgacgtacgtcgacgtcgacgtcgtcgacgataacgaccgcgccgaaatcattcgtcgacaaaaaaaaaaaaactacatcgaaaaaaaaaaaaaacaaaaactcttacccaaaaaacgtaataacgacgtctacgataaaaacgacgaaaaccgccaaacgataataaaaaacgataacgacgtcgatacgaaattaccctaaacaataacgacgaaaaaaaaaccgatactcgatctcgataaaaaaacgtctaaatattaataaaaaaaacgaaaatacaccgaaaatatatataccccccgaatctttactcccgattaataaaaaaaaccgaaaataaaaattcgtaacaacaaccgaaat

SEQ ID NO: 40033 - DNA, 1446 bp, Artificial Sequence
  chemically treated genomic DNA (Homo sapiens) CpG-island No: 40033
tcgggtatatagagacggtttacgggtcgatagaagtagatttcgtgtgttaatcgaggcgagtggtcgataaacggattttattagatattatacgggttgtatatttggaaattacgcggttatcgagcggatatattattacggttattatacgtataagcgaacgattatcgatatcggtatacgggtatcggggtcgataatcgtataacgggtacggggcgatataaaaagaatgaggacggggtagcgaaggagagatttttattattacgcgacgaggcgagggaacgataacgacgaacgggcgcggcggagacggtcgggaacgacggagacgaaaggcgaggggacgatttcggcggtgatttttggacgaaggcgagacgcggtcggcgtaacgtttggcgacgcggaggcgaggacgaagacgatgacggggttgcggtatttgacggagcgaggacgacgaacgagaacggtttgacggagggacgaacgttacgacgatcgggaacgacgggaggattacgacgacgatgatcggggttggtaaggaggcgacgtgggtagtcggtagcggttgtacggagacgaggacggagtggaatacgtcgttgtgatgtcgacgacggaggcggtgtcgcgagacgacgagtcggcgaggaggaatgatcgatcggaggagtcgtcgacgaggacgaacggagatgacgataacgaatatcggcggggtttagatggaggggaggcgaggtcgagggtaattttgacgttgtgatgtcggaggtggtggttgcgcggtcgacggcgtacgggtggaggaagggtcgattggggaaatttcggtaaggcggatggagaggtcggcgcggtacggcggtgtttcggcgaaatcgagggtaggtcggggtggagggtgacgtcgtaatgtcgacgaaggatacggcgacgtcggtcgacgttcgggcgcggcgatcggggcgattgaaggcggtatagtggcggtaacgttattgttttgttggcgaggacgcgtttttaggggttttcgcgcgaaacggagggtaggtcgggggagaggaggttgttgtgacgacggggaaggtaacggtatagtcggtcggcgcgttgacgcggcggtaggggcggttggaggcggtcggcgcgggggaaagagaagggcgatcgcggggaggggtgatacgattacggtgaggttcgggatgaggttaaaacgatagaatggaggatggggattttattttatagcggagggaagcgagtcgagtacgggaggagcggggaaaggcggcggaaaaggcgttcggcggttatggaaggcggttatgaatggcgtagtcgtttcggttaaaatagtgtacgattaaaggggagattaggggaaatagggagaggaaggaaaggggattaatttttttt

SEQ ID NO: 40034 - DNA, 1446 bp, Artificial Sequence
  chemically treated genomic DNA (Homo sapiens) CpG-island No: 40034
aaaaaaaattaatcccctttccttcctctccctatttcccctaatctcccctttaatcgtacactattttaaccgaaacgactacgccattcataaccgccttccataaccgccgaacgccttttccgccgcctttccccgctcctcccgtactcgactcgcttccctccgctataaaataaaatccccatcctccattctatcgttttaacctcatcccgaacctcaccgtaatcgtatcacccctccccgcgatcgcccttctctttcccccgcgccgaccgcctccaaccgcccctaccgccgcgtcaacgcgccgaccgactataccgttaccttccccgtcgtcacaacaacctcctctcccccgacctaccctccgtttcgcgcgaaaacccctaaaaacgcgtcctcgccaacaaaacaataacgttaccgccactataccgccttcaatcgccccgatcgccgcgcccgaacgtcgaccgacgtcgccgtatccttcgtcgacattacgacgtcaccctccaccccgacctaccctcgatttcgccgaaacaccgccgtaccgcgccgacctctccatccgccttaccgaaatttccccaatcgacccttcctccacccgtacgccgtcgaccgcgcaaccaccacctccgacatcacaacgtcaaaattaccctcgacctcgcctcccctccatctaaaccccgccgatattcgttatcgtcatctccgttcgtcctcgtcgacgactcctccgatcgatcattcctcctcgccgactcgtcgtctcgcgacaccgcctccgtcgtcgacatcacaacgacgtattccactccgtcctcgtctccgtacaaccgctaccgactacccacgtcgcctccttaccaaccccgatcatcgtcgtcgtaatcctcccgtcgttcccgatcgtcgtaacgttcgtccctccgtcaaaccgttctcgttcgtcgtcctcgctccgtcaaataccgcaaccccgtcatcgtcttcgtcctcgcctccgcgtcgccaaacgttacgccgaccgcgtctcgccttcgtccaaaaatcaccgccgaaatcgtcccctcgcctttcgtctccgtcgttcccgaccgtctccgccgcgcccgttcgtcgttatcgttccctcgcctcgtcgcgtaataataaaaatctctccttcgctaccccgtcctcattctttttatatcgccccgtacccgttatacgattatcgaccccgatacccgtataccgatatcgataatcgttcgcttatacgtataataaccgtaataatatatccgctcgataaccgcgtaatttccaaatatacaacccgtataatatctaataaaatccgtttatcgaccactcgcctcgattaacacacgaaatctacttctatcgacccgtaaaccgtctctatatacccga

SEQ ID NO: 40035 - DNA, 1446 bp, Artificial Sequence
  chemically treated genomic DNA (Homo sapiens) CpG-island No: 40035
ggggggaattaatttttttttttttttttttttattttttttaattttttttttgatcgtgtattattttgatcggaacggttgcgttatttatggtcgttttttatggtcgtcgggcgtttttttcgtcgttttttttcgtttttttcgtgttcggttcgttttttttcgttataaaatggaatttttattttttattttatcgttttagttttatttcgagttttatcgtggtcgtattattttttttcgcggtcgtttttttttttttttcgcgtcggtcgtttttagtcgtttttgtcgtcgcgttagcgcgtcggtcggttgtgtcgttgtttttttcgtcgttatagtagttttttttttttcggtttgtttttcgtttcgcgcggagatttttggagacgcgttttcgttagtaaaatagtggcgttgtcgttattgtatcgtttttagtcgtttcgatcgtcgcgttcgagcgtcggtcgacgtcgtcgtatttttcgtcgatattgcggcgttattttttatttcggtttgttttcggtttcgtcggaatatcgtcgtgtcgcgtcggtttttttattcgttttgtcggaatttttttagtcggttttttttttattcgtgcgtcgtcggtcgcgtaattattattttcggtattatagcgttaaggttgttttcggtttcgttttttttttatttgaatttcgtcggtgttcgttatcgttattttcgttcgttttcgtcgacgattttttcggtcggttattttttttcgtcgattcgtcgtttcgcggtatcgttttcgtcgtcggtattatagcggcgtgttttatttcgttttcgttttcgtgtagtcgttgtcggttgtttacgtcgtttttttgttagtttcggttatcgtcgtcgtagttttttcgtcgttttcggtcgtcgtggcgttcgttttttcgttaagtcgttttcgttcgtcgttttcgtttcgttaagtgtcgtagtttcgttatcgttttcgttttcgttttcgcgtcgttaagcgttacgtcggtcgcgtttcgttttcgtttaaggattatcgtcgaagtcgttttttcgtttttcgttttcgtcgttttcggtcgttttcgtcgcgttcgttcgtcgttgtcgttttttcgtttcgtcgcgtggtggtaaggatttttttttcgttgtttcgtttttattttttttgtgtcgtttcgtgttcgttgtgcggttgtcgatttcggtattcgtgtatcggtgtcggtagtcgttcgtttgtgcgtgtggtgatcgtgatagtgtgttcgttcggtagtcgcgtggtttttaagtgtgtagttcgtgtggtgtttagtggagttcgtttgtcggttattcgtttcggttgatatacgggatttgtttttgtcgattcgtggatcgtttttgtgtattcgg

SEQ ID NO: 40036 - DNA, 1446 bp, Artificial Sequence
  chemically treated genomic DNA (Homo sapiens) CpG-island No: 40036
ccgaatacacaaaaacgatccacgaatcgacaaaaacaaatcccgtatatcaaccgaaacgaataaccgacaaacgaactccactaaacaccacacgaactacacacttaaaaaccacgcgactaccgaacgaacacactatcacgatcaccacacgcacaaacgaacgactaccgacaccgatacacgaataccgaaatcgacaaccgcacaacgaacacgaaacgacacaaaaaaaataaaaacgaaacaacgaaaaaaaaatccttaccaccacgcgacgaaacgaaaaaacgacaacgacgaacgaacgcgacgaaaacgaccgaaaacgacgaaaacgaaaaacgaaaaaacgacttcgacgataatccttaaacgaaaacgaaacgcgaccgacgtaacgcttaacgacgcgaaaacgaaaacgaaaacgataacgaaactacgacacttaacgaaacgaaaacgacgaacgaaaacgacttaacgaaaaaacgaacgccacgacgaccgaaaacgacgaaaaaactacgacgacgataaccgaaactaacaaaaaaacgacgtaaacaaccgacaacgactacacgaaaacgaaaacgaaataaaacacgccgctataataccgacgacgaaaacgataccgcgaaacgacgaatcgacgaaaaaaaataaccgaccgaaaaaatcgtcgacgaaaacgaacgaaaataacgataacgaacaccgacgaaattcaaataaaaaaaaaacgaaaccgaaaacaaccttaacgctataataccgaaaataataattacgcgaccgacgacgcacgaataaaaaaaaaaccgactaaaaaaattccgacaaaacgaataaaaaaaccgacgcgacacgacgatattccgacgaaaccgaaaacaaaccgaaataaaaaataacgccgcaatatcgacgaaaaatacgacgacgtcgaccgacgctcgaacgcgacgatcgaaacgactaaaaacgatacaataacgacaacgccactattttactaacgaaaacgcgtctccaaaaatctccgcgcgaaacgaaaaacaaaccgaaaaaaaaaaaactactataacgacgaaaaaaacaacgacacaaccgaccgacgcgctaacgcgacgacaaaaacgactaaaaacgaccgacgcgaaaaaaaaaaaaaaacgaccgcgaaaaaaaataatacgaccacgataaaactcgaaataaaactaaaacgataaaataaaaaataaaaattccattttataacgaaaaaaaacgaaccgaacacgaaaaaaacgaaaaaaaacgacgaaaaaaacgcccgacgaccataaaaaacgaccataaataacgcaaccgttccgatcaaaataatacacgatcaaaaaaaaaattaaaaaaaataaaaaaaaaaaaaaaaaaaaattaattcccccc

SEQ ID NO: 40037 - DNA, 549 bp, Artificial Sequence
  chemically treated genomic DNA (Homo sapiens) CpG-island No: 40037
cgaagcggtcgacgatgggcgtcgtcgtttcggtcgttttcggcgtcgatttgagtttttggttcgattggaggaagtcgcggttgatttcgatgttggtgtagtagtggttgtcgaaggtgttcggcgtcgtcgggtttaggtcgttgagcgtcgtcggcggttcgttgggcgggtatcgttgcgataggaagtttcggtaggcggcgtttatggtggggttcggttttttcgtgttgttgaagttgtatagtttgttcgttacgaattggtattgtattttttcgaacgtgtgtttatttgtatttcgtattattgtcgtcgtcgttagtttcggcgggtatgacggtagaattgaaattgagttcgtcggagaagtgatacgagtatttgagagggcgacgaggtcgacgtcgttgaggttgagggcggcgaatttttggcggaggacggtgaggttgtcggtgggggtcggtaggttgagggagttattgaagtcggaggttttgtcgtcgagtcgttttagtagtattttttattcgggtttat

SEQ ID NO: 40038 - DNA, 549 bp, Artificial Sequence
  chemically treated genomic DNA (Homo sapiens) CpG-island No: 40038
ataaacccgaataaaaaatactactaaaacgactcgacgacaaaacctccgacttcaataactccctcaacctaccgacccccaccgacaacctcaccgtcctccgccaaaaattcgccgccctcaacctcaacgacgtcgacctcgtcgccctctcaaatactcgtatcacttctccgacgaactcaatttcaattctaccgtcatacccgccgaaactaacgacgacgacaataatacgaaatacaaataaacacacgttcgaaaaaatacaataccaattcgtaacgaacaaactatacaacttcaacaacacgaaaaaaccgaaccccaccataaacgccgcctaccgaaacttcctatcgcaacgatacccgcccaacgaaccgccgacgacgctcaacgacctaaacccgacgacgccgaacaccttcgacaaccactactacaccaacatcgaaatcaaccgcgacttcctccaatcgaaccaaaaactcaaatcgacgccgaaaacgaccgaaacgacgacgcccatcgtcgaccgcttcg

SEQ ID NO: 40039 - DNA, 549 bp, Artificial Sequence
  chemically treated genomic DNA (Homo sapiens) CpG-island No: 40039
gtgggttcgggtggggagtgttgttggggcggttcgacggtaagattttcgattttaatggtttttttaatttgtcggtttttatcgataattttatcgtttttcgttaaaagttcgtcgtttttaattttaacgacgtcgatttcgtcgtttttttaggtattcgtattattttttcggcgaatttaattttagttttgtcgttatgttcgtcggagttgacgacgacgataataatgcgaaatgtaggtgggtatacgttcgggagggtgtagtgttagttcgtgacggataggttgtataattttagtaatacggggaggtcggattttattatggacgtcgtttatcggagttttttgtcgtagcggtgttcgtttaacgggtcgtcggcggcgtttaacgatttggattcgacgacgtcggatattttcgataattattattatattaatatcgaggttaatcgcggttttttttagtcggattaggagtttaagtcggcgtcggaggcgatcgggacgacggcgtttatcgtcgatcgtttcg

SEQ ID NO: 40040 - DNA, 549 bp, Artificial Sequence
  chemically treated genomic DNA (Homo sapiens) CpG-island No: 40040
cgaaacgatcgacgataaacgccgtcgtcccgatcgcctccgacgccgacttaaactcctaatccgactaaaaaaaaccgcgattaacctcgatattaatataataataattatcgaaaatatccgacgtcgtcgaatccaaatcgttaaacgccgccgacgacccgttaaacgaacaccgctacgacaaaaaactccgataaacgacgtccataataaaatccgacctccccgtattactaaaattatacaacctatccgtcacgaactaacactacaccctcccgaacgtatacccacctacatttcgcattattatcgtcgtcgtcaactccgacgaacataacgacaaaactaaaattaaattcgccgaaaaaataatacgaatacctaaaaaaacgacgaaatcgacgtcgttaaaattaaaaacgacgaacttttaacgaaaaacgataaaattatcgataaaaaccgacaaattaaaaaaaccattaaaatcgaaaatcttaccgtcgaaccgccccaacaacactccccacccgaacccac

SEQ ID NO: 40041 - DNA, 716 bp, Artificial Sequence
  chemically treated genomic DNA (Homo sapiens) CpG-island No: 40041
gttatttggggcggcgacggcgatcgagtaaggggaggaggcggcggtttattaacggcggtggcggcgacggcggcgcgacgacgtcgtacggcgtacggtgcggcggtacgaaggcggcggtgcggcggcgcgagggcggcgcgacggcgacggcggcgtaagacggcgacgtacggcgcggcggtttcggggcgacggcgcggcggtttcgaaggtggcggcgcggcggtacgataacggcggcgcggggtacgaggcggcgacgggacgcgcggcgatcggacgttgacggcggcggcgatagcggcggcgcgcggttcggggcgggacgcgacgggcggcgacgcgacggtagcgcggcgcgacggcgacggggcgagatgattggcgagcggcgatgggacgggcggacggttcggggcgcgaggtagcgcggtacggggcgcgtcgcggggcgacggggcggcgcgcggcgtagggcgtaaggtcggttagggcggcgtagtagcgatggcgacggcgataggcggcgatggcgacgtcggcgcggcggtaggcgacggcgcgacgggacggtgacggcgacggcgcggtagcggcggtgcggggtttagggaatggtcgggcgcgtggtagagaagggtttagggttagggattaaaatcgaatatttatgaggtaatgaatagtgattttttttatttatttcgatt

SEQ ID NO: 40042 - DNA, 716 bp, Artificial Sequence
  chemically treated genomic DNA (Homo sapiens) CpG-island No: 40042
aatcgaaataaataaaaaaaatcactattcattacctcataaatattcgattttaatccctaaccctaaacccttctctaccacgcgcccgaccattccctaaaccccgcaccgccgctaccgcgccgtcgccgtcaccgtcccgtcgcgccgtcgcctaccgccgcgccgacgtcgccatcgccgcctatcgccgtcgccatcgctactacgccgccctaaccgaccttacgccctacgccgcgcgccgccccgtcgccccgcgacgcgccccgtaccgcgctacctcgcgccccgaaccgtccgcccgtcccatcgccgctcgccaatcatctcgccccgtcgccgtcgcgccgcgctaccgtcgcgtcgccgcccgtcgcgtcccgccccgaaccgcgcgccgccgctatcgccgccgccgtcaacgtccgatcgccgcgcgtcccgtcgccgcctcgtaccccgcgccgccgttatcgtaccgccgcgccgccaccttcgaaaccgccgcgccgtcgccccgaaaccgccgcgccgtacgtcgccgtcttacgccgccgtcgccgtcgcgccgccctcgcgccgccgcaccgccgccttcgtaccgccgcaccgtacgccgtacgacgtcgtcgcgccgccgtcgccgccaccgccgttaataaaccgccgcctcctccccttactcgatcgccgtcgccgccccaaataac

SEQ ID NO: 40043 - DNA, 716 bp, Artificial Sequence
  chemically treated genomic DNA (Homo sapiens) CpG-island No: 40043
aatcgggataaataggaaaagttattgtttattgttttataggtgttcgattttggtttttagttttagatttttttttgttacgcgttcggttattttttgagtttcgtatcgtcgttatcgcgtcgtcgtcgttatcgtttcgtcgcgtcgtcgtttgtcgtcgcgtcgacgtcgttatcgtcgtttgtcgtcgtcgttatcgttgttgcgtcgttttagtcggttttgcgttttgcgtcgcgcgtcgtttcgtcgtttcgcgacgcgtttcgtatcgcgttgtttcgcgtttcgagtcgttcgttcgttttatcgtcgttcgttagttatttcgtttcgtcgtcgtcgcgtcgcgttatcgtcgcgtcgtcgttcgtcgcgtttcgtttcgagtcgcgcgtcgtcgttgtcgtcgtcgtcgttaacgttcggtcgtcgcgcgtttcgtcgtcgtttcgtgtttcgcgtcgtcgttgtcgtgtcgtcgcgtcgttattttcgaagtcgtcgcgtcgtcgtttcggagtcgtcgcgtcgtgcgtcgtcgttttgcgtcgtcgtcgtcgtcgcgtcgttttcgcgtcgtcgtatcgtcgttttcgtgtcgtcgtatcgtgcgtcgtgcgacgtcgtcgcgtcgtcgtcgtcgttatcgtcgttggtaagtcgtcgttttttttttttgttcggtcgtcgtcgtcgttttaggtagt

SEQ ID NO: 40044 - DNA, 716 bp, Artificial Sequence
  chemically treated genomic DNA (Homo sapiens) CpG-island No: 40044
actacctaaaacgacgacgacgaccgaacaaaaaaaaaaaacgacgacttaccaacgacgataacgacgacgacgacgcgacgacgtcgcacgacgcacgatacgacgacacgaaaacgacgatacgacgacgcgaaaacgacgcgacgacgacgacgacgcaaaacgacgacgcacgacgcgacgactccgaaacgacgacgcgacgacttcgaaaataacgacgcgacgacacgacaacgacgacgcgaaacacgaaacgacgacgaaacgcgcgacgaccgaacgttaacgacgacgacgacaacgacgacgcgcgactcgaaacgaaacgcgacgaacgacgacgcgacgataacgcgacgcgacgacgacgaaacgaaataactaacgaacgacgataaaacgaacgaacgactcgaaacgcgaaacaacgcgatacgaaacgcgtcgcgaaacgacgaaacgacgcgcgacgcaaaacgcaaaaccgactaaaacgacgcaacaacgataacgacgacgacaaacgacgataacgacgtcgacgcgacgacaaacgacgacgcgacgaaacgataacgacgacgacgcgataacgacgatacgaaactcaaaaaataaccgaacgcgtaacaaaaaaaaatctaaaactaaaaaccaaaatcgaacacctataaaacaataaacaataacttttcctatttatcccgatt

SEQ ID NO: 40045 - DNA, 1264 bp, Artificial Sequence
  chemically treated genomic DNA (Homo sapiens) CpG-island No: 40045
agcggtcgaggtggtcgtcgtcgatgtcgtcggcgatttatttcggcgagtcgtttttcgcggtggtatgggatacgacggtgacgacgacggagttgaggtagttgtcgagcgagtacgttatgtggtcgagcgtcgagtagaggttttttatggagttcggcgtttggttgtagaagaattttagttgttcgatgtgggttaatatcgcgttggcgtcgagtagtacgtattgcggtatttgttacgcgatgtttatttcgtcggcggtcgttagtcgtttgttttcgacggtcgtcgcggcggttatggcggcgacggatagcgttatgtcggcgtcgatgcgttgtagttcggttagttttttttcgttgtcggtgagtcgtcgcgtcgcgggtattatcgcggcgtcgtagagcggtacgaggacgagtatggtagcggcgtagacggagttgagcgacgtcgtcgggacggcgaacgcgatttcgaggcggcggcgtatggcgcggttttgtatcgggaagagcggttgttggacgagtattatgtagtagacgatttcggtggtttatatcggtagtattcgtacgatcgtttttagtttttttatttgcgttatcgtgtatagtttttacggttgcgtcgtcgtcgacgacggtatcgttatcgttatcgtcgttttgtttaagaaattgaattggtcggtgtgcgttatttttcgttttttttttgtcggattatcgtagaggacgaagtcgtcgtgaggtagtacgacgtttttttttttgacggcggcgacgacgatttggtaagttcggattatttggttgttacgaggttggtggtatttgtatatggcggagtcgaggaggaagttggttatggcgaggacggtgtagagggtcgggacgtcgaagtcgaggagttagtcgaagttgttttgtagttatattacggcggagtcggagacgagggcgtcgacgtatatggcgaagtagaattagttgaagtaggagttttttttgggtttttttatggcgtcgtcgtcgtcgaattggtcggcgtcgaatggttttacgtaggatttgatgtagtcggcgtcgatggttatgaggtatagttttagggagaagacggtcggttgggtgtttcggttgatgatcgtcggcgacgttttcgatagcgttatcgtttttattttttgtaattagtgtatcgatgatcgattataagagaagattttaaattcgtttgaaatttg

SEQ ID NO: 40046 - DNA, 1264 bp, Artificial Sequence
  chemically treated genomic DNA (Homo sapiens) CpG-island No: 40046
caaatttcaaacgaatttaaaatcttctcttataatcgatcatcgatacactaattacaaaaaataaaaacgataacgctatcgaaaacgtcgccgacgatcatcaaccgaaacacccaaccgaccgtcttctccctaaaactatacctcataaccatcgacgccgactacatcaaatcctacgtaaaaccattcgacgccgaccaattcgacgacgacgacgccataaaaaaacccaaaaaaaactcctacttcaactaattctacttcgccatatacgtcgacgccctcgtctccgactccgccgtaatataactacaaaacaacttcgactaactcctcgacttcgacgtcccgaccctctacaccgtcctcgccataaccaacttcctcctcgactccgccatatacaaataccaccaacctcgtaacaaccaaataatccgaacttaccaaatcgtcgtcgccgccgtcaaaaaaaaaaacgtcgtactacctcacgacgacttcgtcctctacgataatccgacaaaaaaaaaacgaaaaataacgcacaccgaccaattcaatttcttaaacaaaacgacgataacgataacgataccgtcgtcgacgacgacgcaaccgtaaaaactatacacgataacgcaaataaaaaaactaaaaacgatcgtacgaatactaccgatataaaccaccgaaatcgtctactacataatactcgtccaacaaccgctcttcccgatacaaaaccgcgccatacgccgccgcctcgaaatcgcgttcgccgtcccgacgacgtcgctcaactccgtctacgccgctaccatactcgtcctcgtaccgctctacgacgccgcgataatacccgcgacgcgacgactcaccgacaacgaaaaaaaactaaccgaactacaacgcatcgacgccgacataacgctatccgtcgccgccataaccgccgcgacgaccgtcgaaaacaaacgactaacgaccgccgacgaaataaacatcgcgtaacaaataccgcaatacgtactactcgacgccaacgcgatattaacccacatcgaacaactaaaattcttctacaaccaaacgccgaactccataaaaaacctctactcgacgctcgaccacataacgtactcgctcgacaactacctcaactccgtcgtcgtcaccgtcgtatcccataccaccgcgaaaaacgactcgccgaaataaatcgccgacgacatcgacgacgaccacctcgaccgct

SEQ ID NO: 40047 - DNA, 1264 bp, Artificial Sequence
  chemically treated genomic DNA (Homo sapiens) CpG-island No: 40047
taaattttaaacgaatttgaaatttttttttgtgatcgattatcgatgtattgattgtaggggatgggaacgatggcgttgtcgggggcgtcgtcggcggttattagtcggagtatttagtcggtcgttttttttttggggttgtattttatggttatcggcgtcggttgtattaagttttgcgtggggttattcggcgtcgattagttcgacggcggcgacgttatggagaggtttaagaagagtttttattttaattggttttatttcgttatgtacgtcggcgttttcgttttcggtttcgtcgtggtgtggttgtaggataatttcggttggtttttcggtttcggcgtttcggttttttgtatcgttttcgttatggttagtttttttttcggtttcgttatgtataggtattattagtttcgtggtagttaggtggttcgagtttgttaggtcgtcgtcgtcgtcgttaggaagaggaacgtcgtgttgttttacgacggtttcgttttttacgatggttcggtagaggaggggcggaggatggcgtatatcgattagtttagttttttggataaggcggcggtggcggtggcggtgtcgtcgtcggcggcggcgtagtcgtggaggttgtgtacggtgacgtaggtggaggagttgaaggcgatcgtgcggatgttgtcggtgtgggttatcgggatcgtttattgtatggtgttcgtttagtagtcgtttttttcggtgtagggtcgcgttatgcgtcgtcgtttcggggtcgcgttcgtcgtttcggcggcgtcgtttaatttcgtttacgtcgttgttatgttcgttttcgtgtcgttttacgacgtcgcggtggtgttcgcggcgcggcggtttatcggtagcgagagggggttgatcgagttgtagcgtatcggcgtcggtatggcgttattcgtcgtcgttatggtcgtcgcggcgatcgtcgagggtaggcgattggcggtcgtcggcgaggtgagtatcgcgtggtaggtgtcgtaatacgtgttgttcggcgttagcgcggtgttggtttatatcgggtagttggagtttttttataattaggcgtcggattttatgaggagtttttgttcggcgttcggttatatgacgtgttcgttcggtagttattttagtttcgtcgtcgttatcgtcgtgttttatgttatcgcgaggggcggttcgtcggggtggatcgtcgacgatatcgacgacggttatttcgatcgtt

SEQ ID NO: 40048 - DNA, 1264 bp, Artificial Sequence
  chemically treated genomic DNA (Homo sapiens) CpG-island No: 40048
aacgatcgaaataaccgtcgtcgatatcgtcgacgatccaccccgacgaaccgcccctcgcgataacataaaacacgacgataacgacgacgaaactaaaataactaccgaacgaacacgtcatataaccgaacgccgaacaaaaactcctcataaaatccgacgcctaattataaaaaaactccaactacccgatataaaccaacaccgcgctaacgccgaacaacacgtattacgacacctaccacgcgatactcacctcgccgacgaccgccaatcgcctaccctcgacgatcgccgcgacgaccataacgacgacgaataacgccataccgacgccgatacgctacaactcgatcaaccccctctcgctaccgataaaccgccgcgccgcgaacaccaccgcgacgtcgtaaaacgacacgaaaacgaacataacaacgacgtaaacgaaattaaacgacgccgccgaaacgacgaacgcgaccccgaaacgacgacgcataacgcgaccctacaccgaaaaaaacgactactaaacgaacaccatacaataaacgatcccgataacccacaccgacaacatccgcacgatcgccttcaactcctccacctacgtcaccgtacacaacctccacgactacgccgccgccgacgacgacaccgccaccgccaccgccgccttatccaaaaaactaaactaatcgatatacgccatcctccgcccctcctctaccgaaccatcgtaaaaaacgaaaccgtcgtaaaacaacacgacgttcctcttcctaacgacgacgacgacgacctaacaaactcgaaccacctaactaccacgaaactaataatacctatacataacgaaaccgaaaaaaaaactaaccataacgaaaacgatacaaaaaaccgaaacgccgaaaccgaaaaaccaaccgaaattatcctacaaccacaccacgacgaaaccgaaaacgaaaacgccgacgtacataacgaaataaaaccaattaaaataaaaactcttcttaaacctctccataacgtcgccgccgtcgaactaatcgacgccgaataaccccacgcaaaacttaatacaaccgacgccgataaccataaaatacaaccccaaaaaaaaaacgaccgactaaatactccgactaataaccgccgacgacgcccccgacaacgccatcgttcccatcccctacaatcaatacatcgataatcgatcacaaaaaaaaatttcaaattcgtttaaaattta

SEQ ID NO: 40049 - DNA, 742 bp, Artificial Sequence
  chemically treated genomic DNA (Homo sapiens) CpG-island No: 40049
tcgttattaattagaagaatcgatcgagatgtttttcgtttagatttttcgggatttattcgttatggtcgtcgtcgtcgtcggtgacggagttgatgatggtgagtatggcggagaggaggtagttttcgggggtgattatgatgagcgagtacgtttggtataagttttttatggcgtcggggttttgttcgtacgcgaattcgatgtatttaacgacgtcgaatattttcgttatttcgacgagtacgtattgcggcgtttgttataggatgtttatcgtcggagtattcgtttttacgttgcggaggcgcgtcgttttaacggtcgcggcggcggcgagcgcgagaacggcgaagattatttcgacgtcgatgcggtgtagttcggagaggtcgcgtttgacgtcggtgagtttgtttatcgtcggtatgaggattttgtcgtatgtcggcgcgaggacgaggatgtagacgtaggtgaaggtcgttagcgacgtcggtggtaaggcgaaggcggcggcgacgtggttgtttatggcgtttttttgttcgacgaatagcgggaagtaggtttcggcggtgttgaagattatttcggtgaggaagatggggagtattttcgtaaagattttgagtttttttatttgcgttatcgtgtatagtttttatggacgattagttgatgttttatcggatgtagtgatagtggtagttcggttaaagaatttaattgtaataat

SEQ ID NO: 40050 - DNA, 742 bp, Artificial Sequence
  chemically treated genomic DNA (Homo sapiens) CpG-island No: 40050
attattacaattaaattctttaaccgaactaccactatcactacatccgataaaacatcaactaatcgtccataaaaactatacacgataacgcaaataaaaaaactcaaaatctttacgaaaatactccccatcttcctcaccgaaataatcttcaacaccgccgaaacctacttcccgctattcgtcgaacaaaaaaacgccataaacaaccacgtcgccgccgccttcgccttaccaccgacgtcgctaacgaccttcacctacgtctacatcctcgtcctcgcgccgacatacgacaaaatcctcataccgacgataaacaaactcaccgacgtcaaacgcgacctctccgaactacaccgcatcgacgtcgaaataatcttcgccgttctcgcgctcgccgccgccgcgaccgttaaaacgacgcgcctccgcaacgtaaaaacgaatactccgacgataaacatcctataacaaacgccgcaatacgtactcgtcgaaataacgaaaatattcgacgtcgttaaatacatcgaattcgcgtacgaacaaaaccccgacgccataaaaaacttataccaaacgtactcgctcatcataatcacccccgaaaactacctcctctccgccatactcaccatcatcaactccgtcaccgacgacgacgacgaccataacgaataaatcccgaaaaatctaaacgaaaaacatctcgatcgattcttctaattaataacga

SEQ ID NO: 40051 - DNA, 742 bp, Artificial Sequence
  chemically treated genomic DNA (Homo sapiens) CpG-island No: 40051
attgttgtaattaggttttttgatcgagttgttattattattgtattcgatgaagtattagttagtcgtttatggaagttgtgtacggtgacgtaggtggaggagtttaagatttttgcgaggatgttttttattttttttatcggagtaatttttaatatcgtcgaggtttgtttttcgttgttcgtcgagtagggaggcgttatggataattacgtcgtcgtcgttttcgttttgttatcggcgtcgttgacgatttttatttgcgtttgtattttcgttttcgcgtcgatatacgatagggtttttatgtcggcggtgagtaggtttatcggcgttaagcgcggttttttcgagttgtatcgtatcggcgtcggaatggttttcgtcgttttcgcgttcgtcgtcgtcgcggtcgttgagacggcgcgttttcgtagcgtggaggcggatgtttcggcggtgagtattttgtggtaggcgtcgtagtacgtgttcgtcggggtggcgaaggtgttcggcgtcgttgggtatatcgagttcgcgtacgagtagagtttcgacgttatgaggagtttgtgttaggcgtgttcgtttattatggttattttcgggagttatttttttttcgttatgtttattattattagtttcgttatcggcggcggcggcggttatggcggatggatttcggagaatttgaacgagggatatttcgatcgatttttttggttgatggcgg

SEQ ID NO: 40052 - DNA, 742 bp, Artificial Sequence
  chemically treated genomic DNA (Homo sapiens) CpG-island No: 40052
ccgccatcaaccaaaaaaatcgatcgaaatatccctcgttcaaattctccgaaatccatccgccataaccgccgccgccgccgataacgaaactaataataataaacataacgaaaaaaaaataactcccgaaaataaccataataaacgaacacgcctaacacaaactcctcataacgtcgaaactctactcgtacgcgaactcgatatacccaacgacgccgaacaccttcgccaccccgacgaacacgtactacgacgcctaccacaaaatactcaccgccgaaacatccgcctccacgctacgaaaacgcgccgtctcaacgaccgcgacgacgacgaacgcgaaaacgacgaaaaccattccgacgccgatacgatacaactcgaaaaaaccgcgcttaacgccgataaacctactcaccgccgacataaaaaccctatcgtatatcgacgcgaaaacgaaaatacaaacgcaaataaaaatcgtcaacgacgccgataacaaaacgaaaacgacgacgacgtaattatccataacgcctccctactcgacgaacaacgaaaaacaaacctcgacgatattaaaaattactccgataaaaaaaataaaaaacatcctcgcaaaaatcttaaactcctccacctacgtcaccgtacacaacttccataaacgactaactaatacttcatcgaatacaataataataacaactcgatcaaaaaacctaattacaacaat

SEQ ID NO: 40053 - DNA, 807 bp, Artificial Sequence
  chemically treated genomic DNA (Homo sapiens) CpG-island No: 40053
ggcggtacgagcgaaggtagcgtaagatgggtttatagtaaattttagtgcgttttttgtagtggtttcgttcgaggtcgtggtcgtgttttggagtcgcgaggtgacgtttagcggttcggttagtaattttatagttggtcgaggttcgtcggttgtcgtttttatttgggaggaattttaggtcgagatggggtatattatcgaggttggtatttacggtattagttacgagattgcggaggcgagggcggcggcggtatcgtcggtaaatgagcgtgtcgatcggttgacgcgtgatttggcggaggttcgcgaggttttttagaagatgagagaattggtggtcggtaacgagcgataattgtaggggttcgagtatcgtatgtcggagttcgagaatgatttgtcggagattcgtggttcgttgtgggttatttatattagtttgtattagtttttcggggagtgcggtgttacgattattatttcggagaatttcgatgagttttcgttgacgatttcgtttacggaattggtaacggcgatggaggcgattttttttaagtacgcggttaggattagagaggagacgtttaacgggatttatatcggggcgtgttacgtttttgcgtgtgtgaggttggtatattttgaatttaatttttagaagattttggattagggggcggttagcgacgcgcgtaaagatgtgatggaagaagtcggcgaattaggggagtttgtttttttattttttgaagagtagggttatcgtttgtttgtattttttaattaatcgcgttt

SEQ ID NO: 40054 - DNA, 807 bp, Artificial Sequence
  chemically treated genomic DNA (Homo sapiens) CpG-island No: 40054
aaacgcgattaattaaaaaatacaaacaaacgataaccctactcttcaaaaaataaaaaaacaaactcccctaattcgccgacttcttccatcacatctttacgcgcgtcgctaaccgccccctaatccaaaatcttctaaaaattaaattcaaaatataccaacctcacacacgcaaaaacgtaacacgccccgatataaatcccgttaaacgtctcctctctaatcctaaccgcgtacttaaaaaaaatcgcctccatcgccgttaccaattccgtaaacgaaatcgtcaacgaaaactcatcgaaattctccgaaataataatcgtaacaccgcactccccgaaaaactaatacaaactaatataaataacccacaacgaaccacgaatctccgacaaatcattctcgaactccgacatacgatactcgaacccctacaattatcgctcgttaccgaccaccaattctctcatcttctaaaaaacctcgcgaacctccgccaaatcacgcgtcaaccgatcgacacgctcatttaccgacgataccgccgccgccctcgcctccgcaatctcgtaactaataccgtaaataccaacctcgataatataccccatctcgacctaaaattcctcccaaataaaaacgacaaccgacgaacctcgaccaactataaaattactaaccgaaccgctaaacgtcacctcgcgactccaaaacacgaccacgacctcgaacgaaaccactacaaaaaacgcactaaaatttactataaacccatcttacgctaccttcgctcgtaccgcc

SEQ ID NO: 40055 - DNA, 807 bp, Artificial Sequence
  chemically treated genomic DNA (Homo sapiens) CpG-island No: 40055
aaacgcgattggttaaggggtatagataagcggtggttttattttttaaaaagtgggaggatagatttttttagttcgtcgattttttttattatatttttgcgcgcgtcgttagtcgttttttgatttaagattttttggagattgagtttagggtgtgttaattttatatacgtaaggacgtggtacgtttcggtgtagatttcgttggacgttttttttttgattttggtcgcgtgtttagaggggatcgtttttatcgtcgttgttagtttcgtgagcgaagtcgttagcgagaatttatcgggatttttcgggatggtggtcgtgatatcgtatttttcggagagttggtgtagattagtgtaggtgatttatagcgagttacggattttcgataagttattttcgagtttcgatatacggtgttcgagtttttgtagttgtcgttcgttgtcggttattagtttttttattttttagaggatttcgcgaattttcgttaaattacgcgttagtcgatcggtacgtttatttgtcgacgatgtcgtcgtcgttttcgttttcgtaatttcgtgattaatgtcgtgagtgttagtttcgatgatgtgttttatttcgatttggagttttttttaggtgaggacggtagtcggcgggtttcgattagttgtgggattgttggtcgggtcgttgggcgttatttcgcggttttaaggtacgattacgatttcggacgaggttattgtaggagacgtattggagtttgttgtagatttattttgcgttgttttcgttcgtgtcgtt

SEQ ID NO: 40056 - DNA, 807 bp, Artificial Sequence
  chemically treated genomic DNA (Homo sapiens) CpG-island No: 40056
aacgacacgaacgaaaacaacgcaaaataaatctacaacaaactccaatacgtctcctacaataacctcgtccgaaatcgtaatcgtaccttaaaaccgcgaaataacgcccaacgacccgaccaacaatcccacaactaatcgaaacccgccgactaccgtcctcacctaaaaaaaactccaaatcgaaataaaacacatcatcgaaactaacactcacgacattaatcacgaaattacgaaaacgaaaacgacgacgacatcgtcgacaaataaacgtaccgatcgactaacgcgtaatttaacgaaaattcgcgaaatcctctaaaaaataaaaaaactaataaccgacaacgaacgacaactacaaaaactcgaacaccgtatatcgaaactcgaaaataacttatcgaaaatccgtaactcgctataaatcacctacactaatctacaccaactctccgaaaaatacgatatcacgaccaccatcccgaaaaatcccgataaattctcgctaacgacttcgctcacgaaactaacaacgacgataaaaacgatcccctctaaacacgcgaccaaaatcaaaaaaaaaacgtccaacgaaatctacaccgaaacgtaccacgtccttacgtatataaaattaacacaccctaaactcaatctccaaaaaatcttaaatcaaaaaacgactaacgacgcgcgcaaaaatataataaaaaaaatcgacgaactaaaaaaatctatcctcccactttttaaaaaataaaaccaccgcttatctataccccttaaccaatcgcgttt

SEQ ID NO: 40057 - DNA, 950 bp, Artificial Sequence
  chemically treated genomic DNA (Homo sapiens) CpG-island No: 40057
tcgggtcggaatttttcgggttatcggatattacgtagagaacggttgaaagttttatatttagcgttagggcggtgggttgtcggcgatcgtgtgtttttcgtgggtgtttatcggatgacgaagatgaagatgatgacgatgatgacgatggtttattcggtttcggtgtgcgatttcgcgggcgacgtttaggttttcgagagttttgttgtcgtttattattgttgttttggcgttgattttcgttatcgttatcgttatgttgacgttttcgattagtatcgtttggtgttcgttgattatcgcggtcgcggtagttgtgacgattatggcggtgttggttttcgttcgagcggttttttcgtttttcgttttcgtgacgttatgaagaaatacgatgtcgggaacgattttcgttgtttcggcgcgttttgtttttcggcggttatttagatggttatggagatcgtcggtgtcgcgaggttgaggggtagtttatttcggcgacgttcgttgtttcggtggttcgtcgtcggtatttttagttgttggtcgttttggttgtgttttggtagtagttttttcgaacgtattattgagattggttatcgattttcgtagtcgttttgtttaacgtgcgagattattgttaagtacggggtcgtagggagttttttttagtattgcgttgacggtgtcgagatgttgggtcggcgtgatcgtttggtttttcgtttttgcgttagtttgtgtagatgtgttagttttatcgatggtaaatacgtcgcgcggtgtattggaagatgacgagttatagttttcgagtaggtgaaggatcgatggtttatggggatcgatgtcgattattttaacgaatcgatttgaggttaacgtcgttttttgttttttgtttgtgtttttgagggaggtttttgattgttggattt

SEQ ID NO: 40058 - DNA, 950 bp, Artificial Sequence
  chemically treated genomic DNA (Homo sapiens) CpG-island No: 40058
aaatccaacaatcaaaaacctccctcaaaaacacaaacaaaaaacaaaaaacgacgttaacctcaaatcgattcgttaaaataatcgacatcgatccccataaaccatcgatccttcacctactcgaaaactataactcgtcatcttccaatacaccgcgcgacgtatttaccatcgataaaactaacacatctacacaaactaacgcaaaaacgaaaaaccaaacgatcacgccgacccaacatctcgacaccgtcaacgcaatactaaaaaaaactccctacgaccccgtacttaacaataatctcgcacgttaaacaaaacgactacgaaaatcgataaccaatctcaataatacgttcgaaaaaactactaccaaaacacaaccaaaacgaccaacaactaaaaataccgacgacgaaccaccgaaacaacgaacgtcgccgaaataaactacccctcaacctcgcgacaccgacgatctccataaccatctaaataaccgccgaaaaacaaaacgcgccgaaacaacgaaaatcgttcccgacatcgtatttcttcataacgtcacgaaaacgaaaaacgaaaaaaccgctcgaacgaaaaccaacaccgccataatcgtcacaactaccgcgaccgcgataatcaacgaacaccaaacgatactaatcgaaaacgtcaacataacgataacgataacgaaaatcaacgccaaaacaacaataataaacgacaacaaaactctcgaaaacctaaacgtcgcccgcgaaatcgcacaccgaaaccgaataaaccatcgtcatcatcgtcatcatcttcatcttcgtcatccgataaacacccacgaaaaacacacgatcgccgacaacccaccgccctaacgctaaatataaaactttcaaccgttctctacgtaatatccgataacccgaaaaattccgacccga

SEQ ID NO: 40059 - DNA, 950 bp, Artificial Sequence
  chemically treated genomic DNA (Homo sapiens) CpG-island No: 40059
aggtttaatagttaggaattttttttaaggatatagataaggaataagaagcgacgttgattttagatcgattcgttggagtaatcgatatcgatttttatgagttatcggttttttatttattcgaagattatggttcgttattttttagtatatcgcgcgacgtgtttgttatcggtgggattaatatatttgtataggttaacgtagaggcggagaattagacggttacgtcgatttaatatttcggtatcgttaacgtaatattgagagaagttttttacgatttcgtgtttaataatgatttcgtacgttggatagaacgattacgggaatcggtagttaattttagtaatgcgttcgaggaagttgttattagagtataattagaacgattaatagttgaaggtgtcgacggcgaattatcgaagtagcggacgtcgtcgagatgagttattttttaatttcgcggtatcggcgatttttatgattatttgaatggtcgtcgagaagtaggacgcgtcgagataacgagaatcgttttcgatatcgtgtttttttatgacgttacgagaacgaagagcgaggaggtcgttcgaacgaggattaatatcgttatgatcgttataattgtcgcgatcgcgatgattagcgaatattagacgatgttggtcgagggcgttagtatgacggtgacgataacgggggttagcgttaggataataatggtggacgataatagaattttcgagaatttgaacgtcgttcgcggaatcgtatatcggagtcgagtgaattatcgttattatcgttattatttttattttcgttattcgatagatatttacggaggatatacgatcgtcgataatttatcgttttagcgttgggtgtagagtttttaatcgttttttacgtgatgttcgatggttcgagagatttcgattcgg

SEQ ID NO: 40060 - DNA, 950 bp, Artificial Sequence
  chemically treated genomic DNA (Homo sapiens) CpG-island No: 40060
ccgaatcgaaatctctcgaaccatcgaacatcacgtaaaaaacgattaaaaactctacacccaacgctaaaacgataaattatcgacgatcgtatatcctccgtaaatatctatcgaataacgaaaataaaaataataacgataataacgataattcactcgactccgatatacgattccgcgaacgacgttcaaattctcgaaaattctattatcgtccaccattattatcctaacgctaacccccgttatcgtcaccgtcatactaacgccctcgaccaacatcgtctaatattcgctaatcatcgcgatcgcgacaattataacgatcataacgatattaatcctcgttcgaacgacctcctcgctcttcgttctcgtaacgtcataaaaaaacacgatatcgaaaacgattctcgttatctcgacgcgtcctacttctcgacgaccattcaaataatcataaaaatcgccgataccgcgaaattaaaaaataactcatctcgacgacgtccgctacttcgataattcgccgtcgacaccttcaactattaatcgttctaattatactctaataacaacttcctcgaacgcattactaaaattaactaccgattcccgtaatcgttctatccaacgtacgaaatcattattaaacacgaaatcgtaaaaaacttctctcaatattacgttaacgataccgaaatattaaatcgacgtaaccgtctaattctccgcctctacgttaacctatacaaatatattaatcccaccgataacaaacacgtcgcgcgatatactaaaaaataacgaaccataatcttcgaataaataaaaaaccgataactcataaaaatcgatatcgattactccaacgaatcgatctaaaatcaacgtcgcttcttattccttatctatatccttaaaaaaaattcctaactattaaacct

SEQ ID NO: 40061 - DNA, 1165 bp, Artificial Sequence
  chemically treated genomic DNA (Homo sapiens) CpG-island No: 40061
tcggttatatcgacggtcgataagatttttttgttaattttggataagtttgttgttacgatattagtgatcgtgttatttgcgttcgattattttatttatgacgttatcgcggagattattaagacggttttcgtttaattattcgtttattattattttatcgtcggtcgtattttttgcgataatgacgacggcggttatttttatatcgattgtatcggcgaggatttcggggttacgttcgtggtcgcgttcgttaattgtattatggaggagtttatgtgtttcgtcgacgattaggttttcgacgacgagatagcggtggtgtagtagttcgtttttaattgtacgttcgacgatttttattatcgtttgttgtgggtgtaggttattatttttaattgtggaggtttcgtcgtcggggtgatatggagttatggcgtggttgacggtttcggtatagtatagtttatataagtcgtcggcgagttcgttcgtggtttgttatcgtcgttcgtcgtttcggttaggttggacgataagatcgtaatttaagtcgtatttttttttattatggtcgtttatcgttttatattcggttttaagttagtattaaatttcgacgtacgtaacgttatcgttttatttagttttattaattatattatcgtcggagttcgtcgtcgtgttatcgtgttcgaggcggtcgtcgtcgtgttttggtagtgtcgtatacgggtggtgatgacggattttgaggttttcgtcgtgttgtttttcgcggtgaacgtacgtaagtatttcggcgttaaggacggttattacggatgttgtatcgttatgtatatggtcgtgtttaagttcggtacggtggttaacggcgatattatgaagttggtcggtattatacgtcgcgttaaggagtagatatcggagtagttgaaggtagacgacggcgagatgatgttacggacgatggtaggggagaagtaggtgaatggatacgagagtttgttttatttgatattttggcgaaatatcgggttcgaggacgtcgatttcggtagcgggaagacggcgagggtgatgatttattcgtcgaggatgttgtttatgatgtttaggattgcgtttatttgttttatgtttaaggttatagagg

SEQ ID NO: 40062 - DNA, 1165 bp, Artificial Sequence
  chemically treated genomic DNA (Homo sapiens) CpG-island No: 40062
cctctataaccttaaacataaaacaaataaacgcaatcctaaacatcataaacaacatcctcgacgaataaatcatcaccctcgccgtcttcccgctaccgaaatcgacgtcctcgaacccgatatttcgccaaaatatcaaataaaacaaactctcgtatccattcacctacttctcccctaccatcgtccgtaacatcatctcgccgtcgtctaccttcaactactccgatatctactccttaacgcgacgtataataccgaccaacttcataatatcgccgttaaccaccgtaccgaacttaaacacgaccatatacataacgatacaacatccgtaataaccgtccttaacgccgaaatacttacgtacgttcaccgcgaaaaacaacacgacgaaaacctcaaaatccgtcatcaccacccgtatacgacactaccaaaacacgacgacgaccgcctcgaacacgataacacgacgacgaactccgacgataatataattaataaaactaaataaaacgataacgttacgtacgtcgaaatttaatactaacttaaaaccgaatataaaacgataaacgaccataataaaaaaaaatacgacttaaattacgatcttatcgtccaacctaaccgaaacgacgaacgacgataacaaaccacgaacgaactcgccgacgacttatataaactatactataccgaaaccgtcaaccacgccataactccatatcaccccgacgacgaaacctccacaattaaaaataataacctacacccacaacaaacgataataaaaatcgtcgaacgtacaattaaaaacgaactactacaccaccgctatctcgtcgtcgaaaacctaatcgtcgacgaaacacataaactcctccataatacaattaacgaacgcgaccacgaacgtaaccccgaaatcctcgccgatacaatcgatataaaaataaccgccgtcgtcattatcgcaaaaaatacgaccgacgataaaataataataaacgaataattaaacgaaaaccgtcttaataatctccgcgataacgtcataaataaaataatcgaacgcaaataacacgatcactaatatcgtaacaacaaacttatccaaaattaacaaaaaaatcttatcgaccgtcgatataaccga

SEQ ID NO: 40063 - DNA, 1165 bp, Artificial Sequence
  chemically treated genomic DNA (Homo sapiens) CpG-island No: 40063
tttttgtggttttgagtatgaagtagatgggcgtaattttgggtattatggatagtattttcggcgggtaggttattattttcgtcgttttttcgttgtcgaaatcgacgttttcgaattcgatgtttcgttaggatgttaagtagagtaggttttcgtatttatttatttgttttttttttattatcgttcgtagtattatttcgtcgtcgtttgtttttagttgtttcggtatttgttttttggcgcggcgtatgatgtcgattaattttatgatgtcgtcgttggttatcgtgtcggatttggatacggttatgtgtatggcggtgtagtattcgtagtagtcgtttttggcgtcgaggtatttgcgtgcgtttatcgcgaagagtagtacggcgggggttttaggattcgttattattattcgtgtacggtattgttagagtacggcggcgatcgtttcgaatacggtggtacgacgacgagtttcgacgatgatgtggttgataaggttagatgagacggtgacgttgcgtacgtcgaggtttgatattggtttgaggtcggatatgaagcgatgaacggttatggtgaagggaggtacggtttgggttgcgattttgtcgtttaatttgatcgggacgacggacggcgatggtaggttacgggcgagttcgtcgacggtttgtatgaattgtgttatgtcgggatcgttagttacgttatggttttatgttatttcgacgacgaagtttttatagttgagagtggtgatttgtatttatagtagacggtgatgaaggtcgtcgggcgtgtagttgaaggcgagttgttgtattatcgttgtttcgtcgtcgggagtttggtcgtcgacgagatatatgagtttttttatggtgtagttggcggacgcggttacgaacgtgatttcgagattttcgtcggtgtagtcgatgtagaaatggtcgtcgtcgttattgtcgtaggaaatgcggtcggcgataggatagtagtggacgagtgattgagcgagagtcgttttgatggttttcgcggtggcgttatggatggggtggtcgaacgtaagtagtacggttattggtatcgtggtaataggtttgtttaaagttgatagaaggattttgtcggtcgtcgatgtggtcgg

SEQ ID NO: 40064 - DNA, 1165 bp, Artificial Sequence
  chemically treated genomic DNA (Homo sapiens) CpG-island No: 40064
ccgaccacatcgacgaccgacaaaatccttctatcaactttaaacaaacctattaccacgataccaataaccgtactacttacgttcgaccaccccatccataacgccaccgcgaaaaccatcaaaacgactctcgctcaatcactcgtccactactatcctatcgccgaccgcatttcctacgacaataacgacgacgaccatttctacatcgactacaccgacgaaaatctcgaaatcacgttcgtaaccgcgtccgccaactacaccataaaaaaactcatatatctcgtcgacgaccaaactcccgacgacgaaacaacgataatacaacaactcgccttcaactacacgcccgacgaccttcatcaccgtctactataaatacaaatcaccactctcaactataaaaacttcgtcgtcgaaataacataaaaccataacgtaactaacgatcccgacataacacaattcatacaaaccgtcgacgaactcgcccgtaacctaccatcgccgtccgtcgtcccgatcaaattaaacgacaaaatcgcaacccaaaccgtacctcccttcaccataaccgttcatcgcttcatatccgacctcaaaccaatatcaaacctcgacgtacgcaacgtcaccgtctcatctaaccttatcaaccacatcatcgtcgaaactcgtcgtcgtaccaccgtattcgaaacgatcgccgccgtactctaacaataccgtacacgaataataataacgaatcctaaaacccccgccgtactactcttcgcgataaacgcacgcaaatacctcgacgccaaaaacgactactacgaatactacaccgccatacacataaccgtatccaaatccgacacgataaccaacgacgacatcataaaattaatcgacatcatacgccgcgccaaaaaacaaataccgaaacaactaaaaacaaacgacgacgaaataatactacgaacgataataaaaaaaaaacaaataaataaatacgaaaacctactctacttaacatcctaacgaaacatcgaattcgaaaacgtcgatttcgacaacgaaaaaacgacgaaaataataacctacccgccgaaaatactatccataatacccaaaattacgcccatctacttcatactcaaaaccacaaaaa

SEQ ID NO: 40065 - DNA, 720 bp, Artificial Sequence
  chemically treated genomic DNA (Homo sapiens) CpG-island No: 40065
tcgtcggcgagtttattcgtggtttgttatcgtcgttcgtcgtttcggttaggttagacgacgataataacgttatttaggttatattttttttcgttatggtcgtttattagtttatgtttagttttagttataaggtatttatcgattatatttttaataatattatcgtttcgtcgagtttgatcgattatattcgatttcgaggacgacgaattaacgacgacgttatcgtgttcgaggttgtcgtcgtcgtgttttggtagtgtcgtattcgggcggtgatgaaaaattcggaggttttcgtcgtattgtttttcgcggtgaatgcgcgaaagtatttcggagttaaggacgggtattacggaaattgtagtacgatgtacgtggtcgtggcgaagagcggcgcggtggcgaacgtcgatattaacgatattgtagatattatacggcgcgttaaggagcggatatcggagtagtttaagatgatcggcggtagcgatatgacgatgttacgggagttcgtcgatgattatcgtttggatggatatgagagtttgttttatttgatattatggcgaaatatcggattcgaagatgttgatttcggtagcgggaagacggcgagggtgatgatttattcgtagagggtggtgttttttatgtcgatgatggtaaaggttatgtcgatttgcgttatgtttaaggtaatagagtaag

SEQ ID NO: 40066 - DNA, 720 bp, Artificial Sequence
  chemically treated genomic DNA (Homo sapiens) CpG-island No: 40066
cttactctattaccttaaacataacgcaaatcgacataacctttaccatcatcgacataaaaaacaccaccctctacgaataaatcatcaccctcgccgtcttcccgctaccgaaatcaacatcttcgaatccgatatttcgccataatatcaaataaaacaaactctcatatccatccaaacgataatcatcgacgaactcccgtaacatcgtcatatcgctaccgccgatcatcttaaactactccgatatccgctccttaacgcgccgtataatatctacaatatcgttaatatcgacgttcgccaccgcgccgctcttcgccacgaccacgtacatcgtactacaatttccgtaatacccgtccttaactccgaaatactttcgcgcattcaccgcgaaaaacaatacgacgaaaacctccgaatttttcatcaccgcccgaatacgacactaccaaaacacgacgacgacaacctcgaacacgataacgtcgtcgttaattcgtcgtcctcgaaatcgaatataatcgatcaaactcgacgaaacgataatattattaaaaatataatcgataaataccttataactaaaactaaacataaactaataaacgaccataacgaaaaaaaatataacctaaataacgttattatcgtcgtctaacctaaccgaaacgacgaacgacgataacaaaccacgaataaactcgccgacga

SEQ ID NO: 40067 - DNA, 720 bp, Artificial Sequence
  chemically treated genomic DNA (Homo sapiens) CpG-island No: 40067
tttgttttgttgttttgagtatgacgtagatcggtatagtttttattattatcgatatggagagtattattttttgcgggtaggttattattttcgtcgttttttcgttgtcgaagttaatattttcgaattcgatgtttcgttatgatgttaagtagagtaggtttttatatttatttagacgatggttatcggcgagttttcgtagtatcgttatgtcgttgtcgtcggttattttgagttgtttcggtattcgttttttggcgcgtcgtatgatgtttataatgtcgttgatgtcggcgttcgttatcgcgtcgtttttcgttacggttacgtgtatcgtgttgtagttttcgtagtattcgtttttggtttcgagatattttcgcgtatttatcgcgaagagtagtacggcgggggttttcggattttttattatcgttcgggtacggtattgttaaagtacggcggcgatagtttcgaatacggtgacgtcgtcgttggttcgtcgttttcggaatcggatgtggtcgattaagttcgacgggacggtgatgttgttgaaggtgtggtcgatggatgttttgtggttggagttggatataaattgataaacggttatggcgaagggaggtatggtttgggtggcgttgttgtcgtcgtttaatttgatcgggacgacggacggcgatggtaggttacgggtgagttcgtcgacgg

SEQ ID NO: 40068 - DNA, 720 bp, Artificial Sequence
  chemically treated genomic DNA (Homo sapiens) CpG-island No: 40068
ccgtcgacgaactcacccgtaacctaccatcgccgtccgtcgtcccgatcaaattaaacgacgacaacaacgccacccaaaccatacctcccttcgccataaccgtttatcaatttatatccaactccaaccacaaaacatccatcgaccacaccttcaacaacatcaccgtcccgtcgaacttaatcgaccacatccgattccgaaaacgacgaaccaacgacgacgtcaccgtattcgaaactatcgccgccgtactttaacaataccgtacccgaacgataataaaaaatccgaaaacccccgccgtactactcttcgcgataaatacgcgaaaatatctcgaaaccaaaaacgaatactacgaaaactacaacacgatacacgtaaccgtaacgaaaaacgacgcgataacgaacgccgacatcaacgacattataaacatcatacgacgcgccaaaaaacgaataccgaaacaactcaaaataaccgacgacaacgacataacgatactacgaaaactcgccgataaccatcgtctaaataaatataaaaacctactctacttaacatcataacgaaacatcgaattcgaaaatattaacttcgacaacgaaaaaacgacgaaaataataacctacccgcaaaaaataatactctccatatcgataataataaaaactataccgatctacgtcatactcaaaacaacaaaacaaa

SEQ ID NO: 40069 - DNA, 653 bp, Artificial Sequence
  chemically treated genomic DNA (Homo sapiens) CpG-island No: 40069
gtcggaggtagatgtgacgtgggggtatatttgttcgtttagttaaatgtgatcggtgataggtcggttatagattagatgtgatcgacgacgggatgtgtgagcgtaagtttttttatcgagagtggcgatagttttttgaggtatttggaattttagattttcgttgttatcgttatcgtcggcgggggttttttttttagatttttttcgttgattattggttggggtcgtgagggttttgttttttcgtcgattttgtcgtttttttttatcggtttttcgaaatcgttcggttaagtttttgatcgagcggtagtcggtaagattgtgtcgataagtattgtgtatcgagtattatttgttcgcggatcgatttttattagaaggggcggtatagttcgttttgtcgtcggtggttttttttttgcgcggggttcgcgagggtttattagtcgtaaggacgtggttttcgttattagagcgggttggttttcgtttgttttttttgtttcgtcgtttggagcggggggtagtttcgggggcggtcgttgtcgtcgtatcggtgttgggggagttttaagtttacgttttttttttttgagttattttgttcgttagttcgaagagtttagcggtggttttaggttttt

SEQ ID NO: 40070 - DNA, 653 bp, Artificial Sequence
  chemically treated genomic DNA (Homo sapiens) CpG-island No: 40070
aaaaacctaaaaccaccgctaaactcttcgaactaacgaacaaaataactcaaaaaaaaaaaacgtaaacttaaaactcccccaacaccgatacgacgacaacgaccgcccccgaaactaccccccgctccaaacgacgaaacaaaaaaaacaaacgaaaaccaacccgctctaataacgaaaaccacgtccttacgactaataaaccctcgcgaaccccgcgcaaaaaaaaaaccaccgacgacaaaacgaactataccgccccttctaataaaaatcgatccgcgaacaaataatactcgatacacaatacttatcgacacaatcttaccgactaccgctcgatcaaaaacttaaccgaacgatttcgaaaaaccgataaaaaaaaacgacaaaatcgacgaaaaaacaaaaccctcacgaccccaaccaataatcaacgaaaaaaatctaaaaaaaaaacccccgccgacgataacgataacaacgaaaatctaaaattccaaatacctcaaaaaactatcgccactctcgataaaaaaacttacgctcacacatcccgtcgtcgatcacatctaatctataaccgacctatcaccgatcacatttaactaaacgaacaaatatacccccacgtcacatctacctccgac

SEQ ID NO: 40071 - DNA, 653 bp, Artificial Sequence
  chemically treated genomic DNA (Homo sapiens) CpG-island No: 40071
aggagtttaagattatcgttgagtttttcgagttagcggataaggtggtttagaaggaggaggcgtgggtttggaatttttttagtatcggtgcggcggtagcggtcgttttcgagattgtttttcgttttaagcggcgggatagaaggggtaagcggaagttagttcgttttgatgacgagggttacgtttttgcggttgatgggttttcgcgggtttcgcgtagggaaagggttatcgacggtaagacgagttatatcgttttttttggtaagggtcggttcgcggataagtggtgttcggtgtataatatttatcggtatagttttgtcgattgtcgttcggttaagaatttggtcgagcggtttcgaaaagtcgatgaggagaagcggtagagtcgacgggagggtaaagtttttacgattttagttaatgattagcgagaggagtttaagaagaaggttttcgtcgacgatggcgatgatagcgagggtttggagttttaggtattttagggaattgtcgttattttcgatgggggggtttgcgtttatatatttcgtcgtcggttatatttgatttgtgatcggtttgttatcggttatatttgattggacggatagatgtgtttttacgttatatttattttcggt

SEQ ID NO: 40072 - DNA, 653 bp, Artificial Sequence
  chemically treated genomic DNA (Homo sapiens) CpG-island No: 40072
accgaaaataaatataacgtaaaaacacatctatccgtccaatcaaatataaccgataacaaaccgatcacaaatcaaatataaccgacgacgaaatatataaacgcaaacccccccatcgaaaataacgacaattccctaaaatacctaaaactccaaaccctcgctatcatcgccatcgtcgacgaaaaccttcttcttaaactcctctcgctaatcattaactaaaatcgtaaaaactttaccctcccgtcgactctaccgcttctcctcatcgacttttcgaaaccgctcgaccaaattcttaaccgaacgacaatcgacaaaactataccgataaatattatacaccgaacaccacttatccgcgaaccgacccttaccaaaaaaaacgatataactcgtcttaccgtcgataaccctttccctacgcgaaacccgcgaaaacccatcaaccgcaaaaacgtaaccctcgtcatcaaaacgaactaacttccgcttaccccttctatcccgccgcttaaaacgaaaaacaatctcgaaaacgaccgctaccgccgcaccgatactaaaaaaattccaaacccacgcctcctccttctaaaccaccttatccgctaactcgaaaaactcaacgataatcttaaactcct

SEQ ID NO: 40073 - DNA, 722 bp, Artificial Sequence
  chemically treated genomic DNA (Homo sapiens) CpG-island No: 40073
tcggagattcgttacgaaggttttgtaattagttttttttggggtggacgtgaggggcgggtcgtcgcgcgaggagaaacgcggtattttagacgaggaggcgtttttttttatgcgggtagcgcggcgttcgtttcgtcgacgtttaatgttgattcgagcgttttgtttttcgtataggttatcgtgacgttttcgatttttcgaggtttttgacgacgttggggtcgtagatcgttttgaggttgtggttattcgacgggtttttttttttgttgacgaggagagggtggtggaggtacgtgatgtatttgtggcggtggaacggttatttacggttaatcgtcgttgggtagtggtgattaagttggcgacgtcgtttaattatcgttggacgggggttttcggttttacgtttatcggggggtgtcgtaggagggttttttttgtttaaagcgcgttttggggcgagttgtcgtcgcggtaggttaggtagcggcgcgttcggacgtgttatggtttttttttatttagaggcggggagagggtcgagttattcgattaggcgtgaattttttttcgtagggggtcggagaggggcggagttcgcgagtcgcgtcggcggtgacgcgggttgcgattttcgttggtatttttatttttggaaggagtaagggtttgtatttttatttttttttttaaaatttttattatgatcgttg

SEQ ID NO: 40074 - DNA, 722 bp, Artificial Sequence
  chemically treated genomic DNA (Homo sapiens) CpG-island No: 40074
caacgatcataataaaaattttaaaaaaaaaaataaaaatacaaacccttactccttccaaaaataaaaataccaacgaaaatcgcaacccgcgtcaccgccgacgcgactcgcgaactccgcccctctccgaccccctacgaaaaaaaattcacgcctaatcgaataactcgaccctctccccgcctctaaataaaaaaaaaccataacacgtccgaacgcgccgctacctaacctaccgcgacgacaactcgccccaaaacgcgctttaaacaaaaaaaaccctcctacgacaccccccgataaacgtaaaaccgaaaacccccgtccaacgataattaaacgacgtcgccaacttaatcaccactacccaacgacgattaaccgtaaataaccgttccaccgccacaaatacatcacgtacctccaccaccctctcctcgtcaacaaaaaaaaaaacccgtcgaataaccacaacctcaaaacgatctacgaccccaacgtcgtcaaaaacctcgaaaaatcgaaaacgtcacgataacctatacgaaaaacaaaacgctcgaatcaacattaaacgtcgacgaaacgaacgccgcgctacccgcataaaaaaaaacgcctcctcgtctaaaataccgcgtttctcctcgcgcgacgacccgcccctcacgtccaccccaaaaaaaactaattacaaaaccttcgtaacgaatctccga

SEQ ID NO: 40075 - DNA, 722 bp, Artificial Sequence
  chemically treated genomic DNA (Homo sapiens) CpG-island No: 40075
taacgattatggtggaggttttagaggaagaggtggaggtgtagatttttattttttttaggagtgaaggtgttagcgggagtcgtaattcgcgttatcgtcgacgcggttcgcggatttcgttttttttcgattttttgcggagggaggtttacgtttgatcgggtggttcggtttttttttcgtttttggatggggggaggttatggtacgttcgagcgcgtcgttgtttgatttatcgcgacggtagttcgttttagggcgcgttttaggtagggggagtttttttgcggtatttttcggtgaacgtggagtcggaggttttcgtttaacgatggttggacgacgtcgttaatttggttattattgtttagcggcggttggtcgtaagtggtcgttttatcgttataggtatattacgtatttttattatttttttttcgttagtaaggaggagggttcgtcggatagttatagttttaaggcgatttacggttttaacgtcgttaggggtttcggaaagtcggaggcgttacgatagtttatacggggagtaggacgttcgagttaatattgagcgtcgacgagacgagcgtcgcgttattcgtatgggagaaggcgttttttcgtttggagtgtcgcgttttttttcgcgcggcggttcgttttttacgtttattttagggggaattggttataaggttttcgtggcgagttttcgg

SEQ ID NO: 40076 - DNA, 722 bp, Artificial Sequence
  chemically treated genomic DNA (Homo sapiens) CpG-island No: 40076
ccgaaaactcgccacgaaaaccttataaccaattccccctaaaataaacgtaaaaaacgaaccgccgcgcgaaaaaaaacgcgacactccaaacgaaaaaacgccttctcccatacgaataacgcgacgctcgtctcgtcgacgctcaatattaactcgaacgtcctactccccgtataaactatcgtaacgcctccgactttccgaaacccctaacgacgttaaaaccgtaaatcgccttaaaactataactatccgacgaaccctcctccttactaacgaaaaaaaaataataaaaatacgtaatatacctataacgataaaacgaccacttacgaccaaccgccgctaaacaataataaccaaattaacgacgtcgtccaaccatcgttaaacgaaaacctccgactccacgttcaccgaaaaataccgcaaaaaaactccccctacctaaaacgcgccctaaaacgaactaccgtcgcgataaatcaaacaacgacgcgctcgaacgtaccataacctccccccatccaaaaacgaaaaaaaaaccgaaccacccgatcaaacgtaaacctccctccgcaaaaaatcgaaaaaaaacgaaatccgcgaaccgcgtcgacgataacgcgaattacgactcccgctaacaccttcactcctaaaaaaaataaaaatctacacctccacctcttcctctaaaacctccaccataatcgtta

SEQ ID NO: 40077 - DNA, 509 bp, Artificial Sequence
  chemically treated genomic DNA (Homo sapiens) CpG-island No: 40077
gcggcggtgcgcggttgcgcgtggtggcgcgcgcggtagcggcggcgtatgcggtagcgttatgcggggcgcggtcgatattgcggcgttgcggtgcgcgcgcgggcgttagaggcgttgtgcggtgggcgtggaatcgggtagcggcgttgtgcggggcgcggttgttggaagttcgcggtagtcgcgcgcggcgtgcggcgacgtcgggcggggcgcggtcggcggtagttcgcggtaatgcgaacggttgttacgacggcgggcggcggtgtcgtgcggggtatagtcggcggcggtttacggcggtgcggcggcgtggtcggcgtcgtaacgtgatgttatgttgcgtcgtgttttcgattcgtgtttgtattggtgaggttcgtttttgttatgatggatgatgtcgagaaaattttaattaattagatgtcgacgattttatttcggcgacggcggtttttatcgggagttataaaaacggaacgaggaatatgtaaagattt

SEQ ID NO: 40078 - DNA, 509 bp, Artificial Sequence
  chemically treated genomic DNA (Homo sapiens) CpG-island No: 40078
aaatctttacatattcctcgttccgtttttataactcccgataaaaaccgccgtcgccgaaataaaatcgtcgacatctaattaattaaaattttctcgacatcatccatcataacaaaaacgaacctcaccaatacaaacacgaatcgaaaacacgacgcaacataacatcacgttacgacgccgaccacgccgccgcaccgccgtaaaccgccgccgactataccccgcacgacaccgccgcccgccgtcgtaacaaccgttcgcattaccgcgaactaccgccgaccgcgccccgcccgacgtcgccgcacgccgcgcgcgactaccgcgaacttccaacaaccgcgccccgcacaacgccgctacccgattccacgcccaccgcacaacgcctctaacgcccgcgcgcgcaccgcaacgccgcaatatcgaccgcgccccgcataacgctaccgcatacgccgccgctaccgcgcgcgccaccacgcgcaaccgcgcaccgccgc

SEQ ID NO: 40079 - DNA, 509 bp, Artificial Sequence
  chemically treated genomic DNA (Homo sapiens) CpG-island No: 40079
aaatttttgtatgtttttcgtttcgtttttgtaattttcgatgaaaatcgtcgtcgtcgaggtggagtcgtcggtatttagttgattggggttttttcggtattatttattatggtagagacgaattttattaatgtaagtacggatcggagatacgacgtagtatggtattacgttgcgacgtcgattacgtcgtcgtatcgtcgtgagtcgtcgtcggttgtgtttcgtacggtatcgtcgttcgtcgtcgtagtagtcgttcgtattgtcgcgagttgtcgtcggtcgcgtttcgttcggcgtcgtcgtacgtcgcgcgcggttgtcgcgagtttttaatagtcgcgtttcgtatagcgtcgttgttcgattttacgtttatcgtatagcgtttttagcgttcgcgcgcgtatcgtaacgtcgtaatgtcggtcgcgtttcgtatggcgttgtcgtatgcgtcgtcgttgtcgcgcgcgttattacgcgtagtcgcgtatcgtcgt

SEQ ID NO: 40080 - DNA, 509 bp, Artificial Sequence
  chemically treated genomic DNA (Homo sapiens) CpG-island No: 40080
acgacgatacgcgactacgcgtaataacgcgcgcgacaacgacgacgcatacgacaacgccatacgaaacgcgaccgacattacgacgttacgatacgcgcgcgaacgctaaaaacgctatacgataaacgtaaaatcgaacaacgacgctatacgaaacgcgactattaaaaactcgcgacaaccgcgcgcgacgtacgacgacgccgaacgaaacgcgaccgacgacaactcgcgacaatacgaacgactactacgacgacgaacgacgataccgtacgaaacacaaccgacgacgactcacgacgatacgacgacgtaatcgacgtcgcaacgtaataccatactacgtcgtatctccgatccgtacttacattaataaaattcgtctctaccataataaataataccgaaaaaaccccaatcaactaaataccgacgactccacctcgacgacgacgattttcatcgaaaattacaaaaacgaaacgaaaaacatacaaaaattt

SEQ ID NO: 40081 - DNA, 565 bp, Artificial Sequence
  chemically treated genomic DNA (Homo sapiens) CpG-island No: 40081
ttatttacgttttgcgtttcgtgttcggcgtcggcgtcggcgcgggattttttttattttcgttcgttttttcgtagtcgtttttttcgtcgttcgttttttattcgtcgttatcgatgttattcgtttttttttcgtttttcgttgattttttttgtaggtcgtgcgacggcgcggttcgtggtttcgttttcggtgtcgtcgtagttagattcggttttttcgcggttggatttagtttcgttgtcgtcggatttggcggtcggaggagacggcgcgacggaggaggatgatcgcgataggttcgtacgacgaagcggcggaggtcgatgggtgtggtattatcgtcgtttttatcgttcgttttttttgcgatattatatttttttttttgttttttttttattttatttatcgataacgaggtttgtggcggcggcgtattcggttgtgtacgggcgttgtgttatcgtcgtttgttattttaatcgggtgtttttttggttcgattgagatggtttttttgtgacggtttattaattttaggtattttagaggttattat

SEQ ID NO: 40082 - DNA, 565 bp, Artificial Sequence
  chemically treated genomic DNA (Homo sapiens) CpG-island No: 40082
ataataacctctaaaatacctaaaattaataaaccgtcacaaaaaaaccatctcaatcgaaccaaaaaaacacccgattaaaataacaaacgacgataacacaacgcccgtacacaaccgaatacgccgccgccacaaacctcgttatcgataaataaaataaaaaaaaaacaaaaaaaaaaatataatatcgcaaaaaaaacgaacgataaaaacgacgataataccacacccatcgacctccgccgcttcgtcgtacgaacctatcgcgatcatcctcctccgtcgcgccgtctcctccgaccgccaaatccgacgacaacgaaactaaatccaaccgcgaaaaaaccgaatctaactacgacgacaccgaaaacgaaaccacgaaccgcgccgtcgcacgacctacaaaaaaaatcaacgaaaaacgaaaaaaaaacgaataacatcgataacgacgaataaaaaacgaacgacgaaaaaaacgactacgaaaaaacgaacgaaaataaaaaaaatcccgcgccgacgccgacgccgaacacgaaacgcaaaacgtaaataa

SEQ ID NO: 40083 - DNA, 565 bp, Artificial Sequence
  chemically treated genomic DNA (Homo sapiens) CpG-island No: 40083
atgatggtttttaaaatatttgaaattagtgggtcgttataaggaagttattttaatcgggttaaaaaagtattcgattgagatgataggcggcggtggtatagcgttcgtgtatagtcggatgcgtcgtcgttataagtttcgttgtcggtgggtggggtggggggagaataagggggggagtgtggtgtcgtagggaaggcggacgatgaaggcgacgatggtgttatatttatcggttttcgtcgtttcgtcgtacgaatttatcgcggttattttttttcgtcgcgtcgtttttttcggtcgttagattcggcggtagcggagttggatttagtcgcgggagggtcggatttgattacggcggtatcgaagacgaggttacgagtcgcgtcgtcgtacggtttgtaaggagagttaacggagaacggggggaggacggatgatatcggtggcggcgggtagagggcggacgacgagggaggcgattgcgggagggcggacggaggtggggggagtttcgcgtcggcgtcggcgtcgagtacgaggcgtagggcgtgggtgg

SEQ ID NO: 40084 - DNA, 565 bp, Artificial Sequence
  chemically treated genomic DNA (Homo sapiens) CpG-island No: 40084
ccacccacgccctacgcctcgtactcgacgccgacgccgacgcgaaactccccccacctccgtccgccctcccgcaatcgcctccctcgtcgtccgccctctacccgccgccaccgatatcatccgtcctccccccgttctccgttaactctccttacaaaccgtacgacgacgcgactcgtaacctcgtcttcgataccgccgtaatcaaatccgaccctcccgcgactaaatccaactccgctaccgccgaatctaacgaccgaaaaaaacgacgcgacgaaaaaaaataaccgcgataaattcgtacgacgaaacgacgaaaaccgataaatataacaccatcgtcgccttcatcgtccgccttccctacgacaccacactcccccccttattctccccccaccccacccaccgacaacgaaacttataacgacgacgcatccgactatacacgaacgctataccaccgccgcctatcatctcaatcgaatacttttttaacccgattaaaataacttccttataacgacccactaatttcaaatattttaaaaaccatcat

SEQ ID NO: 40085 - DNA, 927 bp, Artificial Sequence
  chemically treated genomic DNA (Homo sapiens) CpG-island No: 40085
aggtcgacgtcgaagtttagaggatgatcggcgacgtgtcggttgtcgagtatagttagttgtttatacgataggcggtcggtcgggtaaatcgggtttacgatagcgcgggtaagtgaagttggtttttaggaagcgaagggtttttttttttttttattttgacgtcgacgacgaggacgacgtcgaagatcgtgacgacgaggaggaaggcgaggaggaagaggaggcggaggttatggtcggaagggttgcggacgacgcggtcgaaaatcgcgttgaaatttttggttatatttttattttaagttcggggtataatgagatcggggtagagtcgaatagtttttttttttatcgaagggattcggaggtggcgagagcgttaatcgcgtttttagttggtaaggtggagaaggggagtttagttaaaaaggtcgttaagaagagaggattcgttaacgttggtcgtgtttttagcgacgacgagttttttgacgaaatttcgatttcgttcgtcggttattgtttagatttttcgatcgttttcgttttttcgatcgacgttagtagagcgggtggtagtggcgttgtcgtggttttagttttcgttgatcgcgtcgtgtaagttgcggttagggttttcggaagttttttgtgttagtcggtcgtttcgtcgttggtttagtcgaaggggaagggggcggtcgtcgaaatatttgtttcggattattttttcgtggcgttttattttgtttttggcgattttgagattcgggcggagtttattttttttgtcgagtgggtaagtaattttgtttcgtttgttagtatttcgagtttatttatcgaattgaatgagttcgacgaggggtgtttcgttattaaaagtttggcgttttgggtatgtttttttttttttagttt

SEQ ID NO: 40086 - DNA, 927 bp, Artificial Sequence
  chemically treated genomic DNA (Homo sapiens) CpG-island No: 40086
aaactaaaaaaaaaaaaacatacccaaaacgccaaacttttaataacgaaacacccctcgtcgaactcattcaattcgataaataaactcgaaatactaacaaacgaaacaaaattacttacccactcgacaaaaaaaataaactccgcccgaatctcaaaatcgccaaaaacaaaataaaacgccacgaaaaaataatccgaaacaaatatttcgacgaccgcccccttccccttcgactaaaccaacgacgaaacgaccgactaacacaaaaaacttccgaaaaccctaaccgcaacttacacgacgcgatcaacgaaaactaaaaccacgacaacgccactaccacccgctctactaacgtcgatcgaaaaaacgaaaacgatcgaaaaatctaaacaataaccgacgaacgaaatcgaaatttcgtcaaaaaactcgtcgtcgctaaaaacacgaccaacgttaacgaatcctctcttcttaacgacctttttaactaaactccccttctccaccttaccaactaaaaacgcgattaacgctctcgccacctccgaatcccttcgataaaaaaaaaaactattcgactctaccccgatctcattataccccgaacttaaaataaaaatataaccaaaaatttcaacgcgattttcgaccgcgtcgtccgcaacccttccgaccataacctccgcctcctcttcctcctcgccttcctcctcgtcgtcacgatcttcgacgtcgtcctcgtcgtcgacgtcaaaataaaaaaaaaaaaaaacccttcgcttcctaaaaaccaacttcacttacccgcgctatcgtaaacccgatttacccgaccgaccgcctatcgtataaacaactaactatactcgacaaccgacacgtcgccgatcatcctctaaacttcgacgtcgacct

SEQ ID NO: 40087 - DNA, 927 bp, Artificial Sequence
  chemically treated genomic DNA (Homo sapiens) CpG-island No: 40087
gagttaaaaaaaagggggtatatttaaagcgttaagtttttgatagcggaatatttttcgtcgaatttatttagttcggtgaatagattcggggtgttggtaggcgagataaggttgtttatttattcgataaagggaatgagtttcgttcgggttttaaaatcgttaggggtaaagtggggcgttacgagagaataattcgaggtagatgtttcgacggtcgtttttttttttttcggttagattagcggcgaaacgatcggttgatataaggggttttcgaaaattttagtcgtagtttgtacgacgcgattagcggaggttgaggttacggtagcgttattgttattcgttttgttaacgtcgatcgaaagaacgggggcggtcgaaagatttaagtaatgatcggcgggcgaagtcggggtttcgttagaagattcgtcgtcgttaaaaatacgattaacgttgacgagttttttttttttggcggtttttttaattggattttttttttttattttgttagttgaaaacgcgattagcgttttcgttattttcgaattttttcgatgaaggggggagttattcgattttatttcggttttattgtgtttcggatttggagtgggagtgtagttaggggttttaacgcggttttcgatcgcgtcgttcgtagttttttcgattatggttttcgtttttttttttttttcgttttttttttcgtcgttacgattttcgacgtcgttttcgtcgtcggcgttagaatgagaggaggaaggggtttttcgttttttaggggttagttttatttgttcgcgttgtcgtaaattcgatttgttcggtcggtcgtttgtcgtgtaagtaattggttgtattcgataatcgatacgtcgtcgattattttttgggtttcggcgtcggttt

SEQ ID NO: 40088 - DNA, 927 bp, Artificial Sequence
  chemically treated genomic DNA (Homo sapiens) CpG-island No: 40088
aaaccgacgccgaaacccaaaaaataatcgacgacgtatcgattatcgaatacaaccaattacttacacgacaaacgaccgaccgaacaaatcgaatttacgacaacgcgaacaaataaaactaacccctaaaaaacgaaaaaccccttcctcctctcattctaacgccgacgacgaaaacgacgtcgaaaatcgtaacgacgaaaaaaaaaacgaaaaaaaaaaaaaaacgaaaaccataatcgaaaaaactacgaacgacgcgatcgaaaaccgcgttaaaacccctaactacactcccactccaaatccgaaacacaataaaaccgaaataaaatcgaataactccccccttcatcgaaaaaattcgaaaataacgaaaacgctaatcgcgttttcaactaacaaaataaaaaaaaaaaatccaattaaaaaaaccgccaaaaaaaaaaaactcgtcaacgttaatcgtatttttaacgacgacgaatcttctaacgaaaccccgacttcgcccgccgatcattacttaaatctttcgaccgcccccgttctttcgatcgacgttaacaaaacgaataacaataacgctaccgtaacctcaacctccgctaatcgcgtcgtacaaactacgactaaaattttcgaaaaccccttatatcaaccgatcgtttcgccgctaatctaaccgaaaaaaaaaaaaacgaccgtcgaaacatctacctcgaattattctctcgtaacgccccactttacccctaacgattttaaaacccgaacgaaactcattccctttatcgaataaataaacaaccttatctcgcctaccaacaccccgaatctattcaccgaactaaataaattcgacgaaaaatattccgctatcaaaaacttaacgctttaaatatacccccttttttttaactc

SEQ ID NO: 40089 - DNA, 1587 bp, Artificial Sequence
  chemically treated genomic DNA (Homo sapiens) CpG-island No: 40089
tcgcggtagatcgagtatatagagacggtttacgggtcgacggaagcggatttcgtgtgttaatcgaggcgagtggttaataaacggattttattagatattacgcgggttgtatacgtgaaattacgcggttatcgagcgggtatattaatagggttattatacgtataagcgaacgattatcgatatcggtatacgggtattggggtcgataatcgtataacgggtacggggcgatatcgaaaggatgaggacggggtagcgagaggagagatttatattattacgcgacgaggcgagggaacgataacgacgaacgggcgcggcgtagacgaacggcgagggaacgatttcggcggcgatttttggacgaaggcgagatacggtcggtataaggtttgatgacgcggagtcgaggacgaagacgataacggggttgttacggttcgtttgatggacgcggacgacggacgagaacggtttgacggagggacgaatattacgacgatgaggacgacgatcgggatcggcgaggaggtaacgagggtagtcggcggtagttgtatagagattaggacggcgtggaatatatcgttgcgaattcgacgacggaggcggcgtagcgagacgacgagtcggcgaggaggaacgatcgatcggaggagtcgtcgacgaggacgaacggagacgacgataacgaatatcggcggggtttagatggaggggaggcgaggtcgagggcgattttgtcgttgcgatgtcggaggtggtggtggtgcggtcgacggtgtacgggtggaggaagggtcgatcggggaaatttcggcgaggcggatggagaggttcgcggcgatgtgcggcggttttcgggcgaattcgaggagtggatgaggtggagggttacgttatcgtgtcgagggaggagacggtagcgtcggttgacgtacgggtacggcggaaggggttgtcgaaggaatttcggcgaggcggagggcgagatcggcgcgggcgacgacgtttcggcgaaattcgagcgatgtcgtggtttggtcggggaagaggatggcgttgttgtgtcgggagaggtagcgacgatggaagacgacgttttggtaaagcgatataggcggttggaggtggtatagtggcggtaacgttattgtatattagcgaggaagcgttttcgttggttttcgtgcgaaacggagggtaggtcggcgtagaggggatatttgcgaggtcgaggaaggtggtggcgacgttagtcgtcgtacgggagaggcggtataggcggttggagggtagtcggcgtcgaggaaagagaaggaggaggcggggagaggtggtgcggttacgggggagttcgggaaggggttaaaacgagggaacggagcgagggggttttattttataggtaaagggaaggagtcggttacgggaggagcggggaacggcggcggaaaattcggtcggcggttatggaaggtggtcggggttggcgcgttcgtttttggcgatttaaggcgttatttaaggggaaaattaggggtaattgaagaggaaggaatggggattaaaattttttaa

SEQ ID NO: 40090 - DNA, 1587 bp, Artificial Sequence
  chemically treated genomic DNA (Homo sapiens) CpG-island No: 40090
ttaaaaaattttaatccccattccttcctcttcaattacccctaattttccccttaaataacgccttaaatcgccaaaaacgaacgcgccaaccccgaccaccttccataaccgccgaccgaattttccgccgccgttccccgctcctcccgtaaccgactccttccctttacctataaaataaaaccccctcgctccgttccctcgttttaaccccttcccgaactcccccgtaaccgcaccacctctccccgcctcctccttctctttcctcgacgccgactaccctccaaccgcctataccgcctctcccgtacgacgactaacgtcgccaccaccttcctcgacctcgcaaatatcccctctacgccgacctaccctccgtttcgcacgaaaaccaacgaaaacgcttcctcgctaatatacaataacgttaccgccactataccacctccaaccgcctatatcgctttaccaaaacgtcgtcttccatcgtcgctacctctcccgacacaacaacgccatcctcttccccgaccaaaccacgacatcgctcgaatttcgccgaaacgtcgtcgcccgcgccgatctcgccctccgcctcgccgaaattccttcgacaaccccttccgccgtacccgtacgtcaaccgacgctaccgtctcctccctcgacacgataacgtaaccctccacctcatccactcctcgaattcgcccgaaaaccgccgcacatcgccgcgaacctctccatccgcctcgccgaaatttccccgatcgacccttcctccacccgtacaccgtcgaccgcaccaccaccacctccgacatcgcaacgacaaaatcgccctcgacctcgcctcccctccatctaaaccccgccgatattcgttatcgtcgtctccgttcgtcctcgtcgacgactcctccgatcgatcgttcctcctcgccgactcgtcgtctcgctacgccgcctccgtcgtcgaattcgcaacgatatattccacgccgtcctaatctctatacaactaccgccgactaccctcgttacctcctcgccgatcccgatcgtcgtcctcatcgtcgtaatattcgtccctccgtcaaaccgttctcgtccgtcgtccgcgtccatcaaacgaaccgtaacaaccccgttatcgtcttcgtcctcgactccgcgtcatcaaaccttataccgaccgtatctcgccttcgtccaaaaatcgccgccgaaatcgttccctcgccgttcgtctacgccgcgcccgttcgtcgttatcgttccctcgcctcgtcgcgtaataatataaatctctcctctcgctaccccgtcctcatcctttcgatatcgccccgtacccgttatacgattatcgaccccaatacccgtataccgatatcgataatcgttcgcttatacgtataataaccctattaatatacccgctcgataaccgcgtaatttcacgtatacaacccgcgtaatatctaataaaatccgtttattaaccactcgcctcgattaacacacgaaatccgcttccgtcgacccgtaaaccgtctctatatactcgatctaccgcga

SEQ ID NO: 40091 - DNA, 1587 bp, Artificial Sequence
  chemically treated genomic DNA (Homo sapiens) CpG-island No: 40091
ttagggggttttaatttttatttttttttttttaattgtttttaattttttttttgaatagcgttttaaatcgttaggaacggacgcgttaatttcggttattttttatggtcgtcggtcgagtttttcgtcgtcgtttttcgtttttttcgtggtcggttttttttttttgtttataaaatggaattttttcgtttcgttttttcgttttagttttttttcgagttttttcgtggtcgtattattttttttcgtttttttttttttttttttcggcgtcggttattttttagtcgtttgtgtcgtttttttcgtgcggcggttgacgtcgttattatttttttcggtttcgtaggtgttttttttacgtcggtttgtttttcgtttcgtacggggattaacggagacgttttttcgttggtgtatagtggcgttgtcgttattgtattatttttagtcgtttgtgtcgttttgttagagcgtcgttttttatcgtcgttgtttttttcggtatagtagcgttattttttttttcggttaggttacggtatcgttcgaatttcgtcggaacgtcgtcgttcgcgtcggtttcgtttttcgtttcgtcggagttttttcggtagtttttttcgtcgtgttcgtgcgttagtcggcgttgtcgttttttttttcggtacggtgacgtagttttttattttatttatttttcggattcgttcggaagtcgtcgtatatcgtcgcgaatttttttattcgtttcgtcggaattttttcggtcggttttttttttattcgtgtatcgtcggtcgtattattattattttcggtatcgtagcggtagggtcgttttcgatttcgttttttttttatttgaatttcgtcggtgttcgttatcgtcgttttcgttcgttttcgtcgacgattttttcggtcggtcgttttttttcgtcggttcgtcgtttcgttgcgtcgttttcgtcgtcggattcgtagcggtgtgttttacgtcgttttagtttttgtgtagttgtcgtcggttgttttcgttgttttttcgtcggtttcggtcgtcgtttttatcgtcgtggtgttcgttttttcgttaagtcgttttcgttcgtcgttcgcgtttattaagcgagtcgtggtagtttcgttgtcgttttcgttttcggtttcgcgttattaagttttgtgtcggtcgtgtttcgttttcgtttaaggatcgtcgtcgaagtcgttttttcgtcgttcgtttacgtcgcgttcgttcgtcgttgtcgttttttcgtttcgtcgcgtggtggtatggattttttttttcgttgtttcgtttttattttttcggtgtcgtttcgtattcgttgtgcggttgtcgattttagtattcgtgtatcggtgtcggtagtcgttcgtttgtacgtgtggtgattttgttagtgtgttcgttcggtagtcgcgtggttttacgtgtgtagttcgcgtggtgtttagtggagttcgtttgttggttattcgtttcggttgatatacggggttcgttttcgtcgattcgtggatcgtttttgtgtattcggtttatcgcgg

SEQ ID NO: 40092 - DNA, 1587 bp, Artificial Sequence
  chemically treated genomic DNA (Homo sapiens) CpG-island No: 40092
ccgcgataaaccgaatacacaaaaacgatccacgaatcgacgaaaacgaaccccgtatatcaaccgaaacgaataaccaacaaacgaactccactaaacaccacgcgaactacacacgtaaaaccacgcgactaccgaacgaacacactaacaaaatcaccacacgtacaaacgaacgactaccgacaccgatacacgaatactaaaatcgacaaccgcacaacgaatacgaaacgacaccgaaaaaataaaaacgaaacaacgaaaaaaaaaatccataccaccacgcgacgaaacgaaaaaacgacaacgacgaacgaacgcgacgtaaacgaacgacgaaaaaacgacttcgacgacgatccttaaacgaaaacgaaacacgaccgacacaaaacttaataacgcgaaaccgaaaacgaaaacgacaacgaaactaccacgactcgcttaataaacgcgaacgacgaacgaaaacgacttaacgaaaaaacgaacaccacgacgataaaaacgacgaccgaaaccgacgaaaaaacaacgaaaacaaccgacgacaactacacaaaaactaaaacgacgtaaaacacaccgctacgaatccgacgacgaaaacgacgcaacgaaacgacgaaccgacgaaaaaaaacgaccgaccgaaaaaatcgtcgacgaaaacgaacgaaaacgacgataacgaacaccgacgaaattcaaataaaaaaaaaacgaaatcgaaaacgaccctaccgctacgataccgaaaataataataatacgaccgacgatacacgaataaaaaaaaaaccgaccgaaaaaattccgacgaaacgaataaaaaaattcgcgacgatatacgacgacttccgaacgaatccgaaaaataaataaaataaaaaactacgtcaccgtaccgaaaaaaaaaacgacaacgccgactaacgcacgaacacgacgaaaaaaactaccgaaaaaactccgacgaaacgaaaaacgaaaccgacgcgaacgacgacgttccgacgaaattcgaacgataccgtaacctaaccgaaaaaaaaaataacgctactataccgaaaaaaacaacgacgataaaaaacgacgctctaacaaaacgacacaaacgactaaaaataatacaataacgacaacgccactatacaccaacgaaaaaacgtctccgttaatccccgtacgaaacgaaaaacaaaccgacgtaaaaaaaacacctacgaaaccgaaaaaaataataacgacgtcaaccgccgcacgaaaaaaacgacacaaacgactaaaaaataaccgacgccgaaaaaaaaaaaaaaaaaaacgaaaaaaaataatacgaccacgaaaaaactcgaaaaaaaactaaaacgaaaaaacgaaacgaaaaaattccattttataaacaaaaaaaaaaaaccgaccacgaaaaaaacgaaaaacgacgacgaaaaactcgaccgacgaccataaaaaataaccgaaattaacgcgtccgttcctaacgatttaaaacgctattcaaaaaaaaaattaaaaacaattaaaaaaaaaaaaataaaaattaaaaccccctaa

SEQ ID NO: 40093 - DNA, 791 bp, Artificial Sequence
  chemically treated genomic DNA (Homo sapiens) CpG-island No: 40093
gttgttgttgtggttggttcggtttgcgatcggcgcgttacggttagtatcggcgggtcgcgcgtcggtggcggcggtgcgttcgttttgcggttggttttttgtttgtttcgcgtttgtgtcgtcgtttttttgttgggtcgcggggggggtggttgtgtgtggagtttggtagtggacgggttggcgtagtttgttacggtcgttcgggcgttttcggtcgtttttcgtttggcgcggcggtggtcgtttgttggttgtagcggggtcgttcgttcggcgcgtgttgtcggtgcgggtggtttgtggtggtttgttcgttcgtgcgtgttgtcgttttgttttttttgtgttggtcgtgtggttgttgcgttggtggtgtagtgggtgtgttcgtttttgtgtgtttcgtgtgggtgtgtttgcgtttggttgtttgttcgttacgggtaggtcgttttttttcggcggttcgcgggcgcggtttgtgttcggttttgttgtcggcgcggagtcgttcgggtggttgtgggggttcggtcggtgttttggttttcggttttttttgtgtttcgtttttagcgttgtgtcggcgcgtcgtcgtttgttgtggtttggatatgcgtggagagagttgagggattagtttagtgtcgcgttgaggtgtggttgtgtgatttttcgtgttatgatcgtgacgcggttttgtggtgtgtttggtgttgtgtttgttcggtcgagttttgtggtggtcgttttgtcgttcgtagggtatgtattttattttgttt

SEQ ID NO: 40094 - DNA, 791 bp, Artificial Sequence
  chemically treated genomic DNA (Homo sapiens) CpG-island No: 40094
aaacaaaataaaatacataccctacgaacgacaaaacgaccaccacaaaactcgaccgaacaaacacaacaccaaacacaccacaaaaccgcgtcacgatcataacacgaaaaatcacacaaccacacctcaacgcgacactaaactaatccctcaactctctccacgcatatccaaaccacaacaaacgacgacgcgccgacacaacgctaaaaacgaaacacaaaaaaaaccgaaaaccaaaacaccgaccgaacccccacaaccacccgaacgactccgcgccgacaacaaaaccgaacacaaaccgcgcccgcgaaccgccgaaaaaaaacgacctacccgtaacgaacaaacaaccaaacgcaaacacacccacacgaaacacacaaaaacgaacacacccactacaccaccaacgcaacaaccacacgaccaacacaaaaaaaacaaaacgacaacacgcacgaacgaacaaaccaccacaaaccacccgcaccgacaacacgcgccgaacgaacgaccccgctacaaccaacaaacgaccaccgccgcgccaaacgaaaaacgaccgaaaacgcccgaacgaccgtaacaaactacgccaacccgtccactaccaaactccacacacaaccaccccccccgcgacccaacaaaaaaacgacgacacaaacgcgaaacaaacaaaaaaccaaccgcaaaacgaacgcaccgccgccaccgacgcgcgacccgccgatactaaccgtaacgcgccgatcgcaaaccgaaccaaccacaacaacaac

SEQ ID NO: 40095 - DNA, 791 bp, Artificial Sequence
  chemically treated genomic DNA (Homo sapiens) CpG-island No: 40095
agataaagtagaatgtatattttacgaacgataaggcgattattataagattcgatcgaataaatataatattaaatatattataagatcgcgttacgattatagtacggagaattatatagttatattttagcgcgatattaaattagttttttagttttttttacgtatatttaggttatagtaaacgacggcgcgtcgatatagcgttgagaacggagtatagaaggaatcgagaattaagatatcggtcgagtttttatagttattcgaacgatttcgcgtcgataatagagtcggatataggtcgcgttcgcgagtcgtcgagggagagcgatttgttcgtaacgagtaaataattaagcgtagatatatttatacgagatatataagaacgagtatatttattgtattattaacgtaatagttatacgattaatataagaaagataagacgataatacgtacgaacgagtaaattattataaattattcgtatcggtagtacgcgtcgggcgagcgatttcgttataattagtagacgattatcgtcgcgttaagcgagaagcggtcggaggcgttcggacgatcgtagtaggttgcgttagttcgtttattattagattttatatataattatttttttcgcgatttaataaaaagacgacgatatagacgcggaataaatagggggttagtcgtaagacggacgtatcgtcgttatcggcgcgcggttcgtcggtgttgatcgtagcgcgtcgatcgtaagtcgaattaattatagtaataat

SEQ ID NO: 40096 - DNA, 791 bp, Artificial Sequence
  chemically treated genomic DNA (Homo sapiens) CpG-island No: 40096
attattactataattaattcgacttacgatcgacgcgctacgatcaacaccgacgaaccgcgcgccgataacgacgatacgtccgtcttacgactaaccccctatttattccgcgtctatatcgtcgtctttttattaaatcgcgaaaaaaataattatatataaaatctaataataaacgaactaacgcaacctactacgatcgtccgaacgcctccgaccgcttctcgcttaacgcgacgataatcgtctactaattataacgaaatcgctcgcccgacgcgtactaccgatacgaataatttataataatttactcgttcgtacgtattatcgtcttatctttcttatattaatcgtataactattacgttaataatacaataaatatactcgttcttatatatctcgtataaatatatctacgcttaattatttactcgttacgaacaaatcgctctccctcgacgactcgcgaacgcgacctatatccgactctattatcgacgcgaaatcgttcgaataactataaaaactcgaccgatatcttaattctcgattccttctatactccgttctcaacgctatatcgacgcgccgtcgtttactataacctaaatatacgtaaaaaaaactaaaaaactaatttaatatcgcgctaaaatataactatataattctccgtactataatcgtaacgcgatcttataatatatttaatattatatttattcgatcgaatcttataataatcgccttatcgttcgtaaaatatacattctactttatct

SEQ ID NO: 40097 - DNA, 842 bp, Artificial Sequence
  chemically treated genomic DNA (Homo sapiens) CpG-island No: 40097
cgttgttggcgtttttttataggtttcgtttttttgacgagtattataaaaatcgacgtttaagttagaggtggcgaaattcgataggattataaagatattaggcgtttttttttggaagttttttcgtgcgtttttttgtttcgattttgtcgtttatcggatatttgttcgttttttttttttcgggaagcgtggcgttttttttagtttacgttggaggtattttagttcggtgtaggtcgttcgttttaagttgggttgtgggtacgaatttttcgtttagttcgtcggtgtggtttattcggtaattttcggtttgagtttattcgggtaggatttattttttgttttgtggggggttatcggtatcgtcgttgcgttttttcgtttttgtcgtggttttcgatgttttgatggggtgcgcgttagcgcgtgtcggtgtattggtggttttttcgtattttgtgtgcggtgcgtttcgttcgaaattgagagtttttatttttcgttatatttttttcgattttgtggtttttttttttgtgtatttttttagatttaatatgtcgatggcgttttgtgagggtttcggttttacggcgtgatgttagtttcggtagtcggcgtcgtaatttgggattaagagacgcgaataataatacgggtgtcgggtggttttgtttcgcgcggttcgtttttgcgtcgcggtgtttgtatgggcggtgaatagggatgaggatgtgaggcgggatggggagtaggagagtaagggtgggtgtttagtaatgagcgtggggtgaaaaatattggcgataagcgacgggcggcggttgtggaat

SEQ ID NO: 40098 - DNA, 842 bp, Artificial Sequence
  chemically treated genomic DNA (Homo sapiens) CpG-island No: 40098
attccacaaccgccgcccgtcgcttatcgccaatatttttcaccccacgctcattactaaacacccacccttactctcctactccccatcccgcctcacatcctcatccctattcaccgcccatacaaacaccgcgacgcaaaaacgaaccgcgcgaaacaaaaccacccgacacccgtattattattcgcgtctcttaatcccaaattacgacgccgactaccgaaactaacatcacgccgtaaaaccgaaaccctcacaaaacgccatcgacatattaaatctaaaaaaatacacaaaaaaaaaaaccacaaaatcgaaaaaaatataacgaaaaataaaaactctcaatttcgaacgaaacgcaccgcacacaaaatacgaaaaaaccaccaatacaccgacacgcgctaacgcgcaccccatcaaaacatcgaaaaccacgacaaaaacgaaaaaacgcaacgacgataccgataaccccccacaaaacaaaaaataaatcctacccgaataaactcaaaccgaaaattaccgaataaaccacaccgacgaactaaacgaaaaattcgtacccacaacccaacttaaaacgaacgacctacaccgaactaaaatacctccaacgtaaactaaaaaaaacgccacgcttcccgaaaaaaaaaaaacgaacaaatatccgataaacgacaaaatcgaaacaaaaaaacgcacgaaaaaacttccaaaaaaaaacgcctaatatctttataatcctatcgaatttcgccacctctaacttaaacgtcgatttttataatactcgtcaaaaaaacgaaacctataaaaaaacgccaacaacg

SEQ ID NO: 40099 - DNA, 842 bp, Artificial Sequence
  chemically treated genomic DNA (Homo sapiens) CpG-island No: 40099
attttataatcgtcgttcgtcgtttgtcgttaatattttttattttacgtttattgttaaatatttatttttatttttttgttttttatttcgttttatatttttatttttatttatcgtttatataagtatcgcggcgtagaagcgggtcgcgcgggatagagttattcgatattcgtgttgttattcgcgttttttaattttaggttgcggcgtcgattatcgagattgatattacgtcgtaaagtcgaggtttttataaagcgttatcggtatattgggtttgaaaggatatataaagaaggaaattataaaatcggggggggtatgacgggaagtaggggtttttaatttcgagcgaaacgtatcgtatatagaatacggagaaattattagtatatcgatacgcgttagcgcgtattttattaagatatcgggggttacgatagaagcggaggaacgtaacgacggtatcggtggttttttataggataaaaagtaggttttattcgggtggatttaagtcgaaagttatcggataagttatatcggcgggttgaacggggggttcgtgtttatagtttagtttggagcgaacgatttatatcgaattgagatatttttagcgtgagttagagaaagcgttacgtttttcgaagggagaaaggcggataggtattcggtaagcggtagggtcggaataggagagcgtacgagggagtttttagggggaaacgtttggtatttttatagttttgtcgggtttcgttatttttgatttgagcgtcgatttttgtgatgttcgttaggggggcggagtttatggaaaaacgttagtaacg

SEQ ID NO: 40100 - DNA, 842 bp, Artificial Sequence
  chemically treated genomic DNA (Homo sapiens) CpG-island No: 40100
cgttactaacgtttttccataaactccgcccccctaacgaacatcacaaaaatcgacgctcaaatcaaaaataacgaaacccgacaaaactataaaaataccaaacgtttccccctaaaaactccctcgtacgctctcctattccgaccctaccgcttaccgaatacctatccgcctttctcccttcgaaaaacgtaacgctttctctaactcacgctaaaaatatctcaattcgatataaatcgttcgctccaaactaaactataaacacgaaccccccgttcaacccgccgatataacttatccgataactttcgacttaaatccacccgaataaaacctactttttatcctataaaaaaccaccgataccgtcgttacgttcctccgcttctatcgtaacccccgatatcttaataaaatacgcgctaacgcgtatcgatatactaataatttctccgtattctatatacgatacgtttcgctcgaaattaaaaacccctacttcccgtcataccccccccgattttataatttccttctttatatatcctttcaaacccaatataccgataacgctttataaaaacctcgactttacgacgtaatatcaatctcgataatcgacgccgcaacctaaaattaaaaaacgcgaataacaacacgaatatcgaataactctatcccgcgcgacccgcttctacgccgcgatacttatataaacgataaataaaaataaaaatataaaacgaaataaaaaacaaaaaaataaaaataaatatttaacaataaacgtaaaataaaaaatattaacgacaaacgacgaacgacgattataaaat

SEQ ID NO: 40101 - DNA, 1193 bp, Artificial Sequence
  chemically treated genomic DNA (Homo sapiens) CpG-island No: 40101
  unsure (73, 104, 907, 944)
gcgacgtttagagtttatagcgtattttttatttttttatattcgtaagttatcgcgcggatgttttattgtnagcgtagcgcgtatagcgacgtaattgtttnttagtcgcgttcgatttttatgtttgacgttattttcgcgcgatttacggtttgtttattacgtacgtttgtgtcgatagcgttgtcgtcgtttggttcgcgcggagttcgtattcgttattcgttttgttttttttatatattttcgttttttacggtagattcgtttacgattatagcgagcgcgttagtttttttgtttttttttttgtatttttagcgcgatgtataacgcgcgtgagttcgtggtacggagtacgcgtttcgcgttacgtttttcggtcgttttttcgtcgtgtagtagtgtttagcgtgtcgttcgattgtatcgtttgaggatagtgtttttattagcgttgacgttcgttacgtggtttttttttcgtcgtatttgttcgcgcgtattttttatttttattttttagtcgtattatggttatattgttttttgtatagatatttgtgtgaatagtgcgttgttgttcgcgtggttttcgtcggttgttcgttagcggcgatagtttcgcgacgcggcgattatattataacgattttcgttaggttacgttgttatacggtaacgtcgtgtcgtaatattcgttcgttcgtatgtcgcgcgttcgcgcgttcgtagaatattgtcgcgtatcgttcgtatgcgtaggtaagttcgcgtcgttatatgtagttatcgcgtttcggagatttggttagttcgtatacgcgtattgaatttttttttacggttattattacgtcgttcgttatttgttcgcgttatttgtagcgatttttggttattntcgcggcggtttagtttcgtcgtttgtgttcgtttantttgtcgcgtatgcgtatcgttcgcgtaggcgcgttgtttagttatagttagtagacgtattacgatattttcgttcgtcgtttagattttacgtataggtttttttggatttggtgcgtaataggtaatacgcgtgcgtttggcgtgtagtatgagcgattttcgttgttgcgtatttgtgtagtttgcgtgggagcgttttatttcgttcgacgtgcgtcgttatttaaatgttgttttttacgtgt

SEQ ID NO: 40102 - DNA, 1193 bp, Artificial Sequence
  chemically treated genomic DNA (Homo sapiens) CpG-island No: 40102
  unsure (250, 287, 1090, 1121)
acacgtaaaaaacaacatttaaataacgacgcacgtcgaacgaaataaaacgctcccacgcaaactacacaaatacgcaacaacgaaaatcgctcatactacacgccaaacgcacgcgtattacctattacgcaccaaatccaaaaaaacctatacgtaaaatctaaacgacgaacgaaaatatcgtaatacgtctactaactataactaaacaacgcgcctacgcgaacgatacgcatacgcgacaaantaaacgaacacaaacgacgaaactaaaccgccgcganaataaccaaaaatcgctacaaataacgcgaacaaataacgaacgacgtaataataaccgtaaaaaaaaattcaatacgcgtatacgaactaaccaaatctccgaaacgcgataactacatataacgacgcgaacttacctacgcatacgaacgatacgcgacaatattctacgaacgcgcgaacgcgcgacatacgaacgaacgaatattacgacacgacgttaccgtataacaacgtaacctaacgaaaatcgttataatataatcgccgcgtcgcgaaactatcgccgctaacgaacaaccgacgaaaaccacgcgaacaacaacgcactattcacacaaatatctatacaaaaaacaatataaccataatacgactaaaaaataaaaataaaaaatacgcgcgaacaaatacgacgaaaaaaaaaccacgtaacgaacgtcaacgctaataaaaacactatcctcaaacgatacaatcgaacgacacgctaaacactactacacgacgaaaaaacgaccgaaaaacgtaacgcgaaacgcgtactccgtaccacgaactcacgcgcgttatacatcgcgctaaaaatacaaaaaaaaaaacaaaaaaactaacgcgctcgctataatcgtaaacgaatctaccgtaaaaaacgaaaatatataaaaaaaacaaaacgaataacgaatacgaactccgcgcgaaccaaacgacgacaacgctatcgacacaaacgtacgtaataaacaaaccgtaaatcgcgcgaaaataacgtcaaacataaaaatcgaacgcgactaanaaacaattacgtcgctatacgcgctacgctnacaataaaacatccgcgcgataacttacgaatataaaaaaataaaaaatacgctataaactctaaacgtcgc

SEQ ID NO: 40103 - DNA, 1193 bp, Artificial Sequence
  chemically treated genomic DNA (Homo sapiens) CpG-island No: 40103
  unsure (250, 287, 1090, 1121)
gtacgtgaggagtagtatttaggtggcgacgtacgtcgagcggagtgaggcgtttttacgtaggttgtataagtgcgtagtagcgagagtcgtttatattgtacgttaagcgtacgcgtattgtttgttgcgtattagatttaaggagatttatgcgtagagtttaagcgacgagcgagagtatcgtgatgcgtttattgattgtggttaggtagcgcgtttgcgcgagcgatgcgtatgcgcgatagantgagcgagtataggcgacgagattaggtcgtcgcgangatagttagagatcgttataggtggcgcggatagatagcgaacggcgtggtagtgatcgtagaggagagtttagtgcgcgtgtacgagttgattaagttttcgagacgcgatggttgtatgtggcgacgcggatttgtttgcgtatacggacgatgcgcggtagtattttgcgagcgcgcgagcgcgcgatatgcgagcgagcgagtgttgcggtacgacgttgtcgtatggtagcgtagtttgacgaggatcgttgtggtgtagtcgtcgcgtcgcgaagttgtcgtcgttggcgagtagtcggcgagagttacgcgagtaatagcgtattgtttatataggtgtttgtgtagaagatagtatggttatagtacggttgagagatagaagtaagagatgcgcgcgagtagatacgacgaggagaagattacgtggcgagcgttagcgttggtagagatattgtttttagacggtgtaatcgagcggtacgttggatattattgtacgacgagggggcgatcggaggacgtgacgcggagcgcgtgtttcgtgttacgagtttacgcgcgttgtgtatcgcgttagagatgtagaggaaagaatagagagattagcgcgttcgttgtgatcgtgagcgagtttgtcgtgagaggcgagagtgtgtgagaggagtaaagcgagtaacgagtacgggtttcgcgcgagttaggcgacggtaacgttatcgatatagacgtacgtgatggatagatcgtgggtcgcgcggaagtggcgttaggtatgggagtcgggcgcgattagngggtagttgcgtcgttgtgcgcgttgcgttngtagtgaggtattcgcgcgatggtttgcgggtatagagagatggagagtgcgttgtaggttttgggcgtcgt

SEQ ID NO: 40104 - DNA, 1193 bp, Artificial Sequence
  chemically treated genomic DNA (Homo sapiens) CpG-island No: 40104
  unsure (73, 104, 907, 944)
acgacgcccaaaacctacaacgcactctccatctctctatacccgcaaaccatcgcgcgaatacctcactacnaacgcaacgcgcacaacgacgcaactacccnctaatcgcgcccgactcccatacctaacgccacttccgcgcgacccacgatctatccatcacgtacgtctatatcgataacgttaccgtcgcctaactcgcgcgaaacccgtactcgttactcgctttactcctctcacacactctcgcctctcacgacaaactcgctcacgatcacaacgaacgcgctaatctctctattctttcctctacatctctaacgcgatacacaacgcgcgtaaactcgtaacacgaaacacgcgctccgcgtcacgtcctccgatcgccccctcgtcgtacaataatatccaacgtaccgctcgattacaccgtctaaaaacaatatctctaccaacgctaacgctcgccacgtaatcttctcctcgtcgtatctactcgcgcgcatctcttacttctatctctcaaccgtactataaccatactatcttctacacaaacacctatataaacaatacgctattactcgcgtaactctcgccgactactcgccaacgacgacaacttcgcgacgcgacgactacaccacaacgatcctcgtcaaactacgctaccatacgacaacgtcgtaccgcaacactcgctcgctcgcatatcgcgcgctcgcgcgctcgcaaaatactaccgcgcatcgtccgtatacgcaaacaaatccgcgtcgccacatacaaccatcgcgtctcgaaaacttaatcaactcgtacacgcgcactaaactctcctctacgatcactaccacgccgttcgctatctatccgcgccacctataacgatctctaactatcntcgcgacgacctaatctcgtcgcctatactcgctcantctatcgcgcatacgcatcgctcgcgcaaacgcgctacctaaccacaatcaataaacgcatcacgatactctcgctcgtcgcttaaactctacgcataaatctccttaaatctaatacgcaacaaacaatacgcgtacgcttaacgtacaatataaacgactctcgctactacgcacttatacaacctacgtaaaaacgcctcactccgctcgacgtacgtcgccacctaaatactactcctcacgtac

SEQ ID NO: 40105 - DNA, 518 bp, Artificial Sequence
  chemically treated genomic DNA (Homo sapiens) CpG-island No: 40105
gttagtgtcgcggtcgcggtcgtcgtcgacgtcgtcgtcgtcgtcgtttgggcggttgcgtttatatttatcggtcgtggacgcgcggcggttcgttggagcgttcgtagtcgcgtaaggattcgttggacgatagcggtagttgtttgagcggtagttagcggattttgttttcggtttcgtcgagttcgggttatttgggtcgcggcgcgttatcgttagtcgagttgtgcgtttttttcgagtggaaggcgttcggcgtttttttgagtttgttcgcgtttgagtttttcggtcgtcgcggtcgttacgattcgggttcgttttttatttttaagtttttgatcgagttcgagagtttcgggatcgacggcggcgttagtaacgggaggttgcgaggtcgcggtcgacgtggttaacgggtagtcgggttttaaaagtaatatgtttttggcgttcgggtagttttagggttttcgtgcgtagttttttttttttggggaggaaaatatcgtggg

SEQ ID NO: 40106 - DNA, 518 bp, Artificial Sequence
  chemically treated genomic DNA (Homo sapiens) CpG-island No: 40106
cccacgatattttcctccccaaaaaaaaaaaactacgcacgaaaaccctaaaactacccgaacgccaaaaacatattacttttaaaacccgactacccgttaaccacgtcgaccgcgacctcgcaacctcccgttactaacgccgccgtcgatcccgaaactctcgaactcgatcaaaaacttaaaaataaaaaacgaacccgaatcgtaacgaccgcgacgaccgaaaaactcaaacgcgaacaaactcaaaaaaacgccgaacgccttccactcgaaaaaaacgcacaactcgactaacgataacgcgccgcgacccaaataacccgaactcgacgaaaccgaaaacaaaatccgctaactaccgctcaaacaactaccgctatcgtccaacgaatccttacgcgactacgaacgctccaacgaaccgccgcgcgtccacgaccgataaatataaacgcaaccgcccaaacgacgacgacgacgacgtcgacgacgaccgcgaccgcgacactaac

SEQ ID NO: 40107 - DNA, 518 bp, Artificial Sequence
  chemically treated genomic DNA (Homo sapiens) CpG-island No: 40107
tttacgatgtttttttttttagggaaagaaagttgcgtacgggggttttaaaattgttcgggcgttaggggtatgttgtttttgaagttcggttgttcgttggttacgtcggtcgcggtttcgtagtttttcgttgttggcgtcgtcgtcggtttcggggttttcgggttcggttaggagtttgaaggtgaagagcgggttcgagtcgtggcggtcgcggcggtcggggggtttaggcgcgggtaggtttaggagggcgtcgggcgttttttattcggggaaggcgtatagttcgattggcggtggcgcgtcgcggtttaggtagttcgggttcggcgaggtcgagggtagggttcgttggttgtcgtttaggtagttgtcgttgtcgtttagcgagtttttgcgcgattgcgagcgttttagcgagtcgtcgcgcgtttacggtcggtaggtgtaggcgtagtcgtttaggcgacggcggcggcggcgtcggcggcggtcgcggtcgcggtattggt

SEQ ID NO: 40108 - DNA, 518 bp, Artificial Sequence
  chemically treated genomic DNA (Homo sapiens) CpG-island No: 40108
accaataccgcgaccgcgaccgccgccgacgccgccgccgccgtcgcctaaacgactacgcctacacctaccgaccgtaaacgcgcgacgactcgctaaaacgctcgcaatcgcgcaaaaactcgctaaacgacaacgacaactacctaaacgacaaccaacgaaccctaccctcgacctcgccgaacccgaactacctaaaccgcgacgcgccaccgccaatcgaactatacgccttccccgaataaaaaacgcccgacgccctcctaaacctacccgcgcctaaaccccccgaccgccgcgaccgccacgactcgaacccgctcttcaccttcaaactcctaaccgaacccgaaaaccccgaaaccgacgacgacgccaacaacgaaaaactacgaaaccgcgaccgacgtaaccaacgaacaaccgaacttcaaaaacaacatacccctaacgcccgaacaattttaaaacccccgtacgcaactttctttccctaaaaaaaaaaacatcgtaaa

SEQ ID NO: 40109 - DNA, 540 bp, Artificial Sequence
  chemically treated genomic DNA (Homo sapiens) CpG-island No: 40109
ataagtgcgcgtagtgattaggttcgatttttagagaggtcgttgggaattgtaggagatcgcggcgcgagcgtagaacgggttttgggtggaggaggggacgagcggagaggggcgcgggattcgcgggagggagcggagggggcgtaggcggacggttttgcgaacggagaaggggtgaggcgcggaggaaaaggttggatttcgcgttcgttatttattcgtggacgtttcgtttgggtcgttatggtttaagagcgcgttttttcgcgggtcggcgtatcgcgcggttattttcggcgtttttggtttcgtttcggcgtcggaattacgtggtgtttgttttgtcgtttacgttgtagattggtcggagttatcgcgggttggaatcgttttttatgaaaatattttgagtttaggatttttaattgtatttacgcgttgcgagtgtagaaggagagtttcgtgtcgtttggcgtttggttgtgagttaggtatagttttggttttcggtttgttttcgagggttgaggttttttg

SEQ ID NO: 40110 - DNA, 540 bp, Artificial Sequence
  chemically treated genomic DNA (Homo sapiens) CpG-island No: 40110
caaaaaacctcaaccctcgaaaacaaaccgaaaaccaaaactatacctaactcacaaccaaacgccaaacgacacgaaactctccttctacactcgcaacgcgtaaatacaattaaaaatcctaaactcaaaatattttcataaaaaacgattccaacccgcgataactccgaccaatctacaacgtaaacgacaaaacaaacaccacgtaattccgacgccgaaacgaaaccaaaaacgccgaaaataaccgcgcgatacgccgacccgcgaaaaaacgcgctcttaaaccataacgacccaaacgaaacgtccacgaataaataacgaacgcgaaatccaaccttttcctccgcgcctcaccccttctccgttcgcaaaaccgtccgcctacgccccctccgctccctcccgcgaatcccgcgcccctctccgctcgtcccctcctccacccaaaacccgttctacgctcgcgccgcgatctcctacaattcccaacgacctctctaaaaatcgaacctaatcactacgcgcacttat

SEQ ID NO: 40111 - DNA, 540 bp, Artificial Sequence
  chemically treated genomic DNA (Homo sapiens) CpG-island No: 40111
taagaagttttagttttcggggatagatcgaaggttagggttgtatttggtttataattaggcgttaagcggtacgggattttttttttgtattcgtagcgcgtgagtgtaattggagattttggatttaagatgtttttatgaggaacgattttagttcgcggtaatttcggttagtttgtagcgtggacgataaaataggtattacgtggtttcggcgtcggggcggggttagagacgtcggaagtgatcgcgcggtgcgtcggttcgcgaggaaacgcgtttttagattatggcgatttaggcgaagcgtttacgggtgagtggcgggcgcggggtttagttttttttttcgcgttttatttttttttcgttcgtagaatcgttcgtttgcgtttttttcgttttttttcgcgggtttcgcgttttttttcgttcgtttttttttttatttaaagttcgttttgcgttcgcgtcgcggttttttgtagtttttagcggtttttttgggggtcggatttggttattgcgcgtatttat

SEQ ID NO: 40112 - DNA, 540 bp, Artificial Sequence
  chemically treated genomic DNA (Homo sapiens) CpG-island No: 40112
ataaatacgcgcaataaccaaatccgacccccaaaaaaaccgctaaaaactacaaaaaaccgcgacgcgaacgcaaaacgaactttaaataaaaaaaaaaacgaacgaaaaaaaacgcgaaacccgcgaaaaaaaacgaaaaaaacgcaaacgaacgattctacgaacgaaaaaaaaataaaacgcgaaaaaaaaaactaaaccccgcgcccgccactcacccgtaaacgcttcgcctaaatcgccataatctaaaaacgcgtttcctcgcgaaccgacgcaccgcgcgatcacttccgacgtctctaaccccgccccgacgccgaaaccacgtaatacctattttatcgtccacgctacaaactaaccgaaattaccgcgaactaaaatcgttcctcataaaaacatcttaaatccaaaatctccaattacactcacgcgctacgaatacaaaaaaaaaatcccgtaccgcttaacgcctaattataaaccaaatacaaccctaaccttcgatctatccccgaaaactaaaacttctta

SEQ ID NO: 40113 - DNA, 1090 bp, Artificial Sequence
  chemically treated genomic DNA (Homo sapiens) CpG-island No: 40113
tttcgtggttgggggaattgcggttcgtttcggtaaagcggggattcgagtttttgtcgtcggttcgtaggagtttcgggttcgatgttttgttaatttgtttggggtgttcgtttttcgttttgcgaggtggggttaggttaagacgaggaggagttcgcgtaagcgtatttattattacggcggtgatcggttggttcgggatgtaggatatttcgattttgttttggtcgtttagcgtcgtttcgagaagtcggtagtagagtattcgcggtcgcgttttcgttgtttaataaaggtcgtttcgttcggttcgtttttttatgaatagttaataaatttttagttaattattggtcggagcgttatttcgttttcggaagtttttgcgcgtgcgtagaaaagcgggtagagggcggagcgtgttcggggcgtttacggcgtaggcgcggagggcggggcgggatttgggcgcgtgcgtagttcgagatttttcggtagtttttcgagtaagatggcgtcgcgggtattttttttattgttcgtttgagggaacgttaagtagtgtgttcggcgtcgtgttttaggtaattgggttatcgtggtcggggaacgtagacgcgttattatttttcggtcggttcggatttttaattttttcggcgtttttggaagattcgaggtttaggattggtgttaggtttcggaagttttagggggagggggcggcgtgaatttaatttatcgagtttcgggcgttatttgtaatttggtttttttcgtagtttcgcgttgtttcgcgagaaagcgagaggtcgagttcgggttggtgcgatggtcgcggtggtggttaagcgggaagggtcgtcgtttattagcgaggcggtcgtgcggggtaacgtcgtcgttttggattattgtcggatttcggtgttagcgttgtcgggggttacggtcggtattttcggttttatcggtttttacggttttattttttatttgttcgttttcgttttgttttttttgttttttatttttaaggcgggaaggaggtggaataaatattttaaattacggagattttttttta

SEQ ID NO: 40114 - DNA, 1090 bp, Artificial Sequence
  chemically treated genomic DNA (Homo sapiens) CpG-island No: 40114
taaaaaaaaatctccgtaatttaaaatatttattccacctccttcccgccttaaaaataaaaaacaaaaaaaacaaaacgaaaacgaacaaataaaaaataaaaccgtaaaaaccgataaaaccgaaaataccgaccgtaacccccgacaacgctaacaccgaaatccgacaataatccaaaacgacgacgttaccccgcacgaccgcctcgctaataaacgacgacccttcccgcttaaccaccaccgcgaccatcgcaccaacccgaactcgacctctcgctttctcgcgaaacaacgcgaaactacgaaaaaaaccaaattacaaataacgcccgaaactcgataaattaaattcacgccgccccctccccctaaaacttccgaaacctaacaccaatcctaaacctcgaatcttccaaaaacgccgaaaaaattaaaaatccgaaccgaccgaaaaataataacgcgtctacgttccccgaccacgataacccaattacctaaaacacgacgccgaacacactacttaacgttccctcaaacgaacaataaaaaaaatacccgcgacgccatcttactcgaaaaactaccgaaaaatctcgaactacgcacgcgcccaaatcccgccccgccctccgcgcctacgccgtaaacgccccgaacacgctccgccctctacccgcttttctacgcacgcgcaaaaacttccgaaaacgaaataacgctccgaccaataattaactaaaaatttattaactattcataaaaaaacgaaccgaacgaaacgacctttattaaacaacgaaaacgcgaccgcgaatactctactaccgacttctcgaaacgacgctaaacgaccaaaacaaaatcgaaatatcctacatcccgaaccaaccgatcaccgccgtaataataaatacgcttacgcgaactcctcctcgtcttaacctaaccccacctcgcaaaacgaaaaacgaacaccccaaacaaattaacaaaacatcgaacccgaaactcctacgaaccgacgacaaaaactcgaatccccgctttaccgaaacgaaccgcaattcccccaaccacgaaa

SEQ ID NO: 40115 - DNA, 1090 bp, Artificial Sequence
  chemically treated genomic DNA (Homo sapiens) CpG-island No: 40115
taaagagaggttttcgtgatttgaaatatttgttttatttttttttcgttttgagaatgaggagtagggagagtaggacggaggcgagtaggtagaagatgaagtcgtagaggtcggtgaggtcgaggatgtcggtcgtggttttcgatagcgttgatatcgaggttcggtaataatttaggacggcggcgttgtttcgtacggtcgtttcgttgatgaacggcggtttttttcgtttggttattatcgcggttatcgtattagttcgggttcggtttttcgttttttcgcggaataacgcggagttgcggagaaaattaagttataagtggcgttcggagttcggtgagttgggtttacgtcgttttttttttttggagttttcgagatttggtattagttttgggtttcggattttttaaagacgtcgaggagattgagggttcgggtcggtcgggaggtggtggcgcgtttgcgtttttcggttacggtggtttagttatttggaatacggcgtcggatatattatttagcgtttttttagacgggtagtggaagaaatgttcgcggcgttattttgttcggaagattgtcgggaggtttcgggttgcgtacgcgtttagatttcgtttcgtttttcgcgtttgcgtcgtgggcgtttcggatacgtttcgttttttgttcgtttttttgcgtacgcgtagggattttcgaaagcggagtggcgtttcggttagtgattggttggaggtttgttaattatttatgagggggcgggtcgagcggggcggtttttgttaagtagcgagggcgcgatcgcgggtattttgttgtcggtttttcggagcggcgttgggcgattagagtagggtcgagatgttttatatttcgggttagtcggttatcgtcgtggtggtgagtgcgtttgcgcgggttttttttcgttttggtttgattttatttcgtagagcgggaaacggatattttaagtaggttgatagagtatcgaattcggggtttttgcgaatcggcggtaagggttcgggttttcgttttgtcggagcgggtcgtagtttttttagttacgaaa

SEQ ID NO: 40116 - DNA, 1090 bp, Artificial Sequence
  chemically treated genomic DNA (Homo sapiens) CpG-island No: 40116
tttcgtaactaaaaaaactacgacccgctccgacaaaacgaaaacccgaacccttaccgccgattcgcaaaaaccccgaattcgatactctatcaacctacttaaaatatccgtttcccgctctacgaaataaaatcaaaccaaaacgaaaaaaaacccgcgcaaacgcactcaccaccacgacgataaccgactaacccgaaatataaaacatctcgaccctactctaatcgcccaacgccgctccgaaaaaccgacaacaaaatacccgcgatcgcgccctcgctacttaacaaaaaccgccccgctcgacccgccccctcataaataattaacaaacctccaaccaatcactaaccgaaacgccactccgctttcgaaaatccctacgcgtacgcaaaaaaacgaacaaaaaacgaaacgtatccgaaacgcccacgacgcaaacgcgaaaaacgaaacgaaatctaaacgcgtacgcaacccgaaacctcccgacaatcttccgaacaaaataacgccgcgaacatttcttccactacccgtctaaaaaaacgctaaataatatatccgacgccgtattccaaataactaaaccaccgtaaccgaaaaacgcaaacgcgccaccacctcccgaccgacccgaaccctcaatctcctcgacgtctttaaaaaatccgaaacccaaaactaataccaaatctcgaaaactccaaaaaaaaaaaacgacgtaaacccaactcaccgaactccgaacgccacttataacttaattttctccgcaactccgcgttattccgcgaaaaaacgaaaaaccgaacccgaactaatacgataaccgcgataataaccaaacgaaaaaaaccgccgttcatcaacgaaacgaccgtacgaaacaacgccgccgtcctaaattattaccgaacctcgatatcaacgctatcgaaaaccacgaccgacatcctcgacctcaccgacctctacgacttcatcttctacctactcgcctccgtcctactctccctactcctcattctcaaaacgaaaaaaaaataaaacaaatatttcaaatcacgaaaacctctcttta

SEQ ID NO: 40117 - DNA, 695 bp, Artificial Sequence
  chemically treated genomic DNA (Homo sapiens) CpG-island No: 40117
gaggtcgtttacgaaattgtcgttttttttatttaggaagcgtttttagtcgtcggtcgtttttatttagttttgttcgggggatcgttagttttgttcgaggaatggtatggtatcgcgagcggattagacggatggggagacggggtcggtttggtgggttcggggacgtgttattcggggcggatgttcggggtgtaggggttcgcgacgggggcggcggggcggcgggaacggcgcggggtattttgcggggtggcgggcgcggagaggattttaagcgttgtaggtttcgggagtgttgcgcggtagtagttgtcgtagtatttattttcgtagtcggtcgtagttttttgttgtcggaagagtcgttcgtttttagttcggtttttcggttcggaggttacgtggttttgtttatgggttcggtttgtttttcgaggcgtttgcggtttacgtttttttttcggttgtataatcgcgtcggtggaaatttgaagcggtgttgtcgggtcgggtatttcgtcgtttttggtattttcgcgcgtttttttcgtttttaggatatcgttgttttagagcgaggttcggcgtttggaaagatgcgtttcggttttttgtagttttcgggttgacggggtgtagggagggggtcggaggggcgtttgggtttttgcggggtgggcgtgaggagt

SEQ ID NO: 40118 - DNA, 695 bp, Artificial Sequence
  chemically treated genomic DNA (Homo sapiens) CpG-island No: 40118
actcctcacgcccaccccgcaaaaacccaaacgcccctccgaccccctccctacaccccgtcaacccgaaaactacaaaaaaccgaaacgcatctttccaaacgccgaacctcgctctaaaacaacgatatcctaaaaacgaaaaaaacgcgcgaaaataccaaaaacgacgaaatacccgacccgacaacaccgcttcaaatttccaccgacgcgattatacaaccgaaaaaaaaacgtaaaccgcaaacgcctcgaaaaacaaaccgaacccataaacaaaaccacgtaacctccgaaccgaaaaaccgaactaaaaacgaacgactcttccgacaacaaaaaactacgaccgactacgaaaataaatactacgacaactactaccgcgcaacactcccgaaacctacaacgcttaaaatcctctccgcgcccgccaccccgcaaaataccccgcgccgttcccgccgccccgccgcccccgtcgcgaacccctacaccccgaacatccgccccgaataacacgtccccgaacccaccaaaccgaccccgtctccccatccgtctaatccgctcgcgataccataccattcctcgaacaaaactaacgatcccccgaacaaaactaaataaaaacgaccgacgactaaaaacgcttcctaaataaaaaaaacgacaatttcgtaaacgacctc

SEQ ID NO: 40119 - DNA, 695 bp, Artificial Sequence
  chemically treated genomic DNA (Homo sapiens) CpG-island No: 40119
gttttttacgtttatttcgtagggatttagacgttttttcggttttttttttgtatttcgttagttcgggagttgtaggagatcggggcgtatttttttaagcgtcgggtttcgttttgggataacggtgttttgggggcggggagggcgcgcggaggtgttaggggcggcggggtattcggttcggtagtatcgttttaagtttttatcggcgcggttgtgtaatcgggaggggagcgtgagtcgtaggcgtttcggaaaataagtcgagtttataaataaagttacgtggttttcgggtcggggggtcgggttaagagcgggcggttttttcggtaataaagagttgcggtcggttgcggggataaatattgcggtagttattgtcgcgtagtattttcggagtttgtaacgtttgagatttttttcgcgttcgttatttcgtagggtgtttcgcgtcgttttcgtcgtttcgtcgttttcgtcgcgggtttttgtatttcgagtattcgtttcgggtggtacgttttcgagtttattaggtcggtttcgtttttttattcgtttagttcgttcgcggtgttatgttatttttcgggtaggattggcggtttttcgggtagaattgggtgaagacggtcgacggttggaagcgttttttggatgagaagagcggtagtttcgtgagcgatttt

SEQ ID NO: 40120 - DNA, 695 bp, Artificial Sequence
  chemically treated genomic DNA (Homo sapiens) CpG-island No: 40120
aaaatcgctcacgaaactaccgctcttctcatccaaaaaacgcttccaaccgtcgaccgtcttcacccaattctacccgaaaaaccgccaatcctacccgaaaaataacataacaccgcgaacgaactaaacgaataaaaaaacgaaaccgacctaataaactcgaaaacgtaccacccgaaacgaatactcgaaatacaaaaacccgcgacgaaaacgacgaaacgacgaaaacgacgcgaaacaccctacgaaataacgaacgcgaaaaaaatctcaaacgttacaaactccgaaaatactacgcgacaataactaccgcaatatttatccccgcaaccgaccgcaactctttattaccgaaaaaaccgcccgctcttaacccgaccccccgacccgaaaaccacgtaactttatttataaactcgacttattttccgaaacgcctacgactcacgctcccctcccgattacacaaccgcgccgataaaaacttaaaacgatactaccgaaccgaataccccgccgcccctaacacctccgcgcgccctccccgcccccaaaacaccgttatcccaaaacgaaacccgacgcttaaaaaaatacgccccgatctcctacaactcccgaactaacgaaatacaaaaaaaaaaccgaaaaaacgtctaaatccctacgaaataaacgtaaaaaac

SEQ ID NO: 40121 - DNA, 518 bp, Artificial Sequence
  chemically treated genomic DNA (Homo sapiens) CpG-island No: 40121
gatcggtgttcgtagttttcgttttttcggtcgtcgtttttacggggcggggttttggttcgggattagcgtcgcggttataaatgggttgcggcgaggtcggtagaacgttgtgatagttatacgttttaaggtttttaagatgagttatacgttggattcgttgggtaattcgttcgtttatcggcgggtaatcgagattcgttcgagttttagtcgcgttagcggtttttcgtttagtggttttcgttcgtagtcgtggtttcgcggttcgtttagtatcgtgttttttttttataagcgtagtatgttcgtttcgcgtttcgtttatagttcggttatgtttagtttcgtcgagagtagttttgattttagttagttttcgtttttgtttaacggcggtttcggattcggcggcgattataagttgtttcgttttaacgagaaggagtagttgtaggggttgaacgatcgttttgtcggttatatagagaaggtgtattatttggagtagtaga

SEQ ID NO: 40122 - DNA, 518 bp, Artificial Sequence
  chemically treated genomic DNA (Homo sapiens) CpG-island No: 40122
tctactactccaaataatacaccttctctatataaccgacaaaacgatcgttcaacccctacaactactccttctcgttaaaacgaaacaacttataatcgccgccgaatccgaaaccgccgttaaacaaaaacgaaaactaactaaaatcaaaactactctcgacgaaactaaacataaccgaactataaacgaaacgcgaaacgaacatactacgcttataaaaaaaaaacacgatactaaacgaaccgcgaaaccacgactacgaacgaaaaccactaaacgaaaaaccgctaacgcgactaaaactcgaacgaatctcgattacccgccgataaacgaacgaattacccaacgaatccaacgtataactcatcttaaaaaccttaaaacgtataactatcacaacgttctaccgacctcgccgcaacccatttataaccgcgacgctaatcccgaaccaaaaccccgccccgtaaaaacgacgaccgaaaaaacgaaaactacgaacaccgatc

SEQ ID NO: 40123 - DNA, 518 bp, Artificial Sequence
  chemically treated genomic DNA (Homo sapiens) CpG-island No: 40123
tttgttgttttaggtagtgtattttttttatgtagtcggtaaagcggtcgtttagtttttgtagttgttttttttcgttggagcgggatagtttgtagtcgtcgtcgggttcggagtcgtcgttgagtagggacgaggattggttgaagttaaggttgttttcggcggagttgagtatggtcgagttgtaagcgaggcgcggggcgagtatgttgcgtttataggaggaggatacggtgttgggcgagtcgcgggattacgattgcgagcggaagttattggacggggagtcgttgacgcggttgaagttcgagcgggtttcggttattcgtcggtaggcggacgggttgtttagcgagtttaacgtgtagtttattttggaggttttggggcgtgtggttgttatagcgttttgtcggtttcgtcgtagtttatttatagtcgcggcgttggtttcgggttagggtttcgtttcgtggaggcggcggtcgaggaggcggggattgcgggtatcggtt

SEQ ID NO: 40124 - DNA, 518 bp, Artificial Sequence
  chemically treated genomic DNA (Homo sapiens) CpG-island No: 40124
aaccgatacccgcaatccccgcctcctcgaccgccgcctccacgaaacgaaaccctaacccgaaaccaacgccgcgactataaataaactacgacgaaaccgacaaaacgctataacaaccacacgccccaaaacctccaaaataaactacacgttaaactcgctaaacaacccgtccgcctaccgacgaataaccgaaacccgctcgaacttcaaccgcgtcaacgactccccgtccaataacttccgctcgcaatcgtaatcccgcgactcgcccaacaccgtatcctcctcctataaacgcaacatactcgccccgcgcctcgcttacaactcgaccatactcaactccgccgaaaacaaccttaacttcaaccaatcctcgtccctactcaacgacgactccgaacccgacgacgactacaaactatcccgctccaacgaaaaaaaacaactacaaaaactaaacgaccgctttaccgactacataaaaaaaatacactacctaaaacaacaaa

SEQ ID NO: 40125 - DNA, 538 bp, Artificial Sequence
  chemically treated genomic DNA (Homo sapiens) CpG-island No: 40125
ggtggagcgtaaagattatttgaagatagatatttcgacggcgttgaaggaaattcgtttttagttcgaaagttatttagattagaatatgtattaggtcgaagagtggtttaaatgtcgttacgttaagtttatcgaggcggtcgagtagaataaggaggttattcgtttcgttaaggaagagatcgtcgagtatcggcgttagttgtagtttaagagtatcgagttagagtcggtgcgcggtattaaggagtttttggagcggtagtttagcgatatcgaggagcgttataattacgattttagtagttattaggtaggaatcgcggttgcgcggttagtttgcgttagcgttagcgtcgcgcgttttcgatatttgggttcgtgtttaggcgtttttttcgtcgcgttttttggtggtcgttcgttagagtacgcgcgtcgtagatttagggtatttgcggattagcgttttcgtttattttattttttatatttcgtttttatttatttgttttagttgttaagggttttgatt

SEQ ID NO: 40126 - DNA, 538 bp, Artificial Sequence
  chemically treated genomic DNA (Homo sapiens) CpG-island No: 40126
aatcaaaacccttaacaactaaaacaaataaataaaaacgaaatataaaaaataaaataaacgaaaacgctaatccgcaaataccctaaatctacgacgcgcgtactctaacgaacgaccaccaaaaaacgcgacgaaaaaaacgcctaaacacgaacccaaatatcgaaaacgcgcgacgctaacgctaacgcaaactaaccgcgcaaccgcgattcctacctaataactactaaaatcgtaattataacgctcctcgatatcgctaaactaccgctccaaaaactccttaataccgcgcaccgactctaactcgatactcttaaactacaactaacgccgatactcgacgatctcttccttaacgaaacgaataacctccttattctactcgaccgcctcgataaacttaacgtaacgacatttaaaccactcttcgacctaatacatattctaatctaaataactttcgaactaaaaacgaatttccttcaacgccgtcgaaatatctatcttcaaataatctttacgctccacc

SEQ ID NO: 40127 - DNA, 538 bp, Artificial Sequence
  chemically treated genomic DNA (Homo sapiens) CpG-island No: 40127
ggttaagatttttagtagttggggtaggtgggtgggggcggagtgtggaggatgagatgggcgaggacgttgattcgtaaatattttaggtttgcggcgcgcgtgttttagcgagcggttattagggagcgcggcggagagggcgtttgggtacgagtttaagtgtcgggggcgcgcggcgttggcgttggcgtaggttggtcgcgtagtcgcggtttttatttggtagttgttgaggtcgtggttgtggcgtttttcgatgtcgttgagttgtcgttttagggattttttggtgtcgcgtatcgattttagttcgatgtttttggattgtagttggcgtcggtattcggcgattttttttttggcggagcggatggtttttttgttttgttcggtcgtttcggtgagtttggcgtagcggtatttgaattatttttcggtttggtgtatattttggtttgagtggttttcgagttgggagcggattttttttagcgtcgtcgagatgtttgtttttaggtagtttttgcgttttatt

SEQ ID NO: 40128 - DNA, 538 bp, Artificial Sequence
  chemically treated genomic DNA (Homo sapiens) CpG-island No: 40128
aataaaacgcaaaaactacctaaaaacaaacatctcgacgacgctaaaaaaaatccgctcccaactcgaaaaccactcaaaccaaaatatacaccaaaccgaaaaataattcaaataccgctacgccaaactcaccgaaacgaccgaacaaaacaaaaaaaccatccgctccgccaaaaaaaaaatcgccgaataccgacgccaactacaatccaaaaacatcgaactaaaatcgatacgcgacaccaaaaaatccctaaaacgacaactcaacgacatcgaaaaacgccacaaccacgacctcaacaactaccaaataaaaaccgcgactacgcgaccaacctacgccaacgccaacgccgcgcgcccccgacacttaaactcgtacccaaacgccctctccgccgcgctccctaataaccgctcgctaaaacacgcgcgccgcaaacctaaaatatttacgaatcaacgtcctcgcccatctcatcctccacactccgcccccacccacctaccccaactactaaaaatcttaacc

SEQ ID NO: 40129 - DNA, 681 bp, Artificial Sequence
  chemically treated genomic DNA (Homo sapiens) CpG-island No: 40129
gcggcgcgggagggtaggtgggagattggaggcgttttcgcgttttttagttattcgggagtttcgcgtcggcgatttcgattttgtcgaattcggcggaatatttagaaagaagttgagcgtttcgtagcggttaggatagcgggttaggttcgcgcgttttcgtagcgtacggttagacgcgacgttttttagtacggaatttagtttcgcggattatttcgaagtttagagttatatttcgcgtagaggatcgcggcgatcggaaaagtaaggtagaggcggaaaattatcgcgaggtttcgtttttcgtttcgcgtttgcgtttgcggttgtatcggggttggtcgggtcgcggtggggcggggtcgtttaggcgttttggacgcggagtcgtgggacgagggcggcggtgagttcgaggtggtagagtgattggggcgagcgtgttgtggtttttttttgcgttgttttagggtgtttttcgttcgtcgggattgagtttcgcgtcggcgtggtttgttgggttttaagcgttaggagtcggcgtagtcgtttttagttttggggacgggatcgagaagcggggtgtgggttttacgggattgttttttttgatttcgggtagcgttggggcgagagagggtaggcggaggttcgcggggattattagtattttcg

SEQ ID NO: 40130 - DNA, 681 bp, Artificial Sequence
  chemically treated genomic DNA (Homo sapiens) CpG-island No: 40130
cgaaaatactaataatccccgcgaacctccgcctaccctctctcgccccaacgctacccgaaatcaaaaaaaacaatcccgtaaaacccacaccccgcttctcgatcccgtccccaaaactaaaaacgactacgccgactcctaacgcttaaaacccaacaaaccacgccgacgcgaaactcaatcccgacgaacgaaaaacaccctaaaacaacgcaaaaaaaaaccacaacacgctcgccccaatcactctaccacctcgaactcaccgccgccctcgtcccacgactccgcgtccaaaacgcctaaacgaccccgccccaccgcgacccgaccaaccccgatacaaccgcaaacgcaaacgcgaaacgaaaaacgaaacctcgcgataattttccgcctctaccttacttttccgatcgccgcgatcctctacgcgaaatataactctaaacttcgaaataatccgcgaaactaaattccgtactaaaaaacgtcgcgtctaaccgtacgctacgaaaacgcgcgaacctaacccgctatcctaaccgctacgaaacgctcaacttctttctaaatattccgccgaattcgacaaaatcgaaatcgccgacgcgaaactcccgaataactaaaaaacgcgaaaacgcctccaatctcccacctaccctcccgcgccgc

SEQ ID NO: 40131 - DNA, 681 bp, Artificial Sequence
  chemically treated genomic DNA (Homo sapiens) CpG-island No: 40131
cggggatgttggtggttttcgcgagttttcgtttgttttttttcgttttagcgttgttcgaggttaggggggatagtttcgtgaggtttatatttcgtttttcggtttcgtttttaaagttgagagcggttgcgtcgatttttggcgtttggaatttagtaggttacgtcggcgcggaatttagtttcggcgagcgggaggtattttgaggtagcgtagggaagggttatagtacgttcgttttagttattttgttatttcgaatttatcgtcgttttcgttttacggtttcgcgtttaaggcgtttgagcggtttcgttttatcgcggttcggttaatttcggtgtagtcgtagacgtaggcgcggagcgggaggcgggatttcgcggtggtttttcgtttttgttttgttttttcggtcgtcgcggttttttgcgcgggatgtggttttgagtttcggggtagttcgcgaggttgggtttcgtgttgaggggcgtcgcgtttggtcgtgcgttgcgggagcgcgcgggtttggttcgttgttttggtcgttgcgaggcgtttagtttttttttgagtgtttcgtcgggttcgatagggtcgaggtcgtcggcgcgaggttttcggatagttgaggggcgcgagggcgtttttagttttttatttgttttttcgcgtcgt

SEQ ID NO: 40132 - DNA, 681 bp, Artificial Sequence
  chemically treated genomic DNA (Homo sapiens) CpG-island No: 40132
acgacgcgaaaaaacaaataaaaaactaaaaacgccctcgcgcccctcaactatccgaaaacctcgcgccgacgacctcgaccctatcgaacccgacgaaacactcaaaaaaaaactaaacgcctcgcaacgaccaaaacaacgaaccaaacccgcgcgctcccgcaacgcacgaccaaacgcgacgcccctcaacacgaaacccaacctcgcgaactaccccgaaactcaaaaccacatcccgcgcaaaaaaccgcgacgaccgaaaaaacaaaacaaaaacgaaaaaccaccgcgaaatcccgcctcccgctccgcgcctacgtctacgactacaccgaaattaaccgaaccgcgataaaacgaaaccgctcaaacgccttaaacgcgaaaccgtaaaacgaaaacgacgataaattcgaaataacaaaataactaaaacgaacgtactataacccttccctacgctacctcaaaatacctcccgctcgccgaaactaaattccgcgccgacgtaacctactaaattccaaacgccaaaaatcgacgcaaccgctctcaactttaaaaacgaaaccgaaaaacgaaatataaacctcacgaaactatcccccctaacctcgaacaacgctaaaacgaaaaaaaacaaacgaaaactcgcgaaaaccaccaacatccccg

SEQ ID NO: 40133 - DNA, 748 bp, Artificial Sequence
  chemically treated genomic DNA (Homo sapiens) CpG-island No: 40133
  unsure (730..731, 743, 745)
gtaggagttttacgaggtgtaggtttagcgttttagaaggatgagtagcggttcgttatagttcggaggcgggtgggtagcgttttaggtcgagggtttcgcgtcggtaaagatataggatttacgataaggcggttacggtttgagttaaaaggaaggtcgcgcgttttttttttagttcgtagtaagcgggtgttacgaggtatttagtcggttttcgaagttttttttacgcggttttaagattattatcgtagtttaggttaataagcgttgtcgggattttcgaggttacgaatgagtcgggagttattagtagtcggttaagtttcgcgagagcgcggtttcgtttttttagtatgtttcgcgtcgtcgtcgttgtcgtcgtcgtcgtcgtcgtcgcgtcgcggtttgagggcgggaggttgggggagggtagcggagtcggcgtcgtcgttatgttgggtttgaagcggttgttgtaggcgtcgacggagcgagcgggcgtgcggagcgggcgatagtggcgtgggatttgtttttttgcgagtagttgggagcggcggcggcggcgttatgagcgggggtattttttatatcggtagtaagattagttttatttttaaggcggagattcgttacgagggtattttttatattatcgatatcgaaaattttatcgtagtttttgttaaaggtacgcgggatcgggttttagggttgggggttnnnaaaaataaagntnaat

SEQ ID NO: 40134 - DNA, 748 bp, Artificial Sequence
  chemically treated genomic DNA (Homo sapiens) CpG-island No: 40134
  unsure (4, 6, 17..)
attnanctttatttttnnnaacccccaaccctaaaacccgatcccgcgtacctttaacaaaaactacgataaaattttcgatatcgataatataaaaaataccctcgtaacgaatctccgccttaaaaataaaactaatcttactaccgatataaaaaatacccccgctcataacgccgccgccgccgctcccaactactcgcaaaaaaacaaatcccacgccactatcgcccgctccgcacgcccgctcgctccgtcgacgcctacaacaaccgcttcaaacccaacataacgacgacgccgactccgctaccctcccccaacctcccgccctcaaaccgcgacgcgacgacgacgacgacgacgacaacgacgacgacgcgaaacatactaaaaaaacgaaaccgcgctctcgcgaaacttaaccgactactaataactcccgactcattcgtaacctcgaaaatcccgacaacgcttattaacctaaactacgataataatcttaaaaccgcgtaaaaaaaacttcgaaaaccgactaaatacctcgtaacacccgcttactacgaactaaaaaaaaaacgcgcgaccttccttttaactcaaaccgtaaccgccttatcgtaaatcctatatctttaccgacgcgaaaccctcgacctaaaacgctacccacccgcctccgaactataacgaaccgctactcatccttctaaaacgctaaacctacacctcgtaaaactcctac

SEQ ID NO: 40135 - DNA, 748 bp, Artificial Sequence
  chemically treated genomic DNA (Homo sapiens) CpG-island No: 40135
  unsure (4, 6, 17..)
attnanttttatttttnnnaatttttagttttgaggttcggtttcgcgtatttttggtaagggttacggtggagttttcggtgtcgatggtgtagaggatgttttcgtagcggattttcgttttggagatgaggttgattttgttgtcgatgtaaggggtgttttcgtttatggcgtcgtcgtcgtcgtttttagttgttcgtagagaggtagattttacgttattgtcgttcgtttcgtacgttcgttcgtttcgtcggcgtttatagtagtcgttttagatttaatatggcggcggcgtcggtttcgttatttttttttagtttttcgtttttaagtcgcggcgcggcggcggcggcggcggcggtagcggcggcggcgcggggtatgttgggagggcgaggtcgcgttttcgcgagatttggtcggttattggtggttttcggtttattcgtggtttcgggagtttcggtagcgtttgttggtttggattacggtggtggttttggggtcgcgtgagaggaatttcggggatcggttgagtgtttcgtggtattcgtttgttgcgggttggagaggaggcgcgcggttttttttttgatttaggtcgtggtcgttttgtcgtgggttttgtgtttttgtcgacgcggggttttcggtttggagcgttgtttattcgttttcgagttgtggcgagtcgttgtttatttttttaagacgttgaatttgtatttcgtggagtttttat

SEQ ID NO: 40136 - DNA, 748 bp, Artificial Sequence
  chemically treated genomic DNA (Homo sapiens) CpG-island No: 40136
  unsure (730..731, 743, 745)
ataaaaactccacgaaatacaaattcaacgtcttaaaaaaataaacaacgactcgccacaactcgaaaacgaataaacaacgctccaaaccgaaaaccccgcgtcgacaaaaacacaaaacccacgacaaaacgaccacgacctaaatcaaaaaaaaaaccgcgcgcctcctctccaacccgcaacaaacgaataccacgaaacactcaaccgatccccgaaattcctctcacgcgaccccaaaaccaccaccgtaatccaaaccaacaaacgctaccgaaactcccgaaaccacgaataaaccgaaaaccaccaataaccgaccaaatctcgcgaaaacgcgacctcgccctcccaacataccccgcgccgccgccgctaccgccgccgccgccgccgccgcgccgcgacttaaaaacgaaaaactaaaaaaaaataacgaaaccgacgccgccgccatattaaatctaaaacgactactataaacgccgacgaaacgaacgaacgtacgaaacgaacgacaataacgtaaaatctacctctctacgaacaactaaaaacgacgacgacgacgccataaacgaaaacaccccttacatcgacaacaaaatcaacctcatctccaaaacgaaaatccgctacgaaaacatcctctacaccatcgacaccgaaaactccaccgtaacccttaccaaaaatacgcgaaaccgaacctcaaaactaaaaattnnnaaaaataaaantnaat

SEQ ID NO: 40137 - DNA, 562 bp, Artificial Sequence
  chemically treated genomic DNA (Homo sapiens) CpG-island No: 40137
tcgcgggggggggcggggtcggtggattgggcgtgagttaattggttggggggcggggtattacgggttggtttcgtttaggcgttcgcgcggatttcgggtggaatgacgggagggagtttcggtagtttttattttttagcgatggcgtcgttgtgtcgcgtttagtttttagtttgtcggtcggtatttatcgttattcggagttcgtttagacggtgagatttggggcgggttcgaggtagcggcgggacgttatttgcgatcgggattatgaggagttgttagattcgtggggtcggtaacgagagtagtcgcggtatttgttgagaggaaagagggagcggttcggcgcggttggggcgcggtagaggtttgttcgattttcggttatgttattgttttgcgtgcgcggtgagtgcgcggattgaggcggggaggcggggtgtcggcgtagaggttttcgtatttttttagtggacgttcggtgatcgttttatttaaattttatatttcgttcgtgttttgggggtttattattttggtaattatttaataatta

SEQ ID NO: 40138 - DNA, 562 bp, Artificial Sequence
  chemically treated genomic DNA (Homo sapiens) CpG-island No: 40138
taattattaaataattaccaaaataataaacccccaaaacacgaacgaaatataaaatttaaataaaacgatcaccgaacgtccactaaaaaaatacgaaaacctctacgccgacaccccgcctccccgcctcaatccgcgcactcaccgcgcacgcaaaacaataacataaccgaaaatcgaacaaacctctaccgcgccccaaccgcgccgaaccgctccctctttcctctcaacaaataccgcgactactctcgttaccgaccccacgaatctaacaactcctcataatcccgatcgcaaataacgtcccgccgctacctcgaacccgccccaaatctcaccgtctaaacgaactccgaataacgataaataccgaccgacaaactaaaaactaaacgcgacacaacgacgccatcgctaaaaaataaaaactaccgaaactccctcccgtcattccacccgaaatccgcgcgaacgcctaaacgaaaccaacccgtaataccccgccccccaaccaattaactcacgcccaatccaccgaccccgcccccccccgcga

SEQ ID NO: 40139 - DNA, 562 bp, Artificial Sequence
  chemically treated genomic DNA (Homo sapiens) CpG-island No: 40139
tgattgttaagtgattgttaaaataatagatttttaaagtacggacgggatgtaaagtttgggtgagacggttatcggacgtttattggaagggtgcggggatttttacgtcgatatttcgttttttcgttttagttcgcgtatttatcgcgtacgtagagtagtgatatggtcgaggatcgggtaagtttttgtcgcgttttagtcgcgtcggatcgttttttttttttttttagtaggtgtcgcgattgttttcgttatcggttttacgggtttggtagttttttatggtttcggtcgtaggtagcgtttcgtcgttgtttcggattcgttttaaattttatcgtttgagcgaatttcgggtagcggtgagtatcggtcggtaggttggggattgggcgcggtatagcgacgttatcgttgggaggtaggagttgtcgggattttttttcgttattttattcgggattcgcgcgagcgtttgggcggagttaattcgtggtgtttcgttttttagttaattaatttacgtttagtttatcgatttcgttttttttcgcga

SEQ ID NO: 40140 - DNA, 562 bp, Artificial Sequence
  chemically treated genomic DNA (Homo sapiens) CpG-island No: 40140
tcgcgaaaaaaaacgaaatcgataaactaaacgtaaattaattaactaaaaaacgaaacaccacgaattaactccgcccaaacgctcgcgcgaatcccgaataaaataacgaaaaaaaatcccgacaactcctacctcccaacgataacgtcgctataccgcgcccaatccccaacctaccgaccgatactcaccgctacccgaaattcgctcaaacgataaaatttaaaacgaatccgaaacaacgacgaaacgctacctacgaccgaaaccataaaaaactaccaaacccgtaaaaccgataacgaaaacaatcgcgacacctactaaaaaaaaaaaaaaaacgatccgacgcgactaaaacgcgacaaaaacttacccgatcctcgaccatatcactactctacgtacgcgataaatacgcgaactaaaacgaaaaaacgaaatatcgacgtaaaaatccccgcacccttccaataaacgtccgataaccgtctcacccaaactttacatcccgtccgtactttaaaaatctattattttaacaatcacttaacaatca

SEQ ID NO: 40141 - DNA, 938 bp, Artificial Sequence
  chemically treated genomic DNA (Homo sapiens) CpG-island No: 40141
  unsure (306)
gttgtcgtttttcgtttttcggtattggtgatttattgttttaggttcgcggggttattttcgagatttcggtttcgaggatcgaggtgggatagggtttgcggatcgcgcgttgtcgttggatttagtttaatttaatttaggtttttttatttatcgggtgttcgtaggttacgtttttcgttcggagtttcgtttttagaacgcggtttcgttttcgatattgtagtttcgtttcgtttttcgggttaattttagtttaggcgttttttgtttcggtttttagcgcgcggtacgtcgggtttntcggggtcgcgtcgcgcgcgcgcgcgggttttgggcgggattttgtttaggcggcggggttgttgttgtcgtttttattaaggttgcgttatcggcgtttttacgttgattgtattttttgttgggtttgcgtttgttttaggcgtggtggtcggtttcgcgcggtgggcgcggtattttttattttttgtttattcgttttcgacgttttcgggttcgtcgcgtcgcggcggcgcgcgttgtagggttggtcgtagtttcgcgtgtcggtcgggtcggattgtgtgtaggtatgtcgtgtgttcgtcgcgggttcgttcgacgttcgtttttttggtggcgtttttcggcgttgttttattttcgcgttggatatcgcgtgtgtcgtttttcgcgatcggcgtggtcgtattttcgtataattcgcggtgcggcggtcgtttatattcggaagtacgttcgtggtttcggttggtatataatttcgcgtggtttttcgttcggagggttcggttttcgtttttttatttttttcgtatgcggatagtacgacgtacgtagtggggtggttaggtgtcgcgttattattattattcgcgttcgggttcgcgttcgtgcgacggtgggttttt

SEQ ID NO: 40142 - DNA, 938 bp, Artificial Sequence
  chemically treated genomic DNA (Homo sapiens) CpG-island No: 40142
  unsure (633)
aaaaacccaccgtcgcacgaacgcgaacccgaacgcgaataataataataacgcgacacctaaccaccccactacgtacgtcgtactatccgcatacgaaaaaaataaaaaaacgaaaaccgaaccctccgaacgaaaaaccacgcgaaattatataccaaccgaaaccacgaacgtacttccgaatataaacgaccgccgcaccgcgaattatacgaaaatacgaccacgccgatcgcgaaaaacgacacacgcgatatccaacgcgaaaataaaacaacgccgaaaaacgccaccaaaaaaacgaacgtcgaacgaacccgcgacgaacacacgacatacctacacacaatccgacccgaccgacacgcgaaactacgaccaaccctacaacgcgcgccgccgcgacgcgacgaacccgaaaacgtcgaaaacgaataaacaaaaaataaaaaataccgcgcccaccgcgcgaaaccgaccaccacgcctaaaacaaacgcaaacccaacaaaaaatacaatcaacgtaaaaacgccgataacgcaaccttaataaaaacgacaacaacaaccccgccgcctaaacaaaatcccgcccaaaacccgcgcgcgcgcgcgacgcgaccccganaaacccgacgtaccgcgcgctaaaaaccgaaacaaaaaacgcctaaactaaaattaacccgaaaaacgaaacgaaactacaatatcgaaaacgaaaccgcgttctaaaaacgaaactccgaacgaaaaacgtaacctacgaacacccgataaataaaaaaacctaaattaaattaaactaaatccaacgacaacgcgcgatccgcaaaccctatcccacctcgatcctcgaaaccgaaatctcgaaaataaccccgcgaacctaaaacaataaatcaccaataccgaaaaacgaaaaacgacaac

SEQ ID NO: 40143 - DNA, 938 bp, Artificial Sequence
  chemically treated genomic DNA (Homo sapiens) CpG-island No: 40143
  unsure (633)
ggggatttatcgtcgtacggacgcgaattcggacgcgggtggtggtgatggcgcggtatttggttattttattacgtgcgtcgtgttgttcgtatgcgggaggggtgggggggcgggaatcggatttttcggacggagaattacgcgaggttgtgtgttagtcggagttacgggcgtgttttcgggtgtgggcggtcgtcgtatcgcgggttgtgcgagggtgcgattacgtcggtcgcggggggcgatatacgcggtgtttagcgcgggggtggagtagcgtcggggggcgttattaggggggcgggcgtcgggcggattcgcggcgggtatacgatatgtttgtatataattcggttcggtcggtacgcgagattacgattagttttgtagcgcgcgtcgtcgcggcgcgacgaattcgggagcgtcgggggcgagtgaataggaggtggggggtgtcgcgtttatcgcgcggggtcggttattacgtttgggataggcgtaggtttagtagggagtatagttagcgtgagagcgtcggtagcgtagttttagtaggagcggtagtagtagtttcgtcgtttgggtagggtttcgtttaaagttcgcgcgcgcgcgcggcgcggtttcggnaagttcgacgtatcgcgcgttagaagtcggaatagagggcgtttgggttggggttagttcggggggcggggcgaggttgtagtatcgggggcggggtcgcgttttggaggcggggtttcgggcgaggggcgtggtttgcgggtattcggtgggtggggaggtttgggttgggttgggttgggtttagcggtagcgcgcggttcgtagattttgttttatttcggttttcgagatcgaagtttcggaggtggtttcgcggatttggagtagtgagttattagtgtcggggagcgggaggcggtagt

SEQ ID NO: 40144 - DNA, 938 bp, Artificial Sequence
  chemically treated genomic DNA (Homo sapiens) CpG-island No: 40144
  unsure (306)
actaccgcctcccgctccccgacactaataactcactactccaaatccgcgaaaccacctccgaaacttcgatctcgaaaaccgaaataaaacaaaatctacgaaccgcgcgctaccgctaaacccaacccaacccaacccaaacctccccacccaccgaatacccgcaaaccacgcccctcgcccgaaaccccgcctccaaaacgcgaccccgcccccgatactacaacctcgccccgccccccgaactaaccccaacccaaacgccctctattccgacttctaacgcgcgatacgtcgaacttnccgaaaccgcgccgcgcgcgcgcgcgaactttaaacgaaaccctacccaaacgacgaaactactactaccgctcctactaaaactacgctaccgacgctctcacgctaactatactccctactaaacctacgcctatcccaaacgtaataaccgaccccgcgcgataaacgcgacaccccccacctcctattcactcgcccccgacgctcccgaattcgtcgcgccgcgacgacgcgcgctacaaaactaatcgtaatctcgcgtaccgaccgaaccgaattatatacaaacatatcgtatacccgccgcgaatccgcccgacgcccgcccccctaataacgccccccgacgctactccacccccgcgctaaacaccgcgtatatcgccccccgcgaccgacgtaatcgcaccctcgcacaacccgcgatacgacgaccgcccacacccgaaaacacgcccgtaactccgactaacacacaacctcgcgtaattctccgtccgaaaaatccgattcccgcccccccacccctcccgcatacgaacaacacgacgcacgtaataaaataaccaaataccgcgccatcaccaccacccgcgtccgaattcgcgtccgtacgacgataaatcccc

SEQ ID NO: 40145 - DNA, 765 bp, Artificial Sequence
  chemically treated genomic DNA (Homo sapiens) CpG-island No: 40145
gcgtttgtcgtagtatttttcgttcgtataggttatattagtcggggtcgttcggtagtattaattcggcgaagtagtgtttttcgtttcgtttcgtcgggattttgggattttgcggttgttcgaagatgtttcgtacgtcgcggggtcggggcgttttaggtcgtcgtcgtagtttttgttgtagattaggtcggagcgggcgagcgggtcgggaggttcggggcgggggttttaggttttttcgggtagtttttcgggcgttgcgtttttcgcgcgtttcgggcgtagtggagaggggcgtcgggatatagaggcgcgaggatcggtcggggggcggcggcggtagttcggggtcgtttaggttttgtagatagcgcggcggttcggggtttaatagtagcgggtacgggcgttgttcgatggtcggggacgttatggttatgttcggttagtggcggtagttttggtagcggcggttttggcgattgcgttattttcgagttagtttcgagagaaggggtcgttttatattagcgcgtttttaaaggaatcgtagtttgttgggcggggcgggggcggggagagtcggagtggtaggaaggacgatttaagagaatcgtcgacggatcgaagggggtagggttcgtgttaggcgacgtttgcgcgagtgtggatttgggggcgtttttatttggagtagttgtaggatttcgtagaggagcgtttttgtatagtatagtttagagggcgtatttttgcggg

SEQ ID NO: 40146 - DNA, 765 bp, Artificial Sequence
  chemically treated genomic DNA (Homo sapiens) CpG-island No: 40146
cccgcaaaaatacgccctctaaactatactatacaaaaacgctcctctacgaaatcctacaactactccaaataaaaacgcccccaaatccacactcgcgcaaacgtcgcctaacacgaaccctacccccttcgatccgtcgacgattctcttaaatcgtccttcctaccactccgactctccccgcccccgccccgcccaacaaactacgattcctttaaaaacgcgctaatataaaacgaccccttctctcgaaactaactcgaaaataacgcaatcgccaaaaccgccgctaccaaaactaccgccactaaccgaacataaccataacgtccccgaccatcgaacaacgcccgtacccgctactattaaaccccgaaccgccgcgctatctacaaaacctaaacgaccccgaactaccgccgccgccccccgaccgatcctcgcgcctctatatcccgacgcccctctccactacgcccgaaacgcgcgaaaaacgcaacgcccgaaaaactacccgaaaaaacctaaaacccccgccccgaacctcccgacccgctcgcccgctccgacctaatctacaacaaaaactacgacgacgacctaaaacgccccgaccccgcgacgtacgaaacatcttcgaacaaccgcaaaatcccaaaatcccgacgaaacgaaacgaaaaacactacttcgccgaattaatactaccgaacgaccccgactaatataacctatacgaacgaaaaatactacgacaaacgc

SEQ ID NO: 40147 - DNA, 765 bp, Artificial Sequence
  chemically treated genomic DNA (Homo sapiens) CpG-island No: 40147
ttcgtagaaatgcgttttttgagttgtattgtatagaggcgtttttttgcggaattttgtagttgttttaggtgaagacgtttttaaatttatattcgcgtagacgtcgtttggtacggattttatttttttcggttcgtcggcggtttttttgggtcgttttttttgttatttcgatttttttcgttttcgtttcgtttagtaggttgcggtttttttaaaggcgcgttggtgtggggcggttttttttttcggggttggttcgggagtagcgtagtcgttaaagtcgtcgttgttaaagttgtcgttattagtcgggtatggttatggcgttttcggttatcgggtagcgttcgtattcgttattattggatttcgagtcgtcgcgttatttatagagtttgagcggtttcgagttatcgtcgtcgtttttcgatcggttttcgcgtttttgtgtttcggcgtttttttttattgcgttcggggcgcgcgaggggcgtagcgttcggagggttgttcgggggaatttggagttttcgtttcgggtttttcgattcgttcgttcgtttcggtttggtttgtagtagagattgcggcggcggtttggagcgtttcgatttcgcgacgtgcggagtattttcgagtagtcgtaggattttagagtttcggcggagcgaggcgaggggtattgtttcgtcgagttggtgttgtcgggcggtttcggttggtgtgatttgtgcggacgagaggtgttgcggtaggcgt

SEQ ID NO: 40148 - DNA, 765 bp, Artificial Sequence
  chemically treated genomic DNA (Homo sapiens) CpG-island No: 40148
acgcctaccgcaacacctctcgtccgcacaaatcacaccaaccgaaaccgcccgacaacaccaactcgacgaaacaatacccctcgcctcgctccgccgaaactctaaaatcctacgactactcgaaaatactccgcacgtcgcgaaatcgaaacgctccaaaccgccgccgcaatctctactacaaaccaaaccgaaacgaacgaacgaatcgaaaaacccgaaacgaaaactccaaattcccccgaacaaccctccgaacgctacgcccctcgcgcgccccgaacgcaataaaaaaaaacgccgaaacacaaaaacgcgaaaaccgatcgaaaaacgacgacgataactcgaaaccgctcaaactctataaataacgcgacgactcgaaatccaataataacgaatacgaacgctacccgataaccgaaaacgccataaccatacccgactaataacgacaactttaacaacgacgactttaacgactacgctactcccgaaccaaccccgaaaaaaaaaaccgccccacaccaacgcgcctttaaaaaaaccgcaacctactaaacgaaacgaaaacgaaaaaaatcgaaataacaaaaaaaacgacccaaaaaaaccgccgacgaaccgaaaaaaataaaatccgtaccaaacgacgtctacgcgaatataaatttaaaaacgtcttcacctaaaacaactacaaaattccgcaaaaaaacgcctctatacaatacaactcaaaaaacgcatttctacgaa

SEQ ID NO: 40149 - DNA, 519 bp, Artificial Sequence
  chemically treated genomic DNA (Homo sapiens) CpG-island No: 40149
gaggtcgttagcgtattaagggggtcgggtttgggatgcggcggagggaggtgggtattttttttcgggtttcgtttggcgtaagtttttagttttgagtttcgagtcgggagttggtcgggtagcggattaggtagagtcggcgggtcgtttgcgttttttttagcggggtgcgagcgttcgggcggttcggtaatttgtttttgttttcgcgtcgtttgcgtttgtagagtttcgggcgttcggttcgcgttttattttttgattcgttcgggttttgcggtttcgtgttttcggcgttagcgtttttttttcgtcgtcgtgtagagcgttattttcgtatttttttcgtttttcgcgttttttttgtttttcgcgtaaagtagttttgaagttattttttttgtaaggttttttaaagtcggttcggttgttattgcgtttttttttcgttttttcgtcgtttgggtgttattcgttttcggtggtaagtggatttagggaattgtaggttatata

SEQ ID NO: 40150 - DNA, 519 bp, Artificial Sequence
  chemically treated genomic DNA (Homo sapiens) CpG-island No: 40150
tatataacctacaattccctaaatccacttaccaccgaaaacgaataacacccaaacgacgaaaaaacgaaaaaaaaacgcaataacaaccgaaccgactttaaaaaaccttacaaaaaaaataacttcaaaactactttacgcgaaaaacaaaaaaaacgcgaaaaacgaaaaaaatacgaaaataacgctctacacgacgacgaaaaaaaaacgctaacgccgaaaacacgaaaccgcaaaacccgaacgaatcaaaaaataaaacgcgaaccgaacgcccgaaactctacaaacgcaaacgacgcgaaaacaaaaacaaattaccgaaccgcccgaacgctcgcaccccgctaaaaaaaacgcaaacgacccgccgactctacctaatccgctacccgaccaactcccgactcgaaactcaaaactaaaaacttacgccaaacgaaacccgaaaaaaaatacccacctccctccgccgcatcccaaacccgacccccttaatacgctaacgacctc

SEQ ID NO: 40151 - DNA, 519 bp, Artificial Sequence
  chemically treated genomic DNA (Homo sapiens) CpG-island No: 40151
tatatgatttgtagttttttgagtttatttgttatcgggggcgggtggtatttaggcggcggggaggcgggggaggggcgtagtgatagtcgagtcggttttgaggaattttgtagaggaagtggttttagaattgttttacgcgaggggtaggaaaggcgcgggaggcgggggaggtgcggagatggcgttttgtacggcggcggagggagggcgttggcgtcggggatacgaaatcgtagagttcggacgagttagggagtgaggcgcgagtcgggcgttcggggttttgtaggcgtaggcggcgcggggataggagtaggttatcgggtcgttcgagcgttcgtatttcgttgaaagaaacgtaggcggttcgtcggttttgtttggttcgttattcgattagttttcggttcggggtttagagttaggggtttacgttaagcggagttcggggaggggtgtttattttttttcgtcgtattttaagttcggtttttttgatgcgttggcggtttt

SEQ ID NO: 40152 - DNA, 519 bp, Artificial Sequence
  chemically treated genomic DNA (Homo sapiens) CpG-island No: 40152
aaaaccgccaacgcatcaaaaaaaccgaacttaaaatacgacgaaaaaaaataaacacccctccccgaactccgcttaacgtaaacccctaactctaaaccccgaaccgaaaactaatcgaataacgaaccaaacaaaaccgacgaaccgcctacgtttctttcaacgaaatacgaacgctcgaacgacccgataacctactcctatccccgcgccgcctacgcctacaaaaccccgaacgcccgactcgcgcctcactccctaactcgtccgaactctacgatttcgtatccccgacgccaacgccctccctccgccgccgtacaaaacgccatctccgcacctcccccgcctcccgcgcctttcctacccctcgcgtaaaacaattctaaaaccacttcctctacaaaattcctcaaaaccgactcgactatcactacgcccctcccccgcctccccgccgcctaaataccacccgcccccgataacaaataaactcaaaaaactacaaatcatata

SEQ ID NO: 40153 - DNA, 576 bp, Artificial Sequence
  chemically treated genomic DNA (Homo sapiens) CpG-island No: 40153
ttgcgggggggagatcgattaatacgcggggagaggcggtttgcgtattgagcgtttttgcgtttttttattgattgatttattgagttcggttcgtttatattattaagcggtatgagtttgttgacgcgtcggcgttcggcgagcgttttcgtttggcgtttgtcgtttcggtgtttatttttttttttttttcgtttattttttcgattattttttttttattatttttttcgcgatttttttatttatttttcgtgtattttttttttttttaattttttttcgttcgttttttttttttttgttattttcgatttttcgtttgtatcgcgtttttttttttttttttttttttttttttcgttttttttttttttttttttattttttatttttttttttttttttttacgtttttatttttttttacggtcgatttatcgtttgtttttttcgttttttttgtttcgttttcgttttttttttttttttttttttttattcgtttttttttttttttttttttgttttattttttttttttttttttttttttttttatttttttttttt

SEQ ID NO: 40154 - DNA, 576 bp, Artificial Sequence
  chemically treated genomic DNA (Homo sapiens) CpG-island No: 40154
aaaaaaaaaaaataaaaaaaaaaaaaaaaaaaaaaaaaaaataaaacaaaaaaaaaaaaaaaaaaaaacgaataaaaaaaaaaaaaaaaaaaaaaaacgaaaacgaaacaaaaaaaacgaaaaaaacaaacgataaatcgaccgtaaaaaaaaataaaaacgtaaaaaaaaaaaaaaaaaaataaaaaataaaaaaaaaaaaaaaaaaaacgaaaaaaaaaaaaaaaaaaaaaaaaaaaaacgcgatacaaacgaaaaatcgaaaataacaaaaaaaaaaaaaacgaacgaaaaaaaattaaaaaaaaaaaaaatacacgaaaaataaataaaaaaatcgcgaaaaaaataataaaaaaaaaataatcgaaaaaataaacgaaaaaaaaaaaaaaataaacaccgaaacgacaaacgccaaacgaaaacgctcgccgaacgccgacgcgtcaacaaactcataccgcttaataatataaacgaaccgaactcaataaatcaatcaataaaaaaacgcaaaaacgctcaatacgcaaaccgcctctccccgcgtattaatcgatctcccccccgcaa

SEQ ID NO: 40155 - DNA, 576 bp, Artificial Sequence
  chemically treated genomic DNA (Homo sapiens) CpG-island No: 40155
ggagagagaggatggaaaaagagggagaggggaaagaagaataaaataaaggaggggagggggaaaaacgagtggggagaaaaaaaaggggggggagcgggggcgggataggaagggcgggagaggtagacggtaaatcgatcgtggaagaaggtgaggacgtgaaaaaaggggggaaagaataggagatgagaaagggaggaaaaaaggcgggaggggggaaaaggagagggagaaaaaacgcggtataagcgaagggtcgagggtgataaggaaagagagggcgggcggaggggaattggaaagaagggggatgtacgaggggtaagtgaaaagatcgcgaaagaaataatgggagggagatgatcggagggatgagcgggggaaagggaaaaataggtatcgggacggtaaacgttaggcggaagcgttcgtcggacgtcggcgcgttagtaaatttatatcgtttgataatatggacgggtcgagtttagtgagttagttagtgagaaagcgtaagagcgtttaatacgtaagtcgttttttttcgcgtgttgatcgatttttttttcgtag

SEQ ID NO: 40156 - DNA, 576 bp, Artificial Sequence
  chemically treated genomic DNA (Homo sapiens) CpG-island No: 40156
ctacgaaaaaaaaatcgatcaacacgcgaaaaaaaacgacttacgtattaaacgctcttacgctttctcactaactaactcactaaactcgacccgtccatattatcaaacgatataaatttactaacgcgccgacgtccgacgaacgcttccgcctaacgtttaccgtcccgatacctatttttccctttcccccgctcatccctccgatcatctccctcccattatttctttcgcgatcttttcacttacccctcgtacatcccccttctttccaattcccctccgcccgccctctctttccttatcaccctcgacccttcgcttataccgcgttttttctccctctccttttcccccctcccgccttttttcctccctttctcatctcctattctttccccccttttttcacgtcctcaccttcttccacgatcgatttaccgtctacctctcccgcccttcctatcccgcccccgctccccccccttttttttctccccactcgtttttccccctcccctcctttattttattcttctttcccctctccctctttttccatcctctctctcc

SEQ ID NO: 40157 - DNA, 509 bp, Artificial Sequence
  chemically treated genomic DNA (Homo sapiens) CpG-island No: 40157
gaaagaaaacgagggaaggggtagaacgcgtcgggtggaggagaagggggaacgagtattaggaaaaagggcgacgggatagcgaatagaagaaaaggcgtcggcgagatagcgataagttagggagaaggaggagggggaaaggagggggagcgatagacgcggcgacgtacgttcgtagggtgggacgaacggataaagcgggaaaaaaataagcgatcgcggcggaggtagaaagaacggatcggcgcgttatcggtcgtttggaattttttattagatttttttgttggacgggtatttttagatgattgtagtttcgagaagtcgaaatttattttagaaaatcgaaatttattaagttttttttcgcgtgttttataaaaattttttattgttttagtcgggcgcgattttttttggttttttttgttaggattagtgaatttcgttcgagagttttattaataaagtaggtcgtttttgattattagttatttaaattttgt

SEQ ID NO: 40158 - DNA, 509 bp, Artificial Sequence
  chemically treated genomic DNA (Homo sapiens) CpG-island No: 40158
acaaaatttaaataactaataatcaaaaacgacctactttattaataaaactctcgaacgaaattcactaatcctaacaaaaaaaaccaaaaaaaatcgcgcccgactaaaacaataaaaaatttttataaaacacgcgaaaaaaaacttaataaatttcgattttctaaaataaatttcgacttctcgaaactacaatcatctaaaaatacccgtccaacaaaaaaatctaataaaaaattccaaacgaccgataacgcgccgatccgttctttctacctccgccgcgatcgcttatttttttcccgctttatccgttcgtcccaccctacgaacgtacgtcgccgcgtctatcgctccccctcctttccccctcctccttctccctaacttatcgctatctcgccgacgccttttcttctattcgctatcccgtcgccctttttcctaatactcgttcccccttctcctccacccgacgcgttctaccccttccctcgttttctttc

SEQ ID NO: 40159 - DNA, 509 bp, Artificial Sequence
  chemically treated genomic DNA (Homo sapiens) CpG-island No: 40159
atagaatttaggtgattaatggttagaggcgatttgttttattaatggagttttcgggcgaggtttattggttttaataaggagggttaggggaagtcgcgttcgattggggtagtagagggtttttatagagtacgcggggaggggtttagtaagtttcggttttttgggataggtttcgatttttcggggttgtagttatttgaaagtgttcgtttagtaggaaaatttggtgggagattttaagcggtcggtggcgcgtcggttcgttttttttgttttcgtcgcggtcgtttgtttttttttcgttttgttcgttcgttttattttgcgggcgtacgtcgtcgcgtttgtcgttttttttttttttttttttttttttttttttggtttgtcgttgtttcgtcggcgtttttttttttgttcgttatttcgtcgtttttttttttggtgttcgttttttttttttttttattcgacgcgttttattttttttttcgttttttttt

SEQ ID NO: 40160 - DNA, 509 bp, Artificial Sequence
  chemically treated genomic DNA (Homo sapiens) CpG-island No: 40160
aaaaaaaaacgaaaaaaaaaataaaacgcgtcgaataaaaaaaaaaaaaaaacgaacaccaaaaaaaaaaacgacgaaataacgaacaaaaaaaaaaacgccgacgaaacaacgacaaaccaaaaaaaaaaaaaaaaaaaaaaaaaaaaaaaacgacaaacgcgacgacgtacgcccgcaaaataaaacgaacgaacaaaacgaaaaaaaaacaaacgaccgcgacgaaaacaaaaaaaacgaaccgacgcgccaccgaccgcttaaaatctcccaccaaattttcctactaaacgaacactttcaaataactacaaccccgaaaaatcgaaacctatcccaaaaaaccgaaacttactaaacccctccccgcgtactctataaaaaccctctactaccccaatcgaacgcgacttcccctaaccctccttattaaaaccaataaacctcgcccgaaaactccattaataaaacaaatcgcctctaaccattaatcacctaaattctat

SEQ ID NO: 40161 - DNA, 508 bp, Artificial Sequence
  chemically treated genomic DNA (Homo sapiens) CpG-island No: 40161
ggtcgttcgagagttttagtaggtttcggggcgcgaaaggtaatttgggagtagtagttttttcgggcgtttagcgggatcgttagcgcggtagtgggggttttcgcggttgtaagttagcgggttttgtgagggcgagcggaggcggagaaagggcgcgggagtgagagagggtgagttagttattgtttatgtaataaagggaggttttatcgcgggatagggttgaatttagaagtgcggttcgtgtcgtagtttgttttaggacgcggtttgttttagcgttagcgagggaaggttgaggaggagttagagtttggttttgtagtttttttcgtcgttagcgttcgtcgttatttttattatgtagtttcgggaagacgtttcgcgttttcgtcgtttcgttagttttcgtggtgggaggcggtttaagaggatttttaagttttcggtttcggttttttttacgggtttagaggagttaaaggatacggtttattttgtagtt

SEQ ID NO: 40162 - DNA, 508 bp, Artificial Sequence
  chemically treated genomic DNA (Homo sapiens) CpG-island No: 40162
aactacaaaataaaccgtatcctttaactcctctaaacccgtaaaaaaaaccgaaaccgaaaacttaaaaatcctcttaaaccgcctcccaccacgaaaactaacgaaacgacgaaaacgcgaaacgtcttcccgaaactacataataaaaataacgacgaacgctaacgacgaaaaaaactacaaaaccaaactctaactcctcctcaaccttccctcgctaacgctaaaacaaaccgcgtcctaaaacaaactacgacacgaaccgcacttctaaattcaaccctatcccgcgataaaacctccctttattacataaacaataactaactcaccctctctcactcccgcgccctttctccgcctccgctcgccctcacaaaacccgctaacttacaaccgcgaaaacccccactaccgcgctaacgatcccgctaaacgcccgaaaaaactactactcccaaattacctttcgcgccccgaaacctactaaaactctcgaacgacc

SEQ ID NO: 40163 - DNA, 508 bp, Artificial Sequence
  chemically treated genomic DNA (Homo sapiens) CpG-island No: 40163
ggttgtagaatgggtcgtgttttttaatttttttggattcgtgaaaaaggtcgaaatcgagggtttggaaatttttttgggtcgttttttattacggggattggcgaggcggcgagagcgcgggacgttttttcgggattgtatggtggagatggcgacgggcgttgacggcgagaaaggttgtaggattaggttttggtttttttttaattttttttcgttgacgttaagataagtcgcgttttggaatagattgcggtacgggtcgtatttttgaatttagttttatttcgcggtgaggtttttttttattgtatagatagtggttgatttatttttttttattttcgcgtttttttttcgttttcgttcgtttttataggattcgttggtttgtagtcgcggaagtttttattgtcgcgttggcgatttcgttaggcgttcgggagaattattgtttttaggttgtttttcgcgtttcgaggtttgttggggttttcggacggtt

SEQ ID NO: 40164 - DNA, 508 bp, Artificial Sequence
  chemically treated genomic DNA (Homo sapiens) CpG-island No: 40164
aaccgtccgaaaaccccaacaaacctcgaaacgcgaaaaacaacctaaaaacaataattctcccgaacgcctaacgaaatcgccaacgcgacaataaaaacttccgcgactacaaaccaacgaatcctataaaaacgaacgaaaacgaaaaaaaaacgcgaaaataaaaaaaaataaatcaaccactatctatacaataaaaaaaaacctcaccgcgaaataaaactaaattcaaaaatacgacccgtaccgcaatctattccaaaacgcgacttatcttaacgtcaacgaaaaaaaattaaaaaaaaaccaaaacctaatcctacaacctttctcgccgtcaacgcccgtcgccatctccaccatacaatcccgaaaaaacgtcccgcgctctcgccgcctcgccaatccccgtaataaaaaacgacccaaaaaaatttccaaaccctcgatttcgacctttttcacgaatccaaaaaaattaaaaaacacgacccattctacaacc

SEQ ID NO: 40165 - DNA, 510 bp, Artificial Sequence
  chemically treated genomic DNA (Homo sapiens) CpG-island No: 40165
gttcgggagttcgagagttttagtagttttcggggcgcgaaaggtaatttgggagcggtagtttttttgggcgtttagtattgtcgtttacgttgtagtagcggtttttgcggttttaagttagcgggttttgtgaaggcgagtagacgcggagaaaggacgcgggagtgagagagggtgagttagttattgtttaaacgataacgggaggcggttttgcggggtagggttgaatttagtaaatgggttcgtgttgttgttttttcggagacgttgttattttagcgttagcgagggaaggttgaggaggagttagagtcgggttttgtagcgtttttcgttattagcgttcgtcgttatttttattatgtagtttcgggaagacgtttcgcgttttcgtcgtttagttagttttcgtggtgggaagcggtttaagaagatttataaatttatagtttcggttttttttacgggtttagaggaattaaaggatacggtttattttgtagt

SEQ ID NO: 40166 - DNA, 510 bp, Artificial Sequence
  chemically treated genomic DNA (Homo sapiens) CpG-island No: 40166
actacaaaataaaccgtatcctttaattcctctaaacccgtaaaaaaaaccgaaactataaatttataaatcttcttaaaccgcttcccaccacgaaaactaactaaacgacgaaaacgcgaaacgtcttcccgaaactacataataaaaataacgacgaacgctaataacgaaaaacgctacaaaacccgactctaactcctcctcaaccttccctcgctaacgctaaaataacaacgtctccgaaaaaacaacaacacgaacccatttactaaattcaaccctaccccgcaaaaccgcctcccgttatcgtttaaacaataactaactcaccctctctcactcccgcgtcctttctccgcgtctactcgccttcacaaaacccgctaacttaaaaccgcaaaaaccgctactacaacgtaaacgacaatactaaacgcccaaaaaaactaccgctcccaaattacctttcgcgccccgaaaactactaaaactctcgaactcccgaac

SEQ ID NO: 40167 - DNA, 510 bp, Artificial Sequence
  chemically treated genomic DNA (Homo sapiens) CpG-island No: 40167
gttgtagaatgggtcgtgttttttaatttttttggattcgtgaaaaaggtcgaaattgtgggtttgtgaatttttttgggtcgttttttattacggggattggttaggcggcgagagcgcggggcgttttttcgggattgtatggtggagatggcgacgggcgttgatggcgagaaacgttgtaggattcggttttggtttttttttaattttttttcgttgacgttaagatagtagcgttttcgaagagatagtagtacgagtttatttattgaatttaattttatttcgtagaatcgtttttcgttatcgtttagatagtggttgatttatttttttttattttcgcgtttttttttcgcgtttgttcgtttttataggattcgttggtttggagtcgtagaagtcgttattgtagcgtgggcgataatgttaggcgtttaggagaattatcgtttttaggttgtttttcgcgtttcgagggttgttgggattttcggattttcgggt

SEQ ID NO: 40168 - DNA, 510 bp, Artificial Sequence
  chemically treated genomic DNA (Homo sapiens) CpG-island No: 40168
acccgaaaatccgaaaatcccaacaaccctcgaaacgcgaaaaacaacctaaaaacgataattctcctaaacgcctaacattatcgcccacgctacaataacgacttctacgactccaaaccaacgaatcctataaaaacgaacaaacgcgaaaaaaaaacgcgaaaataaaaaaaaataaatcaaccactatctaaacgataacgaaaaacgattctacgaaataaaattaaattcaataaataaactcgtactactatctcttcgaaaacgctactatcttaacgtcaacgaaaaaaaattaaaaaaaaaccaaaaccgaatcctacaacgtttctcgccatcaacgcccgtcgccatctccaccatacaatcccgaaaaaacgccccgcgctctcgccgcctaaccaatccccgtaataaaaaacgacccaaaaaaattcacaaacccacaatttcgacctttttcacgaatccaaaaaaattaaaaaacacgacccattctacaac

SEQ ID NO: 40169 - DNA, 621 bp, Artificial Sequence
  chemically treated genomic DNA (Homo sapiens) CpG-island No: 40169
gggggaggatttttgaggggttgttgcgagttcggcgcggtagagagtacggtagttattatcggtcgaggcggttgtgttcgggtattgcggagagcggcgtgaagtttttggaaagagcgcggcgggggtgaggcgagtcgtagaagatcgcggaaaggaagcgtacggaggagcggttcggtagttttcgtgggtcggtcggagcgggaaagtggggtttcgcgattttcgaggtaaataaagagcggtgggtagcggaggttaagtttggttcgcgtcggtcgtcgttagatcgtttgtttttaaggttcgaggattcggggatcggggggcggtagcgcggtttacggttatttattaagatgcgtttgaagaggttgttttttttgggcggtagtagtacgttcggtatcgtggtcggtagggaggttaggtggtcggtagggaggttaggtgttcgggcgtttcgtttcgcgggggtgggtatcgggacgaatcgttgttgagagtcgggttgcgggcgatggattagtttattggtttatagttgtaattgggtagtttggttgttcggtacgggtggtaatggagaaggaaggcggtttgagtaggatacgt

SEQ ID NO: 40170 - DNA, 621 bp, Artificial Sequence
  chemically treated genomic DNA (Homo sapiens) CpG-island No: 40170
acgtatcctactcaaaccgccttccttctccattaccacccgtaccgaacaaccaaactacccaattacaactataaaccaataaactaatccatcgcccgcaacccgactctcaacaacgattcgtcccgatacccacccccgcgaaacgaaacgcccgaacacctaacctccctaccgaccacctaacctccctaccgaccacgataccgaacgtactactaccgcccaaaaaaaacaacctcttcaaacgcatcttaataaataaccgtaaaccgcgctaccgccccccgatccccgaatcctcgaaccttaaaaacaaacgatctaacgacgaccgacgcgaaccaaacttaacctccgctacccaccgctctttatttacctcgaaaatcgcgaaaccccactttcccgctccgaccgacccacgaaaactaccgaaccgctcctccgtacgcttcctttccgcgatcttctacgactcgcctcacccccgccgcgctctttccaaaaacttcacgccgctctccgcaatacccgaacacaaccgcctcgaccgataataactaccgtactctctaccgcgccgaactcgcaacaacccctcaaaaatcctccccc

SEQ ID NO: 40171 - DNA, 621 bp, Artificial Sequence
  chemically treated genomic DNA (Homo sapiens) CpG-island No: 40171
gcgtgttttgtttagatcgttttttttttttattgttattcgtgtcgaatagttaggttgtttaattgtaattgtagattaatgaattaatttatcgttcgtagttcgatttttagtagcggttcgtttcggtgtttattttcgcgaagcggagcgttcgggtatttagtttttttgtcggttatttagtttttttgtcggttacgatgtcgaacgtgttgttgtcgtttaaggagagtaatttttttaaacgtattttggtgagtggtcgtaggtcgcgttgtcgtttttcggttttcgggttttcgggttttaagggtaagcggtttggcggcggtcggcgcgggttaggtttggttttcgttgtttatcgttttttgtttatttcggaggtcgcgggattttattttttcgtttcggtcggtttacgggggttgtcgagtcgttttttcgtgcgtttttttttcgcggttttttgcggttcgttttattttcgtcgcgttttttttagaaattttacgtcgtttttcgtagtgttcgggtatagtcgtttcggtcggtagtggttgtcgtgttttttgtcgcgtcgggttcgtagtagttttttagggattttttttt

SEQ ID NO: 40172 - DNA, 621 bp, Artificial Sequence
  chemically treated genomic DNA (Homo sapiens) CpG-island No: 40172
aaaaaaaaatccctaaaaaactactacgaacccgacgcgacaaaaaacacgacaaccactaccgaccgaaacgactatacccgaacactacgaaaaacgacgtaaaatttctaaaaaaaacgcgacgaaaataaaacgaaccgcaaaaaaccgcgaaaaaaaaacgcacgaaaaaacgactcgacaacccccgtaaaccgaccgaaacgaaaaaataaaatcccgcgacctccgaaataaacaaaaaacgataaacaacgaaaaccaaacctaacccgcgccgaccgccgccaaaccgcttacccttaaaacccgaaaacccgaaaaccgaaaaacgacaacgcgacctacgaccactcaccaaaatacgtttaaaaaaattactctccttaaacgacaacaacacgttcgacatcgtaaccgacaaaaaaactaaataaccgacaaaaaaactaaatacccgaacgctccgcttcgcgaaaataaacaccgaaacgaaccgctactaaaaatcgaactacgaacgataaattaattcattaatctacaattacaattaaacaacctaactattcgacacgaataacaataaaaaaaaaaaacgatctaaacaaaacacgc

SEQ ID NO: 40173 - DNA, 783 bp, Artificial Sequence
  chemically treated genomic DNA (Homo sapiens) CpG-island No: 40173
ttttcggatttgtgttttagtttagagaaagaagaaaatgtgtgtgtgtggcgagggggagggttcgtattgagtagtcgtttcgcgtttggtaatcggggtagggggtgggcgtttggcgggggcgggggcggaggcggaggcggaggagcgcgcggttgtcgggcgggacgggaatcgggtttgcgcgcgagtcgggcggtgggcgcggatagggtcgagggcgttcgggagtcgtgttaggcggcggcgaggagcgggcgcgtcgggcgcggggagtcgtcggcggtcgttcgttgcggggatatttcggtgaatgagttttcgtcgttaggcgtacggcgtaggggagtttcgtaggcggcggcggcggcggcggttcggggggcgaggcgggtcgtttgttttcggggaaggaggcgcgggcgtttgagcgaggtcgggcgcggcggtttttttttacgcgtttttcgagttagcgttcgtttttcgcgttcgttttttttttttcgtcggtttagattattcgtttttatcgcgttttcggtttatttggtggtttcggttttggtcgtcgttttcgcgggcggttttcggagttcgtttcggacgcgcgttcgggcggcgggggtttcggcggttatcgttgtttcgggggagtaagggcgggagggtgtgtgtgcgcgttgtgagtagggggtgtcggcggggttgtagcggaggtatttttgaagaatgattttggagtttattatggcgtgttgtttgagcgaggaggttaag

SEQ ID NO: 40174 - DNA, 783 bp, Artificial Sequence
  chemically treated genomic DNA (Homo sapiens) CpG-island No: 40174
cttaacctcctcgctcaaacaacacgccataataaactccaaaatcattcttcaaaaatacctccgctacaaccccgccgacaccccctactcacaacgcgcacacacaccctcccgcccttactcccccgaaacaacgataaccgccgaaacccccgccgcccgaacgcgcgtccgaaacgaactccgaaaaccgcccgcgaaaacgacgaccaaaaccgaaaccaccaaataaaccgaaaacgcgataaaaacgaataatctaaaccgacgaaaaaaaaaaaacgaacgcgaaaaacgaacgctaactcgaaaaacgcgtaaaaaaaaaccgccgcgcccgacctcgctcaaacgcccgcgcctccttccccgaaaacaaacgacccgcctcgccccccgaaccgccgccgccgccgccgcctacgaaactcccctacgccgtacgcctaacgacgaaaactcattcaccgaaatatccccgcaacgaacgaccgccgacgactccccgcgcccgacgcgcccgctcctcgccgccgcctaacacgactcccgaacgccctcgaccctatccgcgcccaccgcccgactcgcgcgcaaacccgattcccgtcccgcccgacaaccgcgcgctcctccgcctccgcctccgcccccgcccccgccaaacgcccaccccctaccccgattaccaaacgcgaaacgactactcaatacgaaccctccccctcgccacacacacacattttcttctttctctaaactaaaacacaaatccgaaaa

SEQ ID NO: 40175 - DNA, 783 bp, Artificial Sequence
  chemically treated genomic DNA (Homo sapiens) CpG-island No: 40175
tttggttttttcgtttaggtagtacgttatgatggattttagagttattttttaaaagtgttttcgttgtagtttcgtcggtattttttgtttatagcgcgtatatatattttttcgtttttgttttttcgaggtagcggtggtcgtcgaagttttcgtcgttcgggcgcgcgttcgggacgagtttcgggaatcgttcgcgggggcggcggttagggtcggggttattaggtgggtcgggggcgcggtgggagcggatagtttgggtcgacgggagaagagaggcgggcgcgggaggcgggcgttggttcggggggcgcgtgagagaaggtcgtcgcgttcggtttcgtttagacgttcgcgttttttttttcgggaataggcggttcgtttcgtttttcgagtcgtcgtcgtcgtcgtcgtttgcgaggtttttttacgtcgtgcgtttggcggcgagagtttatttatcggggtgttttcgtagcgagcggtcgtcgacggtttttcgcgttcggcgcgttcgtttttcgtcgtcgtttgatacggttttcgggcgttttcggttttgttcgcgtttatcgttcggttcgcgcgtagattcggttttcgtttcgttcggtaatcgcgcgttttttcgttttcgttttcgttttcgttttcgttagacgtttattttttgtttcgattgttaggcgcggagcggttgtttagtgcgagttttttttttcgttatatatatatatttttttttttttttgaattggagtatagattcgggag

SEQ ID NO: 40176 - DNA, 783 bp, Artificial Sequence
  chemically treated genomic DNA (Homo sapiens) CpG-island No: 40176
ctcccgaatctatactccaattcaaaaaaaaaaaaaaatatatatatataacgaaaaaaaaaactcgcactaaacaaccgctccgcgcctaacaatcgaaacaaaaaataaacgtctaacgaaaacgaaaacgaaaacgaaaacgaaaaaacgcgcgattaccgaacgaaacgaaaaccgaatctacgcgcgaaccgaacgataaacgcgaacaaaaccgaaaacgcccgaaaaccgtatcaaacgacgacgaaaaacgaacgcgccgaacgcgaaaaaccgtcgacgaccgctcgctacgaaaacaccccgataaataaactctcgccgccaaacgcacgacgtaaaaaaacctcgcaaacgacgacgacgacgacgactcgaaaaacgaaacgaaccgcctattcccgaaaaaaaaaacgcgaacgtctaaacgaaaccgaacgcgacgaccttctctcacgcgccccccgaaccaacgcccgcctcccgcgcccgcctctcttctcccgtcgacccaaactatccgctcccaccgcgcccccgacccacctaataaccccgaccctaaccgccgcccccgcgaacgattcccgaaactcgtcccgaacgcgcgcccgaacgacgaaaacttcgacgaccaccgctacctcgaaaaaacaaaaacgaaaaaatatatatacgcgctataaacaaaaaataccgacgaaactacaacgaaaacacttttaaaaaataactctaaaatccatcataacgtactacctaaacgaaaaaaccaaa

SEQ ID NO: 40177 - DNA, 1109 bp, Artificial Sequence
  chemically treated genomic DNA (Homo sapiens) CpG-island No: 40177
taattttttttttttttagattttattcgtttcgttattttttttcgttttcggtttcgttagtttaatttgttagagaagttgtgtataaattgcgcggtcgttttgcgcgcgaagttcgtggttcgagaggggtgcggtcgggtcgacggaggcggggttttggttgtttttttttttgtttataggttggtcgtttaggtttggtcggtttcggggtttcgggattcgcggcggcgttgttaattaggcgatcgggtttcgttttttcggagttgggtgaaatagaggcgggcgttaagtgttagtagtcgcggggtaggtacgtgcgttcgcggttttttcgcggaggtcggcggtggcgggagcgggtttcggagagtttgagagtacggtggggcggggcgggagaaagtggtcgttcggaggacgttggcgtttacgtgtggaagagcggaagagttttgtttttcgtgcgcgttttcgaaaattgtttgtcgttgtttgaggagtttattcgaaattttttttttttcgtcggtagtttcgcgttgagttcgtcgatttaagttagcgtgggcgaggtgggaagtgcgttcgattcgcgtttggagttgcgttttcgagtgtttatggttataagggtgttgagtatgagcgttcgtttgggattcgtgttttagtcgtcggcgtcgtaggacgagtcggtgttcgcgtagtttaagtcggtgttgggcgtcgcgaattcggttcgcgacgcggcgttttttttcggcgaggagttgaagtacgcgtattatcgttcgtaggcgtagttcgcgttcgcgtaggtttcgtagtcggtttagtcgttcgttatcggttcgcggttgtttttagaggatttggtttaggtaggaagagtcgttttttttttatcgtagtattttcgggttcgggcgtgtttcgttgttgcgattcgcgggcgataggggtcgttttaggttggggcgtgcgtcggggcgtatcggagtcggtgttgggtgggtagtttcgttttgtacgtttggtcggggtttcgcgtttcgttgagagtaaatgggggggggggtcgggggtgggaaggatgg

SEQ ID NO: 40178 - DNA, 1109 bp, Artificial Sequence
  chemically treated genomic DNA (Homo sapiens) CpG-island No: 40178
ccatccttcccacccccgacccccccccccatttactctcaacgaaacgcgaaaccccgaccaaacgtacaaaacgaaactacccacccaacaccgactccgatacgccccgacgcacgccccaacctaaaacgacccctatcgcccgcgaatcgcaacaacgaaacacgcccgaacccgaaaatactacgataaaaaaaaaacgactcttcctacctaaaccaaatcctctaaaaacaaccgcgaaccgataacgaacgactaaaccgactacgaaacctacgcgaacgcgaactacgcctacgaacgataatacgcgtacttcaactcctcgccgaaaaaaaacgccgcgtcgcgaaccgaattcgcgacgcccaacaccgacttaaactacgcgaacaccgactcgtcctacgacgccgacgactaaaacacgaatcccaaacgaacgctcatactcaacacccttataaccataaacactcgaaaacgcaactccaaacgcgaatcgaacgcacttcccacctcgcccacgctaacttaaatcgacgaactcaacgcgaaactaccgacgaaaaaaaaaaaatttcgaataaactcctcaaacaacgacaaacaattttcgaaaacgcgcacgaaaaacaaaactcttccgctcttccacacgtaaacgccaacgtcctccgaacgaccactttctcccgccccgccccaccgtactctcaaactctccgaaacccgctcccgccaccgccgacctccgcgaaaaaaccgcgaacgcacgtacctaccccgcgactactaacacttaacgcccgcctctatttcacccaactccgaaaaaacgaaacccgatcgcctaattaacaacgccgccgcgaatcccgaaaccccgaaaccgaccaaacctaaacgaccaacctataaacaaaaaaaaaaacaaccaaaaccccgcctccgtcgacccgaccgcacccctctcgaaccacgaacttcgcgcgcaaaacgaccgcgcaatttatacacaacttctctaacaaattaaactaacgaaaccgaaaacgaaaaaaaataacgaaacgaataaaatctaaaaaaaaaaaaaatta

SEQ ID NO: 40179 - DNA, 1109 bp, Artificial Sequence
  chemically treated genomic DNA (Homo sapiens) CpG-island No: 40179
ttattttttttattttcggtttttttttttatttatttttagcgaaacgcggggtttcggttaggcgtgtagggcggggttgtttatttagtatcggtttcggtgcgtttcgacgtacgttttagtttggagcggtttttgtcgttcgcgagtcgtagtaacgggatacgttcgagttcgggagtgttgcggtgggaggggagcggttttttttatttggattaggttttttggaggtagtcgcgggtcggtggcgggcggttgggtcggttgcggggtttgcgcgggcgcgggttgcgtttgcgggcggtggtgcgcgtgttttagtttttcgtcggggaagagcgtcgcgtcgcgggtcggattcgcggcgtttagtatcggtttgagttgcgcgaatatcggttcgttttgcggcgtcggcggttggggtacgggttttaggcgggcgtttatgtttagtatttttgtagttatgggtattcgggggcgtagttttaggcgcgggtcgggcgtattttttatttcgtttacgttggtttgggtcggcgagtttagcgcggggttgtcggcggaggaggggaggtttcgggtggattttttagatagcggtaggtagttttcgaaggcgcgtacgaaaagtaaaattttttcgtttttttatacgtaaacgttaacgtttttcgggcggttattttttttcgtttcgttttatcgtgtttttaggtttttcggagttcgttttcgttatcgtcgattttcgcgagagaatcgcgagcgtacgtatttgtttcgcgattattgatatttgacgttcgtttttattttatttaatttcgggggggcggggttcgatcgtttgattggtagcgtcgtcgcgaatttcgaggtttcgaggtcggttaggtttgagcggttagtttatgagtagggagagaggtagttagggtttcgttttcgtcggttcgatcgtatttttttcgggttacgagtttcgcgcgtagggcggtcgcgtagtttgtatataatttttttgatagattgggttggcggagtcgggggcggagggaagtagcggagcgggtggaatttgggaagagggggaatta

SEQ ID NO: 40180 - DNA, 1109 bp, Artificial Sequence
  chemically treated genomic DNA (Homo sapiens) CpG-island No: 40180
taattccccctcttcccaaattccacccgctccgctacttccctccgcccccgactccgccaacccaatctatcaaaaaaattatatacaaactacgcgaccgccctacgcgcgaaactcgtaacccgaaaaaaatacgatcgaaccgacgaaaacgaaaccctaactacctctctccctactcataaactaaccgctcaaacctaaccgacctcgaaacctcgaaattcgcgacgacgctaccaatcaaacgatcgaaccccgcccccccgaaattaaataaaataaaaacgaacgtcaaatatcaataatcgcgaaacaaatacgtacgctcgcgattctctcgcgaaaatcgacgataacgaaaacgaactccgaaaaacctaaaaacacgataaaacgaaacgaaaaaaaataaccgcccgaaaaacgttaacgtttacgtataaaaaaacgaaaaaattttacttttcgtacgcgccttcgaaaactacctaccgctatctaaaaaatccacccgaaacctcccctcctccgccgacaaccccgcgctaaactcgccgacccaaaccaacgtaaacgaaataaaaaatacgcccgacccgcgcctaaaactacgcccccgaatacccataactacaaaaatactaaacataaacgcccgcctaaaacccgtaccccaaccgccgacgccgcaaaacgaaccgatattcgcgcaactcaaaccgatactaaacgccgcgaatccgacccgcgacgcgacgctcttccccgacgaaaaactaaaacacgcgcaccaccgcccgcaaacgcaacccgcgcccgcgcaaaccccgcaaccgacccaaccgcccgccaccgacccgcgactacctccaaaaaacctaatccaaataaaaaaaaccgctcccctcccaccgcaacactcccgaactcgaacgtatcccgttactacgactcgcgaacgacaaaaaccgctccaaactaaaacgtacgtcgaaacgcaccgaaaccgatactaaataaacaaccccgccctacacgcctaaccgaaaccccgcgtttcgctaaaaataaataaaaaaaaaaaccgaaaataaaaaaaataa

SEQ ID NO: 40181 - DNA, 569 bp, Artificial Sequence
  chemically treated genomic DNA (Homo sapiens) CpG-island No: 40181
taagacgcgtttaggtcgtttggttatttttattagtcgtagtcgttagttaagtttgtgcgacgattacgaggagtagatagacgaatattttttcgatcgcgattcggtcgttttttagttggtttataatttttatttgttcggggtgttgttggtgttcgacgggttgtgttcgcgtcgttttttggaggagttgggttattggggcgtgcggtttaagtatacgttacgttgttgtcgtatttgtttcgaggagcggcgcgacgagttgagcgaacggtttaagatttagtacgagttgcgcgcgtaggcgtaggtcgaggaggcggaggaattttttcgcgatatgcgtttttacggttcgtagcggcgtcgtttttggaattttatggagaagttatttttttcggtggtcgttaaggttatcggggtggtttttagtattttcgtgttcgttttcgtggtggcgttggcgtttaatatcgtggaggagatgtagtagtattcggggtagggcgagggcggtttagatttgcggtttattttggagtacgtggagatgttgt

SEQ ID NO: 40182 - DNA, 569 bp, Artificial Sequence
  chemically treated genomic DNA (Homo sapiens) CpG-island No: 40182
acaacatctccacgtactccaaaataaaccgcaaatctaaaccgccctcgccctaccccgaatactactacatctcctccacgatattaaacgccaacgccaccacgaaaacgaacacgaaaatactaaaaaccaccccgataaccttaacgaccaccgaaaaaaataacttctccataaaattccaaaaacgacgccgctacgaaccgtaaaaacgcatatcgcgaaaaaattcctccgcctcctcgacctacgcctacgcgcgcaactcgtactaaatcttaaaccgttcgctcaactcgtcgcgccgctcctcgaaacaaatacgacaacaacgtaacgtatacttaaaccgcacgccccaataacccaactcctccaaaaaacgacgcgaacacaacccgtcgaacaccaacaacaccccgaacaaataaaaattataaaccaactaaaaaacgaccgaatcgcgatcgaaaaaatattcgtctatctactcctcgtaatcgtcgcacaaacttaactaacgactacgactaataaaaataaccaaacgacctaaacgcgtctta

SEQ ID NO: 40183 - DNA, 569 bp, Artificial Sequence
  chemically treated genomic DNA (Homo sapiens) CpG-island No: 40183
atagtatttttacgtgttttaggatgggtcgtaggtttgggtcgttttcgttttgtttcgagtgttgttgtattttttttacggtgttgagcgttagcgttattacggagacgagtacgaaggtgttggaggttatttcgatggttttggcggttatcgaggagaatggtttttttatgaggttttagaggcggcgtcgttgcgggtcgtagaagcgtatgtcgcggaagagttttttcgttttttcgatttgcgtttgcgcgcgtagttcgtgttggattttgagtcgttcgtttagttcgtcgcgtcgtttttcgaagtagatgcggtagtagcgtggcgtgtatttgagtcgtacgttttagtagtttagtttttttaggaagcggcgcggatatagttcgtcgagtattagtagtatttcggataggtagaaattgtagattagttggaagacggtcgggtcgcggtcgaagaagtattcgtttgtttgtttttcgtagtcgtcgtataggtttagttggcggttgcggttggtggaggtggttaggcgatttaggcgcgttttg

SEQ ID NO: 40184 - DNA, 569 bp, Artificial Sequence
  chemically treated genomic DNA (Homo sapiens) CpG-island No: 40184
caaaacgcgcctaaatcgcctaaccacctccaccaaccgcaaccgccaactaaacctatacgacgactacgaaaaacaaacaaacgaatacttcttcgaccgcgacccgaccgtcttccaactaatctacaatttctacctatccgaaatactactaatactcgacgaactatatccgcgccgcttcctaaaaaaactaaactactaaaacgtacgactcaaatacacgccacgctactaccgcatctacttcgaaaaacgacgcgacgaactaaacgaacgactcaaaatccaacacgaactacgcgcgcaaacgcaaatcgaaaaaacgaaaaaactcttccgcgacatacgcttctacgacccgcaacgacgccgcctctaaaacctcataaaaaaaccattctcctcgataaccgccaaaaccatcgaaataacctccaacaccttcgtactcgtctccgtaataacgctaacgctcaacaccgtaaaaaaaatacaacaacactcgaaacaaaacgaaaacgacccaaacctacgacccatcctaaaacacgtaaaaatactat

SEQ ID NO: 40185 - DNA, 626 bp, Artificial Sequence
  chemically treated genomic DNA (Homo sapiens) CpG-island No: 40185
tcgcgtggagttttgttgttttttttgcgttttttcgttggttaggatcgtttttaggtttttgttacgtttcgggagcgttacgaatttaatagtcgtttaagtcgtttttcggttcgcggtttgcggacgcgttcggagttgggggttttcgttaatagttgtcgtatcgtgtcgcgtcgtagtcgtacgttagcggggttaacggcgcggtaggcgtaggggttttcgttaaggttcggaagaggattttgaaaatggtttttgggtatgcgttatagcggtcgttacgagacgtaaaatcgacgttttggaattgagagtttagagggacggagttcggcgtattatgaggttttcggggtttaaggtcgatcgtgagagcgtacgaggttggcgagtttcgcggggaggtcgaggcgcgggtgcgggcgtcggcgtagtcgcggcggtagcgttacgtagcgaggtcgtgcgtgcgcgggcgttagggcggcgttgagttgaggacgttggcggtttcgcgacgagttttgttttttcggttgggtatgttgtttatcgtaggatgatggaagcgacggttcgtataaagatagaagcgttggttttagtgagtagggttt

SEQ ID NO: 40186 - DNA, 626 bp, Artificial Sequence
  chemically treated genomic DNA (Homo sapiens) CpG-island No: 40186
aaaccctactcactaaaaccaacgcttctatctttatacgaaccgtcgcttccatcatcctacgataaacaacatacccaaccgaaaaaacaaaactcgtcgcgaaaccgccaacgtcctcaactcaacgccgccctaacgcccgcgcacgcacgacctcgctacgtaacgctaccgccgcgactacgccgacgcccgcacccgcgcctcgacctccccgcgaaactcgccaacctcgtacgctctcacgatcgaccttaaaccccgaaaacctcataatacgccgaactccgtccctctaaactctcaattccaaaacgtcgattttacgtctcgtaacgaccgctataacgcatacccaaaaaccattttcaaaatcctcttccgaaccttaacgaaaacccctacgcctaccgcgccgttaaccccgctaacgtacgactacgacgcgacacgatacgacaactattaacgaaaacccccaactccgaacgcgtccgcaaaccgcgaaccgaaaaacgacttaaacgactattaaattcgtaacgctcccgaaacgtaacaaaaacctaaaaacgatcctaaccaacgaaaaaacgcaaaaaaaacaacaaaactccacgcga

SEQ ID NO: 40187 - DNA, 626 bp, Artificial Sequence
  chemically treated genomic DNA (Homo sapiens) CpG-island No: 40187
aaattttgtttattgaaattaacgtttttgtttttgtacgggtcgtcgtttttattattttgcggtaagtagtatgtttaatcgaaaaaataaagttcgtcgcggagtcgttagcgtttttaatttagcgtcgttttgacgttcgcgtacgtacggtttcgttgcgtgacgttatcgtcgcggttacgtcggcgttcgtattcgcgtttcggttttttcgcggggttcgttaatttcgtgcgtttttacggtcggttttgggtttcgggagttttatggtgcgtcgagtttcgtttttttaggtttttagttttaaggcgtcggttttgcgtttcgtaacggtcgttgtggcgtatgtttagaagttatttttaaggttttttttcgaattttggcgaggatttttgcgtttgtcgcgtcgttgatttcgttagcgtgcggttgcgacgcggtacggtacggtagttgttggcgaaggtttttaatttcgagcgcgttcgtagatcgcgagtcggaaggcggtttgggcggttgttgagttcgtggcgttttcgaggcgtggtaaaggtttaaaaacggttttggttagcggaaaggcgtaagaggagtagtaaggttttacgcga

SEQ ID NO: 40188 - DNA, 626 bp, Artificial Sequence
  chemically treated genomic DNA (Homo sapiens) CpG-island No: 40188
tcgcgtaaaaccttactactcctcttacgcctttccgctaaccaaaaccgtttttaaacctttaccacgcctcgaaaacgccacgaactcaacaaccgcccaaaccgccttccgactcgcgatctacgaacgcgctcgaaattaaaaaccttcgccaacaactaccgtaccgtaccgcgtcgcaaccgcacgctaacgaaatcaacgacgcgacaaacgcaaaaatcctcgccaaaattcgaaaaaaaaccttaaaaataacttctaaacatacgccacaacgaccgttacgaaacgcaaaaccgacgccttaaaactaaaaacctaaaaaaacgaaactcgacgcaccataaaactcccgaaacccaaaaccgaccgtaaaaacgcacgaaattaacgaaccccgcgaaaaaaccgaaacgcgaatacgaacgccgacgtaaccgcgacgataacgtcacgcaacgaaaccgtacgtacgcgaacgtcaaaacgacgctaaattaaaaacgctaacgactccgcgacgaactttattttttcgattaaacatactacttaccgcaaaataataaaaacgacgacccgtacaaaaacaaaaacgttaatttcaataaacaaaattt

SEQ ID NO: 40189 - DNA, 616 bp, Artificial Sequence
  chemically treated genomic DNA (Homo sapiens) CpG-island No: 40189
agcggaataagttagatgacgttatttcgttcgttaaagtatattacgtggttttcgtagtacgtgattcgtgttttcgtcgtaggtaaaagaatgacgtacgttagttttagatcgtgcgttttatatttttttcggtaacgaagttcgttgtttgggtttaaatttttttagagtgtggtatcgtcggtgttggaagttatttgtttttagagtcggtttaacgtagtcgtacggggtcgttgtaggtcgaggtttcgatttttttaagtcgcgtatggttattggttgttgaggtgtttattcgacgtatttaatttttcgttttcgttttttatgtttgacgtatgcgtagtggtttcgtcggcgaggtttcgcgaatttaggagaatgtgcgcgcgtagggtggcgttgagggaagttttgagttttttatggggtttcgaattttatttcgggcgtgtgttttttcgggattttaatttcgtttattttatatatagttgttatagttgttcgtttttttagggtagaatgcgatttcggtttttcgcgttttttgagagggaatatatttttatgaagaattcgtaattatgtttttttcgaaatatta

SEQ ID NO: 40190 - DNA, 616 bp, Artificial Sequence
  chemically treated genomic DNA (Homo sapiens) CpG-island No: 40190
taatatttcgaaaaaaacataattacgaattcttcataaaaatatattccctctcaaaaaacgcgaaaaaccgaaatcgcattctaccctaaaaaaacgaacaactataacaactatatataaaataaacgaaattaaaatcccgaaaaaacacacgcccgaaataaaattcgaaaccccataaaaaactcaaaacttccctcaacgccaccctacgcgcgcacattctcctaaattcgcgaaacctcgccgacgaaaccactacgcatacgtcaaacataaaaaacgaaaacgaaaaattaaatacgtcgaataaacacctcaacaaccaataaccatacgcgacttaaaaaaatcgaaacctcgacctacaacgaccccgtacgactacgttaaaccgactctaaaaacaaataacttccaacaccgacgataccacactctaaaaaaatttaaacccaaacaacgaacttcgttaccgaaaaaaatataaaacgcacgatctaaaactaacgtacgtcattcttttacctacgacgaaaacacgaatcacgtactacgaaaaccacgtaatatactttaacgaacgaaataacgtcatctaacttattccgct

SEQ ID NO: 40191 - DNA, 616 bp, Artificial Sequence
  chemically treated genomic DNA (Homo sapiens) CpG-island No: 40191
taatgtttcgagagagatatagttgcgagttttttatggaggtgtgtttttttttaaaaagcgcgggaagtcggagtcgtattttattttaggagggcgggtaattgtagtagttgtgtgtaagataaacgagattggggtttcggaggggtatacgttcgggatagggttcgaagttttatggagaatttaaagttttttttaacgttattttgcgcgcgtatatttttttgggttcgcgggatttcgtcggcgaggttattgcgtatgcgttaggtatggagagcggaagcggaaggttgaatgcgtcgggtgggtattttagtaattagtagttatgcgcggtttggaggagtcggggtttcggtttatagcgatttcgtgcggttgcgttaagtcggttttggagataggtaatttttaatatcggcggtgttatattttggagaggtttaggtttaggtagcggatttcgttgtcgagaggggtgtaaaacgtacgatttggaattgacgtgcgttatttttttatttacggcgaaggtacgggttacgtgttgcggagattacgtgatgtgttttggcgagcgggatgacgttatttggtttgtttcgtt

SEQ ID NO: 40192 - DNA, 616 bp, Artificial Sequence
  chemically treated genomic DNA (Homo sapiens) CpG-island No: 40192
aacgaaacaaaccaaataacgtcatcccgctcgccaaaacacatcacgtaatctccgcaacacgtaacccgtaccttcgccgtaaataaaaaaataacgcacgtcaattccaaatcgtacgttttacacccctctcgacaacgaaatccgctacctaaacctaaacctctccaaaatataacaccgccgatattaaaaattacctatctccaaaaccgacttaacgcaaccgcacgaaatcgctataaaccgaaaccccgactcctccaaaccgcgcataactactaattactaaaatacccacccgacgcattcaaccttccgcttccgctctccatacctaacgcatacgcaataacctcgccgacgaaatcccgcgaacccaaaaaaatatacgcgcgcaaaataacgttaaaaaaaactttaaattctccataaaacttcgaaccctatcccgaacgtatacccctccgaaaccccaatctcgtttatcttacacacaactactacaattacccgccctcctaaaataaaatacgactccgacttcccgcgctttttaaaaaaaaacacacctccataaaaaactcgcaactatatctctctcgaaacatta

SEQ ID NO: 40193 - DNA, 1605 bp, Artificial Sequence
  chemically treated genomic DNA (Homo sapiens) CpG-island No: 40193
ggtacgaaatttggtcgttcgtttagtttagagcgggtcgggaggtttcgcggggtcgtttttcgcgggaaagttattggttcgttggggtattcggtcgcggcgttaattggttcgcgtcggttcgcggcggggggggggttcgcgacggcgggtagtcgcgttaaattcgggagacgaatggggtaatttttataggtcggatttacgtttacgtagtcgcgtcgtaagagggtcgtttttaggtttttatagttcgtaaggcgcgcggtcgatcgtattaggtcgtttttaagtacgtgggaggttagaggtcgttcggtttacgagtcgagtcgaagttcgtttaaaatttcgcgcgttcggcgcggggcgggggcggtcgtttgtcgttgtttttttaagaagggggagggggtcggtagcgcgttcgcgacgggatgagtcggcggcggtcgcggcgcgcggttttcgttagtgggagttaagtttcggcggggcggggggaaatagatcgagggttcggcgcgggaagaggcggtcgttagttagcgtcgagggcgggcgggtaaggttaagttcgtgggtcggtttattaggcgtagggagacgggtattcgttaatatggcgttgcggcggtttgtggcgcgtttcggttggcgtgaagagtcgtcgttcgtttatacggaggggttagtttttcggggtaagggtaggggtttcgggcgtcgtcgtcgcggtatagggggaagggcgaggtcgtcgttataacggttggttttggtcgattcgggttgtttttgggaggtaggagtgggtaaggtcgagggcgaagagggagcgagagaacgggggagaaagttttatttttgggtttgaaaaatggcgggaattacgttttttttttaaatttggtttcgggaggggcggcggttgcgttattttcgtcgttttggttcgtttttttttcgtttcgcgcgtcgggtcgcgttcgtttaggtttttaggcgttcgagggggtttttcgttttttttaaaagaaaaaagtttttttttcgttttacgattgttgatttcggtcgggtcggcgtttacggcgagtttcggttataagagttttcgtttcgttttattcgcgtttttttttcggtcggttcggggcgcgcggagttcggtttggtttaggcggggatggtcgcgtagtttttcggtaggtcgggttttcgttcggtcgcgtatttcgggaggttgtaaatatggtttttagcgttatataattttcgtttttttttttcgtcgtcggttatttgtatacgcgtttttttaggggaaagatttcggcgggcgaagcgtttaaagtttgtttttttttatatcgttgttttttttcggtcgttttaggggttcgcgggcggtaaagagttaattttcgcgcgttcgttttttttttcgcgttcgttcgtttttttcgttcgagtttacgagttgcgttttttttcgcgtcggggtcggcgaatttttagttcgggtttcgtaggtggttattattatatgtaagttatcgggggagagggtatttatagaatgcggaataaaagaggttt

SEQ ID NO: 40194 - DNA, 1605 bp, Artificial Sequence
  chemically treated genomic DNA (Homo sapiens) CpG-island No: 40194
aaacctcttttattccgcattctataaataccctctcccccgataacttacatataataataaccacctacgaaacccgaactaaaaattcgccgaccccgacgcgaaaaaaaacgcaactcgtaaactcgaacgaaaaaaacgaacgaacgcgaaaaaaaaaacgaacgcgcgaaaattaactctttaccgcccgcgaacccctaaaacgaccgaaaaaaaacaacgatataaaaaaaaacaaactttaaacgcttcgcccgccgaaatctttcccctaaaaaaacgcgtatacaaataaccgacgacgaaaaaaaaaaacgaaaattatataacgctaaaaaccatatttacaacctcccgaaatacgcgaccgaacgaaaacccgacctaccgaaaaactacgcgaccatccccgcctaaaccaaaccgaactccgcgcgccccgaaccgaccgaaaaaaaaacgcgaataaaacgaaacgaaaactcttataaccgaaactcgccgtaaacgccgacccgaccgaaatcaacaatcgtaaaacgaaaaaaaaacttttttcttttaaaaaaaacgaaaaaccccctcgaacgcctaaaaacctaaacgaacgcgacccgacgcgcgaaacgaaaaaaaaacgaaccaaaacgacgaaaataacgcaaccgccgcccctcccgaaaccaaatttaaaaaaaaaacgtaattcccgccatttttcaaacccaaaaataaaactttctcccccgttctctcgctccctcttcgccctcgaccttacccactcctacctcccaaaaacaacccgaatcgaccaaaaccaaccgttataacgacgacctcgcccttccccctataccgcgacgacgacgcccgaaacccctacccttaccccgaaaaactaacccctccgtataaacgaacgacgactcttcacgccaaccgaaacgcgccacaaaccgccgcaacgccatattaacgaatacccgtctccctacgcctaataaaccgacccacgaacttaaccttacccgcccgccctcgacgctaactaacgaccgcctcttcccgcgccgaaccctcgatctatttccccccgccccgccgaaacttaactcccactaacgaaaaccgcgcgccgcgaccgccgccgactcatcccgtcgcgaacgcgctaccgaccccctcccccttcttaaaaaaacaacgacaaacgaccgcccccgccccgcgccgaacgcgcgaaattttaaacgaacttcgactcgactcgtaaaccgaacgacctctaacctcccacgtacttaaaaacgacctaatacgatcgaccgcgcgccttacgaactataaaaacctaaaaacgaccctcttacgacgcgactacgtaaacgtaaatccgacctataaaaattaccccattcgtctcccgaatttaacgcgactacccgccgtcgcgaaccccccccccgccgcgaaccgacgcgaaccaattaacgccgcgaccgaataccccaacgaaccaataactttcccgcgaaaaacgaccccgcgaaacctcccgacccgctctaaactaaacgaacgaccaaatttcgtacc

SEQ ID NO: 40195 - DNA, 1605 bp, Artificial Sequence
  chemically treated genomic DNA (Homo sapiens) CpG-island No: 40195
aggttttttttgtttcgtattttatgggtgttttttttttcgatgatttgtatgtaatggtggttatttgcggggttcgggttgagggttcgtcggtttcggcgcggggaagagcgtagttcgtgggttcggacggggaaggcgggcgggcgcggaggggggagcgagcgcgcgaggattaattttttgtcgttcgcgggtttttggggcggtcggggggaggtagcggtgtgggggaaagtaaattttgagcgtttcgttcgtcggggttttttttttgagggagcgcgtgtgtaagtggtcggcggcgagagagggaggcgggggttgtgtaacgttgggagttatgtttgtagtttttcgggatgcgcggtcgggcggaggttcggtttgtcgaggagttgcgcggttattttcgtttgggttaggtcgggtttcgcgcgtttcgggtcggtcggggaaggggcgcgggtggggcgggacgggggtttttgtggtcggagttcgtcgtgggcgtcggttcggtcgaggttagtagtcgtggggcgaggagggggttttttttttttgaagggagcgagaagttttttcgggcgtttggaggtttgggcgggcgcggttcggcgcgcggagcgggggaggggcgggttagggcggcggaggtggcgtaatcgtcgtttttttcgaggttaagtttgaaaaaaggacgtggttttcgttattttttaagtttaaaaataaaattttttttttcgttttttcgtttttttttcgttttcggttttgtttatttttgttttttaggggtagttcgggtcgattaaggttaatcgttgtggcgacggtttcgtttttttttttgtgtcgcggcggcggcgttcggggtttttgtttttgtttcgggaggttggttttttcgtgtgggcgggcggcggttttttacgttagtcggggcgcgttataggtcgtcgtagcgttatgttggcgggtgttcgtttttttgcgtttggtgagtcggtttacgagtttggttttgttcgttcgttttcggcgttggttggcggtcgttttttttcgcgtcgagttttcggtttgttttttttcgtttcgtcggggtttggtttttattggcgggagtcgcgcgtcgcggtcgtcgtcgatttatttcgtcgcgggcgcgttgtcgattttttttttttttttaaaagggtaacggtaggcggtcgttttcgtttcgcgtcgggcgcgcgggattttgggcgggtttcggttcggttcgtgggtcgggcggtttttggttttttacgtgtttgagagcggtttggtgcggtcggtcgcgcgttttgcgggttgtaggggtttgagggcggtttttttgcggcgcggttgcgtgggcgtgggttcgatttgtgggaattgttttattcgtttttcgggtttagcgcggttgttcgtcgtcgcgagtttttttttcgtcgcggatcggcgcgggttagttagcgtcgcggtcgggtgttttagcgggttagtggttttttcgcggagggcggtttcgcggggtttttcgattcgttttgggttaagcgagcggttaggtttcgtgtt

SEQ ID NO: 40196 - DNA, 1605 bp, Artificial Sequence
  chemically treated genomic DNA (Homo sapiens) CpG-island No: 40196
aacacgaaacctaaccgctcgcttaacccaaaacgaatcgaaaaaccccgcgaaaccgccctccgcgaaaaaaccactaacccgctaaaacacccgaccgcgacgctaactaacccgcgccgatccgcgacgaaaaaaaaactcgcgacgacgaacaaccgcgctaaacccgaaaaacgaataaaacaattcccacaaatcgaacccacgcccacgcaaccgcgccgcaaaaaaaccgccctcaaacccctacaacccgcaaaacgcgcgaccgaccgcaccaaaccgctctcaaacacgtaaaaaaccaaaaaccgcccgacccacgaaccgaaccgaaacccgcccaaaatcccgcgcgcccgacgcgaaacgaaaacgaccgcctaccgttacccttttaaaaaaaaaaaaaaaatcgacaacgcgcccgcgacgaaataaatcgacgacgaccgcgacgcgcgactcccgccaataaaaaccaaaccccgacgaaacgaaaaaaaacaaaccgaaaactcgacgcgaaaaaaaacgaccgccaaccaacgccgaaaacgaacgaacaaaaccaaactcgtaaaccgactcaccaaacgcaaaaaaacgaacacccgccaacataacgctacgacgacctataacgcgccccgactaacgtaaaaaaccgccgcccgcccacacgaaaaaaccaacctcccgaaacaaaaacaaaaaccccgaacgccgccgccgcgacacaaaaaaaaaaacgaaaccgtcgccacaacgattaaccttaatcgacccgaactacccctaaaaaacaaaaataaacaaaaccgaaaacgaaaaaaaaacgaaaaaacgaaaaaaaaaattttatttttaaacttaaaaaataacgaaaaccacgtccttttttcaaacttaacctcgaaaaaaacgacgattacgccacctccgccgccctaacccgcccctcccccgctccgcgcgccgaaccgcgcccgcccaaacctccaaacgcccgaaaaaacttctcgctcccttcaaaaaaaaaaaaccccctcctcgccccacgactactaacctcgaccgaaccgacgcccacgacgaactccgaccacaaaaacccccgtcccgccccacccgcgccccttccccgaccgacccgaaacgcgcgaaacccgacctaacccaaacgaaaataaccgcgcaactcctcgacaaaccgaacctccgcccgaccgcgcatcccgaaaaactacaaacataactcccaacgttacacaacccccgcctccctctctcgccgccgaccacttacacacgcgctccctcaaaaaaaaaaccccgacgaacgaaacgctcaaaatttactttcccccacaccgctacctccccccgaccgccccaaaaacccgcgaacgacaaaaaattaatcctcgcgcgctcgctcccccctccgcgcccgcccgccttccccgtccgaacccacgaactacgctcttccccgcgccgaaaccgacgaaccctcaacccgaaccccgcaaataaccaccattacatacaaatcatcgaaaaaaaaaacacccataaaatacgaaacaaaaaaaacct

SEQ ID NO: 40197 - DNA, 968 bp, Artificial Sequence
  chemically treated genomic DNA (Homo sapiens) CpG-island No: 40197
cgtcgtttacgtgaggcgtttggattttgttcggttttcgtagttttttttttttagtaggtggttttggtttttttttttaattcgggcgtttacgttatcggcgaatttttaattagcgttagcgtcgttattaatcgcgaaaataaataaattttcgcgttcggcggacgcgttaggtttcgtcgggggtttcgttttcgtttcgaggtttttacgtcgtttttttcggtcgggtttttttttatttttcgttcgttcgtttgtttttagtcgcgtttttttcgttttttatcgtagtttgtagtcgcgtttattttcgcggttcgtttcggcgtttcgggattcgttagtgtttagtttgtgggtcgatcgtgattttcgttcggcgcgagtttgtttttagttttgtcgatatttgatttagattagttttaacgtttagtgcggtcgttcggggagtcgcgggagaggcggcggcggggggaggagggagaggagggtcgagtcggcggtacgggaggttcggtgagtacgcggaggcgggttcgtttcgcgggtgttcgtttcggtatttcggaggcgtaggtagcggttcgatagcgtttttttcggcgtttcggtttcgggtggcggggattcggtttgaggcgacgggttttattgatcggagtcgttgggtagagggtacgggagggtcgcggttcgacgttcggcgtaaggttcggggcggcggggagggattcgtattcgatttttaggtcggcgatcgttgagtttttcgagatttcgtgggggtcgttcgagtgataggtgttatagtttttttttcgtcgttggcgttcgcgttttttttcgggtattcgggcgttcggaaatttttggagtaacgatttgattcgtttttttttttttaggttttgaagtcgtttttttgttcgagttaggtttcgtttagcgtaattttt

SEQ ID NO: 40198 - DNA, 968 bp, Artificial Sequence
  chemically treated genomic DNA (Homo sapiens) CpG-island No: 40198
aaaaattacgctaaacgaaacctaactcgaacaaaaaaacgacttcaaaacctaaaaaaaaaaaaacgaatcaaatcgttactccaaaaatttccgaacgcccgaatacccgaaaaaaaacgcgaacgccaacgacgaaaaaaaaactataacacctatcactcgaacgacccccacgaaatctcgaaaaactcaacgatcgccgacctaaaaatcgaatacgaatccctccccgccgccccgaaccttacgccgaacgtcgaaccgcgaccctcccgtaccctctacccaacgactccgatcaataaaacccgtcgcctcaaaccgaatccccgccacccgaaaccgaaacgccgaaaaaaacgctatcgaaccgctacctacgcctccgaaataccgaaacgaacacccgcgaaacgaacccgcctccgcgtactcaccgaacctcccgtaccgccgactcgaccctcctctccctcctccccccgccgccgcctctcccgcgactccccgaacgaccgcactaaacgttaaaactaatctaaatcaaatatcgacaaaactaaaaacaaactcgcgccgaacgaaaatcacgatcgacccacaaactaaacactaacgaatcccgaaacgccgaaacgaaccgcgaaaataaacgcgactacaaactacgataaaaaacgaaaaaaacgcgactaaaaacaaacgaacgaacgaaaaataaaaaaaaacccgaccgaaaaaaacgacgtaaaaacctcgaaacgaaaacgaaacccccgacgaaacctaacgcgtccgccgaacgcgaaaatttatttattttcgcgattaataacgacgctaacgctaattaaaaattcgccgataacgtaaacgcccgaattaaaaaaaaaaaccaaaaccacctactaaaaaaaaaaaactacgaaaaccgaacaaaatccaaacgcctcacgtaaacgacg

SEQ ID NO: 40199 - DNA, 968 bp, Artificial Sequence
  chemically treated genomic DNA (Homo sapiens) CpG-island No: 40199
agaaattgcgttgggcgaaatttaattcgggtagagaagcggttttaaaatttgaaagggagaaaacgagttaggtcgttgttttagaaattttcgagcgttcgggtgttcgggagggagcgcgggcgttagcggcggggaggggattgtggtatttgttattcgagcggtttttacggggtttcgggaggtttagcggtcgtcggtttgggagtcgggtgcgagttttttttcgtcgtttcgagttttgcgtcgagcgtcgggtcgcggttttttcgtgttttttgtttagcggtttcggttagtggggttcgtcgttttaggtcgagttttcgttattcgaggtcggggcgtcgaggggagcgttgtcgagtcgttgtttacgttttcggggtgtcggagcggatattcgcgaggcgggttcgttttcgcgtatttatcgggtttttcgtgtcgtcggttcggtttttttttttttttttttttcgtcgtcgtttttttcgcggtttttcgggcggtcgtattgggcgttgggattggtttgggttaagtgtcggtagagttgggggtaggttcgcgtcgggcgggggttacggtcggtttataggttgggtattaacgggtttcggggcgtcggggcggatcgcggaggtgagcgcgattgtaggttacggtaagggacggggagagcgcggttgagagtaggcgggcggacggagggtggaggaaagttcggtcggaggaggcggcgtgagagtttcggggcggggacggggttttcggcggggtttggcgcgttcgtcgagcgcgggggtttgtttattttcgcggttggtagcggcgttggcgttggttagaggttcgtcggtgacgtgagcgttcgagttgggggagaggattagaattatttgttggagaaggggagttacgggggtcgggtagggtttaaacgttttacgtaggcggcg

SEQ ID NO: 40200 - DNA, 968 bp, Artificial Sequence
  chemically treated genomic DNA (Homo sapiens) CpG-island No: 40200
cgccgcctacgtaaaacgtttaaaccctacccgacccccgtaactccccttctccaacaaataattctaatcctctcccccaactcgaacgctcacgtcaccgacgaacctctaaccaacgccaacgccgctaccaaccgcgaaaataaacaaacccccgcgctcgacgaacgcgccaaaccccgccgaaaaccccgtccccgccccgaaactctcacgccgcctcctccgaccgaactttcctccaccctccgtccgcccgcctactctcaaccgcgctctccccgtcccttaccgtaacctacaatcgcgctcacctccgcgatccgccccgacgccccgaaacccgttaatacccaacctataaaccgaccgtaacccccgcccgacgcgaacctacccccaactctaccgacacttaacccaaaccaatcccaacgcccaatacgaccgcccgaaaaaccgcgaaaaaaacgacgacgaaaaaaaaaaaaaaaaaaaaaccgaaccgacgacacgaaaaacccgataaatacgcgaaaacgaacccgcctcgcgaatatccgctccgacaccccgaaaacgtaaacaacgactcgacaacgctcccctcgacgccccgacctcgaataacgaaaactcgacctaaaacgacgaaccccactaaccgaaaccgctaaacaaaaaacacgaaaaaaccgcgacccgacgctcgacgcaaaactcgaaacgacgaaaaaaaactcgcacccgactcccaaaccgacgaccgctaaacctcccgaaaccccgtaaaaaccgctcgaataacaaataccacaatcccctccccgccgctaacgcccgcgctccctcccgaacacccgaacgctcgaaaatttctaaaacaacgacctaactcgttttctccctttcaaattttaaaaccgcttctctacccgaattaaatttcgcccaacgcaatttct

SEQ ID NO: 40201 - DNA, 681 bp, Artificial Sequence
  chemically treated genomic DNA (Homo sapiens) CpG-island No: 40201
aagacgtcgaggtcggtgtagtagagaaatagaggataatggcgtttgtagtgttgtcgtttggagcgttttttttttttttcgttcgcgtatttattagttggggggaggggcggttagggggcgaatttttcgcgagatttaataattgtttagtttacgcgtatagggagggggcggggaaggggcgttttttagtttcgaaggagttttttggggttggaggaggggcgcgagcgcgcggtaaatcgggcgggaagaggtaaaaaaggaattgggagcgcgtcgcggcggtttttgtttttatagttgcgttgtttagggatcgatgttgcgcgaggaaaatgcgggacgtttaggtcggtgttcggtttagatttatgttcgtgtttttatagtttatattcgtgttcgaagttttttatttcgtttcgggttgtggtttgtgggttgtgggacgagttgcggcgcggtaagtgcgggtcgtttgcgttcgttgggtcgggtttacgtttcggaaattcgttgtttgtaatggttcggggcgttcgttagttaaggtcgggttcgggggcgtagttggcggttttcggtttgttttgcgtcggggcgggagtcggggaaacgcggggcgagtttgggagtattggagaatttttcgtcgagagggtataggcggtt

SEQ ID NO: 40202 - DNA, 681 bp, Artificial Sequence
  chemically treated genomic DNA (Homo sapiens) CpG-island No: 40202
aaccgcctataccctctcgacgaaaaattctccaatactcccaaactcgccccgcgtttccccgactcccgccccgacgcaaaacaaaccgaaaaccgccaactacgcccccgaacccgaccttaactaacgaacgccccgaaccattacaaacaacgaatttccgaaacgtaaacccgacccaacgaacgcaaacgacccgcacttaccgcgccgcaactcgtcccacaacccacaaaccacaacccgaaacgaaataaaaaacttcgaacacgaatataaactataaaaacacgaacataaatctaaaccgaacaccgacctaaacgtcccgcattttcctcgcgcaacatcgatccctaaacaacgcaactataaaaacaaaaaccgccgcgacgcgctcccaattccttttttacctcttcccgcccgatttaccgcgcgctcgcgcccctcctccaaccccaaaaaactccttcgaaactaaaaaacgccccttccccgccccctccctatacgcgtaaactaaacaattattaaatctcgcgaaaaattcgccccctaaccgcccctccccccaactaataaatacgcgaacgaaaaaaaaaaaaaacgctccaaacgacaacactacaaacgccattatcctctatttctctactacaccgacctcgacgtctt

SEQ ID NO: 40203 - DNA, 681 bp, Artificial Sequence
  chemically treated genomic DNA (Homo sapiens) CpG-island No: 40203
aatcgtttgtgttttttcggcgagaagttttttagtatttttaggttcgtttcgcgttttttcggttttcgtttcggcgtaaggtaggtcgagaatcgttagttgcgttttcgggttcggttttgattgacgggcgtttcggattattataaataacgggttttcgaagcgtgggttcggtttagcggacgtagacggttcgtatttatcgcgtcgtagttcgttttatagtttatagattatagttcggggcggggtaaggggtttcgggtacgagtgtgggttgtgaaaatacgggtataagtttgggtcgagtatcgatttgggcgtttcgtatttttttcgcgtaatatcggtttttgggtagcgtaattgtaaggataggaatcgtcgcggcgcgtttttagttttttttttattttttttcgttcgatttgtcgcgcgttcgcgttttttttttaattttaaaggattttttcggggttggaaaacgtttttttttcgttttttttttgtgcgcgtgaattaggtagttgttagatttcgcgagaggttcgttttttagtcgtttttttttttagttagtgagtgcgcgaacgagaaaggaggagggcgttttaggcgatagtattgtagacgttattattttttgtttttttgttgtatcgatttcgacgtttt

SEQ ID NO: 40204 - DNA, 681 bp, Artificial Sequence
  chemically treated genomic DNA (Homo sapiens) CpG-island No: 40204
aaaacgtcgaaatcgatacaacaaaaaaacaaaaaataataacgtctacaatactatcgcctaaaacgccctcctcctttctcgttcgcgcactcactaactaaaaaaaaaaacgactaaaaaacgaacctctcgcgaaatctaacaactacctaattcacgcgcacaaaaaaaaaacgaaaaaaaaacgttttccaaccccgaaaaaatcctttaaaattaaaaaaaaaacgcgaacgcgcgacaaatcgaacgaaaaaaaataaaaaaaaaactaaaaacgcgccgcgacgattcctatccttacaattacgctacccaaaaaccgatattacgcgaaaaaaatacgaaacgcccaaatcgatactcgacccaaacttatacccgtattttcacaacccacactcgtacccgaaaccccttaccccgccccgaactataatctataaactataaaacgaactacgacgcgataaatacgaaccgtctacgtccgctaaaccgaacccacgcttcgaaaacccgttatttataataatccgaaacgcccgtcaatcaaaaccgaacccgaaaacgcaactaacgattctcgacctaccttacgccgaaacgaaaaccgaaaaaacgcgaaacgaacctaaaaatactaaaaaacttctcgccgaaaaaacacaaacgatt

SEQ ID NO: 40205 - DNA, 870 bp, Artificial Sequence
  chemically treated genomic DNA (Homo sapiens) CpG-island No: 40205
ttttgggtggtttacgcgtttggtttgggtaggaatttttgtgggtagcgaggcgtatttaggtagcgttgcgggtgaatttgcgtgggatgagggtggattttttttaggattgcggtgtattttaggtcggggtgaaggtgttttatagtcgcggcgtagggaattttttttaggatgggggagcgggtcgggcggcgtcggttagggaggggaagtttaacgggggttcggagaggttcgggggattcggacggagagaagtcgggtcgcggttgcggaggttcggtcggttaagggattttcgcgacgtttagcgttgcgagttgcgcggcgttgcggtttttttcgtttcgggggaatttgttgtcggcgaaataggcgggcggtggcgacgatggagaagtttttttcgtttttgtttggttgtacggtagtttttttattttaggtacgtttcgcggcgcggttttttttttcgttttttcgtttaaaataaatagaatacgtcgtcgttaattttagtttgttaacggcgagtacggtcgtttttcgtgtcgttttcgggagtcgaggcgcggtttcgtcgttcggggaggaggaggcggagggggaggaggttaatatggcggcgcgtagggttgggtcgggtcgtagtcgcgtttgagcgttttatcgtattagttcggttcgtaggatttaagttcgtatttagtttggttcggttgttgcggagtattcggggtaggaacgtaggggttaatttgggcgcggaggcggcgcggagggtgcgtcgcgcggttcgttaggttcgggattcgtagtttcgtcgtgcgttggtcggggcggttaggaggtttaagttatgga

SEQ ID NO: 40206 - DNA, 870 bp, Artificial Sequence
  chemically treated genomic DNA (Homo sapiens) CpG-island No: 40206
tccataacttaaacctcctaaccgccccgaccaacgcacgacgaaactacgaatcccgaacctaacgaaccgcgcgacgcaccctccgcgccgcctccgcgcccaaattaacccctacgttcctaccccgaatactccgcaacaaccgaaccaaactaaatacgaacttaaatcctacgaaccgaactaatacgataaaacgctcaaacgcgactacgacccgacccaaccctacgcgccgccatattaacctcctccccctccgcctcctcctccccgaacgacgaaaccgcgcctcgactcccgaaaacgacacgaaaaacgaccgtactcgccgttaacaaactaaaattaacgacgacgtattctatttattttaaacgaaaaaacgaaaaaaaaaaccgcgccgcgaaacgtacctaaaataaaaaaactaccgtacaaccaaacaaaaacgaaaaaaacttctccatcgtcgccaccgcccgcctatttcgccgacaacaaattcccccgaaacgaaaaaaaccgcaacgccgcgcaactcgcaacgctaaacgtcgcgaaaatcccttaaccgaccgaacctccgcaaccgcgacccgacttctctccgtccgaatcccccgaacctctccgaacccccgttaaacttcccctccctaaccgacgccgcccgacccgctcccccatcctaaaaaaaattccctacgccgcgactataaaacaccttcaccccgacctaaaatacaccgcaatcctaaaaaaaatccaccctcatcccacgcaaattcacccgcaacgctacctaaatacgcctcgctacccacaaaaattcctacccaaaccaaacgcgtaaaccacccaaaa

SEQ ID NO: 40207 - DNA, 870 bp, Artificial Sequence
  chemically treated genomic DNA (Homo sapiens) CpG-island No: 40207
tttatggtttgggttttttggtcgtttcggttagcgtacggcgaagttacgggtttcgggtttggcgggtcgcgcggcgtatttttcgcgtcgttttcgcgtttaggttggtttttgcgtttttgtttcgggtgtttcgtagtagtcgggttaggttgggtgcgggtttgggttttgcgagtcgagttagtgcggtgaggcgtttaggcgcggttgcggttcggtttagttttgcgcgtcgttatgttggtttttttttttttcgttttttttttttcgggcggcggggtcgcgtttcggttttcggaagcggtacgggaggcgatcgtgttcgtcgttggtaggttagggttggcggcggcgtattttgtttgttttaaacgaaggagcggagggaggggtcgcgtcgcggagcgtgtttaaggtgaaagggttgtcgtgtagttaggtagaggcgaggaaggtttttttatcgtcgttatcgttcgtttgtttcgtcggtaataggttttttcgggacgggaggggtcgtagcgtcgcgtagttcgtagcgttgaacgtcgcggaaattttttggtcggtcgagttttcgtagtcgcgattcggttttttttcgttcgagtttttcgagttttttcgaattttcgttggattttttttttttggtcggcgtcgttcgattcgtttttttattttagagggaattttttgcgtcgcggttgtgaggtatttttatttcggtttgaaatgtatcgtagttttgaaggaaatttatttttattttacgtagatttattcgtaacgttgtttgaatacgtttcgttgtttatagaaatttttgtttaaattagacgcgtggattatttaaga

SEQ ID NO: 40208 - DNA, 870 bp, Artificial Sequence
  chemically treated genomic DNA (Homo sapiens) CpG-island No: 40208
tcttaaataatccacgcgtctaatttaaacaaaaatttctataaacaacgaaacgtattcaaacaacgttacgaataaatctacgtaaaataaaaataaatttccttcaaaactacgatacatttcaaaccgaaataaaaatacctcacaaccgcgacgcaaaaaattccctctaaaataaaaaaacgaatcgaacgacgccgaccaaaaaaaaaaaatccaacgaaaattcgaaaaaactcgaaaaactcgaacgaaaaaaaaccgaatcgcgactacgaaaactcgaccgaccaaaaaatttccgcgacgttcaacgctacgaactacgcgacgctacgacccctcccgtcccgaaaaaacctattaccgacgaaacaaacgaacgataacgacgataaaaaaaccttcctcgcctctacctaactacacgacaaccctttcaccttaaacacgctccgcgacgcgacccctccctccgctccttcgtttaaaacaaacaaaatacgccgccgccaaccctaacctaccaacgacgaacacgatcgcctcccgtaccgcttccgaaaaccgaaacgcgaccccgccgcccgaaaaaaaaaaaacgaaaaaaaaaaaaaccaacataacgacgcgcaaaactaaaccgaaccgcaaccgcgcctaaacgcctcaccgcactaactcgactcgcaaaacccaaacccgcacccaacctaacccgactactacgaaacacccgaaacaaaaacgcaaaaaccaacctaaacgcgaaaacgacgcgaaaaatacgccgcgcgacccgccaaacccgaaacccgtaacttcgccgtacgctaaccgaaacgaccaaaaaacccaaaccataaa

SEQ ID NO: 40209 - DNA, 687 bp, Artificial Sequence
  chemically treated genomic DNA (Homo sapiens) CpG-island No: 40209
gggggtgttgggggatgcggatgggtcgtttcgcgttcgaatattttggaagttcgttattcgaggcgtggattcgtgtcggcgttttgtagtttagtcggtttggttatgttttatttttcgtcgttgtagtttcgataggaacgttttcggttggttttcgggtttcggaaaagtcgttaggcgcgtgattaaaggattcggggaaatgggtcgggttttagtattcggacgtagttaattcggtagcggaaagtcggtggtttggagatttttggagtcgttaattcggaggcgggggtgggcggtgcgaaggcggggatagcggggtttgtagggttcgttcggcggcggtagggggtagtcgagggttgcgtagtgggggaggagaacgcgacgcggggtcggacggggtagggcggggcgcgcgtagtttttcggcggtttttggttcgttcgcgtttggagtttcgattttgggaggttttcggcgtttattttatttatttttttcgttgtagttagaatagggtcgcgttacgttttaacgttgagtttaggtttttcgcggtaagattttgtttcgggtttattcggttttcgtttgtgtttgttttttggttttcgggttgtgttcggttggtagagtacggtaggtttgggttatcgagggttttggtacgttta

SEQ ID NO: 40210 - DNA, 687 bp, Artificial Sequence
  chemically treated genomic DNA (Homo sapiens) CpG-island No: 40210
taaacgtaccaaaaccctcgataacccaaacctaccgtactctaccaaccgaacacaacccgaaaaccaaaaaacaaacacaaacgaaaaccgaataaacccgaaacaaaatcttaccgcgaaaaacctaaactcaacgttaaaacgtaacgcgaccctattctaactacaacgaaaaaaataaataaaataaacgccgaaaacctcccaaaatcgaaactccaaacgcgaacgaaccaaaaaccgccgaaaaactacgcgcgccccgccctaccccgtccgaccccgcgtcgcgttctcctcccccactacgcaaccctcgactaccccctaccgccgccgaacgaaccctacaaaccccgctatccccgccttcgcaccgcccacccccgcctccgaattaacgactccaaaaatctccaaaccaccgactttccgctaccgaattaactacgtccgaatactaaaacccgacccatttccccgaatcctttaatcacgcgcctaacgacttttccgaaacccgaaaaccaaccgaaaacgttcctatcgaaactacaacgacgaaaaataaaacataaccaaaccgactaaactacaaaacgccgacacgaatccacgcctcgaataacgaacttccaaaatattcgaacgcgaaacgacccatccgcatcccccaacaccccc

SEQ ID NO: 40211 - DNA, 687 bp, Artificial Sequence
  chemically treated genomic DNA (Homo sapiens) CpG-island No: 40211
tgggcgtgttagggttttcggtagtttagatttgtcgtattttattagtcgagtatagttcgaaggttagggaataaatatagacggaggtcgagtgggttcggagtagggttttgtcgcgaagggtttgggtttaacgttagagcgtggcgcgattttattttggttgtaacgagaggggtgaatgaagtgggcgtcggggattttttagaatcggagttttagacgcgggcgggttaggggtcgtcggaaaattgcgcgcgtttcgttttatttcgttcggtttcgcgtcgcgttttttttttttattgcgtagttttcggttgttttttgtcgtcgtcgggcggattttgtaagtttcgttgttttcgttttcgtatcgtttattttcgttttcggattggcggttttagaaatttttaggttatcggtttttcgttatcggattggttgcgttcgggtgttgaggttcggtttattttttcgggttttttgattacgcgtttgacggttttttcggggttcgggagttaatcgagggcgtttttgtcggggttgtagcggcgggaggtaaggtatggttaggtcggttgggttgtagagcgtcggtacgggtttacgtttcgggtgacgggtttttaggatgttcgggcgcggggcggtttattcgtattttttaatattttt

SEQ ID NO: 40212 - DNA, 687 bp, Artificial Sequence
  chemically treated genomic DNA (Homo sapiens) CpG-island No: 40212
aaaaatattaaaaaatacgaataaaccgccccgcgcccgaacatcctaaaaacccgtcacccgaaacgtaaacccgtaccgacgctctacaacccaaccgacctaaccataccttacctcccgccgctacaaccccgacaaaaacgccctcgattaactcccgaaccccgaaaaaaccgtcaaacgcgtaatcaaaaaacccgaaaaaataaaccgaacctcaacacccgaacgcaaccaatccgataacgaaaaaccgataacctaaaaatttctaaaaccgccaatccgaaaacgaaaataaacgatacgaaaacgaaaacaacgaaacttacaaaatccgcccgacgacgacaaaaaacaaccgaaaactacgcaataaaaaaaaaaaacgcgacgcgaaaccgaacgaaataaaacgaaacgcgcgcaattttccgacgacccctaacccgcccgcgtctaaaactccgattctaaaaaatccccgacgcccacttcattcacccctctcgttacaaccaaaataaaatcgcgccacgctctaacgttaaacccaaacccttcgcgacaaaaccctactccgaacccactcgacctccgtctatatttattccctaaccttcgaactatactcgactaataaaatacgacaaatctaaactaccgaaaaccctaacacgccca

SEQ ID NO: 40213 - DNA, 663 bp, Artificial Sequence
  chemically treated genomic DNA (Homo sapiens) CpG-island No: 40213
tagcgggtagatgtttcgagttgtcgtcgtcgtcgtcgtcgattcggtcggtggcggtgtgggaggtgggcgattagttcggggtcgttgagtgtgacggacgtaattgggggcgtcgggggtttcgtacggattatgtattttttgagcggttggtttaagaggttgttgtgttttttggggagttcggtcgaggcgtttttttacgtttagttcgattcgtagagggtttttttcgtcgtgttggtcgcggttcgttttagtatttggtatagtcgagtaagtagagtcgttcgtcgtttttcgtcgttgttttttcggtttttcggcgtcgttttatttttaatttttatttagagtttaggatttttgttttttcgtgttagatttatttgttttcgtagttcgcgttttcgttttatcgaattggtcgtaggtattcgtcggttgtaggtacgttttttagcgggcggttcggggtggatgaagtcgttgttgtcgaaaatttttgagttttttcgcgttggatcgacggtcgcggcgtgtagatttcgtacgtttttcggtcgagtttagatttgtttttttttttttttttttatttttcgagggataaatttgtttaaattttttataattagaaattcggtcgttgtggtgttt

SEQ ID NO: 40214 - DNA, 663 bp, Artificial Sequence
  chemically treated genomic DNA (Homo sapiens) CpG-island No: 40214
aaacaccacaacgaccgaatttctaattataaaaaatttaaacaaatttatccctcgaaaaataaaaaaaaaaaaaaaaaaacaaatctaaactcgaccgaaaaacgtacgaaatctacacgccgcgaccgtcgatccaacgcgaaaaaactcaaaaattttcgacaacaacgacttcatccaccccgaaccgcccgctaaaaaacgtacctacaaccgacgaatacctacgaccaattcgataaaacgaaaacgcgaactacgaaaacaaataaatctaacacgaaaaaacaaaaatcctaaactctaaataaaaattaaaaataaaacgacgccgaaaaaccgaaaaaacaacgacgaaaaacgacgaacgactctacttactcgactataccaaatactaaaacgaaccgcgaccaacacgacgaaaaaaaccctctacgaatcgaactaaacgtaaaaaaacgcctcgaccgaactccccaaaaaacacaacaacctcttaaaccaaccgctcaaaaaatacataatccgtacgaaacccccgacgcccccaattacgtccgtcacactcaacgaccccgaactaatcgcccacctcccacaccgccaccgaccgaatcgacgacgacgacgacgacaactcgaaacatctacccgcta

SEQ ID NO: 40215 - DNA, 663 bp, Artificial Sequence
  chemically treated genomic DNA (Homo sapiens) CpG-island No: 40215
gggtattatagcggtcggatttttaattgtggaaagtttaaataaatttgtttttcggggaatgggggaagggagagaagaataagtttgggttcggtcggggagcgtgcggagtttgtacgtcgcggtcgtcggtttaacgcggggaggtttagggattttcggtagtagcgattttatttatttcggatcgttcgttggaggacgtgtttgtagtcggcgggtatttgcggttaattcggtggaacgaggacgcggattgcgaaggtaggtgggtttggtacgaaggggtaggagttttaggttttgggtggaagttgggggtgggacggcgtcgggaggtcggggaggtagcggcgaaaggcggcgggcggttttatttattcggttgtattagatgttgaggcgggtcgcggttagtacggcgaagaaagttttttgcgggtcggattgaacgtggaaaggcgtttcggtcgggttttttagagggtatagtagttttttgggttagtcgtttagaaaatatatggttcgtgcggagttttcggcgtttttagttgcgttcgttatatttagcggtttcgggttggtcgtttattttttatatcgttatcggtcgagtcggcggcggcggcggcggtagttcggggtatttgttcgttg

SEQ ID NO: 40216 - DNA, 663 bp, Artificial Sequence
  chemically treated genomic DNA (Homo sapiens) CpG-island No: 40216
caacgaacaaataccccgaactaccgccgccgccgccgccgactcgaccgataacgatataaaaaataaacgaccaacccgaaaccgctaaatataacgaacgcaactaaaaacgccgaaaactccgcacgaaccatatattttctaaacgactaacccaaaaaactactataccctctaaaaaacccgaccgaaacgcctttccacgttcaatccgacccgcaaaaaactttcttcgccgtactaaccgcgacccgcctcaacatctaatacaaccgaataaataaaaccgcccgccgcctttcgccgctacctccccgacctcccgacgccgtcccacccccaacttccacccaaaacctaaaactcctaccccttcgtaccaaacccacctaccttcgcaatccgcgtcctcgttccaccgaattaaccgcaaatacccgccgactacaaacacgtcctccaacgaacgatccgaaataaataaaatcgctactaccgaaaatccctaaacctccccgcgttaaaccgacgaccgcgacgtacaaactccgcacgctccccgaccgaacccaaacttattcttctctcccttcccccattccccgaaaaacaaatttatttaaactttccacaattaaaaatccgaccgctataataccc

SEQ ID NO: 40217 - DNA, 642 bp, Artificial Sequence
  chemically treated genomic DNA (Homo sapiens) CpG-island No: 40217
tttcgcgcgttttcgttcgtatgtgtcgttaggttcgttttcgttcggtcgttcgttcgttcggtgggtcgcggtggtcgcgggttgcgttgcgcgggtcgggtttggcgggtcgggggttgcgcgcgttcgcgagggcgttcgacgcgggttgaggggcgttggcgtgtgttcgtaggcggttttgcgcgggggacggcgcgtttttggatatcgtcggttttaagatgagcgatttggatttcgaggtgttgtttttgtcgtcgcgttatcgttttcgggatttgttgttgggcgattcgtttttttagaacgacgataggtagggatcgggcgcggggtgggggttggggtcgtcgtttcggcgtcgtcgtacgttcggagttgttcgcggtgttgacggtcggtttcgcgcgttttcgtagtcgtcggcgttttttaatttttttcggtttttggggacgtagaagtttcggagggggtgcgggtagggggaagtattttttcgggagggggttttcggaggagggcgcgggatgttcggagttgcggagttttttagagttcgatttggggcgcggaggcggagggcggtttggtttttcggtgtttgtttttaatttttagtattttagttttttt

SEQ ID NO: 40218 - DNA, 642 bp, Artificial Sequence
  chemically treated genomic DNA (Homo sapiens) CpG-island No: 40218
aaaaaaactaaaatactaaaaattaaaaacaaacaccgaaaaaccaaaccgccctccgcctccgcgccccaaatcgaactctaaaaaactccgcaactccgaacatcccgcgccctcctccgaaaaccccctcccgaaaaaatacttccccctacccgcaccccctccgaaacttctacgtccccaaaaaccgaaaaaaattaaaaaacgccgacgactacgaaaacgcgcgaaaccgaccgtcaacaccgcgaacaactccgaacgtacgacgacgccgaaacgacgaccccaacccccaccccgcgcccgatccctacctatcgtcgttctaaaaaaacgaatcgcccaacaacaaatcccgaaaacgataacgcgacgacaaaaacaacacctcgaaatccaaatcgctcatcttaaaaccgacgatatccaaaaacgcgccgtcccccgcgcaaaaccgcctacgaacacacgccaacgcccctcaacccgcgtcgaacgccctcgcgaacgcgcgcaacccccgacccgccaaacccgacccgcgcaacgcaacccgcgaccaccgcgacccaccgaacgaacgaacgaccgaacgaaaacgaacctaacgacacatacgaacgaaaacgcgcgaaa

SEQ ID NO: 40219 - DNA, 642 bp, Artificial Sequence
  chemically treated genomic DNA (Homo sapiens) CpG-island No: 40219
agaaaaattggggtgttgggggttgggagtagatatcggaaggttaggtcgtttttcgttttcgcgttttaagtcgggttttggaagatttcgtagtttcgagtatttcgcgttttttttcggagattttttttcgagaagatgtttttttttgttcgtatttttttcgaaatttttgcgtttttagaagtcgggaaaagttgaagggcgtcggcggttgcgggggcgcgcgggatcggtcgttagtatcgcggatagtttcgggcgtgcggcggcgtcgggacggcgattttagtttttatttcgcgttcggtttttatttgtcgtcgttttggaaggacgggtcgtttagtagtaggtttcggaagcggtagcgcggcggtaagggtagtatttcggagtttaggtcgtttattttgaagtcggcggtgtttaggagcgcgtcgtttttcgcgtagggtcgtttgcgggtatacgttagcgttttttagttcgcgtcgggcgttttcgcggacgcgcgtagttttcggttcgttaggttcggttcgcgtagcgtagttcgcggttatcgcgatttatcgggcgggcgggcggtcgggcgggggcgggtttggcggtatatgcgggcgggggcgcgcggga

SEQ ID NO: 40220 - DNA, 642 bp, Artificial Sequence
  chemically treated genomic DNA (Homo sapiens) CpG-island No: 40220
tcccgcgcgcccccgcccgcatataccgccaaacccgcccccgcccgaccgcccgcccgcccgataaatcgcgataaccgcgaactacgctacgcgaaccgaacctaacgaaccgaaaactacgcgcgtccgcgaaaacgcccgacgcgaactaaaaaacgctaacgtatacccgcaaacgaccctacgcgaaaaacgacgcgctcctaaacaccgccgacttcaaaataaacgacctaaactccgaaatactacccttaccgccgcgctaccgcttccgaaacctactactaaacgacccgtccttccaaaacgacgacaaataaaaaccgaacgcgaaataaaaactaaaatcgccgtcccgacgccgccgcacgcccgaaactatccgcgatactaacgaccgatcccgcgcgcccccgcaaccgccgacgcccttcaacttttcccgacttctaaaaacgcaaaaatttcgaaaaaaatacgaacaaaaaaaaacatcttctcgaaaaaaaatctccgaaaaaaaacgcgaaatactcgaaactacgaaatcttccaaaacccgacttaaaacgcgaaaacgaaaaacgacctaaccttccgatatctactcccaacccccaacaccccaatttttct

SEQ ID NO: 40221 - DNA, 537 bp, Artificial Sequence
  chemically treated genomic DNA (Homo sapiens) CpG-island No: 40221
taacgtcgtgattgggaaaattttggcgttatttaatttaatcgttttgtaggatatgtttttttggttagttggcgtgatatcgaagcgggttttattcgtcggtttttcgatttgtcgtgttcgtcgtttagcggtttcggttagcggggttcgtcgttttagggcgagttttcgttattcgaggtcggggcgtcgaggggagcgttgtcgagtcgttgtttacgttttcggggtgtcggagcggatattcgcgaggcgggttcgttttcgcgtatttatcgggtttttcgtgtcgtcggttcggtttttttttttttttttttttcgtcgtcgtttttttcgcggtttttcgggcggtcgtattgggcgttgggattggtttgggttaagtgtcggtagagttgggggtaggttcgcgtcgggcgggggtcgcggtcggtttataggttgggtattaacgggtttcggggcgtcggggcggatcgcggaggtgagcgcggttgtaggttgcggtgaggggcggggagagcgcgg

SEQ ID NO: 40222 - DNA, 537 bp, Artificial Sequence
  chemically treated genomic DNA (Homo sapiens) CpG-island No: 40222
ccgcgctctccccgcccctcaccgcaacctacaaccgcgctcacctccgcgatccgccccgacgccccgaaacccgttaatacccaacctataaaccgaccgcgacccccgcccgacgcgaacctacccccaactctaccgacacttaacccaaaccaatcccaacgcccaatacgaccgcccgaaaaaccgcgaaaaaaacgacgacgaaaaaaaaaaaaaaaaaaaaaccgaaccgacgacacgaaaaacccgataaatacgcgaaaacgaacccgcctcgcgaatatccgctccgacaccccgaaaacgtaaacaacgactcgacaacgctcccctcgacgccccgacctcgaataacgaaaactcgccctaaaacgacgaaccccgctaaccgaaaccgctaaacgacgaacacgacaaatcgaaaaaccgacgaataaaacccgcttcgatatcacgccaactaaccaaaaaaacatatcctacaaaacgattaaattaaataacgccaaaattttcccaatcacgacgtta

SEQ ID NO: 40223 - DNA, 537 bp, Artificial Sequence
  chemically treated genomic DNA (Homo sapiens) CpG-island No: 40223
tcgcgtttttttcgttttttatcgtagtttgtagtcgcgtttattttcgcggttcgtttcggcgtttcgggattcgttagtgtttagtttgtgggtcgatcgcgattttcgttcggcgcgagtttgtttttagttttgtcgatatttgatttagattagttttaacgtttagtgcggtcgttcggggagtcgcgggagaggcggcggcggggggaggagggagaggagggtcgagtcggcggtacgggaggttcggtgagtacgcggaggcgggttcgtttcgcgggtgttcgtttcggtatttcggaggcgtaggtagcggttcgatagcgtttttttcggcgtttcggtttcgggtggcggggattcgttttgaggcgacgggtttcgttgatcggagtcgttgggcgacgggtacggtaggtcggagggtcgacgggtggggttcgtttcggtattacgttagttggttaaaggggtatgttttgtaaggcgattaagttgggtaacgttagggtttttttagttacgacgttg

SEQ ID NO: 40224 - DNA, 537 bp, Artificial Sequence
  chemically treated genomic DNA (Homo sapiens) CpG-island No: 40224
caacgtcgtaactaaaaaaaccctaacgttacccaacttaatcgccttacaaaacatacccctttaaccaactaacgtaataccgaaacgaaccccacccgtcgaccctccgacctaccgtacccgtcgcccaacgactccgatcaacgaaacccgtcgcctcaaaacgaatccccgccacccgaaaccgaaacgccgaaaaaaacgctatcgaaccgctacctacgcctccgaaataccgaaacgaacacccgcgaaacgaacccgcctccgcgtactcaccgaacctcccgtaccgccgactcgaccctcctctccctcctccccccgccgccgcctctcccgcgactccccgaacgaccgcactaaacgttaaaactaatctaaatcaaatatcgacaaaactaaaaacaaactcgcgccgaacgaaaatcgcgatcgacccacaaactaaacactaacgaatcccgaaacgccgaaacgaaccgcgaaaataaacgcgactacaaactacgataaaaaacgaaaaaaacgcga

SEQ ID NO: 40225 - DNA, 554 bp, Artificial Sequence
  chemically treated genomic DNA (Homo sapiens) CpG-island No: 40225
gaggcgtagggcgagggggtttcggtgaataatttttttcgttcggcgaatttcggcgggcggtttggggtgggcgtcgttggcggtatttatcgcgcgtagtggagagggcgtttcgacgcggtgcgggcgggcgggcgggtcggtgcgggttcgacgaggtcgggttgattgcggcgggtacgttgttgtttttgtcgttgtcgttgttttcgttttttgggttgtcgcggttgttgtttgcgtcgggaggatcggtttttttttttttttgggtcgggttttttttttgttttcgttcgggttttcgcgtcgttgcgtgggcgcgtgggggcgtcgaggcgcgacgttgggttacgcgggcgtatatattcggcggttggacgtagggcgcggggttttggtttagtagttgtcgtcgcgtcgttttttgagtttgtagtcgagtagagcgcgtttattttcgtcggttttggaggttagggtttagttttttttcgatttatcgatatcgcggatttttttttttttcggggtagtatattttgtttgta

SEQ ID NO: 40226 - DNA, 554 bp, Artificial Sequence
  chemically treated genomic DNA (Homo sapiens) CpG-island No: 40226
tacaaacaaaatatactaccccgaaaaaaaaaaaaatccgcgatatcgataaatcgaaaaaaaactaaaccctaacctccaaaaccgacgaaaataaacgcgctctactcgactacaaactcaaaaaacgacgcgacgacaactactaaaccaaaaccccgcgccctacgtccaaccgccgaatatatacgcccgcgtaacccaacgtcgcgcctcgacgcccccacgcgcccacgcaacgacgcgaaaacccgaacgaaaacaaaaaaaaaacccgacccaaaaaaaaaaaaaaaccgatcctcccgacgcaaacaacaaccgcgacaacccaaaaaacgaaaacaacgacaacgacaaaaacaacaacgtacccgccgcaatcaacccgacctcgtcgaacccgcaccgacccgcccgcccgcccgcaccgcgtcgaaacgccctctccactacgcgcgataaataccgccaacgacgcccaccccaaaccgcccgccgaaattcgccgaacgaaaaaaattattcaccgaaaccccctcgccctacgcctc

SEQ ID NO: 40227 - DNA, 554 bp, Artificial Sequence
  chemically treated genomic DNA (Homo sapiens) CpG-island No: 40227
tgtaggtaggatgtgttgtttcggggagggaggaggttcgcggtgtcggtgggtcgggaggaggttgggttttggtttttaggatcggcgagagtgagcgcgttttgttcggttgtaggtttaggaagcggcgcggcggtagttgttgggttagagtttcgcgttttgcgtttagtcgtcgggtgtgtgcgttcgcgtagtttagcgtcgcgtttcggcgtttttacgcgtttacgtagcggcgcggggattcgggcgggggtagagggagggttcggtttagggaggagaaggggtcggttttttcggcgtaggtagtagtcgcggtagtttaggaggcggaggtagcggtaacggtagagatagtaacgtgttcgtcgtagttagttcggtttcgtcggattcgtatcggttcgttcgttcgttcgtatcgcgtcggggcgttttttttattgcgcgcggtgagtatcgttagcggcgtttattttaggtcgttcgtcgggattcgtcgggcggggggagttgtttatcgggattttttcgttttgcgtttt

SEQ ID NO: 40228 - DNA, 554 bp, Artificial Sequence
  chemically treated genomic DNA (Homo sapiens) CpG-island No: 40228
aaaacgcaaaacgaaaaaatcccgataaacaactccccccgcccgacgaatcccgacgaacgacctaaaataaacgccgctaacgatactcaccgcgcgcaataaaaaaaacgccccgacgcgatacgaacgaacgaacgaaccgatacgaatccgacgaaaccgaactaactacgacgaacacgttactatctctaccgttaccgctacctccgcctcctaaactaccgcgactactacctacgccgaaaaaaccgaccccttctcctccctaaaccgaaccctccctctacccccgcccgaatccccgcgccgctacgtaaacgcgtaaaaacgccgaaacgcgacgctaaactacgcgaacgcacacacccgacgactaaacgcaaaacgcgaaactctaacccaacaactaccgccgcgccgcttcctaaacctacaaccgaacaaaacgcgctcactctcgccgatcctaaaaaccaaaacccaacctcctcccgacccaccgacaccgcgaacctcctccctccccgaaacaacacatcctacctaca

SEQ ID NO: 40229 - DNA, 549 bp, Artificial Sequence
  chemically treated genomic DNA (Homo sapiens) CpG-island No: 40229
tcgtgagggtcgcgcggtacgcgtttagtttttcgggacgtttttttttttatttttattttcggtttttagttttttattatttattttcgggcggggatcggaagtgtagtcgttttcgtcgggagtcgcggagttgagggacgcgcggagatgacgtaggtagtatcggaagtcgtttttttgtgaggttgcggatcgggagtagcggtcgtaggttcgggtttgtatgcgagtcggggttcggtcggggaggggatttttaggcgttcgcggttttgatgattcgtcgcgttttggttgtttttttttttttgtaggcgttatggttgcggagcggattcgttcgttgtaaggttttgacggttcgagcgtgtttagtatttgtgaattcggcgcgaggttttcgggtttcggggcgttcgtttaggttagtatcgcgcggaattcgatttcgagagtaagggatttgggagtaacgaatgggttgatgggaattggattttagagacgggaaaatagggttttggagtttcggttttatattgt

SEQ ID NO: 40230 - DNA, 549 bp, Artificial Sequence
  chemically treated genomic DNA (Homo sapiens) CpG-island No: 40230
acaatataaaaccgaaactccaaaaccctattttcccgtctctaaaatccaattcccatcaacccattcgttactcccaaatcccttactctcgaaatcgaattccgcgcgatactaacctaaacgaacgccccgaaacccgaaaacctcgcgccgaattcacaaatactaaacacgctcgaaccgtcaaaaccttacaacgaacgaatccgctccgcaaccataacgcctacaaaaaaaaaaaaacaaccaaaacgcgacgaatcatcaaaaccgcgaacgcctaaaaatcccctccccgaccgaaccccgactcgcatacaaacccgaacctacgaccgctactcccgatccgcaacctcacaaaaaaacgacttccgatactacctacgtcatctccgcgcgtccctcaactccgcgactcccgacgaaaacgactacacttccgatccccgcccgaaaataaataataaaaaactaaaaaccgaaaataaaaataaaaaaaaaaacgtcccgaaaaactaaacgcgtaccgcgcgaccctcacga

SEQ ID NO: 40231 - DNA, 549 bp, Artificial Sequence
  chemically treated genomic DNA (Homo sapiens) CpG-island No: 40231
gtagtatgaggtcggaattttaaaattttgttttttcgtttttaaaatttagtttttattaatttattcgttgtttttaggttttttgttttcggaatcgggtttcgcgcggtattgatttgagcgagcgtttcggggttcgggaatttcgcgtcgggtttataggtattaggtacgttcggatcgttagagttttgtagcgggcgggttcgtttcgtagttatggcgtttgtagggaaagaaaaatagttaaggcgcggcgggttattagagtcgcgggcgtttaagagtttttttttcgatcgggtttcggttcgtatatagattcggatttgcggtcgttgttttcggttcgtagttttataggggagcggttttcggtgttgtttgcgttattttcgcgcgttttttagtttcgcggttttcggcggaagcggttgtattttcggttttcgttcgaaggtgggtggtgggaggttggaggtcgggagtaggggtggggagaagagcgtttcgggaagttgaacgcgtgtcgcgcggtttttacgg

SEQ ID NO: 40232 - DNA, 549 bp, Artificial Sequence
  chemically treated genomic DNA (Homo sapiens) CpG-island No: 40232
ccgtaaaaaccgcgcgacacgcgttcaacttcccgaaacgctcttctccccacccctactcccgacctccaacctcccaccacccaccttcgaacgaaaaccgaaaatacaaccgcttccgccgaaaaccgcgaaactaaaaaacgcgcgaaaataacgcaaacaacaccgaaaaccgctcccctataaaactacgaaccgaaaacaacgaccgcaaatccgaatctatatacgaaccgaaacccgatcgaaaaaaaaactcttaaacgcccgcgactctaataacccgccgcgccttaactatttttctttccctacaaacgccataactacgaaacgaacccgcccgctacaaaactctaacgatccgaacgtacctaatacctataaacccgacgcgaaattcccgaaccccgaaacgctcgctcaaatcaataccgcgcgaaacccgattccgaaaacaaaaaacctaaaaacaacgaataaattaataaaaactaaattttaaaaacgaaaaaacaaaattttaaaattccgacctcatactac

SEQ ID NO: 40233 - DNA, 902 bp, Artificial Sequence
  chemically treated genomic DNA (Homo sapiens) CpG-island No: 40233
cggggcgaggagattcgtagaatgtttgattagaggttattcgcgcgttttggacggtggtcgtatttttagggtttgagtttcggagtcgtagttttgtcgtagagcgtttggagtcgcgagtagttagtagttcggcgaagcgtatagtttcggcgatagttagtttcgcggtttttgttttcgtttttttcggtcgtttcgggaaggggcggagacgaggaggagttgggacggtcgtcgcgttttcgggcgtattaagttttttaaaagtcgcgggttttgatagttttgtaggtagtcgtcgcggtttcggatttttagtttcgtatttttagttggcgagtcggtttcgggtgcggcgaggtttagttttttcggattgcgcgtcggatttcgggacgcgttttatgcggtcgtttagtatgttcgggtattttttgttcgtatttattttcgagtttttttcggattatttattgtttaaggatattaaattggcggtgttgggcgtcggtcgcgtgggtaagagcggtgagtgcggcggggattttcgggcggtttcgtttttcggtttcggtcgcgattattgggggcgttgcggagagagggcgtttcggtcgaagtagagggcgcgggtgtaggtagaatcgggttgttttcgcgttgggtgggtttcggttcgtttcggtttgtttttttggcgttttttggtgtatttatttttgggatttcggcgggattggcgtttgttcggggatggggtgcgggagaggtgtttcgttagtcgtattcgcggttaagttcgcggtattacggttttgcggagtttttggaagcgagtagtgtttacggttttgtattttttattttttttagtttgttcgaggtgtttgggtttg

SEQ ID NO: 40234 - DNA, 902 bp, Artificial Sequence
  chemically treated genomic DNA (Homo sapiens) CpG-island No: 40234
caaacccaaacacctcgaacaaactaaaaaaaataaaaaatacaaaaccgtaaacactactcgcttccaaaaactccgcaaaaccgtaataccgcgaacttaaccgcgaatacgactaacgaaacacctctcccgcaccccatccccgaacaaacgccaatcccgccgaaatcccaaaaataaatacaccaaaaaacgccaaaaaaacaaaccgaaacgaaccgaaacccacccaacgcgaaaacaacccgattctacctacacccgcgccctctacttcgaccgaaacgccctctctccgcaacgcccccaataatcgcgaccgaaaccgaaaaacgaaaccgcccgaaaatccccgccgcactcaccgctcttacccacgcgaccgacgcccaacaccgccaatttaatatccttaaacaataaataatccgaaaaaaactcgaaaataaatacgaacaaaaaatacccgaacatactaaacgaccgcataaaacgcgtcccgaaatccgacgcgcaatccgaaaaaactaaacctcgccgcacccgaaaccgactcgccaactaaaaatacgaaactaaaaatccgaaaccgcgacgactacctacaaaactatcaaaacccgcgacttttaaaaaacttaatacgcccgaaaacgcgacgaccgtcccaactcctcctcgtctccgccccttcccgaaacgaccgaaaaaaacgaaaacaaaaaccgcgaaactaactatcgccgaaactatacgcttcgccgaactactaactactcgcgactccaaacgctctacgacaaaactacgactccgaaactcaaaccctaaaaatacgaccaccgtccaaaacgcgcgaataacctctaatcaaacattctacgaatctcctcgccccg

SEQ ID NO: 40235 - DNA, 902 bp, Artificial Sequence
  chemically treated genomic DNA (Homo sapiens) CpG-island No: 40235
taaatttaggtatttcggataaattggggggagtgaagggtgtagaatcgtgggtattgttcgtttttagaggtttcgtaaagtcgtggtgtcgcgggtttggtcgcgagtacgattggcgggatatttttttcgtattttattttcgaataggcgttaatttcgtcgagattttaggagtagatgtattaggaaacgttagggaagtaggtcgggacggatcgggatttatttagcgcgaaagtagttcgattttatttgtattcgcgttttttgtttcggtcgaggcgtttttttttcgtagcgtttttagtggtcgcggtcggagtcggggagcgaagtcgttcgggggttttcgtcgtatttatcgtttttgtttacgcggtcggcgtttagtatcgttagtttgatgtttttgggtagtaggtagttcgaggaggattcggggatgggtgcgagtagaaagtgttcggatatgttgagcggtcgtatggagcgcgtttcggggttcggcgcgtaattcgagagggttgggtttcgtcgtattcggagtcggttcgttagttgggagtgcgggattagaggttcgggatcgcggcggttgtttgtagaattgttaaggttcgcggtttttaaagggtttggtgcgttcgggagcgcggcggtcgttttagttttttttcgttttcgttttttttcggagcggtcgggaggggcgggagtagaggtcgcggagttgattatcgtcgaggttgtgcgtttcgtcgggttgttagttgttcgcggttttaggcgttttgcggtaggattgcggtttcggggtttagattttggagatacggttatcgtttagagcgcgcgagtggtttttagttaggtattttgcgagttttttcgtttcg

SEQ ID NO: 40236 - DNA, 902 bp, Artificial Sequence
  chemically treated genomic DNA (Homo sapiens) CpG-island No: 40236
cgaaacgaaaaaactcgcaaaatacctaactaaaaaccactcgcgcgctctaaacgataaccgtatctccaaaatctaaaccccgaaaccgcaatcctaccgcaaaacgcctaaaaccgcgaacaactaacaacccgacgaaacgcacaacctcgacgataatcaactccgcgacctctactcccgcccctcccgaccgctccgaaaaaaaacgaaaacgaaaaaaaactaaaacgaccgccgcgctcccgaacgcaccaaaccctttaaaaaccgcgaaccttaacaattctacaaacaaccgccgcgatcccgaacctctaatcccgcactcccaactaacgaaccgactccgaatacgacgaaacccaaccctctcgaattacgcgccgaaccccgaaacgcgctccatacgaccgctcaacatatccgaacactttctactcgcacccatccccgaatcctcctcgaactacctactacccaaaaacatcaaactaacgatactaaacgccgaccgcgtaaacaaaaacgataaatacgacgaaaacccccgaacgacttcgctccccgactccgaccgcgaccactaaaaacgctacgaaaaaaaaacgcctcgaccgaaacaaaaaacgcgaatacaaataaaatcgaactactttcgcgctaaataaatcccgatccgtcccgacctacttccctaacgtttcctaatacatctactcctaaaatctcgacgaaattaacgcctattcgaaaataaaatacgaaaaaaatatcccgccaatcgtactcgcgaccaaacccgcgacaccacgactttacgaaacctctaaaaacgaacaatacccacgattctacacccttcactccccccaatttatccgaaatacctaaattta

SEQ ID NO: 40237 - DNA, 571 bp, Artificial Sequence
  chemically treated genomic DNA (Homo sapiens) CpG-island No: 40237
gcgggttcggtttacgtgcgtttttttttttttttttgtttgttttttattttttttttcggcggcggcggtagttttacgcgggattttcgggttgggcgggttggggcggtggcgcggggttggggcggcggcggcggtggggggggcgcgtggtagcggcggcgcgcgaggtttcgggtgcggtcggggagaaggggcgggtacgcggggatcggttggcgcgagagcggcggtgggggaggggcggcggcggttttacgcgttcgcgttgcgttagtcgtttacggcggtagcggcggttgtttcgcgatcgttaaggaatgcggcggtttcgtataattacggggttagaggttacggtttcggttttcgttttttcgttttgttgagggattgagataggatcgacggcggggcgggagggcgagacgcggtttttttttcggcgttcgggtgcgtgcgtgtttgtcgtgggtgtgtgtgagtgtgtgtgaagagtgaggagggggagtgtggggttttttttttttgaataaaaataaatcgaaagggcgtttgggagtcgtag

SEQ ID NO: 40238 - DNA, 571 bp, Artificial Sequence
  chemically treated genomic DNA (Homo sapiens) CpG-island No: 40238
ctacgactcccaaacgccctttcgatttatttttattcaaaaaaaaaaaaccccacactccccctcctcactcttcacacacactcacacacacccacgacaaacacgcacgcacccgaacgccgaaaaaaaaaccgcgtctcgccctcccgccccgccgtcgatcctatctcaatccctcaacaaaacgaaaaaacgaaaaccgaaaccgtaacctctaaccccgtaattatacgaaaccgccgcattccttaacgatcgcgaaacaaccgccgctaccgccgtaaacgactaacgcaacgcgaacgcgtaaaaccgccgccgcccctcccccaccgccgctctcgcgccaaccgatccccgcgtacccgccccttctccccgaccgcacccgaaacctcgcgcgccgccgctaccacgcgccccccccaccgccgccgccgccccaaccccgcgccaccgccccaacccgcccaacccgaaaatcccgcgtaaaactaccgccgccgccgaaaaaaaaaataaaaaacaaacaaaaaaaaaaaaaaaaacgcacgtaaaccgaacccgc

SEQ ID NO: 40239 - DNA, 571 bp, Artificial Sequence
  chemically treated genomic DNA (Homo sapiens) CpG-island No: 40239
ttacgatttttaggcgttttttcggtttgtttttgtttaaaaaaaaaaaattttatattttttttttttattttttatatatatttatatatatttacggtagatacgtacgtattcgggcgtcgaagggaaagtcgcgtttcgttttttcgtttcgtcgtcggttttgttttagttttttagtagagcgggaaagcggaggtcggagtcgtgatttttgatttcgtggttatgcggagtcgtcgtattttttagcgatcgcggggtagtcgtcgttgtcgtcgtgggcgattgacgtagcgcgggcgcgtggagtcgtcgtcgttttttttttatcgtcgttttcgcgttagtcggttttcgcgtgttcgtttttttttttcggtcgtattcgagatttcgcgcgtcgtcgttgttacgcgttttttttatcgtcgtcgtcgttttagtttcgcgttatcgttttagttcgtttagttcggaggtttcgcgtggagttgtcgtcgtcgtcggggagaaggatgaaggataaatagaagaagaagaaggagcgtacgtgggtcgagttcgt

SEQ ID NO: 40240 - DNA, 571 bp, Artificial Sequence
  chemically treated genomic DNA (Homo sapiens) CpG-island No: 40240
acgaactcgacccacgtacgctccttcttcttcttctatttatccttcatccttctccccgacgacgacgacaactccacgcgaaacctccgaactaaacgaactaaaacgataacgcgaaactaaaacgacgacgacgataaaaaaaacgcgtaacaacgacgacgcgcgaaatctcgaatacgaccgaaaaaaaaaaacgaacacgcgaaaaccgactaacgcgaaaacgacgataaaaaaaaaacgacgacgactccacgcgcccgcgctacgtcaatcgcccacgacgacaacgacgactaccccgcgatcgctaaaaaatacgacgactccgcataaccacgaaatcaaaaatcacgactccgacctccgctttcccgctctactaaaaaactaaaacaaaaccgacgacgaaacgaaaaaacgaaacgcgactttcccttcgacgcccgaatacgtacgtatctaccgtaaatatatataaatatatataaaaaataaaaaaaaaaaatataaaattttttttttttaaacaaaaacaaaccgaaaaaacgcctaaaaatcgtaa

SEQ ID NO: 40241 - DNA, 760 bp, Artificial Sequence
  chemically treated genomic DNA (Homo sapiens) CpG-island No: 40241
cgttttcgcgttttggagttcgcggtgggcgagagcgagtcggcggtcgcggtagttatggcgttcgtttttgtcggggagtcggtatcgttcgcgttcgcgtttttagaggattattcggacgaggagatggggtttattatcgatattaagagtttttttaagtcgggcgagaagacgtatacgtagcgttgtcgttttttcgtgggaaatttgtttatcgatattacggaggaggattttaagaggtttttcgaacgttatggcgagtttagcgaagtttttattaatcgggatcgtggtttcggttttattcgtttggtgagtgttaggcgttcgcgcgagggaataaaaggattgtcggggtggtcgcggggtcgtggggttgaggttagtttcgttttaggacgttgttttaatttgtggtaatcgtggcgtcgttcggttttatcgatttttttgtgcggggttggtcgtttttttagttcggcgtttttggtttcgagtttacggtttcgggattttttgcgtttatagtggtcgtcgttttttgtcgtgcgtcgatcgtgttttgcggtggttgtaggtttgttgttttgcgttggatcgggtatggtgtattttgtttaggtagcgagcgttttcgggtttttcgttgtttcgggtatcgaaagggttcggggataggggcgggtagcgttttggggtgagaattttttaaggtaaaaatcgtgttataaaaaacgaattggatgtatat

SEQ ID NO: 40242 - DNA, 760 bp, Artificial Sequence
  chemically treated genomic DNA (Homo sapiens) CpG-island No: 40242
atatacatccaattcgttttttataacacgatttttaccttaaaaaattctcaccccaaaacgctacccgcccctatccccgaaccctttcgatacccgaaacaacgaaaaacccgaaaacgctcgctacctaaacaaaatacaccatacccgatccaacgcaaaacaacaaacctacaaccaccgcaaaacacgatcgacgcacgacaaaaaacgacgaccactataaacgcaaaaaatcccgaaaccgtaaactcgaaaccaaaaacgccgaactaaaaaaacgaccaaccccgcacaaaaaaatcgataaaaccgaacgacgccacgattaccacaaattaaaacaacgtcctaaaacgaaactaacctcaaccccacgaccccgcgaccaccccgacaatccttttattccctcgcgcgaacgcctaacactcaccaaacgaataaaaccgaaaccacgatcccgattaataaaaacttcgctaaactcgccataacgttcgaaaaacctcttaaaatcctcctccgtaatatcgataaacaaatttcccacgaaaaaacgacaacgctacgtatacgtcttctcgcccgacttaaaaaaactcttaatatcgataataaaccccatctcctcgtccgaataatcctctaaaaacgcgaacgcgaacgataccgactccccgacaaaaacgaacgccataactaccgcgaccgccgactcgctctcgcccaccgcgaactccaaaacgcgaaaacg

SEQ ID NO: 40243 - DNA, 760 bp, Artificial Sequence
  chemically treated genomic DNA (Homo sapiens) CpG-island No: 40243
atgtatatttaattcgttttttatggtacgatttttgttttgaagaatttttattttaaaacgttgttcgtttttgttttcggattttttcggtattcggggtaacggggaattcgggagcgttcgttatttggatagggtgtattatgttcgatttagcgtagggtagtaggtttgtagttatcgtaaagtacgatcggcgtacggtagaaaacggcggttattgtgagcgtaggaaatttcgggatcgtgaattcgaaattaaaggcgtcgagttggggaagcggttaatttcgtatagaggaatcgatgaggtcgagcggcgttacggttgttataggttgagatagcgttttaggacgaggttggttttagttttacgatttcgcggttatttcgatagtttttttgttttttcgcgcgggcgtttgatatttattaagcggatgaagtcgaagttacggtttcggttgatgaagatttcgttgggttcgttatagcgttcgaagagttttttgaagttttttttcgtgatgtcggtgggtagattttttacgaagaggcggtagcgttgcgtgtacgttttttcgttcggtttgaggaaatttttgatgtcgatagtgaattttattttttcgttcgggtggttttttggaggcgcgggcgcgggcggtgtcggtttttcggtaagagcgagcgttatggttgtcgcggtcgtcggttcgttttcgtttatcgcggattttagggcgcgaaggcg

SEQ ID NO: 40244 - DNA, 760 bp, Artificial Sequence
  chemically treated genomic DNA (Homo sapiens) CpG-island No: 40244
cgccttcgcgccctaaaatccgcgataaacgaaaacgaaccgacgaccgcgacaaccataacgctcgctcttaccgaaaaaccgacaccgcccgcgcccgcgcctccaaaaaaccacccgaacgaaaaaataaaattcactatcgacatcaaaaatttcctcaaaccgaacgaaaaaacgtacacgcaacgctaccgcctcttcgtaaaaaatctacccaccgacatcacgaaaaaaaacttcaaaaaactcttcgaacgctataacgaacccaacgaaatcttcatcaaccgaaaccgtaacttcgacttcatccgcttaataaatatcaaacgcccgcgcgaaaaaacaaaaaaactatcgaaataaccgcgaaatcgtaaaactaaaaccaacctcgtcctaaaacgctatctcaacctataacaaccgtaacgccgctcgacctcatcgattcctctatacgaaattaaccgcttccccaactcgacgcctttaatttcgaattcacgatcccgaaatttcctacgctcacaataaccgccgttttctaccgtacgccgatcgtactttacgataactacaaacctactaccctacgctaaatcgaacataatacaccctatccaaataacgaacgctcccgaattccccgttaccccgaataccgaaaaaatccgaaaacaaaaacgaacaacgttttaaaataaaaattcttcaaaacaaaaatcgtaccataaaaaacgaattaaatatacat

SEQ ID NO: 40245 - DNA, 575 bp, Artificial Sequence
  chemically treated genomic DNA (Homo sapiens) CpG-island No: 40245
cgttatgggatttcgcgttttcgtgttgggcggcggatgtttttgcggttttttcggcgggggaaggtgtgcgttttcgtcgttttattgtgtgtatacgcgggagtattttggttttcgtttttcgttgttttcgcgtttttttattttttagttgatggtttaggttcggttggttagggagttcgggttatttcggggcggttgtaaggcgtagacggagagtcgagtcgggcgtttatttcgcgttttggttcgggtaaatttggaagaattgcgatcgtagtttgtttagcgttatagtttgagtggcgttttttttattttcgtttttgcgtcggtaggggcggtggagagacgcggagggtttttttagttttttttttttttattcgtttttcgggcgatagagcgttcggcgttcgggtcgggggcgggtaaggttgggagggattttcgtcggggatttggtttttggacgtcggcgttttaaggttggtttggggattttacgggttgtttgttttagatgtggggcgggttttttcgttagggttttttagtgtttttttagt

SEQ ID NO: 40246 - DNA, 575 bp, Artificial Sequence
  chemically treated genomic DNA (Homo sapiens) CpG-island No: 40246
actaaaaaaacactaaaaaaccctaacgaaaaaacccgccccacatctaaaacaaacaacccgtaaaatccccaaaccaaccttaaaacgccgacgtccaaaaaccaaatccccgacgaaaatccctcccaaccttacccgcccccgacccgaacgccgaacgctctatcgcccgaaaaacgaataaaaaaaaaaaaaactaaaaaaaccctccgcgtctctccaccgcccctaccgacgcaaaaacgaaaataaaaaaaacgccactcaaactataacgctaaacaaactacgatcgcaattcttccaaatttacccgaaccaaaacgcgaaataaacgcccgactcgactctccgtctacgccttacaaccgccccgaaataacccgaactccctaaccaaccgaacctaaaccatcaactaaaaaataaaaaaacgcgaaaacaacgaaaaacgaaaaccaaaatactcccgcgtatacacacaataaaacgacgaaaacgcacaccttcccccgccgaaaaaaccgcaaaaacatccgccgcccaacacgaaaacgcgaaatcccataacg

SEQ ID NO: 40247 - DNA, 575 bp, Artificial Sequence
  chemically treated genomic DNA (Homo sapiens) CpG-island No: 40247
attggggaagtattgaggaattttaacgggaaagttcgttttatatttgaaataggtagttcgtgaagtttttaaattagttttgaaacgtcggcgtttagaggttaggttttcggcgagggttttttttagttttgttcgttttcggttcgagcgtcgggcgttttgtcgttcgaaggacggataggggagagaggggttgggggagtttttcgcgtttttttatcgtttttgtcggcgtaagggcgggagtggagaaggcgttatttagattgtggcgttgggtaaattgcggtcgtagtttttttaagtttgttcgaattagaacgcggagtgagcgttcggttcggtttttcgtttgcgttttgtagtcgtttcggagtgattcgggttttttggttagtcgggtttgagttattaattaaggggtagaagggcgcgagagtagcgggaggcgggagttagggtgttttcgcgtgtgtatataatgaggcggcggagacgtatattttttttcgtcgaagaagtcgtaggagtattcgtcgtttaatacggagacgcggagttttatagcg

SEQ ID NO: 40248 - DNA, 575 bp, Artificial Sequence
  chemically treated genomic DNA (Homo sapiens) CpG-island No: 40248
cgctataaaactccgcgtctccgtattaaacgacgaatactcctacgacttcttcgacgaaaaaaaatatacgtctccgccgcctcattatatacacacgcgaaaacaccctaactcccgcctcccgctactctcgcgcccttctaccccttaattaataactcaaacccgactaaccaaaaaacccgaatcactccgaaacgactacaaaacgcaaacgaaaaaccgaaccgaacgctcactccgcgttctaattcgaacaaacttaaaaaaactacgaccgcaatttacccaacgccacaatctaaataacgccttctccactcccgcccttacgccgacaaaaacgataaaaaaacgcgaaaaactcccccaacccctctctcccctatccgtccttcgaacgacaaaacgcccgacgctcgaaccgaaaacgaacaaaactaaaaaaaaccctcgccgaaaacctaacctctaaacgccgacgtttcaaaactaatttaaaaacttcacgaactacctatttcaaatataaaacgaactttcccgttaaaattcctcaatacttccccaat

SEQ ID NO: 40249 - DNA, 822 bp, Artificial Sequence
  chemically treated genomic DNA (Homo sapiens) CpG-island No: 40249
gggggcggggttttggacgggggcggagttacggcgagagtcgcggtgagggcggggttcgggtgggcggtgttttgagcggggtttttagtgggcggggttttggggtggcggtcgttgtcgggttacgggagagcgcggagttttgcgttgggaggtgtacggtgtgtacgttggattggatttttatgtaatttcgcgttttgcgttttaattaggattgtttcgcgcgtttttgagtttcgggtttcggttcggatttgtagttttttaggtggttgggaaggtaggtgcgtcgttgttttcggcgcgcggcgtttcgcgaggtttttagttttcgttttggtggattttcgttgggtgggagtcgggagtggaggcggtcgttttagggagggaggagcgtaggcgggggttgtttacgggcggagtattgcgcggcgaagggaattttcgaaggggttgatcgggtttcggggtcgtgataggcggcgaggcggtgggaggggagcgtgtgaatttacgtcgggttttcgcgggcgacgcgagcgacgcgatttggatttttattcgggatattgtaaatagatttgtttgtgaggtttacgattgggagtttgttattttgtttaagttcgattcggtttcggcgttcgttcgcgttttgcggaggttttttgagttagcgcgcggttgtaggggtttcggggtcgtatttcggattagcgttagcggcgggagagcgttgtttgtgagcggtttagggtatattttttttgtgggaaagagttttttagagtttagtaggaattattagtatat

SEQ ID NO: 40250 - DNA, 822 bp, Artificial Sequence
  chemically treated genomic DNA (Homo sapiens) CpG-island No: 40250
atatactaataattcctactaaactctaaaaaactctttcccacaaaaaaaatataccctaaaccgctcacaaacaacgctctcccgccgctaacgctaatccgaaatacgaccccgaaacccctacaaccgcgcgctaactcaaaaaacctccgcaaaacgcgaacgaacgccgaaaccgaatcgaacttaaacaaaataacaaactcccaatcgtaaacctcacaaacaaatctatttacaatatcccgaataaaaatccaaatcgcgtcgctcgcgtcgcccgcgaaaacccgacgtaaattcacacgctcccctcccaccgcctcgccgcctatcacgaccccgaaacccgatcaaccccttcgaaaattcccttcgccgcgcaatactccgcccgtaaacaacccccgcctacgctcctccctccctaaaacgaccgcctccactcccgactcccacccaacgaaaatccaccaaaacgaaaactaaaaacctcgcgaaacgccgcgcgccgaaaacaacgacgcacctaccttcccaaccacctaaaaaactacaaatccgaaccgaaacccgaaactcaaaaacgcgcgaaacaatcctaattaaaacgcaaaacgcgaaattacataaaaatccaatccaacgtacacaccgtacacctcccaacgcaaaactccgcgctctcccgtaacccgacaacgaccgccaccccaaaaccccgcccactaaaaaccccgctcaaaacaccgcccacccgaaccccgccctcaccgcgactctcgccgtaactccgcccccgtccaaaaccccgccccc

SEQ ID NO: 40251 - DNA, 822 bp, Artificial Sequence
  chemically treated genomic DNA (Homo sapiens) CpG-island No: 40251
atatattaataatttttgttgaattttaaggaatttttttttatagaaggaatatattttgggtcgtttatagataacgttttttcgtcgttggcgttggttcgggatgcggtttcgagatttttgtagtcgcgcgttggtttaggggattttcgtaggacgcgggcgggcgtcggggtcgggtcgggtttgggtagagtgataggtttttagtcgtgagttttataagtagatttatttataatatttcggataggagtttaggtcgcgtcgttcgcgtcgttcgcggggattcggcgtgaatttatacgttttttttttatcgtttcgtcgtttgttacggtttcgagattcggttagttttttcgggggtttttttcgtcgcgtagtatttcgttcgtgagtagttttcgtttgcgtttttttttttttagggcggtcgtttttattttcggtttttatttagcggggatttattagggcgagggttgaagatttcgcgggacgtcgcgcgtcggggatagcgacgtatttatttttttagttatttgggaggttgtaggttcgggtcggagttcgaggtttaggggcgcgcggagtagttttggttaaggcgtagggcgcggggttgtatgggggtttagtttagcgtgtatatcgtgtattttttagcgtagggtttcgcgttttttcgtagttcggtaacggtcgttattttagagtttcgtttattaggagtttcgtttagggtatcgtttattcgggtttcgtttttatcgcggttttcgtcgtggtttcgttttcgtttagagtttcgttttt

SEQ ID NO: 40252 - DNA, 822 bp, Artificial Sequence
  chemically treated genomic DNA (Homo sapiens) CpG-island No: 40252
aaaaacgaaactctaaacgaaaacgaaaccacgacgaaaaccgcgataaaaacgaaacccgaataaacgataccctaaacgaaactcctaataaacgaaactctaaaataacgaccgttaccgaactacgaaaaaacgcgaaaccctacgctaaaaaatacacgatatacacgctaaactaaacccccatacaaccccgcgccctacgccttaaccaaaactactccgcgcgcccctaaacctcgaactccgacccgaacctacaacctcccaaataactaaaaaaataaatacgtcgctatccccgacgcgcgacgtcccgcgaaatcttcaaccctcgccctaataaatccccgctaaataaaaaccgaaaataaaaacgaccgccctaaaaaaaaaaaaacgcaaacgaaaactactcacgaacgaaatactacgcgacgaaaaaaacccccgaaaaaactaaccgaatctcgaaaccgtaacaaacgacgaaacgataaaaaaaaaacgtataaattcacgccgaatccccgcgaacgacgcgaacgacgcgacctaaactcctatccgaaatattataaataaatctacttataaaactcacgactaaaaacctatcactctacccaaacccgacccgaccccgacgcccgcccgcgtcctacgaaaatcccctaaaccaacgcgcgactacaaaaatctcgaaaccgcatcccgaaccaacgccaacgacgaaaaaacgttatctataaacgacccaaaatatattccttctataaaaaaaaattccttaaaattcaacaaaaattattaatatat

SEQ ID NO: 40253 - DNA, 813 bp, Artificial Sequence
  chemically treated genomic DNA (Homo sapiens) CpG-island No: 40253
gtcgagcgaggtttcgtgcgaggatagttttttaatcgtattttttagagggagcgttgggattcgcggaggagattagttttcggttataaataattttttattttttttttttcgttcgcgttcgttcgcgtcggggcggcgcgtcggggcggtttttcgaggtttaggaatttttttcggcgttcgcgaggtttcgagttttttttcggagggcggttgcgggtttgttttttttttttaattaggtgtttgtttattttatttaattttttttattcgtttacgttacggttattttataggggcggttgacgttagttttttttttttttttttcgatttttattatttttaatagttaaggagaggtcggcggttttgacgcgtaggtttatcgtcgcggtcgtttcgcgcgcgcggacgcggttttcgtttttatttcgcggttttttcgtagttcggtttcgttttttttcgaagttcgttttcgggtcggttcgttcgttcgttcgcgcgtattcgacgtttcgtttttgcgcgtgtttaataattgttttcggagtcggtttataagtttttttcgtttttgagttgtttaaatatgttaatgaaaggatagggtttgattagtagaacggcgaggcggtgtattacgtggttcggggacgtgttaggggcggagttttcgtagtttttgttcgagttaaaatcggagtgtgagagagaaaagcgttttagtagcgagaggggttgagaaagtggtgatatcgtcggggtgcggagggagtttttgaaattttttttaatagt

SEQ ID NO: 40254 - DNA, 813 bp, Artificial Sequence
  chemically treated genomic DNA (Homo sapiens) CpG-island No: 40254
actattaaaaaaaatttcaaaaactccctccgcaccccgacgatatcaccactttctcaacccctctcgctactaaaacgcttttctctctcacactccgattttaactcgaacaaaaactacgaaaactccgcccctaacacgtccccgaaccacgtaatacaccgcctcgccgttctactaatcaaaccctatcctttcattaacatatttaaacaactcaaaaacgaaaaaaacttataaaccgactccgaaaacaattattaaacacgcgcaaaaacgaaacgtcgaatacgcgcgaacgaacgaacgaaccgacccgaaaacgaacttcgaaaaaaaacgaaaccgaactacgaaaaaaccgcgaaataaaaacgaaaaccgcgtccgcgcgcgcgaaacgaccgcgacgataaacctacgcgtcaaaaccgccgacctctccttaactattaaaaataataaaaatcgaaaaaaaaaaaaaaaaaactaacgtcaaccgcccctataaaataaccgtaacgtaaacgaataaaaaaaattaaataaaataaacaaacacctaattaaaaaaaaaaaacaaacccgcaaccgccctccgaaaaaaaactcgaaacctcgcgaacgccgaaaaaaattcctaaacctcgaaaaaccgccccgacgcgccgccccgacgcgaacgaacgcgaacgaaaaaaaaaaaataaaaaattatttataaccgaaaactaatctcctccgcgaatcccaacgctccctctaaaaaatacgattaaaaaactatcctcgcacgaaacctcgctcgac

SEQ ID NO: 40255 - DNA, 813 bp, Artificial Sequence
  chemically treated genomic DNA (Homo sapiens) CpG-island No: 40255
gttgttgggagaagttttagggatttttttcgtatttcggcggtgttattatttttttagtttttttcgttattgaagcgttttttttttttatatttcggttttaattcgggtaggggttgcggaggtttcgtttttgatacgttttcgagttacgtgatatatcgtttcgtcgttttattggttaggttttatttttttattagtatatttaaatagtttaggggcgggggaagtttgtaggtcggtttcggggatagttattgagtacgcgtagaggcggggcgtcgggtgcgcgcgagcgggcgggcgggtcgattcggaggcgggtttcgggaaggggcggggtcggattgcggaaggatcgcgaggtgggggcgggggtcgcgttcgcgcgcgcggggcggtcgcggcggtgagtttgcgcgttagggtcgtcggtttttttttggttgttggaggtgataggggtcgaggggagggaaaaaggggttggcgttagtcgtttttgtgaggtggtcgtagcgtggacgagtaagaagggttgagtaaagtggataaatatttggttaggagaagagggtaggttcgtagtcgtttttcggaggaggattcggggtttcgcgggcgtcggaggaggtttttgggtttcggagggtcgtttcggcgcgtcgtttcggcgcgagcgggcgcgggcgggggaggggaagtgagaggttgtttatgatcggggattaatttttttcgcgagttttagcgttttttttggggagtgcggttgaggggttgttttcgtacggagtttcgttcggt

SEQ ID NO: 40256 - DNA, 813 bp, Artificial Sequence
  chemically treated genomic DNA (Homo sapiens) CpG-island No: 40256
accgaacgaaactccgtacgaaaacaacccctcaaccgcactccccaaaaaaaacgctaaaactcgcgaaaaaaattaatccccgatcataaacaacctctcacttcccctcccccgcccgcgcccgctcgcgccgaaacgacgcgccgaaacgaccctccgaaacccaaaaacctcctccgacgcccgcgaaaccccgaatcctcctccgaaaaacgactacgaacctaccctcttctcctaaccaaatatttatccactttactcaacccttcttactcgtccacgctacgaccacctcacaaaaacgactaacgccaacccctttttccctcccctcgacccctatcacctccaacaaccaaaaaaaaaccgacgaccctaacgcgcaaactcaccgccgcgaccgccccgcgcgcgcgaacgcgacccccgcccccacctcgcgatccttccgcaatccgaccccgccccttcccgaaacccgcctccgaatcgacccgcccgcccgctcgcgcgcacccgacgccccgcctctacgcgtactcaataactatccccgaaaccgacctacaaacttcccccgcccctaaactatttaaatatactaataaaaaaataaaacctaaccaataaaacgacgaaacgatatatcacgtaactcgaaaacgtatcaaaaacgaaacctccgcaacccctacccgaattaaaaccgaaatataaaaaaaaaaaacgcttcaataacgaaaaaaactaaaaaaataataacaccgccgaaatacgaaaaaaatccctaaaacttctcccaacaac

SEQ ID NO: 40257 - DNA, 629 bp, Artificial Sequence
  chemically treated genomic DNA (Homo sapiens) CpG-island No: 40257
gcggcgcgcggggagggggtcgggggcggtggcggcggcgttggggggcggggaggaggtaggaggaggagtagtagcgttcgtcgggggatgtagtagcggtagcggcggcggcggcggcggtagcggtagcggcggcgcggagttttttgcgtttagcggttcggtcgggttgcggtagaggcggcggcggcgtttcgtttcgggtgaggttgtcggggtcgtgcgcgttggtgagtggggcgtggggggtaggtgggtggttgggggacgcggggttcgggcgggggttcgcggcggtcggagtttttttcggcgtgagttcggtcgcgagcgtcgtttaggtgagtcggggttggttcggatcgttcggttttagttttagcgttgtttgcggaggtgggttcgggcgggcgggagggaggtttcggcgtcggtcgttcgtagagggatgatttgtttgatttcgttggttggcgggcgggcgaggatttttcgtcgcgtttttgattcgcggatacggtatatcgagtataggcggtttcgggtaggggagcgcgtttgggtcggttattcgtaggggtatggttttgttgatttttagggtttagatttaagggatcggtaga

SEQ ID NO: 40258 - DNA, 629 bp, Artificial Sequence
  chemically treated genomic DNA (Homo sapiens) CpG-island No: 40258
tctaccgatcccttaaatctaaaccctaaaaatcaacaaaaccatacccctacgaataaccgacccaaacgcgctcccctacccgaaaccgcctatactcgatataccgtatccgcgaatcaaaaacgcgacgaaaaatcctcgcccgcccgccaaccaacgaaatcaaacaaatcatccctctacgaacgaccgacgccgaaacctccctcccgcccgcccgaacccacctccgcaaacaacgctaaaactaaaaccgaacgatccgaaccaaccccgactcacctaaacgacgctcgcgaccgaactcacgccgaaaaaaactccgaccgccgcgaacccccgcccgaaccccgcgtcccccaaccacccacctaccccccacgccccactcaccaacgcgcacgaccccgacaacctcacccgaaacgaaacgccgccgccgcctctaccgcaacccgaccgaaccgctaaacgcaaaaaactccgcgccgccgctaccgctaccgccgccgccgccgccgctaccgctactacatcccccgacgaacgctactactcctcctcctacctcctccccgccccccaacgccgccgccaccgcccccgaccccctccccgcgcgccgc

SEQ ID NO: 40259 - DNA, 629 bp, Artificial Sequence
  chemically treated genomic DNA (Homo sapiens) CpG-island No: 40259
tttatcggttttttgggtttaaattttaagggttaataaggttatgtttttgcggatggtcggtttaggcgcgtttttttattcggggtcgtttgtgttcggtgtgtcgtgttcgcgggttaggggcgcggcgggaagttttcgttcgttcgttagttagcggggttaaataggttatttttttgcggacggtcggcgtcggagtttttttttcgttcgttcggatttattttcgtaagtagcgttggggttggagtcgggcggttcggattagtttcggtttatttgggcggcgttcgcggtcgggtttacgtcggggaaggtttcggtcgtcgcgagttttcgttcgagtttcgcgttttttagttatttatttgttttttacgttttatttattagcgcgtacggtttcggtaattttattcggagcggggcgtcgtcgtcgtttttgtcgtagttcggtcgggtcgttgggcgtaggggatttcgcgtcgtcgttgtcgttgtcgtcgtcgtcgtcgtcgttgtcgttgttgtatttttcggcgagcgttgttgtttttttttttgtttttttttcgttttttagcgtcgtcgttatcgttttcggtttttttttcgcgcgtcgt

SEQ ID NO: 40260 - DNA, 629 bp, Artificial Sequence
  chemically treated genomic DNA (Homo sapiens) CpG-island No: 40260
acgacgcgcgaaaaaaaaaccgaaaacgataacgacgacgctaaaaaacgaaaaaaaaacaaaaaaaaaaacaacaacgctcgccgaaaaatacaacaacgacaacgacgacgacgacgacgacaacgacaacgacgacgcgaaatcccctacgcccaacgacccgaccgaactacgacaaaaacgacgacgacgccccgctccgaataaaattaccgaaaccgtacgcgctaataaataaaacgtaaaaaacaaataaataactaaaaaacgcgaaactcgaacgaaaactcgcgacgaccgaaaccttccccgacgtaaacccgaccgcgaacgccgcccaaataaaccgaaactaatccgaaccgcccgactccaaccccaacgctacttacgaaaataaatccgaacgaacgaaaaaaaaactccgacgccgaccgtccgcaaaaaaataacctatttaaccccgctaactaacgaacgaacgaaaacttcccgccgcgcccctaacccgcgaacacgacacaccgaacacaaacgaccccgaataaaaaaacgcgcctaaaccgaccatccgcaaaaacataaccttattaacccttaaaatttaaacccaaaaaaccgataaa

SEQ ID NO: 40261 - DNA, 1020 bp, Artificial Sequence
  chemically treated genomic DNA (Homo sapiens) CpG-island No: 40261
tgcggtcgcggcggtcgcggggttgttttgcgtcgcgggcggttttatgaggcggtttagttgggttcggcgcgcgtggttttgggttttgcgaggtggtagtcggggttattcgggggtttgttgtttcgtatattttagttttgttagttttttcggcgttgcgttttagtcgcgtcgtttttagtacggttcgcgttcgttttattatcggttcgggtttttagattttatagttttcggcggtcggagcggaggcggggtcggggcggggttgcggagtcggggcgacgggtttgttttcgtcgtttttcgaggaggtttttgtttttaggtatcgttttcgttacgcgttcgttttggaatcgcggtgacgaggagtcgtcgaagtttcggttatagttttaaatatttattcgtttttcgttttcgcgttttgataattcggtttacgcggtgttttcggcgttattagagttgattgttgggcgcgagttttgttgtttttcgtcgcgtgttaggtattttcgcgagtcgtagttttttcggttgtgaagtggacgtgggtatgtagagtttttttggttggcggtgagggacgaaggagttcgcggtcgtgttttagtcgggtgtcggggacgcggaggttttttacgtattgttttaaggggattttcgagatggtgggcgggcggagtggagagggtcggggcgagaggggtaggagttgggggagttttgaattgtttttatcgcggagcgcgggggtttgaattacggtttagggcgttttcgttagtttgattttatttagaaggggtttattatgggaagaaattattgcgtcgacgtagcgcgaatagggcgttttgtagtgtttacggagtaacgagttattttgtttcgcggtttgcgggggcgaacgttttggattgtgcgttgagttaggcgttagtttttcgttttttattatagacggttaattaaatgtagagtaattaatatgtaacggagtgaaat

SEQ ID NO: 40262 - DNA, 1020 bp, Artificial Sequence
  chemically treated genomic DNA (Homo sapiens) CpG-island No: 40262
atttcactccgttacatattaattactctacatttaattaaccgtctataataaaaaacgaaaaactaacgcctaactcaacgcacaatccaaaacgttcgcccccgcaaaccgcgaaacaaaataactcgttactccgtaaacactacaaaacgccctattcgcgctacgtcgacgcaataatttcttcccataataaaccccttctaaataaaatcaaactaacgaaaacgccctaaaccgtaattcaaacccccgcgctccgcgataaaaacaattcaaaactcccccaactcctacccctctcgccccgaccctctccactccgcccgcccaccatctcgaaaatccccttaaaacaatacgtaaaaaacctccgcgtccccgacacccgactaaaacacgaccgcgaactccttcgtccctcaccgccaaccaaaaaaactctacatacccacgtccacttcacaaccgaaaaaactacgactcgcgaaaatacctaacacgcgacgaaaaacaacaaaactcgcgcccaacaatcaactctaataacgccgaaaacaccgcgtaaaccgaattatcaaaacgcgaaaacgaaaaacgaataaatatttaaaactataaccgaaacttcgacgactcctcgtcaccgcgattccaaaacgaacgcgtaacgaaaacgatacctaaaaacaaaaacctcctcgaaaaacgacgaaaacaaacccgtcgccccgactccgcaaccccgccccgaccccgcctccgctccgaccgccgaaaactataaaatctaaaaacccgaaccgataataaaacgaacgcgaaccgtactaaaaacgacgcgactaaaacgcaacgccgaaaaaactaacaaaactaaaatatacgaaacaacaaacccccgaataaccccgactaccacctcgcaaaacccaaaaccacgcgcgccgaacccaactaaaccgcctcataaaaccgcccgcgacgcaaaacaaccccgcgaccgccgcgaccgca

SEQ ID NO: 40263 - DNA, 1020 bp, Artificial Sequence
  chemically treated genomic DNA (Homo sapiens) CpG-island No: 40263
gttttatttcgttatatgttaattgttttatatttaattagtcgtttgtggtgagaggcgagaggttagcgtttagtttagcgtatagtttagggcgttcgttttcgtaggtcgcggggtagggtggttcgttatttcgtggatattgtaaggcgttttgttcgcgttgcgtcgacgtagtagtttttttttataataaattttttttagataaagttaggttggcgggagcgttttggatcgtagtttaggttttcgcgtttcgcggtggaaatagtttaggatttttttaatttttgtttttttcgtttcgattttttttatttcgttcgtttattatttcggaagtttttttgggataatgcgtaggggattttcgcgttttcgatattcgattgggatacggtcgcgggttttttcgttttttatcgttagttagggaggttttgtatgtttacgtttattttatagtcgaggaagttgcggttcgcggaggtgtttggtacgcggcgggaagtagtagagttcgcgtttagtagttagttttggtgacgtcgaggatatcgcgtgggtcgggttgttagggcgcgggggcgagaggcgggtaaatatttggggttgtaatcggggtttcggcgatttttcgttatcgcggttttagggcgggcgcgtggcgagggcggtgtttgggggtaggggttttttcggagggcggcggggatagattcgtcgtttcggtttcgtagtttcgtttcggtttcgttttcgtttcggtcgtcgaaggttataagatttaggaattcgagtcggtggtagggcgggcgcggatcgtgttgggagcggcgcggttggagcgtagcgtcgaagggattggtagggttgaagtgtgcgggatagtaagttttcgaatagtttcggttgttatttcgtaggatttaaggttacgcgcgtcgggtttagttgagtcgttttatgaagtcgttcgcggcgtagggtagtttcgcggtcgtcgcggtcgta

SEQ ID NO: 40264 - DNA, 1020 bp, Artificial Sequence
  chemically treated genomic DNA (Homo sapiens) CpG-island No: 40264
tacgaccgcgacgaccgcgaaactaccctacgccgcgaacgacttcataaaacgactcaactaaacccgacgcgcgtaaccttaaatcctacgaaataacaaccgaaactattcgaaaacttactatcccgcacacttcaaccctaccaatcccttcgacgctacgctccaaccgcgccgctcccaacacgatccgcgcccgccctaccaccgactcgaattcctaaatcttataaccttcgacgaccgaaacgaaaacgaaaccgaaacgaaactacgaaaccgaaacgacgaatctatccccgccgccctccgaaaaaacccctacccccaaacaccgccctcgccacgcgcccgccctaaaaccgcgataacgaaaaatcgccgaaaccccgattacaaccccaaatatttacccgcctctcgcccccgcgccctaacaacccgacccacgcgatatcctcgacgtcaccaaaactaactactaaacgcgaactctactacttcccgccgcgtaccaaacacctccgcgaaccgcaacttcctcgactataaaataaacgtaaacatacaaaacctccctaactaacgataaaaaacgaaaaaacccgcgaccgtatcccaatcgaatatcgaaaacgcgaaaatcccctacgcattatcccaaaaaaacttccgaaataataaacgaacgaaataaaaaaaatcgaaacgaaaaaaacaaaaattaaaaaaatcctaaactatttccaccgcgaaacgcgaaaacctaaactacgatccaaaacgctcccgccaacctaactttatctaaaaaaaatttattataaaaaaaaactactacgtcgacgcaacgcgaacaaaacgccttacaatatccacgaaataacgaaccaccctaccccgcgacctacgaaaacgaacgccctaaactatacgctaaactaaacgctaacctctcgcctctcaccacaaacgactaattaaatataaaacaattaacatataacgaaataaaac

SEQ ID NO: 40265 - DNA, 664 bp, Artificial Sequence
  chemically treated genomic DNA (Homo sapiens) CpG-island No: 40265
atcgcggagcgggaaaggattgcgggattttggggggtcgttcgtttatcggtttttttggaggttcgggcggtaggtagggaggggtttcgttttgcgtttggagggggcggttttggcggggtttgggcgttatagtggggcggggggcgtatgggttcgttttggggcgttagggcgggggcggcgatgacgcgtggttatcgtattcgagtcgcggatgacgcgcggtcgcgtttgggggatgcggcgggcggcggcgggggcgggcggagcgcgggcggcggggttaattgggggcgtttttcgtttgtattttaatgcgggacgtaggagcggtgcgcgggtcggggtttaggggtgcggcgggtttagggtgggttcggcggattcgcgggtttttttcgcgtagtttttggtttgtgttcgcggtcggagttagcggttcgtttgtgattcgaaggtcgcgagtgttttgttcgatttggtttttgacgttttcgttttgcgggtgcggttggaggagacgggggagatgtttcgagtggtaaattgtcgcggcgatatgatcgtgcgagagtttaaagaggagttggatttgatggtcggtattttttttaatttttagcggttttagtatttcgacgaaggtggtttttgtttt

SEQ ID NO: 40266 - DNA, 664 bp, Artificial Sequence
  chemically treated genomic DNA (Homo sapiens) CpG-island No: 40266
aaaacaaaaaccaccttcgtcgaaatactaaaaccgctaaaaattaaaaaaaataccgaccatcaaatccaactcctctttaaactctcgcacgatcatatcgccgcgacaatttaccactcgaaacatctcccccgtctcctccaaccgcacccgcaaaacgaaaacgtcaaaaaccaaatcgaacaaaacactcgcgaccttcgaatcacaaacgaaccgctaactccgaccgcgaacacaaaccaaaaactacgcgaaaaaaacccgcgaatccgccgaacccaccctaaacccgccgcacccctaaaccccgacccgcgcaccgctcctacgtcccgcattaaaatacaaacgaaaaacgcccccaattaaccccgccgcccgcgctccgcccgcccccgccgccgcccgccgcatcccccaaacgcgaccgcgcgtcatccgcgactcgaatacgataaccacgcgtcatcgccgcccccgccctaacgccccaaaacgaacccatacgccccccgccccactataacgcccaaaccccgccaaaaccgccccctccaaacgcaaaacgaaacccctccctacctaccgcccgaacctccaaaaaaaccgataaacgaacgaccccccaaaatcccgcaatcctttcccgctccgcgat

SEQ ID NO: 40267 - DNA, 664 bp, Artificial Sequence
  chemically treated genomic DNA (Homo sapiens) CpG-island No: 40267
agggtaggagttattttcgtcgaggtattggagtcgttggaggttgaaggggatgtcgattattaggtttagtttttttttgagttttcgtacggttatgtcgtcgcggtagtttgttattcggaatatttttttcgttttttttagtcgtattcgtaggacgaagacgttaggggttaagtcgggtaaggtattcgcggttttcgggttatagacgagtcgttggtttcggtcgcgggtataggttaggggttgcgcggggagggttcgcgagttcgtcgagtttattttgggttcgtcgtatttttgagtttcggttcgcgtatcgtttttgcgtttcgtattggggtgtaggcgagaggcgtttttagttggtttcgtcgttcgcgtttcgttcgttttcgtcgtcgttcgtcgtattttttaggcgcggtcgcgcgttattcgcggttcgagtgcggtggttacgcgttatcgtcgttttcgttttgacgttttaaggcgggtttatgcgtttttcgttttattgtgacgtttaggtttcgttaggatcgttttttttagacgtaaggcgaggtttttttttgtttgtcgttcgagtttttagggagatcgatgggcgggcggttttttaaggtttcgtagttttttttcgtttcgcgat

SEQ ID NO: 40268 - DNA, 664 bp, Artificial Sequence
  chemically treated genomic DNA (Homo sapiens) CpG-island No: 40268
atcgcgaaacgaaaaaaaactacgaaaccttaaaaaaccgcccgcccatcgatctccctaaaaactcgaacgacaaacaaaaaaaaacctcgccttacgtctaaaaaaaacgatcctaacgaaacctaaacgtcacaataaaacgaaaaacgcataaacccgccttaaaacgtcaaaacgaaaacgacgataacgcgtaaccaccgcactcgaaccgcgaataacgcgcgaccgcgcctaaaaaatacgacgaacgacgacgaaaacgaacgaaacgcgaacgacgaaaccaactaaaaacgcctctcgcctacaccccaatacgaaacgcaaaaacgatacgcgaaccgaaactcaaaaatacgacgaacccaaaataaactcgacgaactcgcgaaccctccccgcgcaacccctaacctatacccgcgaccgaaaccaacgactcgtctataacccgaaaaccgcgaataccttacccgacttaacccctaacgtcttcgtcctacgaatacgactaaaaaaaacgaaaaaaatattccgaataacaaactaccgcgacgacataaccgtacgaaaactcaaaaaaaaactaaacctaataatcgacatccccttcaacctccaacgactccaatacctcgacgaaaataactcctaccct

SEQ ID NO: 40269 - DNA, 859 bp, Artificial Sequence
  chemically treated genomic DNA (Homo sapiens) CpG-island No: 40269
gacgtgggaggcgtttttaggtgcgggtatagacgcggggatgtggggtgcggggatgtgggaggcgtttttaggtgtgggtgtagacgtggggagcggggacgtgggaggcgtttttaggtgcgggcgtagacgtggggacgtgggaggcgtttttaggtgcgggcgtagacgtggggacgtggggtgcggggacgtgggaggtgtttttaggtgtgggtgtagacgtgggaggcgtttttaggtgtgggcgtagatgtggggagtggggacgtgggaggcgtttttaggtgcggcgtagacgggacgtgggaggcgtttttaggtgtgggcgtagacgtggggtgcggggacgtgggaggtgtttttaggtgtgggtgtagacgtgggaggcgtttttaggtgtgggcgtagatgtggggagtggggacgtgggaggcgtttttaggtgtggacgtagacgggacgtgggaggcgtttttaggtgtgggcgtagacgtggggatttggggtgcggggacgtgggaggcgtttttaggtgcgggcgtagacgtggggacgtggggtgcggggacgtgggaggtgtttttaggtgtgggtgtagacgtggggtgcggggacgtgggaggcgtttttaggtgcggacgtagacgtggggacgtgggaggcgtttttaggtgtgggcgcggacgtggggagcggggacgtgggaggcgtttttaggggcgggcgtagatttgttatgtcgttatttttggttgtaggtgggaagttaagcgagtcgagtggttaagttgaaagtcgagggttagggagcgatgttttttttcgatgaggttacggcgaggggtagaggtag

SEQ ID NO: 40270 - DNA, 859 bp, Artificial Sequence
  chemically treated genomic DNA (Homo sapiens) CpG-island No: 40270
ctacctctacccctcgccgtaacctcatcgaaaaaaaacatcgctccctaaccctcgactttcaacttaaccactcgactcgcttaacttcccacctacaaccaaaaataacgacataacaaatctacgcccgcccctaaaaacgcctcccacgtccccgctccccacgtccgcgcccacacctaaaaacgcctcccacgtccccacgtctacgtccgcacctaaaaacgcctcccacgtccccgcaccccacgtctacacccacacctaaaaacacctcccacgtccccgcaccccacgtccccacgtctacgcccgcacctaaaaacgcctcccacgtccccgcaccccaaatccccacgtctacgcccacacctaaaaacgcctcccacgtcccgtctacgtccacacctaaaaacgcctcccacgtccccactccccacatctacgcccacacctaaaaacgcctcccacgtctacacccacacctaaaaacacctcccacgtccccgcaccccacgtctacgcccacacctaaaaacgcctcccacgtcccgtctacgccgcacctaaaaacgcctcccacgtccccactccccacatctacgcccacacctaaaaacgcctcccacgtctacacccacacctaaaaacacctcccacgtccccgcaccccacgtccccacgtctacgcccgcacctaaaaacgcctcccacgtccccacgtctacgcccgcacctaaaaacgcctcccacgtccccgctccccacgtctacacccacacctaaaaacgcctcccacatccccgcaccccacatccccgcgtctatacccgcacctaaaaacgcctcccacgtc

SEQ ID NO: 40271 - DNA, 859 bp, Artificial Sequence
  chemically treated genomic DNA (Homo sapiens) CpG-island No: 40271
ttgtttttgtttttcgtcgtggttttatcggagggaggtatcgttttttgattttcgatttttagtttggttattcgattcgtttggttttttatttatagttaggagtgacggtataataggtttgcgttcgtttttgaagacgttttttacgttttcgttttttacgttcgcgtttatatttgaagacgttttttacgtttttacgtttgcgttcgtatttgaagacgttttttacgttttcgtattttacgtttgtatttatatttgaagatattttttacgttttcgtattttacgtttttacgtttgcgttcgtatttgaagacgttttttacgttttcgtattttaagtttttacgtttgcgtttatatttgaagacgttttttacgtttcgtttgcgtttatatttgaagacgttttttacgtttttattttttatatttgcgtttatatttgaagacgttttttacgtttgtatttatatttgaagatattttttacgttttcgtattttacgtttgcgtttatatttgaagacgttttttacgtttcgtttgcgtcgtatttgaagacgttttttacgtttttattttttatatttgcgtttatatttgaagacgttttttacgtttgtatttatatttgaagatattttttacgttttcgtattttacgtttttacgtttgcgttcgtatttgaagacgttttttacgtttttacgtttgcgttcgtatttgaagacgttttttacgttttcgttttttacgtttgtatttatatttgaagacgttttttatattttcgtattttatattttcgcgtttgtgttcgtatttgaagacgttttttacgtt

SEQ ID NO: 40272 - DNA, 859 bp, Artificial Sequence
  chemically treated genomic DNA (Homo sapiens) CpG-island No: 40272
aacgtaaaaaacgtcttcaaatacgaacacaaacgcgaaaatataaaatacgaaaatataaaaaacgtcttcaaatataaatacaaacgtaaaaaacgaaaacgtaaaaaacgtcttcaaatacgaacgcaaacgtaaaaacgtaaaaaacgtcttcaaatacgaacgcaaacgtaaaaacgtaaaatacgaaaacgtaaaaaatatcttcaaatataaatacaaacgtaaaaaacgtcttcaaatataaacgcaaatataaaaaataaaaacgtaaaaaacgtcttcaaatacgacgcaaacgaaacgtaaaaaacgtcttcaaatataaacgcaaacgtaaaatacgaaaacgtaaaaaatatcttcaaatataaatacaaacgtaaaaaacgtcttcaaatataaacgcaaatataaaaaataaaaacgtaaaaaacgtcttcaaatataaacgcaaacgaaacgtaaaaaacgtcttcaaatataaacgcaaacgtaaaaacttaaaatacgaaaacgtaaaaaacgtcttcaaatacgaacgcaaacgtaaaaacgtaaaatacgaaaacgtaaaaaatatcttcaaatataaatacaaacgtaaaatacgaaaacgtaaaaaacgtcttcaaatacgaacgcaaacgtaaaaacgtaaaaaacgtcttcaaatataaacgcgaacgtaaaaaacgaaaacgtaaaaaacgtcttcaaaaacgaacgcaaacctattataccgtcactcctaactataaataaaaaaccaaacgaatcgaataaccaaactaaaaatcgaaaatcaaaaaacgatacctccctccgataaaaccacgacgaaaaacaaaaacaa

SEQ ID NO: 40273 - DNA, 1541 bp, Artificial Sequence
  chemically treated genomic DNA (Homo sapiens) CpG-island No: 40273
cgttttattttttcggatttttgttttttcggacgcgtggattttagttttcgtttgggtttttaaagcgttgaatttatggttatttttatgcgtagttttggtgttcgtcgtttatagtcggatcgtatttttcggttttcgtttaatttttggtttagttatacgagtgatagttttgttcgttcgggcgggcgacgtcgaggggtgggttcggttttatttgagtagttttttagcgtttttttgaaattcgtttgtggtttttggcgtcgtttttaggggtcgtcgtcgtttttttatgatatagtaataataggggtcgttttggtttaagcgttttgcggttcgcgttttcgtcggaaaagagtcgtcggcgcgggggcggatcggggaggagcgagtgcgatggacggtcgttttcgttaatcgttggtaggttagagtcggttgcgcggtttacggggtttaatcggcggcgagagcggtaggcggggcgggtcgaacgcgggttttcggcggggttcggtaggcgtcgaggaggaagagcgagttcggacggcgtttttcgaacgagtgtgggcgcgaggtaggtgcgggagtcgtcgggtttggggcggtcgggggcgatcggaggcgggggtaggggttgttggattaaggatggggcgggggtagttaagacgagaaggtggtcggcgcggcgggtggggtttgcgggggtcgggtcgggcgggggttttggggtttcgggcgtcgtttcggtttcgtttgcggttttgaacgtggggttcggcgggagttcgggcgggtttgtttcgcggagcgggtcgtcggggtggcgcgtcgaggttggtgtttcgcggagacggcgttaagtttagggtcggttttattaggtttggcggggttgtttcggtttagcgtcgagtgcgggcggtgcgatcgtcgtgagcggggtaaacgcggaaaggtagttcggcgtgtttgagtttgttttaggtagttttgggcgtaggttttttgttcgtaaatattttagggggcgggagtttgtcggatcgtaggcgatagtgatcgtcgcgttttagcgtttttttcgcgtttttaggatgacgattttaggcgcgttttttttaagtttggtgttaggttttcggggcgtttttaataagtatttggtggagtttcgggcgggaaagatgtttttgaaggggattatcgtgatttcggataagcggaaagggttggtgtatatttagtagacggacgattcgtttatttatttttgttggaaggataggacgttcgggaacgtggaagacgtgagtgtttttgagtcgtagtagtaggataggcgatttttcgggttttcggagttttcgttttggagttcgcggtgggggtttggtcgtatttggggatcgttcgtggggtcgttatcgattgttttgttgatgggtcgttttggttttcgcggtgataggggtatttcggttattgtgtattttgaattgttcgtgtgaggtgtttgggttgga

SEQ ID NO: 40274 - DNA, 1541 bp, Artificial Sequence
  chemically treated genomic DNA (Homo sapiens) CpG-island No: 40274
tccaacccaaacacctcacacgaacaattcaaaatacacaataaccgaaatacccctatcaccgcgaaaaccaaaacgacccatcaacaaaacaatcgataacgaccccacgaacgatccccaaatacgaccaaacccccaccgcgaactccaaaacgaaaactccgaaaacccgaaaaatcgcctatcctactactacgactcaaaaacactcacgtcttccacgttcccgaacgtcctatccttccaacaaaaataaataaacgaatcgtccgtctactaaatatacaccaaccctttccgcttatccgaaatcacgataatccccttcaaaaacatctttcccgcccgaaactccaccaaatacttattaaaaacgccccgaaaacctaacaccaaacttaaaaaaaacgcgcctaaaatcgtcatcctaaaaacgcgaaaaaaacgctaaaacgcgacgatcactatcgcctacgatccgacaaactcccgccccctaaaatatttacgaacaaaaaacctacgcccaaaactacctaaaacaaactcaaacacgccgaactacctttccgcgtttaccccgctcacgacgatcgcaccgcccgcactcgacgctaaaccgaaacaaccccgccaaacctaataaaaccgaccctaaacttaacgccgtctccgcgaaacaccaacctcgacgcgccaccccgacgacccgctccgcgaaacaaacccgcccgaactcccgccgaaccccacgttcaaaaccgcaaacgaaaccgaaacgacgcccgaaaccccaaaacccccgcccgacccgacccccgcaaaccccacccgccgcgccgaccaccttctcgtcttaactacccccgccccatccttaatccaacaacccctacccccgcctccgatcgcccccgaccgccccaaacccgacgactcccgcacctacctcgcgcccacactcgttcgaaaaacgccgtccgaactcgctcttcctcctcgacgcctaccgaaccccgccgaaaacccgcgttcgacccgccccgcctaccgctctcgccgccgattaaaccccgtaaaccgcgcaaccgactctaacctaccaacgattaacgaaaacgaccgtccatcgcactcgctcctccccgatccgcccccgcgccgacgactcttttccgacgaaaacgcgaaccgcaaaacgcttaaaccaaaacgacccctattattactatatcataaaaaaacgacgacgacccctaaaaacgacgccaaaaaccacaaacgaatttcaaaaaaacgctaaaaaactactcaaataaaaccgaacccacccctcgacgtcgcccgcccgaacgaacaaaactatcactcgtataactaaaccaaaaattaaacgaaaaccgaaaaatacgatccgactataaacgacgaacaccaaaactacgcataaaaataaccataaattcaacgctttaaaaacccaaacgaaaactaaaatccacgcgtccgaaaaaacaaaaatccgaaaaaataaaacg

SEQ ID NO: 40275 - DNA, 1541 bp, Artificial Sequence
  chemically treated genomic DNA (Homo sapiens) CpG-island No: 40275
tttaatttaggtattttatacggatagtttaagatatatagtggtcgagatgtttttgttatcgcggaaattaggacgatttattagtagggtagtcgatgacggttttacgagcggtttttagatgcggttaagtttttatcgcgaattttaaagcgaggatttcgagggttcgagaagtcgtttgttttgttgttgcggtttagggatatttacgttttttacgttttcggacgttttgtttttttagtagaagtgaataagcgagtcgttcgtttgttgaatgtatattagtttttttcgtttattcggagttacggtggttttttttagggatatttttttcgttcgaaattttattaagtatttgttggaggcgtttcgagagtttggtattaggtttggaaagagcgcgtttgaggtcgttattttgaaagcgcggagaggacgttgagacgcggcggttattgtcgtttgcggttcggtaagttttcgttttttggggtgtttgcgagtagggggtttgcgtttagagttgtttaaggtagatttagatacgtcgggttgttttttcgcgtttgtttcgtttacgacgatcgtatcgttcgtattcggcgttgggtcggggtagtttcgttaagtttagtggggtcggttttaggtttgacgtcgttttcgcggggtattagtttcgacgcgttatttcggcgattcgtttcgcggggtagattcgttcgagttttcgtcgagttttacgtttagagtcgtaggcggaatcggggcggcgttcgagattttagaattttcgttcggttcggttttcgtaggttttattcgtcgcgtcggttattttttcgttttggttgttttcgttttatttttggtttagtagtttttgttttcgttttcggtcgttttcggtcgttttaggttcggcgattttcgtatttgtttcgcgtttatattcgttcgagaggcgtcgttcgggttcgtttttttttttcggcgtttgtcgggtttcgtcggaaattcgcgttcggttcgtttcgtttgtcgttttcgtcgtcgattgagtttcgtaagtcgcgtagtcggttttaatttgttaacgattggcgagggcgatcgtttatcgtattcgttttttttcggttcgttttcgcgtcggcggttttttttcggcggaagcgcgggtcgtagggcgtttggattagagcggtttttattgttgttgtgttataggggagcggcggcggtttttagaggcggcgttagggattataggcgggttttagaggggcgttggggaattgtttaggtggggtcgagtttatttttcggcgtcgttcgttcgggcgggtagagttgttattcgtgtggttgagttaggggttaggcggaggtcgaggagtgcggttcggttgtgggcggcgggtattagggttacgtatagaagtgattatgggtttagcgttttggggatttaggcgggagttggagtttacgcgttcgggagagtaggggttcgggagggtagagcg

SEQ ID NO: 40276 - DNA, 1541 bp, Artificial Sequence
  chemically treated genomic DNA (Homo sapiens) CpG-island No: 40276
cgctctaccctcccgaacccctactctcccgaacgcgtaaactccaactcccgcctaaatccccaaaacgctaaacccataatcacttctatacgtaaccctaatacccgccgcccacaaccgaaccgcactcctcgacctccgcctaacccctaactcaaccacacgaataacaactctacccgcccgaacgaacgacgccgaaaaataaactcgaccccacctaaacaattccccaacgcccctctaaaacccgcctataatccctaacgccgcctctaaaaaccgccgccgctcccctataacacaacaacaataaaaaccgctctaatccaaacgccctacgacccgcgcttccgccgaaaaaaaaccgccgacgcgaaaacgaaccgaaaaaaaacgaatacgataaacgatcgccctcgccaatcgttaacaaattaaaaccgactacgcgacttacgaaactcaatcgacgacgaaaacgacaaacgaaacgaaccgaacgcgaatttccgacgaaacccgacaaacgccgaaaaaaaaaaacgaacccgaacgacgcctctcgaacgaatataaacgcgaaacaaatacgaaaatcgccgaacctaaaacgaccgaaaacgaccgaaaacgaaaacaaaaactactaaaccaaaaataaaacgaaaacaaccaaaacgaaaaaataaccgacgcgacgaataaaacctacgaaaaccgaaccgaacgaaaattctaaaatctcgaacgccgccccgattccgcctacgactctaaacgtaaaactcgacgaaaactcgaacgaatctaccccgcgaaacgaatcgccgaaataacgcgtcgaaactaataccccgcgaaaacgacgtcaaacctaaaaccgaccccactaaacttaacgaaactaccccgacccaacgccgaatacgaacgatacgatcgtcgtaaacgaaacaaacgcgaaaaaacaacccgacgtatctaaatctaccttaaacaactctaaacgcaaaccccctactcgcaaacaccccaaaaaacgaaaacttaccgaaccgcaaacgacaataaccgccgcgtctcaacgtcctctccgcgctttcaaaataacgacctcaaacgcgctctttccaaacctaataccaaactctcgaaacgcctccaacaaatacttaataaaatttcgaacgaaaaaaatatccctaaaaaaaaccaccgtaactccgaataaacgaaaaaaactaatatacattcaacaaacgaacgactcgcttattcacttctactaaaaaaacaaaacgtccgaaaacgtaaaaaacgtaaatatccctaaaccgcaacaacaaaacaaacgacttctcgaaccctcgaaatcctcgctttaaaattcgcgataaaaacttaaccgcatctaaaaaccgctcgtaaaaccgtcatcgactaccctactaataaatcgtcctaatttccgcgataacaaaaacatctcgaccactatatatcttaaactatccgtataaaatacctaaattaaa

SEQ ID NO: 40277 - DNA, 747 bp, Artificial Sequence
  chemically treated genomic DNA (Homo sapiens) CpG-island No: 40277
agttttgtcggtcgtttggttttagattcgtcgggttttcgtcgcgcgcgttgtttttggagttcggggacgcggttcggagtcgggaagatggcgaagcggttttgcgcggggagcgtattgtgtgttcgcggttttcggggtttcgcgtcgttgttgttggtcgggttggcgttgttgggcgcggcgcgggcgcgggaggaggcgggcggcggttttagtttgtattcgttttattttaatttggtcgagggcgttcgtatcgtcgttttcgcgatttgcggagaggaggtttcggcgcgcggtttttcgcgttttatcgaggatttttattgtaagttggtagggggtttcgtggtcggcggcgattttaattagattattcgggtgagcgtaggggcgggtcgtggggttttttttcggggtattcggattcggaatatcggttcgattttagggggagcgtcgtggttcggggcgagtttaggtgcggattttttggtttcgtattttgggggtttaagaaggtatttcgattcggtcgtttcgtttcggtcgggaaatttcgcgttttttcgggaaggcggaattaaagttttcggtatggattcgggggcggttgggcgtcggtttagttcgattgcggtgatcggggcgggaggggggtcgggtttagtttttggcggttttaagttcgggatttcggggagggcgggatttggttttcgtcgtttgttgtcggtgggg

SEQ ID NO: 40278 - DNA, 747 bp, Artificial Sequence
  chemically treated genomic DNA (Homo sapiens) CpG-island No: 40278
ccccaccgacaacaaacgacgaaaaccaaatcccgccctccccgaaatcccgaacttaaaaccgccaaaaactaaacccgacccccctcccgccccgatcaccgcaatcgaactaaaccgacgcccaaccgcccccgaatccataccgaaaactttaattccgccttcccgaaaaaacgcgaaatttcccgaccgaaacgaaacgaccgaatcgaaataccttcttaaacccccaaaatacgaaaccaaaaaatccgcacctaaactcgccccgaaccacgacgctccccctaaaatcgaaccgatattccgaatccgaataccccgaaaaaaaaccccacgacccgcccctacgctcacccgaataatctaattaaaatcgccgccgaccacgaaaccccctaccaacttacaataaaaatcctcgataaaacgcgaaaaaccgcgcgccgaaacctcctctccgcaaatcgcgaaaacgacgatacgaacgccctcgaccaaattaaaataaaacgaatacaaactaaaaccgccgcccgcctcctcccgcgcccgcgccgcgcccaacaacgccaacccgaccaacaacaacgacgcgaaaccccgaaaaccgcgaacacacaatacgctccccgcgcaaaaccgcttcgccatcttcccgactccgaaccgcgtccccgaactccaaaaacaacgcgcgcgacgaaaacccgacgaatctaaaaccaaacgaccgacaaaact

SEQ ID NO: 40279 - DNA, 747 bp, Artificial Sequence
  chemically treated genomic DNA (Homo sapiens) CpG-island No: 40279
ttttatcggtagtaggcggcggaggttaagtttcgtttttttcgggatttcggatttggggtcgttagggattgggttcggtttttttttcgtttcggttatcgtagtcgaattggatcggcgtttagtcgttttcgggtttatgtcggggattttaatttcgttttttcggagggacgcgaagtttttcggtcgagacggagcggtcgggtcggggtgtttttttgggtttttaaaatgcggaattagagagttcgtatttggattcgtttcgggttacggcgttttttttggggtcgggtcggtgtttcgggttcgagtgtttcgggaggaagttttacggttcgtttttgcgtttattcggatggtttggttggggtcgtcgtcggttacggggttttttattagtttgtagtaaaggttttcggtggggcgcggggagtcgcgcgtcggggtttttttttcgtaggtcgcggaggcggcgatgcgggcgttttcggttaggttgaagtagggcgggtgtaggttgaagtcgtcgttcgttttttttcgcgttcgcgtcgcgtttagtagcgttagttcgattagtagtagcggcgcggggtttcgggggtcgcgaatatatagtgcgtttttcgcgtagagtcgtttcgttattttttcggtttcgggtcgcgttttcgagttttagggatagcgcgcgcggcgggagttcggcgggtttgaagttaggcggtcggtagggtt

SEQ ID NO: 40280 - DNA, 747 bp, Artificial Sequence
  chemically treated genomic DNA (Homo sapiens) CpG-island No: 40280
aaccctaccgaccgcctaacttcaaacccgccgaactcccgccgcgcgcgctatccctaaaactcgaaaacgcgacccgaaaccgaaaaaataacgaaacgactctacgcgaaaaacgcactatatattcgcgacccccgaaaccccgcgccgctactactaatcgaactaacgctactaaacgcgacgcgaacgcgaaaaaaaacgaacgacgacttcaacctacacccgccctacttcaacctaaccgaaaacgcccgcatcgccgcctccgcgacctacgaaaaaaaaaccccgacgcgcgactccccgcgccccaccgaaaacctttactacaaactaataaaaaaccccgtaaccgacgacgaccccaaccaaaccatccgaataaacgcaaaaacgaaccgtaaaacttcctcccgaaacactcgaacccgaaacaccgacccgaccccaaaaaaaacgccgtaacccgaaacgaatccaaatacgaactctctaattccgcattttaaaaacccaaaaaaacaccccgacccgaccgctccgtctcgaccgaaaaacttcgcgtccctccgaaaaaacgaaattaaaatccccgacataaacccgaaaacgactaaacgccgatccaattcgactacgataaccgaaacgaaaaaaaaaccgaacccaatccctaacgaccccaaatccgaaatcccgaaaaaaacgaaacttaacctccgccgcctactaccgataaaa

SEQ ID NO: 40281 - DNA, 763 bp, Artificial Sequence
  chemically treated genomic DNA (Homo sapiens) CpG-island No: 40281
cgtggtgttgtcggcgtcgggcggggcgggggcggggagggggcggggcgagggcggtagttaatggcgggggcgttgcgcggggcgcgcggggcggtgggttgggcgcggggcgtattcggttgcgcgttgcgtttcggttgtacggtcgtatcggtagcggtttaggtttcggtttttttttcgttgtagtagtcgcgttgtcggttttattgggttcggattcggtttcggttttttcggtatcgtttgttttggtttcggtttcggtttcgcggattatgcgttgggcgtttttaggggaattcgattcggttaagggttcgtaaagacgaggttttcgggtcggggtttttttcggtcgtttagttttcggtcggcgttttgtttcgcgtttcggagtcgcgtgagtttgcggggttatggagcgcgcgtcgttcgacgggtcgttgaacgtttcgggggcgttggcgggcgaggcggcggcggcgggcggggcgcgcggtttttcggtagtttggatcgcggtgttggtcgcgtttatggcgttgtttatcgtggttacggtgttgggtaacgcgttggttatgttcgttttcgtggtcgattcgagttttcgtatttagaataatttttttttgtttaatttcgttattttcgattttttcgtcggtaaatttttagtttttggtcgttggggatttaggggcgtttagcgtggtcgggttagcggggattggaatacggatttgggtggttttcg

SEQ ID NO: 40282 - DNA, 763 bp, Artificial Sequence
  chemically treated genomic DNA (Homo sapiens) CpG-island No: 40282
cgaaaaccacccaaatccgtattccaatccccgctaacccgaccacgctaaacgcccctaaatccccaacgaccaaaaactaaaaatttaccgacgaaaaaatcgaaaataacgaaattaaacaaaaaaaaattattctaaatacgaaaactcgaatcgaccacgaaaacgaacataaccaacgcgttacccaacaccgtaaccacgataaacaacgccataaacgcgaccaacaccgcgatccaaactaccgaaaaaccgcgcgccccgcccgccgccgccgcctcgcccgccaacgcccccgaaacgttcaacgacccgtcgaacgacgcgcgctccataaccccgcaaactcacgcgactccgaaacgcgaaacaaaacgccgaccgaaaactaaacgaccgaaaaaaaccccgacccgaaaacctcgtctttacgaacccttaaccgaatcgaattcccctaaaaacgcccaacgcataatccgcgaaaccgaaaccgaaaccaaaacaaacgataccgaaaaaaccgaaaccgaatccgaacccaataaaaccgacaacgcgactactacaacgaaaaaaaaaccgaaacctaaaccgctaccgatacgaccgtacaaccgaaacgcaacgcgcaaccgaatacgccccgcgcccaacccaccgccccgcgcgccccgcgcaacgcccccgccattaactaccgccctcgccccgccccctccccgcccccgccccgcccgacgccgacaacaccacg

SEQ ID NO: 40283 - DNA, 763 bp, Artificial Sequence
  chemically treated genomic DNA (Homo sapiens) CpG-island No: 40283
cgggagttatttaggttcgtgttttagttttcgttggttcggttacgttgggcgtttttgggtttttagcggttaggggttggggatttatcgacgaggaagtcggagatggcgaggttgagtaggaagaagttgttttgggtgcggaggttcgagtcggttacgaaggcgagtatgattagcgcgttgtttagtatcgtggttacgatgagtagcgttatgagcgcggttagtatcgcggtttaggttgtcgagaagtcgcgcgtttcgttcgtcgtcgtcgtttcgttcgttagcgttttcgaagcgtttagcggttcgtcgggcggcgcgcgttttatggtttcgtaggtttacgcggtttcgggacgcggggtagggcgtcggtcgagagttgggcggtcgggaggggtttcggttcgggagtttcgtttttgcgggtttttggtcgggtcgggtttttttgggggcgtttagcgtatggttcgcggggtcggggtcggggttagagtaggcggtgtcgagggggtcggggtcggattcgagtttagtggggtcggtagcgcggttgttgtagcgggagaggagtcggagtttgagtcgttgtcggtgcgatcgtgtagtcggagcgtaacgcgtagtcgagtgcgtttcgcgtttagtttatcgtttcgcgcgtttcgcgtagcgttttcgttattggttgtcgttttcgtttcgtttttttttcgttttcgtttcgttcggcgtcggtagtattacg

SEQ ID NO: 40284 - DNA, 763 bp, Artificial Sequence
  chemically treated genomic DNA (Homo sapiens) CpG-island No: 40284
cgtaatactaccgacgccgaacgaaacgaaaacgaaaaaaaaacgaaacgaaaacgacaaccaataacgaaaacgctacgcgaaacgcgcgaaacgataaactaaacgcgaaacgcactcgactacgcgttacgctccgactacacgatcgcaccgacaacgactcaaactccgactcctctcccgctacaacaaccgcgctaccgaccccactaaactcgaatccgaccccgaccccctcgacaccgcctactctaaccccgaccccgaccccgcgaaccatacgctaaacgcccccaaaaaaacccgacccgaccaaaaacccgcaaaaacgaaactcccgaaccgaaacccctcccgaccgcccaactctcgaccgacgccctaccccgcgtcccgaaaccgcgtaaacctacgaaaccataaaacgcgcgccgcccgacgaaccgctaaacgcttcgaaaacgctaacgaacgaaacgacgacgacgaacgaaacgcgcgacttctcgacaacctaaaccgcgatactaaccgcgctcataacgctactcatcgtaaccacgatactaaacaacgcgctaatcatactcgccttcgtaaccgactcgaacctccgcacccaaaacaacttcttcctactcaacctcgccatctccgacttcctcgtcgataaatccccaacccctaaccgctaaaaacccaaaaacgcccaacgtaaccgaaccaacgaaaactaaaacacgaacctaaataactcccg

SEQ ID NO: 40285 - DNA, 619 bp, Artificial Sequence
  chemically treated genomic DNA (Homo sapiens) CpG-island No: 40285
agttatcgtcgtttttttttattttatttttttagttgtttttagatttttgggtttttttagcgtcgtcgtatttttttttttcgtttttgaggttatcgtatattattttgttaacggtcgagggtttcggtggtgtacgttaggtggttgttttagtttcgtcgttttcgtcgtcgtcgttaggggcgttggtgtgtgtggtgtggtgtgcgtgtgtgggggcggaaggtagcggtagttttcgttaattattgttgtttattttggtcgagtttagtcgcgttttgggcgttattttattttggcggcggtttatttgtttcggttgttattgcgttgtcgttagttgagttttcgatgggttcggacgtgtgcggcggcggcggttgagattgggggagaagggaaagcggacgaggagcggcgggcgtagtggaggtagtggggagcgtcggggtttgacgaggaggttcgaggggtcgggcgtttgggcggtagagattcggtttgtcgaagcgggtggagggagaaggtttaattcgaatcgttggggttttattttggattatttttagtcgttattttgttttttttcgtttaatatattaatgatttt

SEQ ID NO: 40286 - DNA, 619 bp, Artificial Sequence
  chemically treated genomic DNA (Homo sapiens) CpG-island No: 40286
aaaatcattaatatattaaacgaaaaaaaacaaaataacgactaaaaataatccaaaataaaaccccaacgattcgaattaaaccttctccctccacccgcttcgacaaaccgaatctctaccgcccaaacgcccgacccctcgaacctcctcgtcaaaccccgacgctccccactacctccactacgcccgccgctcctcgtccgctttcccttctcccccaatctcaaccgccgccgccgcacacgtccgaacccatcgaaaactcaactaacgacaacgcaataacaaccgaaacaaataaaccgccgccaaaataaaataacgcccaaaacgcgactaaactcgaccaaaataaacaacaataattaacgaaaactaccgctaccttccgcccccacacacgcacaccacaccacacacaccaacgcccctaacgacgacgacgaaaacgacgaaactaaaacaaccacctaacgtacaccaccgaaaccctcgaccgttaacaaaataatatacgataacctcaaaaacgaaaaaaaaaaatacgacgacgctaaaaaaacccaaaaatctaaaaacaactaaaaaaataaaataaaaaaaaacgacgataact

SEQ ID NO: 40287 - DNA, 619 bp, Artificial Sequence
  chemically treated genomic DNA (Homo sapiens) CpG-island No: 40287
agaattattagtatattgaacgggaagaaataagatggcggttgaaggtgatttagagtggggttttagcgattcggattgagttttttttttttattcgtttcggtaggtcgggtttttatcgtttaggcgttcggtttttcgggttttttcgttaggtttcggcgttttttattgtttttattgcgttcgtcgtttttcgttcgttttttttttttttttagttttagtcgtcgtcgtcgtatacgttcgaatttatcgggggtttagttagcggtaacgtagtagtagtcggggtaggtgggtcgtcgttaggatgaggtggcgtttaagacgcggttgagttcggttagggtgggtagtagtagttggcggaagttgtcgttgtttttcgtttttatatacgtatattatattatatatattagcgtttttggcggcggcggcgggggcggcggggttggggtagttatttggcgtgtattatcgaggttttcggtcgttaataaagtggtatacgatgattttaagagcgaggaggaggagtacggcgacgttgaggagatttaggagtttgaggataattaggaggatgagatggaggaggacgacgatgatt

SEQ ID NO: 40288 - DNA, 619 bp, Artificial Sequence
  chemically treated genomic DNA (Homo sapiens) CpG-island No: 40288
aatcatcgtcgtcctcctccatctcatcctcctaattatcctcaaactcctaaatctcctcaacgtcgccgtactcctcctcctcgctcttaaaatcatcgtataccactttattaacgaccgaaaacctcgataatacacgccaaataactaccccaaccccgccgcccccgccgccgccgccaaaaacgctaatatatataatataatatacgtatataaaaacgaaaaacaacgacaacttccgccaactactactacccaccctaaccgaactcaaccgcgtcttaaacgccacctcatcctaacgacgacccacctaccccgactactactacgttaccgctaactaaacccccgataaattcgaacgtatacgacgacgacgactaaaactaaaaaaaaaaaaaaaacgaacgaaaaacgacgaacgcaataaaaacaataaaaaacgccgaaacctaacgaaaaaacccgaaaaaccgaacgcctaaacgataaaaacccgacctaccgaaacgaataaaaaaaaaaaactcaatccgaatcgctaaaaccccactctaaatcaccttcaaccgccatcttatttcttcccgttcaatatactaataattct

SEQ ID NO: 40289 - DNA, 937 bp, Artificial Sequence
  chemically treated genomic DNA (Homo sapiens) CpG-island No: 40289
atttcgcgttttagtttcgcgtcgagtttttcggcggcgtttttagggtagggcgaggagcgcggggagaggtcgcggggattcgggtcgttggggtcgtggggttcgttcggtcgtcggtcggttttttggggcgcgggcggttgcgttagcggggggcggagacgcggcgttgttttcgtttacgcgcgttttgttttttttttttagtcgttttggttcgcggcgtttaacggggaagacgaagatgtagggatacgcgcgaggagtcgtcgtagtcgtcgtcgtcgcgttgtggagttcgagtgagcgcggcgttagttcgttcggtcgttggataatatggaggttgtattgttcgggtcgtcgtggtcgttgttgttggcgttgtgcggttgttcggttttcgtcgtaggtaggtgggcgcgggtcgattcgggatcgcgggttgttagtataatggttcgggcggtttcgcgattaagtgtacgggcgttatcgtcgttttggaagcgagttgggggcgagttggggcgcgtatcggggattttttcgtcgtttttgttcgggttattttcggggacgtcgcgtttcgggtcggtgaggagggcgcgcgggcggcgtcggtcggtttttatttgttcgcgttcgtaggaagttaggagtcgagttcgcgttgggttcgtgtggttcgggtcgggtattaagttgggatttggggttcggaggcgggtttggttcggggagtcggttcgcgattttgtttttagcggtcgcgcggtcggttcgtgtgtttcgaggatcggttgaggttgtagcgagaaagttttgagttcgggtgcggggttgtttggtcggtggcgttgtttttgtgagtcgtggttgtgggtttttaagcggattgatatatgttaggtgtcggggcgattcgaatgtt

SEQ ID NO: 40290 - DNA, 937 bp, Artificial Sequence
  chemically treated genomic DNA (Homo sapiens) CpG-island No: 40290
aacattcgaatcgccccgacacctaacatatatcaatccgcttaaaaacccacaaccacgactcacaaaaacaacgccaccgaccaaacaaccccgcacccgaactcaaaactttctcgctacaacctcaaccgatcctcgaaacacacgaaccgaccgcgcgaccgctaaaaacaaaatcgcgaaccgactccccgaaccaaacccgcctccgaaccccaaatcccaacttaatacccgacccgaaccacacgaacccaacgcgaactcgactcctaacttcctacgaacgcgaacaaataaaaaccgaccgacgccgcccgcgcgccctcctcaccgacccgaaacgcgacgtccccgaaaataacccgaacaaaaacgacgaaaaaatccccgatacgcgccccaactcgcccccaactcgcttccaaaacgacgataacgcccgtacacttaatcgcgaaaccgcccgaaccattatactaacaacccgcgatcccgaatcgacccgcgcccacctacctacgacgaaaaccgaacaaccgcacaacgccaacaacaacgaccacgacgacccgaacaatacaacctccatattatccaacgaccgaacgaactaacgccgcgctcactcgaactccacaacgcgacgacgacgactacgacgactcctcgcgcgtatccctacatcttcgtcttccccgttaaacgccgcgaaccaaaacgactaaaaaaaaaaaacaaaacgcgcgtaaacgaaaacaacgccgcgtctccgccccccgctaacgcaaccgcccgcgccccaaaaaaccgaccgacgaccgaacgaaccccacgaccccaacgacccgaatccccgcgacctctccccgcgctcctcgccctaccctaaaaacgccgccgaaaaactcgacgcgaaactaaaacgcgaaat

SEQ ID NO: 40291 - DNA, 937 bp, Artificial Sequence
  chemically treated genomic DNA (Homo sapiens) CpG-island No: 40291
ggtattcgggtcgtttcggtatttggtatgtgttagttcgtttggaaatttatagttacggtttataggggtagcgttatcggttaggtagtttcgtattcgggtttagaattttttcgttgtaattttagtcggttttcggagtatacgggtcggtcgcgcggtcgttggaaatagagtcgcgaatcggtttttcgggttaggttcgttttcgggttttaagttttaatttggtgttcggttcgggttatacgggtttagcgcgggttcggtttttggttttttacgggcgcgggtaggtgaggatcggtcggcgtcgttcgcgcgttttttttatcggttcgggacgcggcgttttcggggatggttcgggtagggacggcggggggattttcggtgcgcgttttaattcgtttttaattcgtttttaaggcggcggtggcgttcgtgtatttggtcgcggggtcgttcgggttattgtattagtagttcgcggtttcgggtcggttcgcgtttatttatttgcggcgggggtcgggtagtcgtatagcgttagtagtagcggttacggcggttcgggtagtgtagtttttatgttgtttagcggtcggacgggttggcgtcgcgtttattcgggttttatagcgcggcggcggcggttgcggcggtttttcgcgcgtgtttttgtattttcgtttttttcgttgggcgtcgcggattaggacgattgggaggagggagtagggcgcgcgtgagcggaagtagcgtcgcgttttcgtttttcgttgacgtagtcgttcgcgttttagggagtcggtcggcggtcgggcgggttttacggttttagcggttcgggttttcgcggttttttttcgcgtttttcgttttgttttgggggcgtcgtcgggaggttcggcgcggggttggggcgcggggt

SEQ ID NO: 40292 - DNA, 937 bp, Artificial Sequence
  chemically treated genomic DNA (Homo sapiens) CpG-island No: 40292
accccgcgccccaaccccgcgccgaacctcccgacgacgcccccaaaacaaaacgaaaaacgcgaaaaaaaaccgcgaaaacccgaaccgctaaaaccgtaaaacccgcccgaccgccgaccgactccctaaaacgcgaacgactacgtcaacgaaaaacgaaaacgcgacgctacttccgctcacgcgcgccctactccctcctcccaatcgtcctaatccgcgacgcccaacgaaaaaaacgaaaatacaaaaacacgcgcgaaaaaccgccgcaaccgccgccgccgcgctataaaacccgaataaacgcgacgccaacccgtccgaccgctaaacaacataaaaactacactacccgaaccgccgtaaccgctactactaacgctatacgactacccgacccccgccgcaaataaataaacgcgaaccgacccgaaaccgcgaactactaatacaataacccgaacgaccccgcgaccaaatacacgaacgccaccgccgccttaaaaacgaattaaaaacgaattaaaacgcgcaccgaaaatccccccgccgtccctacccgaaccatccccgaaaacgccgcgtcccgaaccgataaaaaaaacgcgcgaacgacgccgaccgatcctcacctacccgcgcccgtaaaaaaccaaaaaccgaacccgcgctaaacccgtataacccgaaccgaacaccaaattaaaacttaaaacccgaaaacgaacctaacccgaaaaaccgattcgcgactctatttccaacgaccgcgcgaccgacccgtatactccgaaaaccgactaaaattacaacgaaaaaattctaaacccgaatacgaaactacctaaccgataacgctacccctataaaccgtaactataaatttccaaacgaactaacacataccaaataccgaaacgacccgaatacc

SEQ ID NO: 40293 - DNA, 529 bp, Artificial Sequence
  chemically treated genomic DNA (Homo sapiens) CpG-island No: 40293
gtatcgtcgtttagcgaggtgggcgttttttcgggatttcggcggtcgttcgcgggcggcgatttcggtttttttgggttcgcgcgggggcggggagttcggtttttttttttttttttttttttttttttttttttgttcggttgttttgcgcgggggcgggggcgggggcggagcgcgcgggcgggattttttcgtttttttttttcggttttcgggaaatttagttttcgtggtttggtcgtttttcgttttcgcgttcgttgtcgttcggcgttcgtttggggtttcgtagtcggcgcggttttttagttgggggtttcgtagtgtcgggtttcggtttttgttcgtttgtttaacgtcgtagtgttttcggttcgggtcgtcggtattatgtaattcggtcggagttcgagtcgggttaggtaagtcgcggggaggagtggggacggggaaacgttatgggattattttatatcgttttttatttaaaggtagaagtcgttttcgtagttatttattttttttt

SEQ ID NO: 40294 - DNA, 529 bp, Artificial Sequence
  chemically treated genomic DNA (Homo sapiens) CpG-island No: 40294
aaaaaaaaataaataactacgaaaacgacttctacctttaaataaaaaacgatataaaataatcccataacgtttccccgtccccactcctccccgcgacttacctaacccgactcgaactccgaccgaattacataataccgacgacccgaaccgaaaacactacgacgttaaacaaacgaacaaaaaccgaaacccgacactacgaaacccccaactaaaaaaccgcgccgactacgaaaccccaaacgaacgccgaacgacaacgaacgcgaaaacgaaaaacgaccaaaccacgaaaactaaatttcccgaaaaccgaaaaaaaaaaacgaaaaaatcccgcccgcgcgctccgcccccgcccccgcccccgcgcaaaacaaccgaacaaaaaaaaaaaaaaaaaaaaaaaaaaaaaaaaaaaccgaactccccgcccccgcgcgaacccaaaaaaaccgaaatcgccgcccgcgaacgaccgccgaaatcccgaaaaaacgcccacctcgctaaacgacgatac

SEQ ID NO: 40295 - DNA, 529 bp, Artificial Sequence
  chemically treated genomic DNA (Homo sapiens) CpG-island No: 40295
gagggggagtgggtggttgcgggggcggtttttgtttttgggtggggggcgatgtggagtaattttataacgttttttcgtttttattttttttcgcggtttatttggttcggttcgggtttcggtcgggttatatggtgtcggcggttcgggtcgggggtattgcggcgttgggtaggcgggtagggatcggggttcggtattgcggagtttttagttgaggggtcgcgtcggttgcggagttttaagcgagcgtcgagcggtagcgggcgcgggagcgggaggcggttaagttacggaggttggatttttcggggatcgggaaggggaggcggggggatttcgttcgcgcgtttcgttttcgttttcgttttcgcgtagggtagtcgagtagggagagggagagggagaggaagagggagggggatcgagtttttcgttttcgcgcggatttaggagggtcgaggtcgtcgttcgcgggcggtcgtcggggtttcggaggagcgtttatttcgttgagcgacggtgt

SEQ ID NO: 40296 - DNA, 529 bp, Artificial Sequence
  chemically treated genomic DNA (Homo sapiens) CpG-island No: 40296
acaccgtcgctcaacgaaataaacgctcctccgaaaccccgacgaccgcccgcgaacgacgacctcgaccctcctaaatccgcgcgaaaacgaaaaactcgatccccctccctcttcctctccctctccctctccctactcgactaccctacgcgaaaacgaaaacgaaaacgaaacgcgcgaacgaaatccccccgcctccccttcccgatccccgaaaaatccaacctccgtaacttaaccgcctcccgctcccgcgcccgctaccgctcgacgctcgcttaaaactccgcaaccgacgcgacccctcaactaaaaactccgcaataccgaaccccgatccctacccgcctacccaacgccgcaatacccccgacccgaaccgccgacaccatataacccgaccgaaacccgaaccgaaccaaataaaccgcgaaaaaaaataaaaacgaaaaaacgttataaaattactccacatcgccccccacccaaaaacaaaaaccgcccccgcaaccacccactccccctc

SEQ ID NO: 40297 - DNA, 632 bp, Artificial Sequence
  chemically treated genomic DNA (Homo sapiens) CpG-island No: 40297
tattcggaggggcgggttattcggggggacgaaggagtcggggaaggcggattaatagtcggggacgggatcgaagtgttttatggacgaagcgagcgtattgcgaggggataggggacggggagagggtggggtgggggggttgcggtaacggtacgggggttttttggaacgttgggggagtatgttatggggggggagaggagggcggagtatatagtgtgggaggttacggtaggtggatgggtagcgtcgtgagtcggggggggataggattaaataaggtgggaagtaggggcgtcggtacggtaggagattttcgggggattcgttgcgggtgatagggtgttgagttaggttcgtgtttttgatcgtagtgtcgttgttgatgaggggcgtcgggtgttggtgtggatgttgtcgcgtcgtatgttgtggtatattgttttcgttatcgttatttttcgtagcgtttacgtacggtatgatttttattgttagtttggttttttttttagtatatatcgttttttttttagtatatatcgcgatatatttttaagttagacgtggcgcggtttgtaacgattagggatttatatggatttaattgggatttgtatggatttgat

SEQ ID NO: 40298 - DNA, 632 bp, Artificial Sequence
  chemically treated genomic DNA (Homo sapiens) CpG-island No: 40298
atcaaatccatacaaatcccaattaaatccatataaatccctaatcgttacaaaccgcgccacgtctaacttaaaaatatatcgcgatatatactaaaaaaaaaacgatatatactaaaaaaaaaaccaaactaacaataaaaatcataccgtacgtaaacgctacgaaaaataacgataacgaaaacaatataccacaacatacgacgcgacaacatccacaccaacacccgacgcccctcatcaacaacgacactacgatcaaaaacacgaacctaactcaacaccctatcacccgcaacgaatcccccgaaaatctcctaccgtaccgacgcccctacttcccaccttatttaatcctatccccccccgactcacgacgctacccatccacctaccgtaacctcccacactatatactccgccctcctctccccccccataacatactcccccaacgttccaaaaaacccccgtaccgttaccgcaacccccccaccccaccctctccccgtcccctatcccctcgcaatacgctcgcttcgtccataaaacacttcgatcccgtccccgactattaatccgccttccccgactccttcgtccccccgaataacccgcccctccgaata

SEQ ID NO: 40299 - DNA, 632 bp, Artificial Sequence
  chemically treated genomic DNA (Homo sapiens) CpG-island No: 40299
attaggtttatatagattttaattagatttatatagatttttgatcgttgtaggtcgcgttacgtttggtttagaagtgtatcgcgatgtgtgttggagggaaaacgatgtgtgttgaagggggaattaaattggtaatggagattatgtcgtacgtgaacgttgcgggaaatggcggtggcgggggtaatgtgttatagtatgcgacgcgataatatttatattaatattcgacgttttttattaataacgatattacgattaaaaatacgaatttagtttaatattttattattcgtagcgaatttttcgagaattttttatcgtatcgacgtttttattttttattttgtttgattttattttttttcggtttacgacgttgtttatttatttgtcgtggttttttatattgtatgtttcgtttttttttttttttttataatatatttttttagcgttttaaagagttttcgtatcgttgtcgtaatttttttattttatttttttttcgttttttattttttcgtaatgcgttcgtttcgtttatggaatatttcggtttcgttttcgattgttggttcgtttttttcggttttttcgttttttcggatagttcgttttttcgagta

SEQ ID NO: 40300 - DNA, 632 bp, Artificial Sequence
  chemically treated genomic DNA (Homo sapiens) CpG-island No: 40300
tactcgaaaaaacgaactatccgaaaaaacgaaaaaaccgaaaaaaacgaaccaacaatcgaaaacgaaaccgaaatattccataaacgaaacgaacgcattacgaaaaaataaaaaacgaaaaaaaaataaaataaaaaaattacgacaacgatacgaaaactctttaaaacgctaaaaaaatatattataaaaaaaaaaaaaaaaacgaaacatacaatataaaaaaccacgacaaataaataaacaacgtcgtaaaccgaaaaaaaataaaatcaaacaaaataaaaaataaaaacgtcgatacgataaaaaattctcgaaaaattcgctacgaataataaaatattaaactaaattcgtatttttaatcgtaatatcgttattaataaaaaacgtcgaatattaatataaatattatcgcgtcgcatactataacacattacccccgccaccgccatttcccgcaacgttcacgtacgacataatctccattaccaatttaattcccccttcaacacacatcgttttccctccaacacacatcgcgatacacttctaaaccaaacgtaacgcgacctacaacgatcaaaaatctatataaatctaattaaaatctatataaacctaat

SEQ ID NO: 40301 - DNA, 507 bp, Artificial Sequence
  chemically treated genomic DNA (Homo sapiens) CpG-island No: 40301
  unsure (389)
gtcggttttattgtagacgttcgttattcgattatttcgtgggtttttttttttttttatttgattttttattttagtcgtttagcgtttttttttcgttttttttcgtttttttttttttttttattaattgtttcgttgttttttgcgcgtatttttttattcgtttaattttgtttttttattttttttttttttttcgtttttttttatgttttcgttattttgtgtagttcgacgtttcgcgtcgttgtcgttatatgttatttttatttcgttaattattacgtcgaattatcgtcgtgtacgtcgttgttcgatttaatttatttcgtttttattttttcgttttttaattttgatcgttttcgaaaatttattgttcgttntcgttatttataaatttgtttacgtttatcgttcgagaataatggtttattgtttcgtattattttttttttaatttatacgtgttcgttttttgttttttttcgttttatttatttt

SEQ ID NO: 40302 - DNA, 507 bp, Artificial Sequence
  chemically treated genomic DNA (Homo sapiens) CpG-island No: 40302
  unsure (119)
aaaataaataaaacgaaaaaaaacaaaaaacgaacacgtataaattaaaaaaaaaataatacgaaacaataaaccattattctcgaacgataaacgtaaacaaatttataaataacganaacgaacaataaattttcgaaaacgatcaaaattaaaaaacgaaaaaataaaaacgaaataaattaaatcgaacaacgacgtacacgacgataattcgacgtaataattaacgaaataaaaataacatataacgacaacgacgcgaaacgtcgaactacacaaaataacgaaaacataaaaaaaaacgaaaaaaaaaaaaaaaataaaaaaacaaaattaaacgaataaaaaaatacgcgcaaaaaacaacgaaacaattaataaaaaaaaaaaaaaaaacgaaaaaaaacgaaaaaaaaacgctaaacgactaaaataaaaaatcaaataaaaaaaaaaaaaaacccacgaaataatcgaataacgaacgtctacaataaaaccgac

SEQ ID NO: 40303 - DNA, 507 bp, Artificial Sequence
  chemically treated genomic DNA (Homo sapiens) CpG-island No: 40303
  unsure (119)
agagtaggtggggcgggaaggggtaagagacggatacgtgtgggttgaggggaagatagtgcggagtaataagttattgttttcgagcggtgggcgtgggtaaatttataggtggcggnggcgagtagtggattttcgggagcggttagagttagaaggcgagagagtgggagcgggatgagttgagtcgggtagcggcgtgtacgacggtggttcgacgtggtaattaacggagtaggaataatatgtggcgatagcggcgcgggacgtcgggttatataggatggcggaggtatgggggggagcggaggaaaggaggggaataggggggtagggttgggcgagtgggaaggtgcgcgtagaaggtagcgaggtagttggtaggggggggagaaggggcgaaggggggcgggggggagacgttgggcgattaaaatagggggttaagtggagagaagaggagatttacgagatgatcgggtggcgggcgtttataatgagatcggt

SEQ ID NO: 40304 - DNA, 507 bp, Artificial Sequence
  chemically treated genomic DNA (Homo sapiens) CpG-island No: 40304
  unsure (389)
accgatctcattataaacgcccgccacccgatcatctcgtaaatctcctcttctctccacttaaccccctattttaatcgcccaacgtctcccccccgccccccttcgccccttctcccccccctaccaactacctcgctaccttctacgcgcaccttcccactcgcccaaccctacccccctattcccctcctttcctccgctcccccccatacctccgccatcctatataacccgacgtcccgcgccgctatcgccacatattattcctactccgttaattaccacgtcgaaccaccgtcgtacacgccgctacccgactcaactcatcccgctcccactctctcgccttctaactctaaccgctcccgaaaatccactactcgccnccgccacctataaatttacccacgcccaccgctcgaaaacaataacttattactccgcactatcttcccctcaacccacacgtatccgtctcttaccccttcccgccccacctactct

SEQ ID NO: 40305 - DNA, 1236 bp, Artificial Sequence
  chemically treated genomic DNA (Homo sapiens) CpG-island No: 40305
atcgtcgaggggtggttttaatttcggttttcgcgtttttgttttgtcgtaggaataatagtttttttggaggcggcgtcggtcgcggtcgggggcggagttgtcggcgcgggagttgggggtgtgcgcggggcggggtcgtagttatttttttcgtcggcggtttcgttacgcgttttttatcgggcgggtcggggtttttgtgacgcggtggtaacggttacggatataaagggaaggcgaggaggcgagtaagaggttgggtttgttttcggttcgcgattttcgttcgtcgcgcgcgcgttcgttcgtttttttcgtcgcggtgttttttacgtcggttcgtattttcgcgcgtatttttgcgcgttcgcgattttcgtacgcgttcggattcgtcgatttcgtttcgagcgtcgcgggttcgggtttggcggacgttgcgggtggggcggggatgttgacgggttgttttttcgtttagcggcgcggttgttaggaggtatcgaggtagcggcggggttttgggcgcgcggttggatgttttcggtttgcggttttttgcgtttttcgtcgtttaggggtattagttatgggcgtcgtagtcgttgaggcgtcgtttcggttgtttgtcgcgttttcgttcgttttttgttgttatacgtcggtgtttttgtttttcgttttttttttgttcgggagtcgcgcgtttaattagttttcgggtggtggcggcggtagcggcggggattgtttcggcggtaaaggtaagagtattaattgtttaggtaggatcggtcggagtcggttttaggtttttttattttttcgttgtcgtttttttcgtggtttttgcggtcggtcgggttgggaaagatttcgtcgtgggggttttaggggtgggttcgagggtgagcgagggcggagggtagggcgcgagcgtgcggtgtggttttgggatcggcgttggggatgggagtggtcgtgggtgcgttcgagtgtgtcgagtggttgggcgagggcggttcggcgtgtggggaggcggtggggtcggggtcggggtcggcgaggttgagcggtcggtcggggttttcggtgtggtcgtgggtgtgttcgcgggagcgtgtgtttgtgttgtgaaggttgaggggagggagggcggttttaggtagggatttgtgtgtgtgtgtgtagagtgcggtgggtgggagacggcgagggggttgggcggggtga

SEQ ID NO: 40306 - DNA, 1236 bp, Artificial Sequence
  chemically treated genomic DNA (Homo sapiens) CpG-island No: 40306
tcaccccgcccaaccccctcgccgtctcccacccaccgcactctacacacacacacacaaatccctacctaaaaccgccctccctcccctcaaccttcacaacacaaacacacgctcccgcgaacacacccacgaccacaccgaaaaccccgaccgaccgctcaacctcgccgaccccgaccccgaccccaccgcctccccacacgccgaaccgccctcgcccaaccactcgacacactcgaacgcacccacgaccactcccatccccaacgccgatcccaaaaccacaccgcacgctcgcgccctaccctccgccctcgctcaccctcgaacccacccctaaaacccccacgacgaaatctttcccaacccgaccgaccgcaaaaaccacgaaaaaaacgacaacgaaaaaataaaaaaacctaaaaccgactccgaccgatcctacctaaacaattaatactcttacctttaccgccgaaacaatccccgccgctaccgccgccaccacccgaaaactaattaaacgcgcgactcccgaacaaaaaaaaaacgaaaaacaaaaacaccgacgtataacaacaaaaaacgaacgaaaacgcgacaaacaaccgaaacgacgcctcaacgactacgacgcccataactaatacccctaaacgacgaaaaacgcaaaaaaccgcaaaccgaaaacatccaaccgcgcgcccaaaaccccgccgctacctcgatacctcctaacaaccgcgccgctaaacgaaaaaacaacccgtcaacatccccgccccacccgcaacgtccgccaaacccgaacccgcgacgctcgaaacgaaatcgacgaatccgaacgcgtacgaaaatcgcgaacgcgcaaaaatacgcgcgaaaatacgaaccgacgtaaaaaacaccgcgacgaaaaaaacgaacgaacgcgcgcgcgacgaacgaaaatcgcgaaccgaaaacaaacccaacctcttactcgcctcctcgccttccctttatatccgtaaccgttaccaccgcgtcacaaaaaccccgacccgcccgataaaaaacgcgtaacgaaaccgccgacgaaaaaaataactacgaccccgccccgcgcacacccccaactcccgcgccgacaactccgcccccgaccgcgaccgacgccgcctccaaaaaaactattattcctacgacaaaacaaaaacgcgaaaaccgaaattaaaaccacccctcgacgat

SEQ ID NO: 40307 - DNA, 1236 bp, Artificial Sequence
  chemically treated genomic DNA (Homo sapiens) CpG-island No: 40307
ttatttcgtttagttttttcgtcgttttttatttatcgtattttgtatatatatatatagatttttgtttggggtcgttttttttttttttagtttttataatataaatatacgttttcgcgagtatatttacgattatatcgggagtttcggtcggtcgtttagtttcgtcggtttcggtttcggttttatcgtttttttatacgtcgggtcgttttcgtttagttattcgatatattcggacgtatttacggttatttttatttttagcgtcggttttaaagttatatcgtacgttcgcgttttgtttttcgttttcgtttattttcgggtttatttttgggatttttacgacggggttttttttagttcggtcgatcgtagggattacgagggaggcggtaacggaggggtgggaagatttagggtcggtttcgatcggttttatttgagtagttgatgtttttgtttttgtcgtcgggatagttttcgtcgttgtcgtcgttattattcgggggttggttggacgcgcggttttcgggtagagagaaggcgaagagtagaagtatcgacgtgtagtagtagaaggcgagcggaggcgcggtaggtagtcggagcggcgttttagcggttgcggcgtttatgattggtgtttttggacggcgggaagcgtagggagtcgtaggtcgggggtatttagtcgcgcgtttagagtttcgtcgttgtttcggtgttttttagtagtcgcgtcgttgagcggggaagtagttcgttagtattttcgttttattcgtagcgttcgttaggttcgggttcgcggcgttcgggacggagtcggcgggttcgggcgcgtgcgagggtcgcgggcgcgtaagggtgcgcgcgagggtgcgagtcggcgtgggggatatcgcggcgaggggagcgggcgggcgcgcgcgcggcgggcgggggtcgcgggtcggaggtaggtttagttttttgttcgttttttcgttttttttttgtgttcgtggtcgttgttatcgcgttataaagatttcggttcgttcggtgaggggcgcgtgacggagtcgtcggcgggaggggtggttgcgatttcgtttcgcgtatatttttagttttcgcgtcgatagtttcgttttcggtcgcggtcggcgtcgtttttaggggagttattgtttttgcgatagggtaggggcgcgggggtcggggttggggttatttttcggcggt

SEQ ID NO: 40308 - DNA, 1236 bp, Artificial Sequence
  chemically treated genomic DNA (Homo sapiens) CpG-island No: 40308
accgccgaaaaataaccccaaccccgacccccgcgcccctaccctatcgcaaaaacaataactcccctaaaaacgacgccgaccgcgaccgaaaacgaaactatcgacgcgaaaactaaaaatatacgcgaaacgaaatcgcaaccacccctcccgccgacgactccgtcacgcgcccctcaccgaacgaaccgaaatctttataacgcgataacaacgaccacgaacacaaaaaaaaaacgaaaaaacgaacaaaaaactaaacctacctccgacccgcgacccccgcccgccgcgcgcgcgcccgcccgctcccctcgccgcgatatcccccacgccgactcgcaccctcgcgcgcacccttacgcgcccgcgaccctcgcacgcgcccgaacccgccgactccgtcccgaacgccgcgaacccgaacctaacgaacgctacgaataaaacgaaaatactaacgaactacttccccgctcaacgacgcgactactaaaaaacaccgaaacaacgacgaaactctaaacgcgcgactaaatacccccgacctacgactccctacgcttcccgccgtccaaaaacaccaatcataaacgccgcaaccgctaaaacgccgctccgactacctaccgcgcctccgctcgccttctactactacacgtcgatacttctactcttcgccttctctctacccgaaaaccgcgcgtccaaccaacccccgaataataacgacgacaacgacgaaaactatcccgacgacaaaaacaaaaacatcaactactcaaataaaaccgatcgaaaccgaccctaaatcttcccacccctccgttaccgcctccctcgtaatccctacgatcgaccgaactaaaaaaaaccccgtcgtaaaaatcccaaaaataaacccgaaaataaacgaaaacgaaaaacaaaacgcgaacgtacgatataactttaaaaccgacgctaaaaataaaaataaccgtaaatacgtccgaatatatcgaataactaaacgaaaacgacccgacgtataaaaaaacgataaaaccgaaaccgaaaccgacgaaactaaacgaccgaccgaaactcccgatataatcgtaaatatactcgcgaaaacgtatatttatattataaaaactaaaaaaaaaaaaaacgaccccaaacaaaaatctatatatatatatacaaaatacgataaataaaaaacgacgaaaaaactaaacgaaataa

SEQ ID NO: 40309 - DNA, 566 bp, Artificial Sequence
  chemically treated genomic DNA (Homo sapiens) CpG-island No: 40309
tttttttttatttttattttttttttttatttttttttcgttcgttatcgtacgtgtattcggttttatttttatcgtttcgttatattatttgagtttttttttttcgattcgtatttttttttttttcgatcgtttttttattttcgttttatcgtttttcgattcgttcgtttttttattttcgtcgtttttgtttcgttttcgtcgttaatatttttttttttcgttttttattcgttttttttttttatttttttttttatgtatcgttttttttttttttattgttttatcggtcgtttttttattttgttttcgtcgcgttttttttttcgtttttttttatcgcgtcgttcgtttttcgtcgatcgtatatttcgcgatttttttttagtcgtttgtttattcgtttttaattttaattcggattttacgagtttttttattatcggtattttttttttttttttattatattttttcgtaaaaatttttttcgtttgttttcgaataattttttttttatcgcgtttttcgtcgttcgatttattcggatttttttt

SEQ ID NO: 40310 - DNA, 566 bp, Artificial Sequence
  chemically treated genomic DNA (Homo sapiens) CpG-island No: 40310
aaaaaaaatccgaataaatcgaacgacgaaaaacgcgataaaaaaaaaattattcgaaaacaaacgaaaaaaatttttacgaaaaaatataataaaaaaaaaaaaaaaataccgataataaaaaaactcgtaaaatccgaattaaaattaaaaacgaataaacaaacgactaaaaaaaaatcgcgaaatatacgatcgacgaaaaacgaacgacgcgataaaaaaaaacgaaaaaaaaaacgcgacgaaaacaaaataaaaaaacgaccgataaaacaataaaaaaaaaaaaaacgatacataaaaaaaaaaataaaaaaaaaaaacgaataaaaaacgaaaaaaaaaaatattaacgacgaaaacgaaacaaaaacgacgaaaataaaaaaacgaacgaatcgaaaaacgataaaacgaaaataaaaaaacgatcgaaaaaaaaaaaaatacgaatcgaaaaaaaaaaactcaaataatataacgaaacgataaaaataaaaccgaatacacgtacgataacgaacgaaaaaaaaataaaaaaaaaaaataaaaataaaaaaaaa

SEQ ID NO: 40311 - DNA, 566 bp, Artificial Sequence
  chemically treated genomic DNA (Homo sapiens) CpG-island No: 40311
agggagagttcgggtggatcgaacgacgagggacgcggtgggaaaaagattgttcgggagtagacgggggaggtttttgcggggaaatatagtgaaggggggaaaggggtatcggtgatgagggggttcgtagggttcgggttgaagttaggggcgggtaaataaacggttagaggggggtcgcggaatgtgcggtcggcggggggcggacgacgcgataagggggggcgagagggggaacgcggcgggaatagggtggggagacggtcggtgaaatagtaggaagagggagaacggtgtatgagagagggggtggggaaaaaaggcgggtgaagggcggagggaaggagtgttgacgacgagggcggagtaggggcggcggggataggagagcgagcgagtcggggaacgatgaagcgggggtgggagggcggtcgaggggggagagggtgcggatcgggggagaagagtttaagtggtgtagcgggacggtgaaggtgaggtcgagtatacgtacggtagcgagcgagggaaaggtggggggggaagatgggggtggaaaggga

SEQ ID NO: 40312 - DNA, 566 bp, Artificial Sequence
  chemically treated genomic DNA (Homo sapiens) CpG-island No: 40312
tccctttccacccccatcttccccccccacctttccctcgctcgctaccgtacgtatactcgacctcaccttcaccgtcccgctacaccacttaaactcttctcccccgatccgcaccctctcccccctcgaccgccctcccacccccgcttcatcgttccccgactcgctcgctctcctatccccgccgcccctactccgccctcgtcgtcaacactccttccctccgcccttcacccgccttttttccccaccccctctctcatacaccgttctccctcttcctactatttcaccgaccgtctccccaccctattcccgccgcgttccccctctcgcccccccttatcgcgtcgtccgccccccgccgaccgcacattccgcgacccccctctaaccgtttatttacccgcccctaacttcaacccgaaccctacgaaccccctcatcaccgatacccctttccccccttcactatatttccccgcaaaaacctcccccgtctactcccgaacaatctttttcccaccgcgtccctcgtcgttcgatccacccgaactctccct

SEQ ID NO: 40313 - DNA, 987 bp, Artificial Sequence
  chemically treated genomic DNA (Homo sapiens) CpG-island No: 40313
ttgtcgtttacgttgggtttcggtttttttaattgcgcgtttatatcgtgacgtcgatttcgttattaggggtgtcgtgaatgaggcgagtattataaggcggggtttcggttttattaggcggggcgggtagtattacggcgtttttcgggggcgggggagatgaggcggagtcggggttttttcgttgcggcgttattggtcgcgttcgtcgttattcggtagtagttgcggaggttagtttcgtttattttttttttttttcggagcgggcggcggcgttggcggtttgtgtagtaatggtgagagttgcggaatcgggcgttattcgagcgttgtgaggcgcgggggttggggaaggcggtgcgggttgagttcgcggattttatttgttatttaggtttgtggggcgtcgcgtagaatggtttggcgttattataattcgttttttcgtttggcgtcgggagaggcgcgcggttcgggtttgggttattttgtttaaggtacggtcggcgagggagattgttttgagttttggttggggtttcggcgtattcgtagtcgatggcgagtcgcgcgtttttgggggttggttacgtaggtgaaggggatatggtttcgcggtttggttgaggtatatttttttttgcgcgtaggttaagattaaggttcgagattttcgcgggaagaagaaggaggagttgttgaaatagttggacgatttgaaggtggagttgttttagttgcgcgtcgttaaagtgataggcggtgcggtttttaagttttttaagatgtaagtgaggcggtcggattatagttttcgtgggtggggagtacgtgtgtatcgggatcgtcggaggattttaaagttggtttaaggagttggtcgtttagatgtttatttcgtgtattttggcgcgtatgggagattcgttgtgtgtttagttttttatttgttttgattttgcggtttttgtgtttggaatg

SEQ ID NO: 40314 - DNA, 987 bp, Artificial Sequence
  chemically treated genomic DNA (Homo sapiens) CpG-island No: 40314
cattccaaacacaaaaaccgcaaaatcaaaacaaataaaaaactaaacacacaacgaatctcccatacgcgccaaaatacacgaaataaacatctaaacgaccaactccttaaaccaactttaaaatcctccgacgatcccgatacacacgtactccccacccacgaaaactataatccgaccgcctcacttacatcttaaaaaacttaaaaaccgcaccgcctatcactttaacgacgcgcaactaaaacaactccaccttcaaatcgtccaactatttcaacaactcctccttcttcttcccgcgaaaatctcgaaccttaatcttaacctacgcgcaaaaaaaaatatacctcaaccaaaccgcgaaaccatatccccttcacctacgtaaccaacccccaaaaacgcgcgactcgccatcgactacgaatacgccgaaaccccaaccaaaactcaaaacaatctccctcgccgaccgtaccttaaacaaaataacccaaacccgaaccgcgcgcctctcccgacgccaaacgaaaaaacgaattataataacgccaaaccattctacgcgacgccccacaaacctaaataacaaataaaatccgcgaactcaacccgcaccgccttccccaacccccgcgcctcacaacgctcgaataacgcccgattccgcaactctcaccattactacacaaaccgccaacgccgccgcccgctccgaaaaaaaaaaaaaataaacgaaactaacctccgcaactactaccgaataacgacgaacgcgaccaataacgccgcaacgaaaaaaccccgactccgcctcatctcccccgcccccgaaaaacgccgtaatactacccgccccgcctaataaaaccgaaaccccgccttataatactcgcctcattcacgacacccctaataacgaaatcgacgtcacgatataaacgcgcaattaaaaaaaccgaaacccaacgtaaacgacaa

SEQ ID NO: 40315 - DNA, 987 bp, Artificial Sequence
  chemically treated genomic DNA (Homo sapiens) CpG-island No: 40315
tattttaggtataaggatcgtaaggttaaggtaggtaagaggttaagtatataacgggttttttatgcgcgttaggatgtacggagtgggtatttaagcggttagttttttaagttaattttgaaatttttcgacgatttcgatgtatacgtgttttttatttacgagggttgtgattcggtcgttttatttatattttagagagtttggaggtcgtatcgtttgttattttggcgacgcgtagttgggatagttttatttttaggtcgtttagttgttttagtagtttttttttttttttttcgcgaagatttcgagttttgattttggtttgcgcgtaagagagagtgtgttttagttaggtcgcggggttatattttttttatttgcgtggttagtttttaaaggcgcgcgattcgttatcgattacgagtgcgtcggagttttaattagggtttaggatagtttttttcgtcggtcgtgttttgggtagagtaatttaggttcgggtcgcgcgtttttttcggcgttaagcgaagaggcgggttgtggtggcgttagattattttgcgcggcgttttataggtttaggtggtagatagaattcgcgggtttagttcgtatcgttttttttaattttcgcgttttatagcgttcggatggcgttcgatttcgtagtttttattattgttgtataagtcgttaacgtcgtcgttcgtttcgagggaaagaggaagtaggcggggttgattttcgtaattattgtcgggtggcggcgggcgcggttaatggcgtcgtagcgggggagtttcggtttcgttttatttttttcgttttcgaggaacgtcgtggtattgttcgtttcgtttggtagggtcggagtttcgttttgtagtgttcgttttatttacggtatttttgatagcgaggtcggcgttacggtgtaggcgcgtagttggggaaatcgaggtttaacgtgggcggtag

SEQ ID NO: 40316 - DNA, 987 bp, Artificial Sequence
  chemically treated genomic DNA (Homo sapiens) CpG-island No: 40316
ctaccgcccacgttaaacctcgatttccccaactacgcgcctacaccgtaacgccgacctcgctatcaaaaataccgtaaataaaacgaacactacaaaacgaaactccgaccctaccaaacgaaacgaacaataccacgacgttcctcgaaaacgaaaaaaataaaacgaaaccgaaactcccccgctacgacgccattaaccgcgcccgccgccacccgacaataattacgaaaatcaaccccgcctacttcctctttccctcgaaacgaacgacgacgttaacgacttatacaacaataataaaaactacgaaatcgaacgccatccgaacgctataaaacgcgaaaattaaaaaaaacgatacgaactaaacccgcgaattctatctaccacctaaacctataaaacgccgcgcaaaataatctaacgccaccacaacccgcctcttcgcttaacgccgaaaaaaacgcgcgacccgaacctaaattactctacccaaaacacgaccgacgaaaaaaactatcctaaaccctaattaaaactccgacgcactcgtaatcgataacgaatcgcgcgcctttaaaaactaaccacgcaaataaaaaaaatataaccccgcgacctaactaaaacacactctctcttacgcgcaaaccaaaatcaaaactcgaaatcttcgcgaaaaaaaaaaaaaaaaactactaaaacaactaaacgacctaaaaataaaactatcccaactacgcgtcgccaaaataacaaacgatacgacctccaaactctctaaaatataaataaaacgaccgaatcacaaccctcgtaaataaaaaacacgtatacatcgaaatcgtcgaaaaatttcaaaattaacttaaaaaactaaccgcttaaatacccactccgtacatcctaacgcgcataaaaaacccgttatatacttaacctcttacctaccttaaccttacgatccttatacctaaaata

SEQ ID NO: 40317 - DNA, 766 bp, Artificial Sequence
  chemically treated genomic DNA (Homo sapiens) CpG-island No: 40317
ttttcggcgtcgttttttcgttttcggagtcgcggttgaggagtttcgcgtttattggcggtcgcggttcggcgttttcgttttttttacgttttcgtttttttcgtcgtcgtcgtcgtttttcggtttcgtttttttttttttcgggagtcgttttcgtcgtcgttatcgttgttgtcggtcggggtttagttagcgtttgtcgcgtcggagtcgagtcgtagtcggagtcgttgttcgcggtttcgttatgagcggaagcgcggtcgtcgcggtcgttgtcgtcgtcgttttagtagtcgtcgtcgtcgcgtatttttagttttagtcgtcgttttttaggtcgggtttcgtcgagtttgggttttcgcgtcgttcgcgttttttatcgtcgtcgtttcggtcggagttcgtcgttacggatcgttttagtttttcgggttacgggttttttcgggcgggagtttagggtggcggcgtttgcggtcgagcgtcgggagtaggtacggggtttcggagcgggttaggtagggaggggcgtgggtcggtttcgcgggtgggggtcggaggcgtgtggtttaggcgttcggtttcgtcgacggggaggagcgttgttcgggttagttttgttcggtttcggagtttttgcgagttttgcgttttagtcgcgtcgagcgtttataaagcgtttttttattcggtgggtagtttttttttttagggtgtgtagggtaggatttttttaggtttttgttcggcggaggag

SEQ ID NO: 40318 - DNA, 766 bp, Artificial Sequence
  chemically treated genomic DNA (Homo sapiens) CpG-island No: 40318
ctcctccgccgaacaaaaacctaaaaaaatcctaccctacacaccctaaaaaaaaaaactacccaccgaataaaaaaacgctttataaacgctcgacgcgactaaaacgcaaaactcgcaaaaactccgaaaccgaacaaaactaacccgaacaacgctcctccccgtcgacgaaaccgaacgcctaaaccacacgcctccgacccccacccgcgaaaccgacccacgcccctccctacctaacccgctccgaaaccccgtacctactcccgacgctcgaccgcaaacgccgccaccctaaactcccgcccgaaaaaacccgtaacccgaaaaactaaaacgatccgtaacgacgaactccgaccgaaacgacgacgataaaaaacgcgaacgacgcgaaaacccaaactcgacgaaacccgacctaaaaaacgacgactaaaactaaaaatacgcgacgacgacgactactaaaacgacgacgacaacgaccgcgacgaccgcgcttccgctcataacgaaaccgcgaacaacgactccgactacgactcgactccgacgcgacaaacgctaactaaaccccgaccgacaacaacgataacgacgacgaaaacgactcccgaaaaaaaaaaaaacgaaaccgaaaaacgacgacgacgacgaaaaaaacgaaaacgtaaaaaaaacgaaaacgccgaaccgcgaccgccaataaacgcgaaactcctcaaccgcgactccgaaaacgaaaaaacgacgccgaaaa

SEQ ID NO: 40319 - DNA, 766 bp, Artificial Sequence
  chemically treated genomic DNA (Homo sapiens) CpG-island No: 40319
ttttttcgtcgagtagagatttagagaggttttgttttgtatattttgggggagggggttatttatcgggtgggaaaacgttttgtgagcgttcggcgcggttgaggcgtagggttcgtaggggtttcggggtcggataaagttgattcggataacgttttttttcgtcggcggggtcgggcgtttggattatacgttttcggtttttattcgcgggatcgatttacgtttttttttgtttggttcgtttcgggatttcgtatttgttttcggcgttcggtcgtaggcgtcgttattttgggttttcgttcggagaggttcgtggttcggagggttgaggcggttcgtggcggcgggtttcggtcggggcggcggcggtggggggcgcgggcggcgcgggggtttaagttcggcggggttcggtttgggagacgacgattgaggttgaaagtgcgcggcggcggcggttgttgaggcggcggcggtagcgatcgcggcggtcgcgttttcgtttatggcggggtcgcgagtagcggtttcggttgcgattcgatttcggcgcggtaggcgttggttgggtttcggtcggtagtagcggtggcggcgacggaggcggttttcgaagggggaggaggcggagtcgggaagcggcggcggcggcggagggggcggggacgtggagggggcggggacgtcgagtcgcggtcgttaatgggcgcggggttttttagtcgcggtttcgggggcgggagggcggcgtcgaggg

SEQ ID NO: 40320 - DNA, 766 bp, Artificial Sequence
  chemically treated genomic DNA (Homo sapiens) CpG-island No: 40320
ccctcgacgccgccctcccgcccccgaaaccgcgactaaaaaaccccgcgcccattaacgaccgcgactcgacgtccccgccccctccacgtccccgccccctccgccgccgccgccgcttcccgactccgcctcctcccccttcgaaaaccgcctccgtcgccgccaccgctactaccgaccgaaacccaaccaacgcctaccgcgccgaaatcgaatcgcaaccgaaaccgctactcgcgaccccgccataaacgaaaacgcgaccgccgcgatcgctaccgccgccgcctcaacaaccgccgccgccgcgcactttcaacctcaatcgtcgtctcccaaaccgaaccccgccgaacttaaacccccgcgccgcccgcgccccccaccgccgccgccccgaccgaaacccgccgccacgaaccgcctcaaccctccgaaccacgaacctctccgaacgaaaacccaaaataacgacgcctacgaccgaacgccgaaaacaaatacgaaatcccgaaacgaaccaaacaaaaaaaaacgtaaatcgatcccgcgaataaaaaccgaaaacgtataatccaaacgcccgaccccgccgacgaaaaaaaacgttatccgaatcaactttatccgaccccgaaacccctacgaaccctacgcctcaaccgcgccgaacgctcacaaaacgttttcccacccgataaataaccccctcccccaaaatatacaaaacaaaacctctctaaatctctactcgacgaaaaaa

SEQ ID NO: 40321 - DNA, 514 bp, Artificial Sequence
  chemically treated genomic DNA (Homo sapiens) CpG-island No: 40321
gtttttaggggattcggagtataagaatttaaatcgagatttttagttttagttttcgttttcgttcgtttttttttatatttaatcgttgggattagaagttttcggtagtttttttagtaagaggtatcgagtttgggcgtgatcgagttagtttcgtcgaggttttaggttataaatttatacgcgtttttttatttttttcgggttcgggtgtggtcgcggatcgttaatggcgcggagtttatttcgtaaagcgtttgtattatttttattagaatttattgtttcgtggcggtcgttatagttagtcgttttttttcggaaggcgggttataagcgcgttttaaaagtgcgcgtcgttgtttagtgtcgttattattttcgtagagggcggggcggcggagcgttgggtatcgtttattcgtatttgcgtattggttgataggaggttggacggggttaggtgggatgtcgtagtttttttaagaattgtttattttgtgttttatta

SEQ ID NO: 40322 - DNA, 514 bp, Artificial Sequence
  chemically treated genomic DNA (Homo sapiens) CpG-island No: 40322
taataaaacacaaaataaacaattcttaaaaaaactacgacatcccacctaaccccgtccaacctcctatcaaccaatacgcaaatacgaataaacgatacccaacgctccgccgccccgccctctacgaaaataataacgacactaaacaacgacgcgcacttttaaaacgcgcttataacccgccttccgaaaaaaaacgactaactataacgaccgccacgaaacaataaattctaataaaaataatacaaacgctttacgaaataaactccgcgccattaacgatccgcgaccacacccgaacccgaaaaaaataaaaaaacgcgtataaatttataacctaaaacctcgacgaaactaactcgatcacgcccaaactcgatacctcttactaaaaaaactaccgaaaacttctaatcccaacgattaaatataaaaaaaaacgaacgaaaacgaaaactaaaactaaaaatctcgatttaaattcttatactccgaatcccctaaaaac

SEQ ID NO: 40323 - DNA, 514 bp, Artificial Sequence
  chemically treated genomic DNA (Homo sapiens) CpG-island No: 40323
taataggatataaggtaaataatttttggaaaaattgcggtattttatttgatttcgtttagttttttgttaattagtgcgtaagtgcgagtaggcggtgtttagcgtttcgtcgtttcgttttttgcggaggtgataacgatattgagtagcgacgcgtatttttgggacgcgtttgtgattcgtttttcggaaggaagcggttaattatggcgatcgttacggagtagtgggttttggtggagatggtataggcgttttacgaggtgggtttcgcgttattagcggttcgcgattatattcgggttcggggagggtgggaggacgcgtgtggatttgtggtttgagatttcggcgggattggttcggttacgtttagattcggtgttttttgttggaaggattgtcgggagtttttagttttagcggttgagtgtagggaggaacgggcgggggcgggggttgggattgagggtttcggtttgaatttttatgtttcgggttttttggaagt

SEQ ID NO: 40324 - DNA, 514 bp, Artificial Sequence
  chemically treated genomic DNA (Homo sapiens) CpG-island No: 40324
acttccaaaaaacccgaaacataaaaattcaaaccgaaaccctcaatcccaacccccgcccccgcccgttcctccctacactcaaccgctaaaactaaaaactcccgacaatccttccaacaaaaaacaccgaatctaaacgtaaccgaaccaatcccgccgaaatctcaaaccacaaatccacacgcgtcctcccaccctccccgaacccgaatataatcgcgaaccgctaataacgcgaaacccacctcgtaaaacgcctataccatctccaccaaaacccactactccgtaacgatcgccataattaaccgcttccttccgaaaaacgaatcacaaacgcgtcccaaaaatacgcgtcgctactcaatatcgttatcacctccgcaaaaaacgaaacgacgaaacgctaaacaccgcctactcgcacttacgcactaattaacaaaaaactaaacgaaatcaaataaaataccgcaatttttccaaaaattatttaccttatatcctatta

SEQ ID NO: 40325 - DNA, 524 bp, Artificial Sequence
  chemically treated genomic DNA (Homo sapiens) CpG-island No: 40325
agtttgcgtttcgcggttcgcgtttttttcgttttcgttttagtattggagtagggtttaggttttttttcgttaggtggttttaaggtattaagcgggggcgggattttcgaggcgcgggaaaggcggaagcgttcggtagggaaggtgcgtgaaggcgggggattcgattttttttcggggtttttttttcgagggtcgaggttgcgagcgtttattaggtattcggcgtttaggtagtgtatcgtgcgttcgtcggcgggggtcggtgattgggagtcgtcgtcgttttttgtacgcggagacgtagcgttcgcgagtcggggtcggggtcggggttggggttggggttggggttggagtcggggtcgggtcggggaggggcgggtacggtgtagcgtcgtttttcgttcgtttttgcgtttggttcggcgattgcgggcgttgcggtttattgggttcgttttttttcggtatgggtttttgtttagtttattcgttgttagttggggttttgttttggt

SEQ ID NO: 40326 - DNA, 524 bp, Artificial Sequence
  chemically treated genomic DNA (Homo sapiens) CpG-island No: 40326
accaaaacaaaaccccaactaacaacgaataaactaaacaaaaacccataccgaaaaaaaacgaacccaataaaccgcaacgcccgcaatcgccgaaccaaacgcaaaaacgaacgaaaaacgacgctacaccgtacccgcccctccccgacccgaccccgactccaaccccaaccccaaccccaaccccgaccccgaccccgactcgcgaacgctacgtctccgcgtacaaaaaacgacgacgactcccaatcaccgacccccgccgacgaacgcacgatacactacctaaacgccgaatacctaataaacgctcgcaacctcgaccctcgaaaaaaaaaccccgaaaaaaaatcgaatcccccgccttcacgcaccttccctaccgaacgcttccgcctttcccgcgcctcgaaaatcccgcccccgcttaataccttaaaaccacctaacgaaaaaaaacctaaaccctactccaatactaaaacgaaaacgaaaaaaacgcgaaccgcgaaacgcaaact

SEQ ID NO: 40327 - DNA, 524 bp, Artificial Sequence
  chemically treated genomic DNA (Homo sapiens) CpG-island No: 40327
attagagtaggattttagttgatagcgggtgagttgggtagaaatttatgtcgggaagaggcggatttagtggatcgtagcgttcgtagtcgtcgggttaggcgtagaggcgaacgggaggcggcgttgtatcgtgttcgttttttttcggttcggtttcggttttagttttagttttagttttagtttcggtttcggtttcggttcgcgggcgttgcgttttcgcgtataggaggcggcggcggtttttagttatcggttttcgtcggcgagcgtacgatgtattgtttgggcgtcgagtatttggtaagcgttcgtagtttcggttttcgggggaggagtttcggggaagggtcgagtttttcgtttttacgtattttttttgtcggacgttttcgtttttttcgcgtttcggggatttcgttttcgtttagtattttggggttatttggcggggaggaatttggattttgttttagtgttggggcggaggcgggggagacgcgggtcgcggggcgtaaatt

SEQ ID NO: 40328 - DNA, 524 bp, Artificial Sequence
  chemically treated genomic DNA (Homo sapiens) CpG-island No: 40328
aatttacgccccgcgacccgcgtctcccccgcctccgccccaacactaaaacaaaatccaaattcctccccgccaaataaccccaaaatactaaacgaaaacgaaatccccgaaacgcgaaaaaaacgaaaacgtccgacaaaaaaaatacgtaaaaacgaaaaactcgacccttccccgaaactcctcccccgaaaaccgaaactacgaacgcttaccaaatactcgacgcccaaacaatacatcgtacgctcgccgacgaaaaccgataactaaaaaccgccgccgcctcctatacgcgaaaacgcaacgcccgcgaaccgaaaccgaaaccgaaactaaaactaaaactaaaactaaaaccgaaaccgaaccgaaaaaaaacgaacacgatacaacgccgcctcccgttcgcctctacgcctaacccgacgactacgaacgctacgatccactaaatccgcctcttcccgacataaatttctacccaactcacccgctatcaactaaaatcctactctaat

SEQ ID NO: 40329 - DNA, 642 bp, Artificial Sequence
  chemically treated genomic DNA (Homo sapiens) CpG-island No: 40329
tttcgttttttttttttttttttttttttttttttttttttattttgatttgggagatttttattcgcggtgcgaagtttcggattcgttgggaatcggatagttttcggtatttttggtcgtatgtttgtaagaggtgggtttcgggaaatatattcgttgattttgtaataagcggatttagtttcgattggaatcgtttttcgtatttttttttatatttatattgtttaaagttcgcggggcgggtttaatttacgtttacggtatttatgtggtcgtacgtggtacgttttatatttatagcgatcgttttcgtatggattgtttttttttcgtttttttttatcgtattatgtcggggcggaagtttattttttagggaacgtagcgagttgatagtttaattgggtcgcgaggcggtagagggcgagtgcggcgcgtagggtttattttatatttataggcgtgttagcgagatcggtgtaatttgatacgttttttattatttttttcgttattttagatataagttttcgttttcgcgaggcgtgtattgattttcggcgtttagcggttcgtcgcgtaaacgggagttatcggtttcgtgttacgggggcgttttttttcgtttcgtaagtt

SEQ ID NO: 40330 - DNA, 642 bp, Artificial Sequence
  chemically treated genomic DNA (Homo sapiens) CpG-island No: 40330
aacttacgaaacgaaaaaaaacgcccccgtaacacgaaaccgataactcccgtttacgcgacgaaccgctaaacgccgaaaatcaatacacgcctcgcgaaaacgaaaacttatatctaaaataacgaaaaaaataataaaaaacgtatcaaattacaccgatctcgctaacacgcctataaatataaaataaaccctacgcgccgcactcgccctctaccgcctcgcgacccaattaaactatcaactcgctacgttccctaaaaaataaacttccgccccgacataatacgataaaaaaaaacgaaaaaaaaacaatccatacgaaaacgatcgctataaatataaaacgtaccacgtacgaccacataaataccgtaaacgtaaattaaacccgccccgcgaactttaaacaatataaatataaaaaaaaatacgaaaaacgattccaatcgaaactaaatccgcttattacaaaatcaacgaatatatttcccgaaacccacctcttacaaacatacgaccaaaaataccgaaaactatccgattcccaacgaatccgaaacttcgcaccgcgaataaaaatctcccaaatcaaaataaaaaaaaaaaaaaaaaaaaaaaaaaaaaaaaaaaacgaaa

SEQ ID NO: 40331 - DNA, 642 bp, Artificial Sequence
  chemically treated genomic DNA (Homo sapiens) CpG-island No: 40331
gatttgcgaggcgggggaggacgttttcgtgatacggggtcgatgattttcgtttacgcgacgagtcgttgagcgtcgagaattaatgtacgtttcgcggagacggaggtttatgtttgagatgacgagaggggtggtggaagacgtgttagattgtatcggtttcgttggtacgtttataagtgtgaagtgggttttgcgcgtcgtattcgttttttatcgtttcgcggtttaattggattgttagttcgttgcgttttttggaaaatgggttttcgtttcggtataatacgatggggaagaacgagagagaagtagtttatgcgggggcggtcgttgtaggtgtggagcgtgttacgtgcgattatataagtatcgtgggcgtgggttgaattcgtttcgcgggttttggataatgtgggtgtagggggaggtgcgaaaaacggttttagtcggagttaggttcgtttgttgtagggttagcgagtgtgtttttcggggtttattttttataagtatgcggttaagggtgtcggagattattcggtttttagcggattcgaggtttcgtatcgcgagtaggaattttttaggttaaaataggagagagagagaaagagagagagagagaaggaggcgggg

SEQ ID NO: 40332 - DNA, 642 bp, Artificial Sequence
  chemically treated genomic DNA (Homo sapiens) CpG-island No: 40332
ccccgcctccttctctctctctctctttctctctctctcctattttaacctaaaaaattcctactcgcgatacgaaacctcgaatccgctaaaaaccgaataatctccgacacccttaaccgcatacttataaaaaataaaccccgaaaaacacactcgctaaccctacaacaaacgaacctaactccgactaaaaccgtttttcgcacctccccctacacccacattatccaaaacccgcgaaacgaattcaacccacgcccacgatacttatataatcgcacgtaacacgctccacacctacaacgaccgcccccgcataaactacttctctctcgttcttccccatcgtattataccgaaacgaaaacccattttccaaaaaacgcaacgaactaacaatccaattaaaccgcgaaacgataaaaaacgaatacgacgcgcaaaacccacttcacacttataaacgtaccaacgaaaccgatacaatctaacacgtcttccaccacccctctcgtcatctcaaacataaacctccgtctccgcgaaacgtacattaattctcgacgctcaacgactcgtcgcgtaaacgaaaatcatcgaccccgtatcacgaaaacgtcctcccccgcctcgcaaatc

SEQ ID NO: 40333 - DNA, 926 bp, Artificial Sequence
  chemically treated genomic DNA (Homo sapiens) CpG-island No: 40333
gagagagggttgagttttgtgcgttttcgttcgttgcgcgcgtcgttttaggtttcgtcgcgtttcgtttgcgttcgggattgcgtcgtagtatttattgtttcgtttatttgtttttggagtaggcgggtcgcgttagaagcgggcgatttcgtagtgttttgtagtcgcggacgtcgtttggttaggatgatattacgttgagcgcgtttgtaaataataataataataagcgtcgtcgcggttatcgcgttttgttttttcgaagcgtcgtcgtcgtcggtggagtcgttttcgcgtttttggtcgttcggagcgttcggtcgttggtgtatgtcgcgtttgttcgggacgggttgaagtcggcggcggggtcggatcgtaggcgtcgagtagggcgagggcggttagggtagtcgtttgtcgttaagtttcgagcgtcgttgttcgaggaaacgttttcggtcgggagttgcggtcgtcgttagtagtttttatgtttgggatttaggagaatatttcgcgcggggggacgattatgaaggaggagtcgttgggtagcggtatgaattcggtgcgttcgtggatgtatacggcgggcgtggtggacgttaatacggtcgtttagaggtacgtatcggtcgttttcgcgcgttttggtttcggtttcggttcggttcggtttttttcgtcggtcggcgtcgcgttttttatcgggtcgttgttttttttttttcgtagcggcgtggggttggcgcgggcgtatttcgagaagtagtcgttttttaattttcggaaatttaattttttttatttcgtgttggcgttttacgataggtaggggtagtcggtggagattgaaaggatcgtttttgtggattttgtggagaaagagaaagtaagtgtaaatatacgattatattttt

SEQ ID NO: 40334 - DNA, 926 bp, Artificial Sequence
  chemically treated genomic DNA (Homo sapiens) CpG-island No: 40334
aaaaatataatcgtatatttacacttactttctctttctccacaaaatccacaaaaacgatcctttcaatctccaccgactacccctacctatcgtaaaacgccaacacgaaataaaaaaaattaaatttccgaaaattaaaaaacgactacttctcgaaatacgcccgcgccaaccccacgccgctacgaaaaaaaaaaaacaacgacccgataaaaaacgcgacgccgaccgacgaaaaaaaccgaaccgaaccgaaaccgaaaccaaaacgcgcgaaaacgaccgatacgtacctctaaacgaccgtattaacgtccaccacgcccgccgtatacatccacgaacgcaccgaattcataccgctacccaacgactcctccttcataatcgtccccccgcgcgaaatattctcctaaatcccaaacataaaaactactaacgacgaccgcaactcccgaccgaaaacgtttcctcgaacaacgacgctcgaaacttaacgacaaacgactaccctaaccgccctcgccctactcgacgcctacgatccgaccccgccgccgacttcaacccgtcccgaacaaacgcgacatacaccaacgaccgaacgctccgaacgaccaaaaacgcgaaaacgactccaccgacgacgacgacgcttcgaaaaaacaaaacgcgataaccgcgacgacgcttattattattattatttacaaacgcgctcaacgtaatatcatcctaaccaaacgacgtccgcgactacaaaacactacgaaatcgcccgcttctaacgcgacccgcctactccaaaaacaaataaacgaaacaataaatactacgacgcaatcccgaacgcaaacgaaacgcgacgaaacctaaaacgacgcgcgcaacgaacgaaaacgcacaaaactcaaccctctctc

SEQ ID NO: 40335 - DNA, 926 bp, Artificial Sequence
  chemically treated genomic DNA (Homo sapiens) CpG-island No: 40335
gagggtgtgatcgtgtgtttgtatttattttttttttttttataaagtttataaaagcggtttttttaatttttatcggttgtttttgtttatcgtagagcgttagtacgaagtggaagaaattggattttcggaggttggaaggcggttgtttttcgaagtgcgttcgcgttagttttacgtcgttgcgggaggaaagagatagcggttcggtgaggagcgcggcgtcggtcggcggagggggtcgggtcgggtcggggtcggggttagggcgcgcgggggcggtcggtacgtatttttgggcggtcgtgttggcgtttattacgttcgtcgtgtgtatttacgagcgtatcgggtttatgtcgttgtttagcggttttttttttatggtcgttttttcgcgcggaatatttttttgaattttaaatatgaaaattgttggcggcggtcgtagttttcggtcgaaagcgttttttcgagtagcggcgttcggggtttggcggtaggcggttgttttggtcgttttcgttttgttcggcgtttgcggttcggtttcgtcgtcggttttagttcgtttcgggtaggcgcgatatatattagcggtcgggcgtttcggacggttaggggcgcggaggcggttttatcggcggcggcggcgtttcgaaggagtaggacgcggtggtcgcggcggcgtttgttgttgttgttgtttgtaggcgcgtttaacgtggtgttattttagttaggcggcgttcgcggttgtaggatattgcgggatcgttcgtttttggcgcggttcgtttgttttaaagataaataaacggggtagtgagtgttgcggcgtagtttcgggcgtaggcggggcgcggcggggtttggagcggcgcgcgtagcggacggaggcgtataaaatttagttttttttt

SEQ ID NO: 40336 - DNA, 926 bp, Artificial Sequence
  chemically treated genomic DNA (Homo sapiens) CpG-island No: 40336
aaaaaaaaactaaattttatacgcctccgtccgctacgcgcgccgctccaaaccccgccgcgccccgcctacgcccgaaactacgccgcaacactcactaccccgtttatttatctttaaaacaaacgaaccgcgccaaaaacgaacgatcccgcaatatcctacaaccgcgaacgccgcctaactaaaataacaccacgttaaacgcgcctacaaacaacaacaacaacaaacgccgccgcgaccaccgcgtcctactccttcgaaacgccgccgccgccgataaaaccgcctccgcgcccctaaccgtccgaaacgcccgaccgctaatatatatcgcgcctacccgaaacgaactaaaaccgacgacgaaaccgaaccgcaaacgccgaacaaaacgaaaacgaccaaaacaaccgcctaccgccaaaccccgaacgccgctactcgaaaaaacgctttcgaccgaaaactacgaccgccgccaacaattttcatatttaaaattcaaaaaaatattccgcgcgaaaaaacgaccataaaaaaaaaaccgctaaacaacgacataaacccgatacgctcgtaaatacacacgacgaacgtaataaacgccaacacgaccgcccaaaaatacgtaccgaccgcccccgcgcgccctaaccccgaccccgacccgacccgaccccctccgccgaccgacgccgcgctcctcaccgaaccgctatctctttcctcccgcaacgacgtaaaactaacgcgaacgcacttcgaaaaacaaccgccttccaacctccgaaaatccaatttcttccacttcgtactaacgctctacgataaacaaaaacaaccgataaaaattaaaaaaaccgcttttataaactttataaaaaaaaaaaaaataaatacaaacacacgatcacaccctc

SEQ ID NO: 40337 - DNA, 550 bp, Artificial Sequence
  chemically treated genomic DNA (Homo sapiens) CpG-island No: 40337
cggggtacggtggtaggcgggtcgttgggtcgtttacgggtatttttacgcgttttcgttcggttttagttcgtcgttcgcggtggaaggtagtgtggcgcgtgcgtattggcgtgttcgcggtcgggttcgtgggttttttcgggagggcgggaggtgggaacgtgggaaggcgcggggtcgtttatttttcggttcgtagtcggcgtcgtcgatatttcgcggtcggggcgttcgcgatgttcgtcgagtgagcggtataggtaagcgcgttttcgatttcgtcgggggtttttcgttttagttcgcggtttttaggcggtcgcggcgttagtaaagttgaatttcgcgcgtggcgggtcggatattgaacgttgggggtcgggttgtcggggtttcggagtcgggtgcgtttttttcgtttacgggagcgcgggcggggttgcggcggaggcgcggggtgggattgtggaggtaggagtttttgattatgagttgcgtttaggtttggtttcgtagtgaatttttgcgtcgcgttttggtagcgttt

SEQ ID NO: 40338 - DNA, 550 bp, Artificial Sequence
  chemically treated genomic DNA (Homo sapiens) CpG-island No: 40338
aaacgctaccaaaacgcgacgcaaaaattcactacgaaaccaaacctaaacgcaactcataatcaaaaactcctacctccacaatcccaccccgcgcctccgccgcaaccccgcccgcgctcccgtaaacgaaaaaaacgcacccgactccgaaaccccgacaacccgacccccaacgttcaatatccgacccgccacgcgcgaaattcaactttactaacgccgcgaccgcctaaaaaccgcgaactaaaacgaaaaacccccgacgaaatcgaaaacgcgcttacctataccgctcactcgacgaacatcgcgaacgccccgaccgcgaaatatcgacgacgccgactacgaaccgaaaaataaacgaccccgcgccttcccacgttcccacctcccgccctcccgaaaaaacccacgaacccgaccgcgaacacgccaatacgcacgcgccacactaccttccaccgcgaacgacgaactaaaaccgaacgaaaacgcgtaaaaatacccgtaaacgacccaacgacccgcctaccaccgtaccccg

SEQ ID NO: 40339 - DNA, 550 bp, Artificial Sequence
  chemically treated genomic DNA (Homo sapiens) CpG-island No: 40339
agacgttgttagggcgcggcgtaaaagtttattgcgaggttaggtttgggcgtagtttatggttaggggtttttgtttttatagttttatttcgcgttttcgtcgtagtttcgttcgcgttttcgtaggcgagaggagcgtattcggtttcggggtttcggtaattcggtttttagcgtttagtgttcggttcgttacgcgcgaagtttaattttgttggcgtcgcggtcgtttgggggtcgcgggttggggcggggagttttcgacgggatcgagagcgcgtttatttgtgtcgtttattcgacggatatcgcgggcgtttcggtcgcgaggtgtcggcggcgtcggttgcgggtcgggaggtgggcggtttcgcgtttttttacgtttttatttttcgttttttcgggagagtttacgggttcggtcgcgagtacgttagtgcgtacgcgttatattgttttttatcgcgggcggcgggttagggtcgagcgggggcgcgtggaggtgttcgtaggcggtttagcggttcgtttgttatcgtgtttcg

SEQ ID NO: 40340 - DNA, 550 bp, Artificial Sequence
  chemically treated genomic DNA (Homo sapiens) CpG-island No: 40340
cgaaacacgataacaaacgaaccgctaaaccgcctacgaacacctccacgcgcccccgctcgaccctaacccgccgcccgcgataaaaaacaatataacgcgtacgcactaacgtactcgcgaccgaacccgtaaactctcccgaaaaaacgaaaaataaaaacgtaaaaaaacgcgaaaccgcccacctcccgacccgcaaccgacgccgccgacacctcgcgaccgaaacgcccgcgatatccgtcgaataaacgacacaaataaacgcgctctcgatcccgtcgaaaactccccgccccaacccgcgacccccaaacgaccgcgacgccaacaaaattaaacttcgcgcgtaacgaaccgaacactaaacgctaaaaaccgaattaccgaaaccccgaaaccgaatacgctcctctcgcctacgaaaacgcgaacgaaactacgacgaaaacgcgaaataaaactataaaaacaaaaacccctaaccataaactacgcccaaacctaacctcgcaataaacttttacgccgcgccctaacaacgtct

SEQ ID NO: 40341 - DNA, 533 bp, Artificial Sequence
  chemically treated genomic DNA (Homo sapiens) CpG-island No: 40341
cgtagacgttttttgggcgggtcgcgtttttgggcgcggagtttcggttataggagttgggtcgcggggtttatagtttgttcgcgttcggttgttttttcgatttttagaaattaggtcgggaagtcgcgcgtcgcgcgtttattcgggttcggcggtttcgagggtcgggttatagcgttcgcggcgttcgtttggtttttggagtagttggttttagggcggtttggttatcgcgtaggtcgcgtagttagatattcggtttcgggtcgtcggagaggtcgggcgcgtttttcgtcggttcggagagatcggagttttttttgttattcgttgtgcgtaagaataggttaggggtcggggtttgtcgcggttatcgggggagagggagtatttggtagattttgttttcgacgtgattttttgttcggtattcggcggttttcgtcggggtaggaagtttggggtatttggcggggtttagatcgggatcggtcggttttgtagtagttttaggtttgtttagaaattag

SEQ ID NO: 40342 - DNA, 533 bp, Artificial Sequence
  chemically treated genomic DNA (Homo sapiens) CpG-island No: 40342
ctaatttctaaacaaacctaaaactactacaaaaccgaccgatcccgatctaaaccccgccaaataccccaaacttcctaccccgacgaaaaccgccgaataccgaacaaaaaatcacgtcgaaaacaaaatctaccaaatactccctctcccccgataaccgcgacaaaccccgacccctaacctattcttacgcacaacgaataacaaaaaaaactccgatctctccgaaccgacgaaaaacgcgcccgacctctccgacgacccgaaaccgaatatctaactacgcgacctacgcgataaccaaaccgccctaaaaccaactactccaaaaaccaaacgaacgccgcgaacgctataacccgaccctcgaaaccgccgaacccgaataaacgcgcgacgcgcgacttcccgacctaatttctaaaaatcgaaaaaacaaccgaacgcgaacaaactataaaccccgcgacccaactcctataaccgaaactccgcgcccaaaaacgcgacccgcccaaaaaacgtctacg

SEQ ID NO: 40343 - DNA, 533 bp, Artificial Sequence
  chemically treated genomic DNA (Homo sapiens) CpG-island No: 40343
ttgatttttaagtagatttaaggttgttgtagggtcggtcggtttcggtttgagtttcgttaggtattttaagttttttatttcggcggaggtcgtcgagtgtcgggtagggaattacgtcggaggtagggtttgttagatgttttttttttttcggtggtcgcggtagatttcggtttttggtttgtttttacgtatagcgagtgataaagaaggtttcggttttttcgggtcgacgggaagcgcgttcggttttttcggcgattcggagtcgggtgtttggttgcgcgatttgcgcggtggttagatcgttttggagttaattgttttaaaaattaagcggacgtcgcgggcgttgtggttcggttttcggagtcgtcggattcgggtgagcgcgcggcgcgcggtttttcgatttggtttttaggaatcgggagggtagtcgggcgcgggtagattgtgggtttcgcggtttagtttttgtagtcgggatttcgcgtttaggagcgcggttcgtttaaaggacgtttgcg

SEQ ID NO: 40344 - DNA, 533 bp, Artificial Sequence
  chemically treated genomic DNA (Homo sapiens) CpG-island No: 40344
cgcaaacgtcctttaaacgaaccgcgctcctaaacgcgaaatcccgactacaaaaactaaaccgcgaaacccacaatctacccgcgcccgactaccctcccgattcctaaaaaccaaatcgaaaaaccgcgcgccgcgcgctcacccgaatccgacgactccgaaaaccgaaccacaacgcccgcgacgtccgcttaatttttaaaacaattaactccaaaacgatctaaccaccgcgcaaatcgcgcaaccaaacacccgactccgaatcgccgaaaaaaccgaacgcgcttcccgtcgacccgaaaaaaccgaaaccttctttatcactcgctatacgtaaaaacaaaccaaaaaccgaaatctaccgcgaccaccgaaaaaaaaaaaacatctaacaaaccctacctccgacgtaattccctacccgacactcgacgacctccgccgaaataaaaaacttaaaatacctaacgaaactcaaaccgaaaccgaccgaccctacaacaaccttaaatctacttaaaaatcaa

SEQ ID NO: 40345 - DNA, 702 bp, Artificial Sequence
  chemically treated genomic DNA (Homo sapiens) CpG-island No: 40345
ttcggatacgaagaggggttaattttttttaagaacggggttttttcgcgggttaggaattgtgacggtcgtcgtttttttaggtcgagtgtagtagtttcgcgggtatacgcgtttaggaattagattcgggtcgtttcgtgtttatcgatttttcggaaacgaatcggatttcgcgcggttttatggattttttttttcggtttttgtttcggggtttcggcgagcgcggttttcgttagattgcggcgggtcgggttttttattcgcgcgtttttgttcgtcgaggtgtaatacgcgcggtcgcgtagcgagggttgtacgttgttcggacgtcggttgtcggcggagtgtttttattttattcgcggtggttttttggaggttgttattcggcggtgacgtgttttagtttacgttaggggagcgtagattagttgattattcgcggaagggtcggcgcgaaggaggcgcgagagtcggcgggcgggcgggcgggttagcgtcgggtcggttacgttttcgttcgtggcgggcgttggcgtcgcggtttcgtttatacgtaggtttcgtttatattttcggatttggggttcgcggtcgtagcgtttgcggtttagagcggggtttgtttttttatattagttcgtattgtttttttttgtagcgagcggggaaaggacgtagtgttgttgagtgttt

SEQ ID NO: 40346 - DNA, 702 bp, Artificial Sequence
  chemically treated genomic DNA (Homo sapiens) CpG-island No: 40346
aaacactcaacaacactacgtcctttccccgctcgctacaaaaaaaaacaatacgaactaatataaaaaaacaaaccccgctctaaaccgcaaacgctacgaccgcgaaccccaaatccgaaaatataaacgaaacctacgtataaacgaaaccgcgacgccaacgcccgccacgaacgaaaacgtaaccgacccgacgctaacccgcccgcccgcccgccgactctcgcgcctccttcgcgccgacccttccgcgaataatcaactaatctacgctcccctaacgtaaactaaaacacgtcaccgccgaataacaacctccaaaaaaccaccgcgaataaaataaaaacactccgccgacaaccgacgtccgaacaacgtacaaccctcgctacgcgaccgcgcgtattacacctcgacgaacaaaaacgcgcgaataaaaaacccgacccgccgcaatctaacgaaaaccgcgctcgccgaaaccccgaaacaaaaaccgaaaaaaaaaatccataaaaccgcgcgaaatccgattcgtttccgaaaaatcgataaacacgaaacgacccgaatctaattcctaaacgcgtatacccgcgaaactactacactcgacctaaaaaaacgacgaccgtcacaattcctaacccgcgaaaaaaccccgttcttaaaaaaaattaacccctcttcgtatccgaa

SEQ ID NO: 40347 - DNA, 702 bp, Artificial Sequence
  chemically treated genomic DNA (Homo sapiens) CpG-island No: 40347
agatatttagtagtattgcgtttttttttcgttcgttgtagggagaggtaatgcggattggtgtggaagggtaggtttcgttttgggtcgtaggcgttgcggtcgcgaattttaggttcgggagtgtgggcggggtttgcgtgtgggcggggtcgcggcgttagcgttcgttacgggcgagggcgtggtcgattcggcgttagttcgttcgttcgttcgtcggttttcgcgtttttttcgcgtcggttttttcgcgggtgattagttggtttgcgtttttttgacgtgggttggggtacgttatcgtcgaatggtagtttttagaaagttatcgcgagtaaggtgagggtatttcgtcggtagtcggcgttcgggtagcgtgtagttttcgttgcgcggtcgcgcgtgttgtatttcggcgggtagggacgcgcgggtgaggagttcggttcgtcgtagtttggcgagggtcgcgttcgtcggagtttcggaataggagtcgggggaaggggtttatgaggtcgcgcgagattcggttcgttttcggagggtcggtgggtacggggcggttcgagtttggtttttggacgcgtatgttcgcggaattgttgtattcggtttgagggggcgacggtcgttatagtttttggttcgcgggaaggtttcgtttttggaggaagttggttttttttcgtgttcggg

SEQ ID NO: 40348 - DNA, 702 bp, Artificial Sequence
  chemically treated genomic DNA (Homo sapiens) CpG-island No: 40348
cccgaacacgaaaaaaaaccaacttcctccaaaaacgaaaccttcccgcgaaccaaaaactataacgaccgtcgccccctcaaaccgaatacaacaattccgcgaacatacgcgtccaaaaaccaaactcgaaccgccccgtacccaccgaccctccgaaaacgaaccgaatctcgcgcgacctcataaaccccttcccccgactcctattccgaaactccgacgaacgcgaccctcgccaaactacgacgaaccgaactcctcacccgcgcgtccctacccgccgaaatacaacacgcgcgaccgcgcaacgaaaactacacgctacccgaacgccgactaccgacgaaataccctcaccttactcgcgataactttctaaaaactaccattcgacgataacgtaccccaacccacgtcaaaaaaacgcaaaccaactaatcacccgcgaaaaaaccgacgcgaaaaaaacgcgaaaaccgacgaacgaacgaacgaactaacgccgaatcgaccacgccctcgcccgtaacgaacgctaacgccgcgaccccgcccacacgcaaaccccgcccacactcccgaacctaaaattcgcgaccgcaacgcctacgacccaaaacgaaacctacccttccacaccaatccgcattacctctccctacaacgaacgaaaaaaaaacgcaatactactaaatatct

SEQ ID NO: 40349 - DNA, 759 bp, Artificial Sequence
  chemically treated genomic DNA (Homo sapiens) CpG-island No: 40349
cgttgtttgcgtttgggtttttttaatcgtagtgagcggtcgtacggttttatattagggtcgttttgaggtttagtttttttcggttttatttcgagtgcgtataggattgaacgagtacgttcggtttttgtttcggagcggaggatacgacgcggattcgtacggtgtatcgtagtgatttgaggaaggagcgacgggcgttcgcgttaaaggcgttcgagtgtttggtaaattgtaaagcgcggttttgcgtgagttgttatggttatagttgcgttaggcggacggtttgtaggatcgaggtgtagttgggacgagcggaaagttttgcgcgtgggcggggagttcggagtttcgtcggggtaatgttatttaggtgttcggcgttttattgattcggttttcgggggtgggcgggtacgtttgtttcggatggtttaataggcgtcggggagagttaatggtgtggttttatggttttatttttttttattcgattggtcggcgtcgaaaagtcgggcgtgagcggtcgtagtttttggagggagtcgttgcgggttttttttttattcgtttttcgcgcgtcgtcgtttttcggttttgttttgttcgtcgttatggtttagtgagtgattcgttaggggtagttcggttcggttttagcgggcggggaattttttgggggtcgagatttttttcgtttttttcgacgttttttattttgggggtcgtttgagtttatttggggttttgtga

SEQ ID NO: 40350 - DNA, 759 bp, Artificial Sequence
  chemically treated genomic DNA (Homo sapiens) CpG-island No: 40350
tcacaaaaccccaaataaactcaaacgacccccaaaataaaaaacgtcgaaaaaaacgaaaaaaatctcgacccccaaaaaattccccgcccgctaaaaccgaaccgaactacccctaacgaatcactcactaaaccataacgacgaacaaaacaaaaccgaaaaacgacgacgcgcgaaaaacgaataaaaaaaaaacccgcaacgactccctccaaaaactacgaccgctcacgcccgacttttcgacgccgaccaatcgaataaaaaaaaataaaaccataaaaccacaccattaactctccccgacgcctattaaaccatccgaaacaaacgtacccgcccacccccgaaaaccgaatcaataaaacgccgaacacctaaataacattaccccgacgaaactccgaactccccgcccacgcgcaaaactttccgctcgtcccaactacacctcgatcctacaaaccgtccgcctaacgcaactataaccataacaactcacgcaaaaccgcgctttacaatttaccaaacactcgaacgcctttaacgcgaacgcccgtcgctccttcctcaaatcactacgatacaccgtacgaatccgcgtcgtatcctccgctccgaaacaaaaaccgaacgtactcgttcaatcctatacgcactcgaaataaaaccgaaaaaaactaaacctcaaaacgaccctaatataaaaccgtacgaccgctcactacgattaaaaaaacccaaacgcaaacaacg

SEQ ID NO: 40351 - DNA, 759 bp, Artificial Sequence
  chemically treated genomic DNA (Homo sapiens) CpG-island No: 40351
ttatagagttttaagtgagtttaggcgatttttagggtgggaggcgtcggagagaacgagggagatttcgatttttaaagagtttttcgttcgttgaggtcgagtcgggttgtttttggcgagttatttattgggttatggcggcggatagagtagaatcgaagagcggcgacgcgcggaggacgagtgagggaaagattcgtagcggttttttttagaaattgcggtcgtttacgttcggtttttcggcgtcggttaatcgaatggaagggggtggagttatgaagttatattattggtttttttcgacgtttgttagattattcgaggtaaacgtgttcgtttattttcgggggtcggattagtggagcgtcgagtatttagatgatattgtttcggcgaggtttcgggtttttcgtttacgcgtagagtttttcgttcgttttagttgtatttcggttttgtaggtcgttcgtttggcgtagttgtagttatagtaatttacgtaggatcgcgttttatagtttattaggtattcggacgtttttggcgcgagcgttcgtcgttttttttttaggttattgcggtgtatcgtgcgggttcgcgtcgtgtttttcgtttcggagtagggatcgggcgtgttcgtttagttttgtgcgtattcggaatggggtcggggaaggttgagttttagggcgattttgatgtggagtcgtgcgatcgtttattgcggttgaagagatttaggcgtagatagcg

SEQ ID NO: 40352 - DNA, 759 bp, Artificial Sequence
  chemically treated genomic DNA (Homo sapiens) CpG-island No: 40352
cgctatctacgcctaaatctcttcaaccgcaataaacgatcgcacgactccacatcaaaatcgccctaaaactcaaccttccccgaccccattccgaatacgcacaaaactaaacgaacacgcccgatccctactccgaaacgaaaaacacgacgcgaacccgcacgatacaccgcaataacctaaaaaaaaaacgacgaacgctcgcgccaaaaacgtccgaatacctaataaactataaaacgcgatcctacgtaaattactataactacaactacgccaaacgaacgacctacaaaaccgaaatacaactaaaacgaacgaaaaactctacgcgtaaacgaaaaacccgaaacctcgccgaaacaatatcatctaaatactcgacgctccactaatccgacccccgaaaataaacgaacacgtttacctcgaataatctaacaaacgtcgaaaaaaaccaataatataacttcataactccacccccttccattcgattaaccgacgccgaaaaaccgaacgtaaacgaccgcaatttctaaaaaaaaccgctacgaatctttccctcactcgtcctccgcgcgtcgccgctcttcgattctactctatccgccgccataacccaataaataactcgccaaaaacaacccgactcgacctcaacgaacgaaaaactctttaaaaatcgaaatctccctcgttctctccgacgcctcccaccctaaaaatcgcctaaactcacttaaaactctataa

SEQ ID NO: 40353 - DNA, 547 bp, Artificial Sequence
  chemically treated genomic DNA (Homo sapiens) CpG-island No: 40353
taggaaaacgggggtcgggttgggttggggtaggacggcgtcgagtttttggatagaaaagtattcggtagttttcggcggttttttatcggtatttcgttttcgggcgtttttcgcggttgcgtatgcgttgtcgcgggtggtgttgggaggcggttttcgcggtaacgcggttggattttggtttgcgttggttggggaggaagcggttttaggggagcgtgcgggcgtcggggttcggcgacgagaggttattttttggttttgcgatgaattttcggttttttttttttagatggggttttcgtgagggtataacgtcggtattagatattttaggtgacgttcgtacgcggtgggcggttcgggtcggagttttggaacgttggttttggaggcgtcgatttttcgttattgatgtagggacgcggtgcggattagttaggtttagagttcgtttttagatgtgggttcgaatttttgtttcgttaatttgtgatcgtatcgattcggtttagacgtaatttttttttttgtaaaatcgtta

SEQ ID NO: 40354 - DNA, 547 bp, Artificial Sequence
  chemically treated genomic DNA (Homo sapiens) CpG-island No: 40354
taacgattttacaaaaaaaaaaattacgtctaaaccgaatcgatacgatcacaaattaacgaaacaaaaattcgaacccacatctaaaaacgaactctaaacctaactaatccgcaccgcgtccctacatcaataacgaaaaatcgacgcctccaaaaccaacgttccaaaactccgacccgaaccgcccaccgcgtacgaacgtcacctaaaatatctaataccgacgttataccctcacgaaaaccccatctaaaaaaaaaaaaccgaaaattcatcgcaaaaccaaaaaataacctctcgtcgccgaaccccgacgcccgcacgctcccctaaaaccgcttcctccccaaccaacgcaaaccaaaatccaaccgcgttaccgcgaaaaccgcctcccaacaccacccgcgacaacgcatacgcaaccgcgaaaaacgcccgaaaacgaaataccgataaaaaaccgccgaaaactaccgaatacttttctatccaaaaactcgacgccgtcctaccccaacccaacccgacccccgttttccta

SEQ ID NO: 40355 - DNA, 547 bp, Artificial Sequence
  chemically treated genomic DNA (Homo sapiens) CpG-island No: 40355
tgacgattttgtagagaagaaaattgcgtttgggtcgagtcgatacgattataagttggcggggtagagattcgaatttatatttaaggacgagttttgggtttgattggttcgtatcgcgtttttgtattagtaacgaggggtcgacgtttttagggttagcgttttagagtttcggttcgaatcgtttatcgcgtacgggcgttatttggaatgtttaatgtcgacgttgtatttttacgaaaattttatttgagaaggggaaatcgaggatttatcgtaaggttagaaggtggtttttcgtcgtcggatttcggcgttcgtacgtttttttagaatcgttttttttttagttagcgtaggttagggtttagtcgcgttgtcgcggaaatcgttttttagtattattcgcggtaacgtatgcgtagtcgcggggggcgttcgggggcggggtgtcgatgagaagtcgtcgggggttgtcgggtatttttttgtttagaaattcgacgtcgttttgttttagtttagttcgattttcgtttttttg

SEQ ID NO: 40356 - DNA, 547 bp, Artificial Sequence
  chemically treated genomic DNA (Homo sapiens) CpG-island No: 40356
caaaaaaacgaaaatcgaactaaactaaaacaaaacgacgtcgaatttctaaacaaaaaaatacccgacaacccccgacgacttctcatcgacaccccgcccccgaacgccccccgcgactacgcatacgttaccgcgaataatactaaaaaacgatttccgcgacaacgcgactaaaccctaacctacgctaactaaaaaaaaaacgattctaaaaaaacgtacgaacgccgaaatccgacgacgaaaaaccaccttctaaccttacgataaatcctcgatttccccttctcaaataaaattttcgtaaaaatacaacgtcgacattaaacattccaaataacgcccgtacgcgataaacgattcgaaccgaaactctaaaacgctaaccctaaaaacgtcgacccctcgttactaatacaaaaacgcgatacgaaccaatcaaacccaaaactcgtccttaaatataaattcgaatctctaccccgccaacttataatcgtatcgactcgacccaaacgcaattttcttctctacaaaatcgtca

SEQ ID NO: 40357 - DNA, 890 bp, Artificial Sequence
  chemically treated genomic DNA (Homo sapiens) CpG-island No: 40357
taggtatttttggaagcggtagaagggatagcgtttgcgttgcgttttgtcgattttgtagttttggttttcggtgtacgtgtagtgtttgttgttttgtatcgtgcgtttgaagaagttttgcgggagttgagagttagcgaggtttcgtagcgttcgtttgtcgtatttttgtcgcgcgttcgtcgtttattttgtagtttttatacgtgagtagttcgtagtggtagtcggatattttgttttcgtatacggggtatagttcgtttaggttttcgtcgtacgaatagtttatgttcgcggcgttcgtttgcggagggatagcgggttagggagggtcggcggagatcggtagtttggggttttcgcggtcgtcgttttagtcgttgtcgtcggttcgtcgcgtaattttttttttgtgtttaggcgttgtcgtcggtatttatcgagcgtttcgcgtagcgtttcggggtgggttcggtgtagttttcgcgttcggtttttttttgttaggttttacgttttcgtttcgttcggggggtttttttcgcgcggatttcgtcgcgttcgatttggggttttcgggttcgatgcgtttcgattgggattcgtttgtttgagaataaaatttcgattttgagaaaaagagatgggtttagtcgcggggaagacgttaggggatttaggagcgttggggcgttcggttcgggtgttttgggaattcgatagagacgaaggaggtagagatagagttcgggggagttagagatgggaagaaattttggcgagagataacgatcgacgttatcgggcgtagatacgaggttagttcgagagtgttagagatatagatattgagacgtttagttagagagaattcggcggggacg

SEQ ID NO: 40358 - DNA, 890 bp, Artificial Sequence
  chemically treated genomic DNA (Homo sapiens) CpG-island No: 40358
cgtccccgccgaattctctctaactaaacgtctcaatatctatatctctaacactctcgaactaacctcgtatctacgcccgataacgtcgatcgttatctctcgccaaaatttcttcccatctctaactcccccgaactctatctctacctccttcgtctctatcgaattcccaaaacacccgaaccgaacgccccaacgctcctaaatcccctaacgtcttccccgcgactaaacccatctctttttctcaaaatcgaaattttattctcaaacaaacgaatcccaatcgaaacgcatcgaacccgaaaaccccaaatcgaacgcgacgaaatccgcgcgaaaaaaaccccccgaacgaaacgaaaacgtaaaacctaacaaaaaaaaaccgaacgcgaaaactacaccgaacccaccccgaaacgctacgcgaaacgctcgataaataccgacgacaacgcctaaacacaaaaaaaaaattacgcgacgaaccgacgacaacgactaaaacgacgaccgcgaaaaccccaaactaccgatctccgccgaccctccctaacccgctatccctccgcaaacgaacgccgcgaacataaactattcgtacgacgaaaacctaaacgaactataccccgtatacgaaaacaaaatatccgactaccactacgaactactcacgtataaaaactacaaaataaacgacgaacgcgcgacaaaaatacgacaaacgaacgctacgaaacctcgctaactctcaactcccgcaaaacttcttcaaacgcacgatacaaaacaacaaacactacacgtacaccgaaaaccaaaactacaaaatcgacaaaacgcaacgcaaacgctatcccttctaccgcttccaaaaataccta

SEQ ID NO: 40359 - DNA, 890 bp, Artificial Sequence
  chemically treated genomic DNA (Homo sapiens) CpG-island No: 40359
cgttttcgtcgggttttttttagttgggcgttttagtgtttgtgtttttggtattttcggattggtttcgtgtttgcgttcggtggcgtcggtcgttgtttttcgttagagtttttttttatttttggttttttcggattttgtttttgtttttttcgtttttgtcgggtttttagaatattcgggtcgggcgttttagcgtttttgggttttttggcgtttttttcgcggttgagtttattttttttttttagaatcggggttttgtttttagataaacgaattttaatcgaagcgtatcgaattcgagggttttagatcgggcgcgacggggttcgcgcgggaggagtttttcggacggggcgggagcgtggggtttggtaggggaaggtcgggcgcggggattgtatcggatttatttcgggacgttgcgcggggcgttcggtgggtgtcggcggtagcgtttgggtatagagaggggattacgcgacgggtcggcgatagcggttggggcggcggtcgcggggattttaggttgtcggttttcgtcggttttttttgattcgttgttttttcgtaggcggacgtcgcgggtatggattattcgtacgacgaggatttggacgagttgtgtttcgtgtgcggggataaggtgttcggttattattacggattgtttacgtgtgagagttgtaaggtgagcggcgagcgcgcggtaggggtgcggtagacgggcgttgcggggtttcgttgatttttagttttcgtagggtttttttaagcgtacggtgtagaataataagtattatacgtgtatcgagagttagagttgtaagatcgataagacgtagcgtaagcgttgttttttttgtcgtttttagaaatgtttg

SEQ ID NO: 40360 - DNA, 890 bp, Artificial Sequence
  chemically treated genomic DNA (Homo sapiens) CpG-island No: 40360
caaacatttctaaaaacgacaaaaaaaacaacgcttacgctacgtcttatcgatcttacaactctaactctcgatacacgtataatacttattattctacaccgtacgcttaaaaaaaccctacgaaaactaaaaatcaacgaaaccccgcaacgcccgtctaccgcacccctaccgcgcgctcgccgctcaccttacaactctcacacgtaaacaatccgtaataataaccgaacaccttatccccgcacacgaaacacaactcgtccaaatcctcgtcgtacgaataatccatacccgcgacgtccgcctacgaaaaaacaacgaatcaaaaaaaaccgacgaaaaccgacaacctaaaatccccgcgaccgccgccccaaccgctatcgccgacccgtcgcgtaatcccctctctatacccaaacgctaccgccgacacccaccgaacgccccgcgcaacgtcccgaaataaatccgatacaatccccgcgcccgaccttcccctaccaaaccccacgctcccgccccgtccgaaaaactcctcccgcgcgaaccccgtcgcgcccgatctaaaaccctcgaattcgatacgcttcgattaaaattcgtttatctaaaaacaaaaccccgattctaaaaaaaaaaaataaactcaaccgcgaaaaaaacgccaaaaaacccaaaaacgctaaaacgcccgacccgaatattctaaaaacccgacaaaaacgaaaaaaacaaaaacaaaatccgaaaaaaccaaaaataaaaaaaaactctaacgaaaaacaacgaccgacgccaccgaacgcaaacacgaaaccaatccgaaaataccaaaaacacaaacactaaaacgcccaactaaaaaaaacccgacgaaaacg

SEQ ID NO: 40361 - DNA, 574 bp, Artificial Sequence
  chemically treated genomic DNA (Homo sapiens) CpG-island No: 40361
tttcgtcgtcggtttcgttattttcgtttcgtcgtggtcgaaattgatataaagtagcgggtcgaggtttcgggggagcggggtcgtagttgggggggcgggagttcgtggggagtcgagtcgagcgtttttcgttttagttttcggtatgggtagtacggggtcgtcggggcgggcgtcgagcgttgagcgttgaggtgaggcgaggcgaggcgaagcgggggcgttcgggagcgcggggttaggagggtagagggagatgcggtcgtagtcgcggggttggaggggtcggggagcgggtgtagattggggagtatcgggggttaagatttgggagttgcggttagacggggcggggatggcggtcgattggagacgaggggttgtcgggtgttcggggacggggtagagcgggggtttgcgtataggatgggaggatggggtgtcgaaggggcgcgtggagagtaggagagcggcgcgagtgttaaggagaagttcgtgtagttttggttaggggagattcgtttagagagttgttgggcgagaggagtaatcgggattcgagggtttggtg

SEQ ID NO: 40362 - DNA, 574 bp, Artificial Sequence
  chemically treated genomic DNA (Homo sapiens) CpG-island No: 40362
caccaaaccctcgaatcccgattactcctctcgcccaacaactctctaaacgaatctcccctaaccaaaactacacgaacttctccttaacactcgcgccgctctcctactctccacgcgccccttcgacaccccatcctcccatcctatacgcaaacccccgctctaccccgtccccgaacacccgacaacccctcgtctccaatcgaccgccatccccgccccgtctaaccgcaactcccaaatcttaacccccgatactccccaatctacacccgctccccgacccctccaaccccgcgactacgaccgcatctccctctaccctcctaaccccgcgctcccgaacgcccccgcttcgcctcgcctcgcctcacctcaacgctcaacgctcgacgcccgccccgacgaccccgtactacccataccgaaaactaaaacgaaaaacgctcgactcgactccccacgaactcccgcccccccaactacgaccccgctcccccgaaacctcgacccgctactttatatcaatttcgaccacgacgaaacgaaaataacgaaaccgacgacgaaa

SEQ ID NO: 40363 - DNA, 574 bp, Artificial Sequence
  chemically treated genomic DNA (Homo sapiens) CpG-island No: 40363
tattaaattttcgggtttcggttatttttttcgtttaataattttttgggcgggttttttttggttaaggttgtacgagtttttttttggtattcgcgtcgtttttttgttttttacgcgttttttcggtattttatttttttattttgtacgtagattttcgttttgtttcgttttcgggtattcgatagtttttcgtttttagtcggtcgttattttcgtttcgtttggtcgtagtttttaaattttggttttcggtgttttttagtttatattcgtttttcggtttttttagtttcgcggttgcggtcgtatttttttttgtttttttggtttcgcgttttcgggcgttttcgtttcgtttcgtttcgttttattttagcgtttagcgttcggcgttcgtttcggcggtttcgtattgtttatgtcgggggttggggcggggggcgttcggttcggttttttacgggttttcgtttttttagttgcggtttcgttttttcggggtttcggttcgttattttgtgttagtttcggttacggcggggcggaagtgacggagtcggcggcgggg

SEQ ID NO: 40364 - DNA, 574 bp, Artificial Sequence
  chemically treated genomic DNA (Homo sapiens) CpG-island No: 40364
ccccgccgccgactccgtcacttccgccccgccgtaaccgaaactaacacaaaataacgaaccgaaaccccgaaaaaacgaaaccgcaactaaaaaaacgaaaacccgtaaaaaaccgaaccgaacgccccccgccccaacccccgacataaacaatacgaaaccgccgaaacgaacgccgaacgctaaacgctaaaataaaacgaaacgaaacgaaacgaaaacgcccgaaaacgcgaaaccaaaaaaacaaaaaaaaatacgaccgcaaccgcgaaactaaaaaaaccgaaaaacgaatataaactaaaaaacaccgaaaaccaaaatttaaaaactacgaccaaacgaaacgaaaataacgaccgactaaaaacgaaaaactatcgaatacccgaaaacgaaacaaaacgaaaatctacgtacaaaataaaaaaataaaataccgaaaaaacgcgtaaaaaacaaaaaaacgacgcgaataccaaaaaaaaactcgtacaaccttaaccaaaaaaaacccgcccaaaaaattattaaacgaaaaaaataaccgaaacccgaaaatttaata

SEQ ID NO: 40365 - DNA, 707 bp, Artificial Sequence
  chemically treated genomic DNA (Homo sapiens) CpG-island No: 40365
gggcggggagcgcgggcgtcgacgtcggtttagtcggcggtttaagcgagagacgcggttttcggggttttttcgtattttttcgtatttttcggggttttcggtcgttatttcgtcgtcgtttgggcgttttgcggagagaagatgggaggtaaggattggatcgacgggtttttagttttagggcgttaggttcggggcgtaaattcgggagggaagtttcggtcgtttagtttagatcgtttggagatttttggcggttattttcggattttttcgggcggcgaggcggggattcgttcgcgttcgggttttttcgtagcggagttttaagttaggtacgcgcggtaaaagtcggagtttgttcggttaacggtcgaaaagaaggaaggggggcgtaaaatgttttttggcgtatttcgggttgtaaatttgtcgtttgcgttcggttcgtaagttcgcgggttttgggtttcgggaaacgtgcggtttttagttgtcgcgtttttagggtaagtatttttcgggttcgattttattttcgtacgtggttgtatcgtagtaaatggggcgggggcgttcgggttttttaggttcgtaggggtcgttcgtcgggttttattttttttttattgtgttttatatatcgtagcgcgggaggagggggcgttatcggttttagtttttttttgttcgttttttttttt

SEQ ID NO: 40366 - DNA, 707 bp, Artificial Sequence
  chemically treated genomic DNA (Homo sapiens) CpG-island No: 40366
aaaaaaaaaaacgaacaaaaaaaaactaaaaccgataacgccccctcctcccgcgctacgatatataaaacacaataaaaaaaaaataaaacccgacgaacgacccctacgaacctaaaaaacccgaacgcccccgccccatttactacgatacaaccacgtacgaaaataaaatcgaacccgaaaaatacttaccctaaaaacgcgacaactaaaaaccgcacgtttcccgaaacccaaaacccgcgaacttacgaaccgaacgcaaacgacaaatttacaacccgaaatacgccaaaaaacattttacgccccccttccttcttttcgaccgttaaccgaacaaactccgacttttaccgcgcgtacctaacttaaaactccgctacgaaaaaacccgaacgcgaacgaatccccgcctcgccgcccgaaaaaatccgaaaataaccgccaaaaatctccaaacgatctaaactaaacgaccgaaacttccctcccgaatttacgccccgaacctaacgccctaaaactaaaaacccgtcgatccaatccttacctcccatcttctctccgcaaaacgcccaaacgacgacgaaataacgaccgaaaaccccgaaaaatacgaaaaaatacgaaaaaaccccgaaaaccgcgtctctcgcttaaaccgccgactaaaccgacgtcgacgcccgcgctccccgccc

SEQ ID NO: 40367 - DNA, 707 bp, Artificial Sequence
  chemically treated genomic DNA (Homo sapiens) CpG-island No: 40367
gaaggagggggcgggtagggagaggttggagtcggtgacgtttttttttttcgcgttgcggtatgtaaagtatagtaggggggaggtggggttcggcgagcgatttttgcggatttgggaggttcgagcgttttcgttttatttgttacggtgtagttacgtgcgggggtggggtcgagttcgggaggtatttattttggagacgcggtagttgggggtcgtacgtttttcgaggtttaagattcgcgggtttgcggatcggacgtaggcggtagatttgtagttcgggatgcgttagggaatattttgcgtttttttttttttttttcggtcgttggtcgggtaaatttcggtttttgtcgcgcgtgtttggtttggagtttcgttgcgggaaaattcgagcgcgggcgggttttcgtttcgtcgttcggggaaattcgggggtggtcgttagggatttttaagcggtttgggttgggcggtcggagtttttttttcggatttgcgtttcgaatttggcgttttgaagttagaggttcgtcggtttagtttttgttttttatttttttttcgtagagcgtttagacgacggcgagatgacggtcgggagtttcgaagaatgcggggaggtgcggaggagtttcgagggtcgcgtttttcgtttgggtcgtcggttgggtcgacgtcggcgttcgcgtttttcgttt

SEQ ID NO: 40368 - DNA, 707 bp, Artificial Sequence
  chemically treated genomic DNA (Homo sapiens) CpG-island No: 40368
aaacgaaaaacgcgaacgccgacgtcgacccaaccgacgacccaaacgaaaaacgcgaccctcgaaactcctccgcacctccccgcattcttcgaaactcccgaccgtcatctcgccgtcgtctaaacgctctacgaaaaaaaaataaaaaacaaaaactaaaccgacgaacctctaacttcaaaacgccaaattcgaaacgcaaatccgaaaaaaaaactccgaccgcccaacccaaaccgcttaaaaatccctaacgaccacccccgaatttccccgaacgacgaaacgaaaacccgcccgcgctcgaattttcccgcaacgaaactccaaaccaaacacgcgcgacaaaaaccgaaatttacccgaccaacgaccgaaaaaaaaaaaaaaaaacgcaaaatattccctaacgcatcccgaactacaaatctaccgcctacgtccgatccgcaaacccgcgaatcttaaacctcgaaaaacgtacgacccccaactaccgcgtctccaaaataaatacctcccgaactcgaccccacccccgcacgtaactacaccgtaacaaataaaacgaaaacgctcgaacctcccaaatccgcaaaaatcgctcgccgaaccccacctcccccctactatactttacataccgcaacgcgaaaaaaaaaaacgtcaccgactccaacctctccctacccgccccctccttc

SEQ ID NO: 40369 - DNA, 598 bp, Artificial Sequence
  chemically treated genomic DNA (Homo sapiens) CpG-island No: 40369
ttttcgttcgtagcgaagttgtagtaggagcgatttgagttagatatcgggaagatcgttcggattaagattagttaggtagaggaggagaggcggcgtcgatttcgtttaagatttttattaagtttacgtatgagaggttttttttttttttagcggtcgtgttggggttacggtagtaggcgggggtgtcggtgtcgggcgttgggtttcgtcggacggatgttttttcggttttttcgtcggttcgggtaaggttgtttttaggttgcgacgtttttaattcgggttttttcggatgaattatttttttttttcgtcgtttggttttttttttcgtttttttcgttcgaggttttcgtggttcgtggttcggttagagtagtatcgtttttgcgtttcgggattcgggtcgtatagtttaagttttttcgattgttggtcgcgttttgtttgcggtttgtggtttggatttcgggtttagtaggagtagtcgagttgcgtgcggtgtggtttttacgaaagggagggcgagggagaagacgcggttttcgtttaggcgttttaggtcgtaggagaggaggtttagggtttagtt

SEQ ID NO: 40370 - DNA, 598 bp, Artificial Sequence
  chemically treated genomic DNA (Homo sapiens) CpG-island No: 40370
aactaaaccctaaacctcctctcctacgacctaaaacgcctaaacgaaaaccgcgtcttctccctcgccctccctttcgtaaaaaccacaccgcacgcaactcgactactcctactaaacccgaaatccaaaccacaaaccgcaaacaaaacgcgaccaacaatcgaaaaaacttaaactatacgacccgaatcccgaaacgcaaaaacgatactactctaaccgaaccacgaaccacgaaaacctcgaacgaaaaaaacgaaaaaaaaaaccaaacgacgaaaaaaaaaaataattcatccgaaaaaacccgaattaaaaacgtcgcaacctaaaaacaaccttacccgaaccgacgaaaaaaccgaaaaaacatccgtccgacgaaacccaacgcccgacaccgacacccccgcctactaccgtaaccccaacacgaccgctaaaaaaaaaaaaaacctctcatacgtaaacttaataaaaatcttaaacgaaatcgacgccgcctctcctcctctacctaactaatcttaatccgaacgatcttcccgatatctaactcaaatcgctcctactacaacttcgctacgaacgaaaa

SEQ ID NO: 40371 - DNA, 598 bp, Artificial Sequence
  chemically treated genomic DNA (Homo sapiens) CpG-island No: 40371
agttaggttttgagtttttttttttgcggtttggggcgtttgggcgggggtcgcgttttttttttcgttttttttttcgtgggggttatatcgtacgtagttcggttatttttgttgggttcgggatttaggttataggtcgtaggtagggcgcggttagtaatcgggagggtttaagttgtgcggttcggatttcgaggcgtaggggcggtgttgttttgatcgggttacgggttacggaggtttcgggcggaggaggcgggaaaggaggttaggcggcgggaaagggggatgatttattcggaggagttcgaattggaaacgtcgtaatttgggaatagttttgttcgggtcgacgggggagtcgggagggtattcgttcggcggggtttagcgttcggtatcggtattttcgtttgttgtcgtggttttagtacgatcgttgggggagggagaggttttttatgcgtggatttgatggaaattttgggcgaagtcggcgtcgtttttttttttttgtttggttggttttgattcgagcggttttttcggtgtttagtttaagtcgtttttgttgtagtttcgttgcgggcggagg

SEQ ID NO: 40372 - DNA, 598 bp, Artificial Sequence
  chemically treated genomic DNA (Homo sapiens) CpG-island No: 40372
cctccgcccgcaacgaaactacaacaaaaacgacttaaactaaacaccgaaaaaaccgctcgaatcaaaaccaaccaaacaaaaaaaaaaaaacgacgccgacttcgcccaaaatttccatcaaatccacgcataaaaaacctctccctcccccaacgatcgtactaaaaccacgacaacaaacgaaaataccgataccgaacgctaaaccccgccgaacgaataccctcccgactcccccgtcgacccgaacaaaactattcccaaattacgacgtttccaattcgaactcctccgaataaatcatccccctttcccgccgcctaacctcctttcccgcctcctccgcccgaaacctccgtaacccgtaacccgatcaaaacaacaccgcccctacgcctcgaaatccgaaccgcacaacttaaaccctcccgattactaaccgcgccctacctacgacctataacctaaatcccgaacccaacaaaaataaccgaactacgtacgatataacccccacgaaaaaaaaaacgaaaaaaaaaacgcgacccccgcccaaacgccccaaaccgcaaaaaaaaaaactcaaaacctaact

SEQ ID NO: 40373 - DNA, 554 bp, Artificial Sequence
  chemically treated genomic DNA (Homo sapiens) CpG-island No: 40373
cggcgaggcgggcgtttttcgttttttgttaattatttttcgggttatagtgggtagcgtcgtcgcggtttcgtagttatatggggcgggggaagcgaaggatagtaggacggcgggttatatattgggtttcggggtcgcgtattttagtgcgttcggttcggaaaatggttcggattcggagcggtagtagaaaaaagataggcggaaagaaaggaaagagagaggaaggatttgagtcgggaaagggaaggggaagcgagaatgagcggtttttcgacggtagagtttgtaaggacggcgagcggttagaattaaaatatttttttttttttgttcgcgcgtcgttatttttgcgtagtcgtatttcggatagcgtcgttacggaaatatcgtcggaacgagatgggcgggatttaggggttggaagatagttttttggtgtttttcggtcgtcgttaggttatttttaacggttgtttggttattgttggatggaagtggacgagttggggttaagggaatttggtttttggtcgtcgattttcgatttt

SEQ ID NO: 40374 - DNA, 554 bp, Artificial Sequence
  chemically treated genomic DNA (Homo sapiens) CpG-island No: 40374
aaaatcgaaaatcgacgaccaaaaaccaaattcccttaaccccaactcgtccacttccatccaacaataaccaaacaaccgttaaaaataacctaacgacgaccgaaaaacaccaaaaaactatcttccaacccctaaatcccgcccatctcgttccgacgatatttccgtaacgacgctatccgaaatacgactacgcaaaaataacgacgcgcgaacaaaaaaaaaaaaatattttaattctaaccgctcgccgtccttacaaactctaccgtcgaaaaaccgctcattctcgcttccccttccctttcccgactcaaatccttcctctctctttcctttctttccgcctatcttttttctactaccgctccgaatccgaaccattttccgaaccgaacgcactaaaatacgcgaccccgaaacccaatatataacccgccgtcctactatccttcgcttcccccgccccatataactacgaaaccgcgacgacgctacccactataacccgaaaaataattaacaaaaaacgaaaaacgcccgcctcgccg

SEQ ID NO: 40375 - DNA, 554 bp, Artificial Sequence
  chemically treated genomic DNA (Homo sapiens) CpG-island No: 40375
ggggtcggaggtcggcggttagaagttagatttttttggttttagttcgtttatttttatttagtagtagttaaataatcgttgaaaatggtttggcggcggtcgggaaatattagagaattattttttaatttttagatttcgtttatttcgtttcggcggtgttttcgtggcgacgttattcgaagtgcggttgcgtaagggtgacggcgcgcgagtaagggggagggggtgttttggttttagtcgttcgtcgtttttgtaggttttgtcgtcggaaagtcgtttattttcgtttttttttttttttttcggtttaagttttttttttttttttttttttttttcgtttattttttttttgttgtcgtttcgggttcgggttatttttcgggtcgggcgtattaaggtgcgcggtttcggggtttagtatatgattcgtcgttttgttatttttcgtttttttcgttttatgtggttgcggggtcgcggcggcgttgtttattatggttcggaaagtagttagtaggaagcggaaagcgttcgtttcgtcg

SEQ ID NO: 40376 - DNA, 554 bp, Artificial Sequence
  chemically treated genomic DNA (Homo sapiens) CpG-island No: 40376
cgacgaaacgaacgctttccgcttcctactaactactttccgaaccataataaacaacgccgccgcgaccccgcaaccacataaaacgaaaaaaacgaaaaataacaaaacgacgaatcatatactaaaccccgaaaccgcgcaccttaatacgcccgacccgaaaaataacccgaacccgaaacgacaacaaaaaaaaaataaacgaaaaaaaaaaaaaaaaaaaaaaaaaacttaaaccgaaaaaaaaaaaaaaaaacgaaaataaacgactttccgacgacaaaacctacaaaaacgacgaacgactaaaaccaaaacaccccctcccccttactcgcgcgccgtcacccttacgcaaccgcacttcgaataacgtcgccacgaaaacaccgccgaaacgaaataaacgaaatctaaaaattaaaaaataattctctaatatttcccgaccgccgccaaaccattttcaacgattatttaactactactaaataaaaataaacgaactaaaaccaaaaaaatctaacttctaaccgccgacctccgacccc

SEQ ID NO: 40377 - DNA, 912 bp, Artificial Sequence
  chemically treated genomic DNA (Homo sapiens) CpG-island No: 40377
gaaggttcgaaggtttagtttattaagtttagttaattgttcgttggatgtttatatttttcggggtcgagcgtcgtgtagttgtttattatagcgttttaattaagtgcgtagtttagagatttggtagtcgtcggggttacggtcgttttggtatataatagtgttattttggatgatatagagacgttcgaagtaggcgttataggtcgagttgttggagttggttatggtgtcgaggattagagcgtagtcgggtgtattttgttgtagtattttcgttgcgttgattcggttttttaggtttcggtgttgtgggatgatgtagggagagttcgtggtgatttagtcgtcggaggggtgcgttttttcgatgtagatgatgaggaagtcgacgtcgcgttggtatttagtgattaggcgttggaaggcgtttatgcgcgttatgaacggtggttaggtgtagttgtcgaaattgagaattagcgggcggtttttttgcgcgtagtcgaggatgtgttggttttggaagtcgtcgggtagaattatttcggagttgggcgtcggatcgttttcgtgcgtttgtttgaagaaatttaatttttggttatgttatatcgttttgagcgacgttagggtgtataggcggttgtcgtcggatacgtagatgggcgggttatcgggaggtattttttcgtttttattgttgagttttatttcgggttcgggttgttttcggcggcggcggtttaggaaatgtttgcggatatataagaaatcgagaagttagagtatgaaggtcgtgtcgaggaagcgcgggaagagtacgaggtacgaggcggtttgggcgtagagttttaaggagtgaagtagtagggagcggagtatggtggttgtaggtttcgaagtttt

SEQ ID NO: 40378 - DNA, 912 bp, Artificial Sequence
  chemically treated genomic DNA (Homo sapiens) CpG-island No: 40378
aaaacttcgaaacctacaaccaccatactccgctccctactacttcactccttaaaactctacgcccaaaccgcctcgtacctcgtactcttcccgcgcttcctcgacacgaccttcatactctaacttctcgatttcttatatatccgcaaacatttcctaaaccgccgccgccgaaaacaacccgaacccgaaataaaactcaacaataaaaacgaaaaaatacctcccgataacccgcccatctacgtatccgacgacaaccgcctatacaccctaacgtcgctcaaaacgatataacataaccaaaaattaaatttcttcaaacaaacgcacgaaaacgatccgacgcccaactccgaaataattctacccgacgacttccaaaaccaacacatcctcgactacgcgcaaaaaaaccgcccgctaattctcaatttcgacaactacacctaaccaccgttcataacgcgcataaacgccttccaacgcctaatcactaaataccaacgcgacgtcgacttcctcatcatctacatcgaaaaaacgcacccctccgacgactaaatcaccacgaactctccctacatcatcccacaacaccgaaacctaaaaaaccgaatcaacgcaacgaaaatactacaacaaaatacacccgactacgctctaatcctcgacaccataaccaactccaacaactcgacctataacgcctacttcgaacgtctctatatcatccaaaataacactattatataccaaaacgaccgtaaccccgacgactaccaaatctctaaactacgcacttaattaaaacgctataataaacaactacacgacgctcgaccccgaaaaatataaacatccaacgaacaattaactaaacttaataaactaaaccttcgaaccttc

SEQ ID NO: 40379 - DNA, 912 bp, Artificial Sequence
  chemically treated genomic DNA (Homo sapiens) CpG-island No: 40379
ggggtttcggggtttgtagttattatgtttcgttttttgttgttttattttttgaggttttgcgtttagatcgtttcgtgtttcgtgtttttttcgcgttttttcggtacggtttttatgttttggtttttcgattttttgtgtattcgtaagtattttttgggtcgtcgtcgtcgggggtagttcgagttcgaagtggagtttaatagtgaaggcgaggaggtgtttttcgatgattcgtttatttgcgtgttcgacgataatcgtttgtgtattttggcgtcgtttaaggcggtgtggtatggttagaagttggatttttttaagtaggcgtacgagggcggttcggcgtttaatttcgaggtggttttgttcgacggtttttagagttagtatattttcgattacgcgtaagggaatcgttcgttggtttttaatttcggtagttgtatttgattatcgtttatggcgcgtatgagcgttttttagcgtttggttattaagtattagcgcgacgtcgatttttttattatttatatcgaggaagcgtattttttcgacggttgggttattacggattttttttatattattttatagtatcggagtttggaggatcgggttagcgtagcgagggtattgtagtaaggtgtattcggttgcgttttggttttcgatattatggttaattttagtagttcggtttatggcgtttatttcgagcgtttttatgttatttagagtggtattattatgtattagggcggtcgtggtttcgacggttattaggtttttgagttgcgtatttggttggaacgttatgatgagtaattgtacggcgttcggtttcggagggtgtaaatatttaacggataattgattgaatttggtgggttgggttttcgagttttt

SEQ ID NO: 40380 - DNA, 912 bp, Artificial Sequence
  chemically treated genomic DNA (Homo sapiens) CpG-island No: 40380
aaaaactcgaaaacccaacccaccaaattcaatcaattatccgttaaatatttacaccctccgaaaccgaacgccgtacaattactcatcataacgttccaaccaaatacgcaactcaaaaacctaataaccgtcgaaaccacgaccgccctaatacataataataccactctaaataacataaaaacgctcgaaataaacgccataaaccgaactactaaaattaaccataatatcgaaaaccaaaacgcaaccgaatacaccttactacaataccctcgctacgctaacccgatcctccaaactccgatactataaaataatataaaaaaaatccgtaataacccaaccgtcgaaaaaatacgcttcctcgatataaataataaaaaaatcgacgtcgcgctaatacttaataaccaaacgctaaaaaacgctcatacgcgccataaacgataatcaaatacaactaccgaaattaaaaaccaacgaacgattcccttacgcgtaatcgaaaatatactaactctaaaaaccgtcgaacaaaaccacctcgaaattaaacgccgaaccgccctcgtacgcctacttaaaaaaatccaacttctaaccataccacaccgccttaaacgacgccaaaatacacaaacgattatcgtcgaacacgcaaataaacgaatcatcgaaaaacacctcctcgccttcactattaaactccacttcgaactcgaactacccccgacgacgacgacccaaaaaatacttacgaatacacaaaaaatcgaaaaaccaaaacataaaaaccgtaccgaaaaaacgcgaaaaaaacacgaaacacgaaacgatctaaacgcaaaacctcaaaaaataaaacaacaaaaaacgaaacataataactacaaaccccgaaacccc

SEQ ID NO: 40381 - DNA, 1369 bp, Artificial Sequence
  chemically treated genomic DNA (Homo sapiens) CpG-island No: 40381
cggagggattatttagtagcgcggttaatgttttagaaattttgggttgagggcgggcgtaggcgggcggagggcggagcggtcgggtttggggtcggtgggggcgggttcgggtttcgtagttagttttcgggggcgggggatttcggtagtcgttgtcgttggggatcgggagttcgattagggatttgggcgttcgttggggaggttttttagttggcgcgagcgttgcgcgtcgttttggttttcgtcgtttggtttcggttcgcgtttttttcgtcgcgtatttgagtcgagtttttcggcggtcgtcgagtcgcgtcggagtttcggttcgtttttcgcgcgtcgtcgttaacgtcgtttacgtcgttgtcgttcgtgcggggtcgttgtttaggtgtcgcgggaggtcgggttcgcggtcgtcgtttcggtggtttcggttttcgttttatcgaggacgcgggttagcgaggaggtaattttgcgttttcgtcgtttttttggttcgttcgcgggcgtcgttcgtttgtcggagttcgttcgttcgtttttcgcgcgcgtttatattcgcgtttcgtatacggtcgtttttcgtatcgtttcgttacgtatacgtcgttcgcgtttttcgtcgttgttcgaggttgtcgcgcgtcgttttagttcgcgtcgttttggtcgcgttcgtttcgttttatttcgttttagcggggcgtcgcggtttttgggttagcggtcgtcggggtcgggttgagaggtgcggagggtagagttcgcgggcgggttatcgtcgggcgtcggagatcggagagttggggaaagcggcgtcggttttgcgtttttagtcgattcgggcgcggggcgttacgggcgtggggcgcggggtagcgggcgcggggcggcgtcggtttcgggcggtttttttattaggggtagttgttgtttgaacgtcggagcgtttttttttcgtcgtttgtttcgtttagcgtagtttcggtcgttgggcgtattcgtttcgttcgttttcggacgttgttttttatttcgggaacgtcgagattggagcgttcgaattgagttattttcgcggatttcgagagcggcggcgcgatttatcgcggaggcgttcggacgcgttaagtgcgtatttttaatcgtaaatgggtgttgagcgtttaggggtgcggggtaattttttaattcgtggggttttggtcggttttgtcgcggcgttcgagattttttgatttttcgttgcgcgcggcgcggggttggcgatttgggtttaggggcggcggggcggggaggtgttttgatttagggatttagaggtcgggagtaagttttttttcgttttggattg

SEQ ID NO: 40382 - DNA, 1369 bp, Artificial Sequence
  chemically treated genomic DNA (Homo sapiens) CpG-island No: 40382
caatccaaaacgaaaaaaaacttactcccgacctctaaatccctaaatcaaaacacctccccgccccgccgcccctaaacccaaatcgccaaccccgcgccgcgcgcaacgaaaaatcaaaaaatctcgaacgccgcgacaaaaccgaccaaaaccccacgaattaaaaaattaccccgcacccctaaacgctcaacacccatttacgattaaaaatacgcacttaacgcgtccgaacgcctccgcgataaatcgcgccgccgctctcgaaatccgcgaaaataactcaattcgaacgctccaatctcgacgttcccgaaataaaaaacaacgtccgaaaacgaacgaaacgaatacgcccaacgaccgaaactacgctaaacgaaacaaacgacgaaaaaaaaacgctccgacgttcaaacaacaactacccctaataaaaaaaccgcccgaaaccgacgccgccccgcgcccgctaccccgcgccccacgcccgtaacgccccgcgcccgaatcgactaaaaacgcaaaaccgacgccgctttccccaactctccgatctccgacgcccgacgataacccgcccgcgaactctaccctccgcacctctcaacccgaccccgacgaccgctaacccaaaaaccgcgacgccccgctaaaacgaaataaaacgaaacgaacgcgaccaaaacgacgcgaactaaaacgacgcgcgacaacctcgaacaacgacgaaaaacgcgaacgacgtatacgtaacgaaacgatacgaaaaacgaccgtatacgaaacgcgaatataaacgcgcgcgaaaaacgaacgaacgaactccgacaaacgaacgacgcccgcgaacgaaccaaaaaaacgacgaaaacgcaaaattacctcctcgctaacccgcgtcctcgataaaacgaaaaccgaaaccaccgaaacgacgaccgcgaacccgacctcccgcgacacctaaacaacgaccccgcacgaacgacaacgacgtaaacgacgttaacgacgacgcgcgaaaaacgaaccgaaactccgacgcgactcgacgaccgccgaaaaactcgactcaaatacgcgacgaaaaaaacgcgaaccgaaaccaaacgacgaaaaccaaaacgacgcgcaacgctcgcgccaactaaaaaacctccccaacgaacgcccaaatccctaatcgaactcccgatccccaacgacaacgactaccgaaatcccccgcccccgaaaactaactacgaaacccgaacccgcccccaccgaccccaaacccgaccgctccgccctccgcccgcctacgcccgccctcaacccaaaatttctaaaacattaaccgcgctactaaataatccctccg

SEQ ID NO: 40383 - DNA, 1369 bp, Artificial Sequence
  chemically treated genomic DNA (Homo sapiens) CpG-island No: 40383
tagtttaaggcgaaaggagatttgttttcggtttttgggtttttaggttaaggtattttttcgtttcgtcgtttttgagtttaagtcgttaatttcgcgtcgcgcgtagcgagggattagaaggtttcggacgtcgcggtagggtcggttagggttttacgagttagggagttgtttcgtatttttaaacgtttagtatttatttacggttgaaagtacgtatttgacgcgttcgggcgttttcgcggtgagtcgcgtcgtcgttttcggggttcgcgaaggtggtttagttcgggcgttttagtttcgacgttttcggggtagagagtaacgttcggggacgaacgggacgggtgcgtttagcggtcggggttgcgttgggcgaggtaagcggcgagaggggagcgtttcggcgtttaggtaatagttatttttagtgggagagtcgttcggggtcggcgtcgtttcgcgttcgttgtttcgcgttttacgttcgtggcgtttcgcgttcgggtcggttgggggcgtagggtcggcgtcgttttttttagtttttcggttttcggcgttcggcggtaattcgttcgcgggttttgtttttcgtattttttagttcggtttcggcggtcgttgatttaggaatcgcggcgtttcgttggaacgagatgggacggggcgggcgcggttagggcggcgcgggttggggcggcgcgcggtagtttcgggtagcggcggggggcgcggacggcgtgtgcgtggcggggcggtgcggggggcggtcgtgtgcgaggcgcgagtgtgagcgcgcgcgggaggcgggcgggcgggtttcggtaggcgagcggcgttcgcgggcgagttaggaaggcggcgggaacgtaaagttgttttttcgttggttcgcgttttcggtggggcgggagtcggggttatcgaagcggcggtcgcggattcggtttttcgcggtatttgggtagcggtttcgtacgagcggtagcggcgtgggcggcgttggcggcggcgcgcgggaagcgaatcggagtttcggcgcggttcggcggtcgtcggggagttcggtttaggtgcgcggcgaggggggcgcgggtcggagttaggcggcggggattagggcggcgcgtagcgttcgcgttagttggaggatttttttagcggacgtttaggtttttggtcgggttttcggtttttagcggtagcggttgtcggagtttttcgttttcgagagttggttgcggggttcgggttcgtttttatcggttttaggttcggtcgtttcgtttttcgttcgtttgcgttcgtttttagtttaagatttttagggtattggtcgcgttgttgggtgattttttcg

SEQ ID NO: 40384 - DNA, 1369 bp, Artificial Sequence
  chemically treated genomic DNA (Homo sapiens) CpG-island No: 40384
cgaaaaaatcacccaacaacgcgaccaataccctaaaaatcttaaactaaaaacgaacgcaaacgaacgaaaaacgaaacgaccgaacctaaaaccgataaaaacgaacccgaaccccgcaaccaactctcgaaaacgaaaaactccgacaaccgctaccgctaaaaaccgaaaacccgaccaaaaacctaaacgtccgctaaaaaaatcctccaactaacgcgaacgctacgcgccgccctaatccccgccgcctaactccgacccgcgcccccctcgccgcgcacctaaaccgaactccccgacgaccgccgaaccgcgccgaaactccgattcgcttcccgcgcgccgccgccaacgccgcccacgccgctaccgctcgtacgaaaccgctacccaaataccgcgaaaaaccgaatccgcgaccgccgcttcgataaccccgactcccgccccaccgaaaacgcgaaccaacgaaaaaacaactttacgttcccgccgccttcctaactcgcccgcgaacgccgctcgcctaccgaaacccgcccgcccgcctcccgcgcgcgctcacactcgcgcctcgcacacgaccgccccccgcaccgccccgccacgcacacgccgtccgcgccccccgccgctacccgaaactaccgcgcgccgccccaacccgcgccgccctaaccgcgcccgccccgtcccatctcgttccaacgaaacgccgcgattcctaaatcaacgaccgccgaaaccgaactaaaaaatacgaaaaacaaaacccgcgaacgaattaccgccgaacgccgaaaaccgaaaaactaaaaaaaacgacgccgaccctacgcccccaaccgacccgaacgcgaaacgccacgaacgtaaaacgcgaaacaacgaacgcgaaacgacgccgaccccgaacgactctcccactaaaaataactattacctaaacgccgaaacgctcccctctcgccgcttacctcgcccaacgcaaccccgaccgctaaacgcacccgtcccgttcgtccccgaacgttactctctaccccgaaaacgtcgaaactaaaacgcccgaactaaaccaccttcgcgaaccccgaaaacgacgacgcgactcaccgcgaaaacgcccgaacgcgtcaaatacgtactttcaaccgtaaataaatactaaacgtttaaaaatacgaaacaactccctaactcgtaaaaccctaaccgaccctaccgcgacgtccgaaaccttctaatccctcgctacgcgcgacgcgaaattaacgacttaaactcaaaaacgacgaaacgaaaaaataccttaacctaaaaacccaaaaaccgaaaacaaatctcctttcgccttaaacta

SEQ ID NO: 40385 - DNA, 500 bp, Artificial Sequence
  chemically treated genomic DNA (Homo sapiens) CpG-island No: 40385
gttcgtagtcggggcggggtagcgggattcgagaggacgggaatttttgtagggagggaagggtcgcgtttgtcgaggcggtttcgagtttcgttattcggttttatttcggttcgcggaggtttaggtttcgggaattgcgggcggagggggcggcgatcgggtattttgcggttattgcggtcgttgtttttgcgattttcgcgttcgtcgggtggtggttttttagtgttcgtttttagtttttttttttcgttttttacgtttttttttcgtttcggttttcgttcggcgttcgggtcgcgtcgattcgtcgtttcgttttttcgagcgcgttaggcggtagatttttggcggcggcggcgtttttttagtgtcggcggtttcgagtcggttgtcgcgtttcgggttttagagttttttcgtttcggttatttttttttttttttattttttttttttagtttttttttttttcgatttttatttttttgtttttt

SEQ ID NO: 40386 - DNA, 500 bp, Artificial Sequence
  chemically treated genomic DNA (Homo sapiens) CpG-island No: 40386
aaaaaacaaaaaaataaaaatcgaaaaaaaaaaaaactaaaaaaaaaaaataaaaaaaaaaaaaaataaccgaaacgaaaaaactctaaaacccgaaacgcgacaaccgactcgaaaccgccgacactaaaaaaacgccgccgccgccaaaaatctaccgcctaacgcgctcgaaaaaacgaaacgacgaatcgacgcgacccgaacgccgaacgaaaaccgaaacgaaaaaaaaacgtaaaaaacgaaaaaaaaaaactaaaaacgaacactaaaaaaccaccacccgacgaacgcgaaaatcgcaaaaacaacgaccgcaataaccgcaaaatacccgatcgccgccccctccgcccgcaattcccgaaacctaaacctccgcgaaccgaaataaaaccgaataacgaaactcgaaaccgcctcgacaaacgcgacccttccctccctacaaaaattcccgtcctctcgaatcccgctaccccgccccgactacgaac

SEQ ID NO: 40387 - DNA, 500 bp, Artificial Sequence
  chemically treated genomic DNA (Homo sapiens) CpG-island No: 40387
ggagggtaaggggatgaggatcgggaggggaggggattaaggggaggagatggggaggagggaaaatggtcgaggcgggaggattttgaggttcggaacgcggtagtcggttcggggtcgtcggtattggggaggcgtcgtcgtcgttaagaatttgtcgtttggcgcgttcggaaggacggggcgacgggtcggcgcggttcgagcgtcgggcgggggtcggggcgggaagggggcgtgaggggcggggaaggggagttgggggcgggtattggggagttattattcggcgggcgcgggagtcgtaggagtagcggtcgtagtggtcgtagggtgttcggtcgtcgtttttttcgttcgtagttttcggggtttgagttttcgcgagtcgggataggatcgagtggcggggttcggagtcgtttcggtaggcgcggtttttttttttttgtagggattttcgttttttcgggtttcgttgtttcgtttcgattgcggat

SEQ ID NO: 40388 - DNA, 500 bp, Artificial Sequence
  chemically treated genomic DNA (Homo sapiens) CpG-island No: 40388
atccgcaatcgaaacgaaacaacgaaacccgaaaaaacgaaaatccctacaaaaaaaaaaaaaccgcgcctaccgaaacgactccgaaccccgccactcgatcctatcccgactcgcgaaaactcaaaccccgaaaactacgaacgaaaaaaacgacgaccgaacaccctacgaccactacgaccgctactcctacgactcccgcgcccgccgaataataactccccaatacccgcccccaactccccttccccgcccctcacgcccccttcccgccccgacccccgcccgacgctcgaaccgcgccgacccgtcgccccgtccttccgaacgcgccaaacgacaaattcttaacgacgacgacgcctccccaataccgacgaccccgaaccgactaccgcgttccgaacctcaaaatcctcccgcctcgaccattttccctcctccccatctcctccccttaatcccctcccctcccgatcctcatccccttaccctcc

SEQ ID NO: 40389 - DNA, 715 bp, Artificial Sequence
  chemically treated genomic DNA (Homo sapiens) CpG-island No: 40389
gttgtcgcgtcgttagttttcgtttttcgttgttcggttttgcgtttcgtcgagcgatgagcgttttttcggttttgcggtcgtttagttcgttgttgttcgtggcggcggtagttgtcgtagcggtcgtcgtattggttttagggttcgggttcgggttcgcgtcgtttttggtttttgtcgcggtttcggtcgggggtatttcgttttatttgtagatcggtttgagtcgtgagtcggtgttgttgttgtaggattcgttcggggattatagtttggcgtacgttcgcgagatggtttgttttattgtcgattagaaggtaagtcgtcgtatcgttgttagttcggcgttttttcgcggcgtagggggcgttgttcggttggtttttttcgcgttaatttttcggttttcggggttcggttggtcgttagtttcgtcggcgttttggaagcggttggtttcgtcgcggttggacgtttgtaattcgaggcgttgcgttcgttgttgtttatttttttttcgttttatttttttttatttatcgatttttttttagttcgtcgtttttttatttatttttattttttttatgatatttttaggtattttgtttttttttcgtcgcgtttttttttgtttttgagattttttagtttttttttttttttttttttacggattttggattagcgtatttttggtgtaggaattttt

SEQ ID NO: 40390 - DNA, 715 bp, Artificial Sequence
  chemically treated genomic DNA (Homo sapiens) CpG-island No: 40390
aaaaattcctacaccaaaaatacgctaatccaaaatccgtaaaaaaaaaaaaaaaaaaaaactaaaaaatctcaaaaacaaaaaaaaacgcgacgaaaaaaaaacaaaatacctaaaaatatcataaaaaaaataaaaataaataaaaaaacgacgaactaaaaaaaaatcgataaataaaaaaaaataaaacgaaaaaaaaataaacaacaacgaacgcaacgcctcgaattacaaacgtccaaccgcgacgaaaccaaccgcttccaaaacgccgacgaaactaacgaccaaccgaaccccgaaaaccgaaaaattaacgcgaaaaaaaccaaccgaacaacgccccctacgccgcgaaaaaacgccgaactaacaacgatacgacgacttaccttctaatcgacaataaaacaaaccatctcgcgaacgtacgccaaactataatccccgaacgaatcctacaacaacaacaccgactcacgactcaaaccgatctacaaataaaacgaaatacccccgaccgaaaccgcgacaaaaaccaaaaacgacgcgaacccgaacccgaaccctaaaaccaatacgacgaccgctacgacaactaccgccgccacgaacaacaacgaactaaacgaccgcaaaaccgaaaaaacgctcatcgctcgacgaaacgcaaaaccgaacaacgaaaaacgaaaactaacgacgcgacaac

SEQ ID NO: 40391 - DNA, 715 bp, Artificial Sequence
  chemically treated genomic DNA (Homo sapiens) CpG-island No: 40391
gaggatttttgtattaggaatgcgttggtttagggttcgtaggggagagaggggaagaaaattgggaagttttaaggataaggaggggcgcggcgaggaaagggtaagatatttggaaatgttatgagaaggatggaaatgggtgaggaggcggcggattggagagaaatcggtgaatagaggaagatggggcgagaggaggatgagtaatagcgagcgtagcgtttcgggttgtaggcgtttagtcgcggcggggttagtcgtttttagagcgtcggcgaggttggcggttagtcgagtttcgggagtcggaaagttggcgcggagagggttagtcgggtagcgttttttgcgtcgcggggaggcgtcgggttggtagcggtgcggcgatttattttttggtcgataatggagtaagttatttcgcggacgtgcgttaggttgtagttttcggacgagttttgtagtagtagtatcggtttacggtttaggtcgatttgtagatggaacgagatgttttcgatcggggtcgcgataggagttaagaacggcgcgggttcgggttcggattttgggattagtgcggcggtcgttgcggtagttgtcgtcgttacgggtagtagcggattgggcggtcgtaggatcggaggggcgtttatcgttcggcggggcgtagggtcgggtagcggagggcgggggttggcggcgcggtagt

SEQ ID NO: 40392 - DNA, 715 bp, Artificial Sequence
  chemically treated genomic DNA (Homo sapiens) CpG-island No: 40392
actaccgcgccgccaacccccgccctccgctacccgaccctacgccccgccgaacgataaacgcccctccgatcctacgaccgcccaatccgctactacccgtaacgacgacaactaccgcaacgaccgccgcactaatcccaaaatccgaacccgaacccgcgccgttcttaactcctatcgcgaccccgatcgaaaacatctcgttccatctacaaatcgacctaaaccgtaaaccgatactactactacaaaactcgtccgaaaactacaacctaacgcacgtccgcgaaataacttactccattatcgaccaaaaaataaatcgccgcaccgctaccaacccgacgcctccccgcgacgcaaaaaacgctacccgactaaccctctccgcgccaactttccgactcccgaaactcgactaaccgccaacctcgccgacgctctaaaaacgactaaccccgccgcgactaaacgcctacaacccgaaacgctacgctcgctattactcatcctcctctcgccccatcttcctctattcaccgatttctctccaatccgccgcctcctcacccatttccatccttctcataacatttccaaatatcttaccctttcctcgccgcgcccctccttatccttaaaacttcccaattttcttcccctctctcccctacgaaccctaaaccaacgcattcctaatacaaaaatcctc

SEQ ID NO: 40393 - DNA, 562 bp, Artificial Sequence
  chemically treated genomic DNA (Homo sapiens) CpG-island No: 40393
ttcgggcggggatagtttattacgtgttgttagacggaacggggcggggtaggttattggttgcggagtgagttgggcgcgcggcgcgtaggcgttttggggattcggtagcggcggtggcggtggcggcggtggcggtggttgcggcgacggtagaggcgaagggagtcggatcgtcgatttgagcgggaggcggcggtggcggttatggcggtagatggagagcgtttttcgttgttgtttgagtttatcgacggtggcgcgggcggtaacggtttagtggggttcggcgggagtggggttgggttcgggggaggtttgatttttttcgtattatcgtacggagtcggtaaatatgtttcgttttagggtaagtcggggcgggttcgaggtgtttttcggggtattttgaaagtcggggagggggcgggatcgagggcggaggcgggttttagtcgttaggtgcgggattgttgtatttgtgattgggcgaggttttttttttttcgtaatcgcgattatagtttagggacggaagggggttttgagtaatttgatagaa

SEQ ID NO: 40394 - DNA, 562 bp, Artificial Sequence
  chemically treated genomic DNA (Homo sapiens) CpG-island No: 40394
ttctatcaaattactcaaaacccccttccgtccctaaactataatcgcgattacgaaaaaaaaaaaacctcgcccaatcacaaatacaacaatcccgcacctaacgactaaaacccgcctccgccctcgatcccgccccctccccgactttcaaaataccccgaaaaacacctcgaacccgccccgacttaccctaaaacgaaacatatttaccgactccgtacgataatacgaaaaaaatcaaacctcccccgaacccaaccccactcccgccgaaccccactaaaccgttaccgcccgcgccaccgtcgataaactcaaacaacaacgaaaaacgctctccatctaccgccataaccgccaccgccgcctcccgctcaaatcgacgatccgactcccttcgcctctaccgtcgccgcaaccaccgccaccgccgccaccgccaccgccgctaccgaatccccaaaacgcctacgcgccgcgcgcccaactcactccgcaaccaataacctaccccgccccgttccgtctaacaacacgtaataaactatccccgcccgaa

SEQ ID NO: 40395 - DNA, 562 bp, Artificial Sequence
  chemically treated genomic DNA (Homo sapiens) CpG-island No: 40395
ttttattaggttgtttagaattttttttcgtttttaggttgtggtcgcgattacggagggaaggaagtttcgtttagttataggtgtagtagtttcgtatttggcgattgggattcgttttcgttttcggtttcgtttttttttcggtttttagagtatttcggggagtatttcggattcgtttcggtttattttggggcggggtatgtttatcggtttcgtacggtggtgcggagggggttaggtttttttcgggtttagttttattttcgtcgggttttattaaatcgttgtcgttcgcgttatcgtcgatgggtttagatagtagcggggaacgttttttatttgtcgttatggtcgttatcgtcgtttttcgtttaggtcggcgattcggtttttttcgtttttgtcgtcgtcgtagttatcgttatcgtcgttatcgttatcgtcgttatcgggtttttagggcgtttgcgcgtcgcgcgtttagtttatttcgtaattagtggtttgtttcgtttcgtttcgtttagtagtacgtgataggttattttcgttcggg

SEQ ID NO: 40396 - DNA, 562 bp, Artificial Sequence
  chemically treated genomic DNA (Homo sapiens) CpG-island No: 40396
cccgaacgaaaataacctatcacgtactactaaacgaaacgaaacgaaacaaaccactaattacgaaataaactaaacgcgcgacgcgcaaacgccctaaaaacccgataacgacgataacgataacgacgataacgataactacgacgacgacaaaaacgaaaaaaaccgaatcgccgacctaaacgaaaaacgacgataacgaccataacgacaaataaaaaacgttccccgctactatctaaacccatcgacgataacgcgaacgacaacgatttaataaaacccgacgaaaataaaactaaacccgaaaaaaacctaaccccctccgcaccaccgtacgaaaccgataaacataccccgccccaaaataaaccgaaacgaatccgaaatactccccgaaatactctaaaaaccgaaaaaaaaacgaaaccgaaaacgaaaacgaatcccaatcgccaaatacgaaactactacacctataactaaacgaaacttccttccctccgtaatcgcgaccacaacctaaaaacgaaaaaaaattctaaacaacctaataaaa

SEQ ID NO: 40397 - DNA, 559 bp, Artificial Sequence
  chemically treated genomic DNA (Homo sapiens) CpG-island No: 40397
tcggggatatcgggttagggcgtcggggttagattcgggttttttcgtcggttatcgattcgcgcggcggagaatcggttcgtgcgttttgtcgaggggtcgtttggcgtttaggttttcggttatcgtttttcgcgtcgcgtttattttgttggttagcgggggttgcgttcgtttcgtttcgagggtcggtgtcggggcgcgttttggacgggttggggtcgcgcgaggatagcggtcgttcgcgtcgtcggaatgttgatgtcgtaggcggtcgcgacgttcggtggtcgtttgggatttttcgttttacggcggtagttgtagttcggagtcgcgtgatttcgggttcgattttttcgcgttcggttgtttgtgcgtatataaaagagaatatttatattttttttttttcggtatagattttatattcgtttcgttttttttttttcgtaatttttcgttttatatacgtttcgttgagaatttttttttttttgcgtatttattgtgtttcgttttttttttttttttaattttatagttgtattcgaggatg

SEQ ID NO: 40398 - DNA, 559 bp, Artificial Sequence
  chemically treated genomic DNA (Homo sapiens) CpG-island No: 40398
catcctcgaatacaactataaaattaaaaaaaaaaaaaaaacgaaacacaataaatacgcaaaaaaaaaaaaattctcaacgaaacgtatataaaacgaaaaattacgaaaaaaaaaaaacgaaacgaatataaaatctataccgaaaaaaaaaaaatataaatattctcttttatatacgcacaaacaaccgaacgcgaaaaaatcgaacccgaaatcacgcgactccgaactacaactaccgccgtaaaacgaaaaatcccaaacgaccaccgaacgtcgcgaccgcctacgacatcaacattccgacgacgcgaacgaccgctatcctcgcgcgaccccaacccgtccaaaacgcgccccgacaccgaccctcgaaacgaaacgaacgcaacccccgctaaccaacaaaataaacgcgacgcgaaaaacgataaccgaaaacctaaacgccaaacgacccctcgacaaaacgcacgaaccgattctccgccgcgcgaatcgataaccgacgaaaaaacccgaatctaaccccgacgccctaacccgatatccccga

SEQ ID NO: 40399 - DNA, 559 bp, Artificial Sequence
  chemically treated genomic DNA (Homo sapiens) CpG-island No: 40399
tattttcgaatataattatggaattaaagaggagagaaaggcgaggtatagtgggtgcgtaaagaaaaagaggtttttagcggagcgtgtgtgaggcggggggttacgggggaggggagacggggcgggtgtgaagtttgtgtcgggaaaagaaaaatatgagtgtttttttttgtgtgcgtataaatagtcgagcgcggggaggtcgggttcggggttacgcggtttcgggttgtagttgtcgtcgtggggcggggggttttaggcggttatcgggcgtcgcggtcgtttgcggtattagtatttcggcggcgcgggcggtcgttgttttcgcgcgattttagttcgtttagagcgcgtttcggtatcgattttcggggcgaggcgagcgtagttttcgttggttaataaggtaagcgcggcgcggggagcggtggtcgggagtttgggcgttaggcgatttttcgatagggcgtacggatcggtttttcgtcgcgcgggtcgatgatcgacggggaggttcgagtttggtttcgacgttttggttcggtgttttcga

SEQ ID NO: 40400 - DNA, 559 bp, Artificial Sequence
  chemically treated genomic DNA (Homo sapiens) CpG-island No: 40400
tcgaaaacaccgaaccaaaacgtcgaaaccaaactcgaacctccccgtcgatcatcgacccgcgcgacgaaaaaccgatccgtacgccctatcgaaaaatcgcctaacgcccaaactcccgaccaccgctccccgcgccgcgcttaccttattaaccaacgaaaactacgctcgcctcgccccgaaaatcgataccgaaacgcgctctaaacgaactaaaatcgcgcgaaaacaacgaccgcccgcgccgccgaaatactaataccgcaaacgaccgcgacgcccgataaccgcctaaaaccccccgccccacgacgacaactacaacccgaaaccgcgtaaccccgaacccgacctccccgcgctcgactatttatacgcacacaaaaaaaaacactcatatttttcttttcccgacacaaacttcacacccgccccgtctcccctcccccgtaaccccccgcctcacacacgctccgctaaaaacctctttttctttacgcacccactatacctcgcctttctctcctctttaattccataattatattcgaaaata

SEQ ID NO: 40401 - DNA, 1140 bp, Artificial Sequence
  chemically treated genomic DNA (Homo sapiens) CpG-island No: 40401
gtatatcggtgttcgacggtaggagggtgtatattttttacgacggtgcgtcgcgatcggtttcggaacgattggtaaggttcgacgggtaaggtggttcggggggtttcgttagttcgttcgttcgttttttttttttttcgttttcgtttttcggtttcgcgttttttttcgggagggcgcgcgggtcggggcggcggcggcgacggcggtggcggcggcggcggcggcggcgggatcgaaatttttttcgagtgttatagttttttcggtagtagtattcgtcgaatttcggggtcgagggagcgagattcgtcgtcgcgtttttttttttttcggcgtttattttcgcggggaatttttcgcgaggggggtttttttcgcgggggcgcgtcggcgttttttcgtgggggggtcgggttattttttttacggcgcgatcgtttttttatttttttttttcgcgttttcgtttcggcgacggggggggtgtcgcgcgcgggtcggggggcggggcggattgtttttagtgcgtttcgggcgggtcgcgtcgtcgggttcgggggaggttttttcggggttacgcgcgcgtttttcgaagagggggacggcggagcgagcgtacggggtcggcggcgacgtcggttatttattcgattcgttttgaaatacggattaaggagtttaatacgtgcgcgagtcgggggttcgtacgaaagtcgtcgtggcgtaatgaaggtgaaggtcggcgcgttcgtcggtcgaggtgggatttcgaggtttttttagttcgtcgagggcgtattatcggttcgtttcgttcgtcgcgtcggggaggtggagtacgagcgtacgtgttaggattcgaaagatggtgaattatgtttgggtagggcgaagttagaggaaattttggtggaggttcgtagcggttttgacgtgtaaatcggtcgttcgatttgggtataggggcgaaagattaatcgaattatttagtagttggtttttttcgaagttttttttaggatagttggcgttttcgtagattcgacgtattttcgttacgtagttttattcggtaaagcgaatgattagaggttttggggtcgaaacgattttaatttatttttaaattttaaa

SEQ ID NO: 40402 - DNA, 1140 bp, Artificial Sequence
  chemically treated genomic DNA (Homo sapiens) CpG-island No: 40402
tttaaaatttaaaaataaattaaaatcgtttcgaccccaaaacctctaatcattcgctttaccgaataaaactacgtaacgaaaatacgtcgaatctacgaaaacgccaactatcctaaaaaaaacttcgaaaaaaaccaactactaaataattcgattaatctttcgcccctatacccaaatcgaacgaccgatttacacgtcaaaaccgctacgaacctccaccaaaatttcctctaacttcgccctacccaaacataattcaccatctttcgaatcctaacacgtacgctcgtactccacctccccgacgcgacgaacgaaacgaaccgataatacgccctcgacgaactaaaaaaacctcgaaatcccacctcgaccgacgaacgcgccgaccttcaccttcattacgccacgacgactttcgtacgaacccccgactcgcgcacgtattaaactccttaatccgtatttcaaaacgaatcgaataaataaccgacgtcgccgccgaccccgtacgctcgctccgccgtccccctcttcgaaaaacgcgcgcgtaaccccgaaaaaacctcccccgaacccgacgacgcgacccgcccgaaacgcactaaaaacaatccgccccgccccccgacccgcgcgcgacaccccccccgtcgccgaaacgaaaacgcgaaaaaaaaaaataaaaaaacgatcgcgccgtaaaaaaaataacccgacccccccacgaaaaaacgccgacgcgcccccgcgaaaaaaacccccctcgcgaaaaattccccgcgaaaataaacgccgaaaaaaaaaaaaacgcgacgacgaatctcgctccctcgaccccgaaattcgacgaatactactaccgaaaaaactataacactcgaaaaaaatttcgatcccgccgccgccgccgccgccgccaccgccgtcgccgccgccgccccgacccgcgcgccctcccgaaaaaaaacgcgaaaccgaaaaacgaaaacgaaaaaaaaaaaaaacgaacgaacgaactaacgaaaccccccgaaccaccttacccgtcgaaccttaccaatcgttccgaaaccgatcgcgacgcaccgtcgtaaaaaatatacaccctcctaccgtcgaacaccgatatac

SEQ ID NO: 40403 - DNA, 1140 bp, Artificial Sequence
  chemically treated genomic DNA (Homo sapiens) CpG-island No: 40403
tttaaagtttgagaataggttgagatcgtttcggttttaagatttttaattattcgttttatcggataaaattgcgtggcgggggtgcgtcgggtttgcgagagcgttagttattttgagggaaatttcggagggaattagttattagatggttcgattagtttttcgtttttatatttaggtcggacgatcgatttgtacgttaggatcgttacggatttttattagagttttttttggtttcgttttgtttaggtatagtttattatttttcgggttttaatacgtgcgttcgtgttttattttttcggcgcggcgggcgagacgggtcggtggtgcgttttcggcggattggagaggtttcgggattttatttcggtcggcgagcgcgtcggtttttatttttattgcgttacggcggttttcgtgcgagttttcgattcgcgtacgtgttagattttttggttcgtgttttaagacgggtcgggtgggtagtcgacgtcgtcgtcgatttcgtgcgttcgtttcgtcgttttttttttcgggggacgcgcgcgtggtttcgagagaatttttttcgggttcgacggcgcgattcgttcggggcgtattggggatagttcgtttcgtttttcgattcgcgcgcggtatttttttcgtcgtcggggcgggggcgcggggaggaggggtgggagagcggtcgcgtcgtgggaggggtggttcggtttttttacgaggagacgtcggcgcgttttcgcgggggagatttttttcgcgggggatttttcgcgggggtgggcgtcgggaggggggagagcgcggcgacgggtttcgttttttcggtttcgggattcggcgagtgttgttgtcgggggggttgtaatattcggggggggtttcggtttcgtcgtcgtcgtcgtcgtcgttatcgtcgtcgtcgtcgtcgtttcgattcgcgcgttttttcgagggaggacgcggggtcggggggcggagacgggggaggaggaggacggacggacggattgacggggtttttcgagttattttattcgtcggattttattagtcgtttcggagtcggtcgcggcgtatcgtcgtggaggatatgtatttttttgtcgtcggatatcggtatgt

SEQ ID NO: 40404 - DNA, 1140 bp, Artificial Sequence
  chemically treated genomic DNA (Homo sapiens) CpG-island No: 40404
acataccgatatccgacgacaaaaaaatacatatcctccacgacgatacgccgcgaccgactccgaaacgactaataaaatccgacgaataaaataactcgaaaaaccccgtcaatccgtccgtccgtcctcctcctcccccgtctccgccccccgaccccgcgtcctccctcgaaaaaacgcgcgaatcgaaacgacgacgacgacgacgataacgacgacgacgacgacgacgaaaccgaaaccccccccgaatattacaacccccccgacaacaacactcgccgaatcccgaaaccgaaaaaacgaaacccgtcgccgcgctctcccccctcccgacgcccacccccgcgaaaaatcccccgcgaaaaaaatctcccccgcgaaaacgcgccgacgtctcctcgtaaaaaaaccgaaccacccctcccacgacgcgaccgctctcccacccctcctccccgcgcccccgccccgacgacgaaaaaaataccgcgcgcgaatcgaaaaacgaaacgaactatccccaatacgccccgaacgaatcgcgccgtcgaacccgaaaaaaattctctcgaaaccacgcgcgcgtcccccgaaaaaaaaaacgacgaaacgaacgcacgaaatcgacgacgacgtcgactacccacccgacccgtcttaaaacacgaaccaaaaaatctaacacgtacgcgaatcgaaaactcgcacgaaaaccgccgtaacgcaataaaaataaaaaccgacgcgctcgccgaccgaaataaaatcccgaaacctctccaatccgccgaaaacgcaccaccgacccgtctcgcccgccgcgccgaaaaaataaaacacgaacgcacgtattaaaacccgaaaaataataaactatacctaaacaaaacgaaaccaaaaaaaactctaataaaaatccgtaacgatcctaacgtacaaatcgatcgtccgacctaaatataaaaacgaaaaactaatcgaaccatctaataactaattccctccgaaatttccctcaaaataactaacgctctcgcaaacccgacgcacccccgccacgcaattttatccgataaaacgaataattaaaaatcttaaaaccgaaacgatctcaacctattctcaaactttaaa

SEQ ID NO: 40405 - DNA, 501 bp, Artificial Sequence
  chemically treated genomic DNA (Homo sapiens) CpG-island No: 40405
  unsure (436)
atagacgtttttatttcgaagttcgttaaatttcgatattatatttttttatttttttatgtttcgtttcgtatataacgattaatagaatagattttttttttgtcgttatcgtagtaagcgttttagttatatgattttatttttacgaagatcgcgttcgacgcgattttttatttgacgatttatttttagagcgttttttcggatttgttgtcgtattaatatcgtttgtagtcgcgtttttatttcgatttttttcgcgttttcgttttttttttatgacggcgttgcgtttcgtcgattttatcgtaagattttcggtttttgttttcgtttttcgttttcgtatttttatttttttcggtcgttaattgttcgttattttttcgtgttcgtttttattcgtttacgtttttttcgcgcgcgtttttantttcgtttttttttatttcgatcgcgttttcgcggtttttttttcgttgttattttttattgatt

SEQ ID NO: 40406 - DNA, 501 bp, Artificial Sequence
  chemically treated genomic DNA (Homo sapiens) CpG-island No: 40406
  unsure (66)
aatcaataaaaaataacaacgaaaaaaaaaccgcgaaaacgcgatcgaaataaaaaaaaacgaaantaaaaacgcgcgcgaaaaaaacgtaaacgaataaaaacgaacacgaaaaaataacgaacaattaacgaccgaaaaaaataaaaatacgaaaacgaaaaacgaaaacaaaaaccgaaaatcttacgataaaatcgacgaaacgcaacgccgtcataaaaaaaaaacgaaaacgcgaaaaaaatcgaaataaaaacgcgactacaaacgatattaatacgacaacaaatccgaaaaaacgctctaaaaataaatcgtcaaataaaaaatcgcgtcgaacgcgatcttcgtaaaaataaaatcatataactaaaacgcttactacgataacgacaaaaaaaaaatctattctattaatcgttatatacgaaacgaaacataaaaaaataaaaaaatataatatcgaaatttaacgaacttcgaaataaaaacgtctat

SEQ ID NO: 40407 - DNA, 501 bp, Artificial Sequence
  chemically treated genomic DNA (Homo sapiens) CpG-island No: 40407
  unsure (66)
gattaatggaggatggtagcgaagggggaatcgcgggagcgcgatcgggataagggaagacggagntgggagcgcgcgcgaaaagggcgtggacgagtgggagcgaatacggagggatggcgggtaattgacggtcgagaagagtgggagtacgagggcgggaagcggggataaagatcgggggttttgcggtgagatcggcggggcgtaacgtcgttatggggggggagcgggaacgcggggggggtcgagataagaacgcgattataggcggtgttggtgcggtaatagattcgggggaacgttttgggagtgggtcgttaggtgaggggtcgcgtcgagcgcggttttcgtggaggtggagttatgtgattgaggcgtttgttacggtggcgatagggagaagatttattttgttggtcgttgtgtgcggggcggggtatggggggatgggagaatatggtgtcggaatttggcgagtttcggagtaggggcgtttat

SEQ ID NO: 40408 - DNA, 501 bp, Artificial Sequence
  chemically treated genomic DNA (Homo sapiens) CpG-island No: 40408
  unsure (436)
ataaacgcccctactccgaaactcgccaaattccgacaccatattctcccatccccccataccccgccccgcacacaacgaccaacaaaataaatcttctccctatcgccaccgtaacaaacgcctcaatcacataactccacctccacgaaaaccgcgctcgacgcgacccctcacctaacgacccactcccaaaacgttcccccgaatctattaccgcaccaacaccgcctataatcgcgttcttatctcgaccccccccgcgttcccgctccccccccataacgacgttacgccccgccgatctcaccgcaaaacccccgatctttatccccgcttcccgccctcgtactcccactcttctcgaccgtcaattacccgccatccctccgtattcgctcccactcgtccacgcccttttcgcgcgcgctcccanctccgtcttcccttatcccgatcgcgctcccgcgattcccccttcgctaccatcctccattaatc

SEQ ID NO: 40409 - DNA, 1289 bp, Artificial Sequence
  chemically treated genomic DNA (Homo sapiens) CpG-island No: 40409
  unsure (803)
ggggtcgcgtttgcgttagggggcggtttataattagattcgcggtttttaatttattttttagaggggcgaaagcgagtttcgataaggacggcgacggttttttagaagtcggggtttaggtaggttgttcggttttcgagttcgtttagcgtcgtttatgatgcgtttcgtagttttttttttaagaagggcgttcgggttttttttggacgcgtagttttcgcgcgtcgcggggtttgggaatagcgtatcggttgcgttcggagtcgggcggacggtgagattgacggcgttcgcgtttaatcgtggggcggggtcgagggggtttgtaggtagcgattaatgggagttcgtagagcgggcggggggcggtgtcgttgggcgggcgggcggtggtatcgggagtcggcgcggtagattgggagttcgggaggagttggcggagcgagaggaggaggaggacggaggaggagtatcgcgttttcgtcggtcgttcgagcgtaggtcgagagttttagtcgtagttagcgggttcgggtcgttttcgtcggagttcggcgcggggagagttcgggtcgatgggtagtttcgggtagcggcgggcggcgaggcggtagttcgggtacgcgtcgttcggcgcgtataggttgtagtaggtttcggcggtacggcgtgcgaaggttcgtgtcggggaattcgacgggtagcgtggcgagggtcggttcggaatgttgcggttaggcggggattgtttcgaaggggaaggggatgtttttcggggcgttttggggggttgacgncggcgaggggtgcgaggggcgcgggggtgcgagggtcgcggcgtagggttcggtttgtagacgtagatgcgttcgcgttttcgattttcggttggaagaggagtcgtcgtcgtttgttttttttaagttatcgatcggttgaaaggttattttcgtttcggcgatataggtattgaggagggttttttttaggtgtttagaatttcgttttgattaacgttttttggaagggttcgcggttgttcgacgtagttttttcggcgcgtttggttagttgacgtcgaatttgttgcggggttaattttttttttagagggggtgcgttcggagcgcgcgtttttatcgggacggatttttttttgtaagatcgggagttttcggcgagcgttttttttatttatcgcgatttttttttttattttgttagtttttgggttttttcgggttttttcgtgttagtgagggtagtttgtttacgttttggga

SEQ ID NO: 40410 - DNA, 1289 bp, Artificial Sequence
  chemically treated genomic DNA (Homo sapiens) CpG-island No: 40410
  unsure (487)
tcccaaaacgtaaacaaactaccctcactaacacgaaaaaacccgaaaaaacccaaaaactaacaaaataaaaaaaaaaatcgcgataaataaaaaaaacgctcgccgaaaactcccgatcttacaaaaaaaaatccgtcccgataaaaacgcgcgctccgaacgcaccccctctaaaaaaaaaattaaccccgcaacaaattcgacgtcaactaaccaaacgcgccgaaaaaactacgtcgaacaaccgcgaacccttccaaaaaacgttaatcaaaacgaaattctaaacacctaaaaaaaaccctcctcaatacctatatcgccgaaacgaaaataacctttcaaccgatcgataacttaaaaaaaacaaacgacgacgactcctcttccaaccgaaaatcgaaaacgcgaacgcatctacgtctacaaaccgaaccctacgccgcgaccctcgcacccccgcgcccctcgcacccctcgccgncgtcaaccccccaaaacgccccgaaaaacatccccttccccttcgaaacaatccccgcctaaccgcaacattccgaaccgaccctcgccacgctacccgtcgaattccccgacacgaaccttcgcacgccgtaccgccgaaacctactacaacctatacgcgccgaacgacgcgtacccgaactaccgcctcgccgcccgccgctacccgaaactacccatcgacccgaactctccccgcgccgaactccgacgaaaacgacccgaacccgctaactacgactaaaactctcgacctacgctcgaacgaccgacgaaaacgcgatactcctcctccgtcctcctcctcctctcgctccgccaactcctcccgaactcccaatctaccgcgccgactcccgataccaccgcccgcccgcccaacgacaccgccccccgcccgctctacgaactcccattaatcgctacctacaaaccccctcgaccccgccccacgattaaacgcgaacgccgtcaatctcaccgtccgcccgactccgaacgcaaccgatacgctattcccaaaccccgcgacgcgcgaaaactacgcgtccaaaaaaaacccgaacgcccttcttaaaaaaaaaactacgaaacgcatcataaacgacgctaaacgaactcgaaaaccgaacaacctacctaaaccccgacttctaaaaaaccgtcgccgtccttatcgaaactcgctttcgcccctctaaaaaataaattaaaaaccgcgaatctaattataaaccgccccctaacgcaaacgcgacccc

SEQ ID NO: 40411 - DNA, 1289 bp, Artificial Sequence
  chemically treated genomic DNA (Homo sapiens) CpG-island No: 40411
  unsure (487)
ttttaggacgtgggtaaattatttttattgatacgggaagattcggagaggtttaggagttggtaaagtgggaagaaaggtcgcggtgagtgagaagagcgttcgtcggaggttttcggttttataaagagggattcgtttcggtgagggcgcgcgtttcgggcgtattttttttagaaggggaattagtttcgtagtaagttcggcgttagttggttaggcgcgtcggggaagttgcgtcgggtaatcgcgagtttttttagagagcgttagttagagcgaagttttgggtatttggagaagattttttttagtgtttgtgtcgtcgagacgggaataattttttagtcgatcgataatttggagagaataggcggcggcggttttttttttagtcggggatcgggagcgcgggcgtatttgcgtttataagtcggattttgcgtcgcgattttcgtattttcgcgtttttcgtatttttcgtcgncgttagttttttaaagcgtttcgaagggtatttttttttttttcgggatagttttcgtttggtcgtagtatttcgaatcgattttcgttacgttgttcgtcggatttttcgatacgaattttcgtacgtcgtatcgtcggaatttgttatagtttgtgcgcgtcgggcggcgcgtattcgggttgtcgtttcgtcgttcgtcgttgttcggggttgtttatcggttcggatttttttcgcgtcgggtttcggcggaggcggttcggattcgttggttgcggttggagttttcggtttgcgttcgggcggtcggcgggggcgcggtgtttttttttcgtttttttttttttttcgtttcgttagtttttttcgggtttttagtttgtcgcgtcggttttcgatgttatcgttcgttcgtttagcggtatcgtttttcgttcgttttgcgggtttttattggtcgttgtttgtaggttttttcggtttcgttttacgattgggcgcggacgtcgttagttttatcgttcgttcggtttcgggcgtagtcggtgcgttgtttttaggtttcgcggcgcgcgggagttgcgcgtttaggaggggttcggacgttttttttggggagggggttgcggggcgtattatgagcggcgttgggcgagttcgagggtcgggtagtttatttggatttcggtttttagagagtcgtcgtcgtttttgtcgagattcgttttcgtttttttgaggaataagttaaaaatcgcgagtttggttatgagtcgttttttggcgtaggcgcgatttt

SEQ ID NO: 40412 - DNA, 1289 bp, Artificial Sequence
  chemically treated genomic DNA (Homo sapiens) CpG-island No: 40412
  unsure (803)
aaaatcgcgcctacgccaaaaaacgactcataaccaaactcgcgatttttaacttattcctcaaaaaaacgaaaacgaatctcgacaaaaacgacgacgactctctaaaaaccgaaatccaaataaactacccgaccctcgaactcgcccaacgccgctcataatacgccccgcaaccccctccccaaaaaaaacgtccgaacccctcctaaacgcgcaactcccgcgcgccgcgaaacctaaaaacaacgcaccgactacgcccgaaaccgaacgaacgataaaactaacgacgtccgcgcccaatcgtaaaacgaaaccgaaaaaacctacaaacaacgaccaataaaaacccgcaaaacgaacgaaaaacgataccgctaaacgaacgaacgataacatcgaaaaccgacgcgacaaactaaaaacccgaaaaaaactaacgaaacgaaaaaaaaaaaaaaacgaaaaaaaaacaccgcgcccccgccgaccgcccgaacgcaaaccgaaaactccaaccgcaaccaacgaatccgaaccgcctccgccgaaacccgacgcgaaaaaaatccgaaccgataaacaaccccgaacaacgacgaacgacgaaacgacaacccgaatacgcgccgcccgacgcgcacaaactataacaaattccgacgatacgacgtacgaaaattcgtatcgaaaaatccgacgaacaacgtaacgaaaatcgattcgaaatactacgaccaaacgaaaactatcccgaaaaaaaaaaaaatacccttcgaaacgctttaaaaaactaacgncgacgaaaaatacgaaaaacgcgaaaatacgaaaatcgcgacgcaaaatccgacttataaacgcaaatacgcccgcgctcccgatccccgactaaaaaaaaaaccgccgccgcctattctctccaaattatcgatcgactaaaaaattattcccgtctcgacgacacaaacactaaaaaaaatcttctccaaatacccaaaacttcgctctaactaacgctctctaaaaaaactcgcgattacccgacgcaacttccccgacgcgcctaaccaactaacgccgaacttactacgaaactaattccccttctaaaaaaaatacgcccgaaacgcgcgccctcaccgaaacgaatccctctttataaaaccgaaaacctccgacgaacgctcttctcactcaccgcgacctttcttcccactttaccaactcctaaacctctccgaatcttcccgtatcaataaaaataatttacccacgtcctaaaa

SEQ ID NO: 40413 - DNA, 509 bp, Artificial Sequence
  chemically treated genomic DNA (Homo sapiens) CpG-island No: 40413
tttaagagtcggtagtggatataaaatgagatacgtatataaatatacgcggggagggagtaattaatatatgcgttaataggcggtttcgttcgagtatcgttttcgcgggacgcggatgaggattgaaaattggatatttttatataggcgagaaaaagcgatgttgtttatagtttttttttattggagtcggtttttcggcgtattattttgtattattgtttagtttatcggagattttttggtggtatggagaacggtcggattgtagtatgtgtagacgtaaggttcgaagtataggttgagcgtgataaacggttcggcgacgtcggtttcgcggtcggatagcggacgtgattgagttgttagtttacgagtgttcgaggaagaataagtgaaggggttagtggtgtggagaagatacgtattcgtagtacggtggtttcgttttgtagttggtatttgttaatgtgtaggttgtatttgttgtacggtagaagcgagtt

SEQ ID NO: 40414 - DNA, 509 bp, Artificial Sequence
  chemically treated genomic DNA (Homo sapiens) CpG-island No: 40414
aactcgcttctaccgtacaacaaatacaacctacacattaacaaataccaactacaaaacgaaaccaccgtactacgaatacgtatcttctccacaccactaaccccttcacttattcttcctcgaacactcgtaaactaacaactcaatcacgtccgctatccgaccgcgaaaccgacgtcgccgaaccgtttatcacgctcaacctatacttcgaaccttacgtctacacatactacaatccgaccgttctccataccaccaaaaaatctccgataaactaaacaataatacaaaataatacgccgaaaaaccgactccaataaaaaaaaactataaacaacatcgctttttctcgcctatataaaaatatccaattttcaatcctcatccgcgtcccgcgaaaacgatactcgaacgaaaccgcctattaacgcatatattaattactccctccccgcgtatatttatatacgtatctcattttatatccactaccgactcttaaa

SEQ ID NO: 40415 - DNA, 509 bp, Artificial Sequence
  chemically treated genomic DNA (Homo sapiens) CpG-island No: 40415
aattcgtttttatcgtataatagatataatttatatattggtagatattaattataagacggggttatcgtgttacgggtacgtgttttttttatattattaatttttttatttattttttttcgaatattcgtggattaataatttagttacgttcgttgttcgatcgcggggtcgacgtcgtcgaatcgtttattacgtttaatttgtatttcgggttttgcgtttgtatatgttgtaattcggtcgttttttatattattagaaagttttcggtggattaggtagtggtatagggtgatacgtcgagagatcgattttaataggaagggattgtggataatatcgttttttttcgtttgtatgggaatatttagtttttagtttttattcgcgtttcgcgaagacggtattcgagcggagtcgtttattgacgtatgtgttaattatttttttttcgcgtgtgtttatatgcgtattttattttatgtttattgtcggtttttgga

SEQ ID NO: 40416 - DNA, 509 bp, Artificial Sequence
  chemically treated genomic DNA (Homo sapiens) CpG-island No: 40416
tccaaaaaccgacaataaacataaaataaaatacgcatataaacacacgcgaaaaaaaaataattaacacatacgtcaataaacgactccgctcgaataccgtcttcgcgaaacgcgaataaaaactaaaaactaaatattcccatacaaacgaaaaaaaacgatattatccacaatcccttcctattaaaatcgatctctcgacgtatcaccctataccactacctaatccaccgaaaactttctaataatataaaaaacgaccgaattacaacatatacaaacgcaaaacccgaaatacaaattaaacgtaataaacgattcgacgacgtcgaccccgcgatcgaacaacgaacgtaactaaattattaatccacgaatattcgaaaaaaaataaataaaaaaattaataatataaaaaaaacacgtacccgtaacacgataaccccgtcttataattaatatctaccaatatataaattatatctattatacgataaaaacgaatt

SEQ ID NO: 40417 - DNA, 704 bp, Artificial Sequence
  chemically treated genomic DNA (Homo sapiens) CpG-island No: 40417
tttcgttgcgttcgttcggtcgtaggtcggcggttcgggtttcgcgtcgttagttcgttcggtcgtttgcgtcgcgcgtcgcggttttttttttcgttatttgataacgggtcgtcgtcggtcgtcgtagtcgtagcggtggtcgggtcgtgcgcgtcggtgtacgtcgtttattagtaagtaggtatatttttgtttttagcgttttcgcgcggttttttttttttaggatattacgtaaagtagtttttttttatttgtatagattcgcggttagggtatttttcgtatttttttacgcgttcgatatttttttcgcggttttttttattttcgtttttttcgatttttattttcgggttatcgggaaggggttgggggtatacgtcggggagcgggggacggagttcggcggcggcgattttaatataaagtgaaataagtttttagcgtcgaaggaggtaggaaaaatttagcgtttaggttatttatcgagtcgaggagggatttagattttcgtcgtttcgttttcgcggtggtcggttcgtttttcgcgtatttcgaggttgtatttagtattttagacgcgagacgtggaggaacgttgtgaacgagtcgggagattttttaagttgttttgggtttcgtggagcgttaaggtttaagatataatttggtaaagatttgtgttatagttatcgaag

SEQ ID NO: 40418 - DNA, 704 bp, Artificial Sequence
  chemically treated genomic DNA (Homo sapiens) CpG-island No: 40418
cttcgataactataacacaaatctttaccaaattatatcttaaaccttaacgctccacgaaacccaaaacaacttaaaaaatctcccgactcgttcacaacgttcctccacgtctcgcgtctaaaatactaaatacaacctcgaaatacgcgaaaaacgaaccgaccaccgcgaaaacgaaacgacgaaaatctaaatccctcctcgactcgataaataacctaaacgctaaatttttcctacctccttcgacgctaaaaacttatttcactttatattaaaatcgccgccgccgaactccgtcccccgctccccgacgtatacccccaaccccttcccgataacccgaaaataaaaatcgaaaaaaacgaaaataaaaaaaaccgcgaaaaaaatatcgaacgcgtaaaaaaatacgaaaaataccctaaccgcgaatctatacaaataaaaaaaaactactttacgtaatatcctaaaaaaaaaaaaccgcgcgaaaacgctaaaaacaaaaatatacctacttactaataaacgacgtacaccgacgcgcacgacccgaccaccgctacgactacgacgaccgacgacgacccgttatcaaataacgaaaaaaaaaaccgcgacgcgcgacgcaaacgaccgaacgaactaacgacgcgaaacccgaaccgccgacctacgaccgaacgaacgcaacgaaa

SEQ ID NO: 40419 - DNA, 704 bp, Artificial Sequence
  chemically treated genomic DNA (Homo sapiens) CpG-island No: 40419
tttcggtgattgtggtataagtttttgttaagttgtgttttggattttgacgttttacggagtttagagtaatttggagggtttttcggttcgtttatagcgtttttttacgtttcgcgtttggggtgttgggtgtagtttcggggtgcgcggagggcggatcggttatcgcgagagcggagcggcgggaatttaggttttttttcggttcggtaagtggtttggacgttgggttttttttgtttttttcggcgttgggagtttgttttattttatattggaatcgtcgtcgtcgaatttcgtttttcgtttttcggcgtgtgtttttagttttttttcggtggttcgagggtgagggtcggagggggcggggatgggggagatcgcgggaggggtgtcgggcgcgtggggaaatgcggggaatattttggtcgcggatttatgtagatgaggggaggttgttttgcgtaatgttttggggggagggggtcgcgcgggagcgttggaggtaggaatgtgtttgtttattaatgagcgacgtgtatcggcgcgtacggttcggttatcgttgcggttgcggcggtcggcggcggttcgttgttaggtagcgggggagggggtcgcggcgcgcggcgtaggcggtcgggcgggttggcggcgcgaggttcgggtcgtcggtttgcggtcgagcgagcgtagcgaag

SEQ ID NO: 40420 - DNA, 704 bp, Artificial Sequence
  chemically treated genomic DNA (Homo sapiens) CpG-island No: 40420
cttcgctacgctcgctcgaccgcaaaccgacgacccgaacctcgcgccgccaacccgcccgaccgcctacgccgcgcgccgcgaccccctcccccgctacctaacaacgaaccgccgccgaccgccgcaaccgcaacgataaccgaaccgtacgcgccgatacacgtcgctcattaataaacaaacacattcctacctccaacgctcccgcgcgaccccctccccccaaaacattacgcaaaacaacctcccctcatctacataaatccgcgaccaaaatattccccgcatttccccacgcgcccgacacccctcccgcgatctcccccatccccgccccctccgaccctcaccctcgaaccaccgaaaaaaaactaaaaacacacgccgaaaaacgaaaaacgaaattcgacgacgacgattccaatataaaataaaacaaactcccaacgccgaaaaaaacaaaaaaaacccaacgtccaaaccacttaccgaaccgaaaaaaaacctaaattcccgccgctccgctctcgcgataaccgatccgccctccgcgcaccccgaaactacacccaacaccccaaacgcgaaacgtaaaaaaacgctataaacgaaccgaaaaaccctccaaattactctaaactccgtaaaacgtcaaaatccaaaacacaacttaacaaaaacttataccacaatcaccgaaa

SEQ ID NO: 40421 - DNA, 636 bp, Artificial Sequence
  chemically treated genomic DNA (Homo sapiens) CpG-island No: 40421
tgcgttacgtgtcgcgttttatgagaggggcgaagatttagggcgcgggggggggtgatttcggaaacgggagttttttgcgtaatatgttagaggttacggggtcgtattggtggggggaaatcgttggcgggcgaggaaacgggaaataaatggcggtgttaatgataggatgaggtggggaatattagtatagtggcggggatttgaggtattcgtaatatagtttttttgagcggtttattcggtgtgttagtttatcgacgtggaattatcggtaatcggtagcggtatttcgacgggttatgagcgatgcgattacgatatcgttgatcggggcggcgacggtcggggggtaaagcgcggcgcgaaatgtgggcgcgggtatgcggggcggcgataaggacgtcggggtggcgtcgcggttttttggtttttgtgttacggggatatgatgcgattcggtttagggggacgtggttttttcgttcgcgggggtttatatacgtcgcggaggttgggtaggagacgatggatttttgcgttcgcgagtaataggcgggatatataaatcgcgttattttttttttttttatgttttcgtaaagtaagatttatttttttttcgttaagtta

SEQ ID NO: 40422 - DNA, 636 bp, Artificial Sequence
  chemically treated genomic DNA (Homo sapiens) CpG-island No: 40422
taacttaacgaaaaaaaaataaatcttactttacgaaaacataaaaaaaaaaaaaataacgcgatttatatatcccgcctattactcgcgaacgcaaaaatccatcgtctcctacccaacctccgcgacgtatataaacccccgcgaacgaaaaaaccacgtccccctaaaccgaatcgcatcatatccccgtaacacaaaaaccaaaaaaccgcgacgccaccccgacgtccttatcgccgccccgcatacccgcgcccacatttcgcgccgcgctttaccccccgaccgtcgccgccccgatcaacgatatcgtaatcgcatcgctcataacccgtcgaaataccgctaccgattaccgataattccacgtcgataaactaacacaccgaataaaccgctcaaaaaaactatattacgaatacctcaaatccccgccactatactaatattccccacctcatcctatcattaacaccgccatttatttcccgtttcctcgcccgccaacgatttccccccaccaatacgaccccgtaacctctaacatattacgcaaaaaactcccgtttccgaaatcacccccccccgcgccctaaatcttcgcccctctcataaaacgcgacacgtaacgca

SEQ ID NO: 40423 - DNA, 636 bp, Artificial Sequence
  chemically treated genomic DNA (Homo sapiens) CpG-island No: 40423
tggtttggcgaaaagaaaatggattttattttacgaagatataaaaagggggggggtgacgcggtttatatgtttcgtttgttattcgcgggcgtagggatttatcgttttttatttagttttcgcgacgtgtgtaaattttcgcgagcgggggggttacgtttttttgagtcgggtcgtattatgttttcgtgatatagagattaagagatcgcggcgttatttcggcgtttttgtcgtcgtttcgtatattcgcgtttatatttcgcgtcgcgttttgtttttcggtcgtcgtcgtttcgattaacggtatcgtaatcgtatcgtttatgattcgtcgaagtgtcgttgtcggttgtcgatagttttacgtcgataagttgatatatcgagtaggtcgtttagaagagttgtattacgagtattttaggttttcgttattgtgttaatattttttattttattttgttattaatatcgttatttatttttcgttttttcgttcgttaacggtttttttttattagtgcgatttcgtgatttttagtatgttgcgtaaaaaattttcgttttcgggattattttttttcgcgttttagattttcgttttttttatagggcgcggtacgtgacgta

SEQ ID NO: 40424 - DNA, 636 bp, Artificial Sequence
  chemically treated genomic DNA (Homo sapiens) CpG-island No: 40424
tacgtcacgtaccgcgccctataaaaaaaacgaaaatctaaaacgcgaaaaaaaataatcccgaaaacgaaaattttttacgcaacatactaaaaatcacgaaatcgcactaataaaaaaaaaccgttaacgaacgaaaaaacgaaaaataaataacgatattaataacaaaataaaataaaaaatattaacacaataacgaaaacctaaaatactcgtaatacaactcttctaaacgacctactcgatatatcaacttatcgacgtaaaactatcgacaaccgacaacgacacttcgacgaatcataaacgatacgattacgataccgttaatcgaaacgacgacgaccgaaaaacaaaacgcgacgcgaaatataaacgcgaatatacgaaacgacgacaaaaacgccgaaataacgccgcgatctcttaatctctatatcacgaaaacataatacgacccgactcaaaaaaacgtaacccccccgctcgcgaaaatttacacacgtcgcgaaaactaaataaaaaacgataaatccctacgcccgcgaataacaaacgaaacatataaaccgcgtcaccccccccctttttatatcttcgtaaaataaaatccattttcttttcgccaaacca

SEQ ID NO: 40425 - DNA, 1174 bp, Artificial Sequence
  chemically treated genomic DNA (Homo sapiens) CpG-island No: 40425
aatttggcgagggcgttgcgggtttcgagcgttttggttaaggtcggttttttagtcgcgcgtttattttgtcggggcgaggcgcgcgcggtggttagggcggcgtcgttcggcgcgcggttgaggttgtagttgttgagtcgttgtgtagcgcgaatttgtagacgttgcggtcgcgcgtcgtgtagttgaagaggtagtagtcgagtacggttgtcgggggcgcggggcgtcggggtagttttattacggttacggagtagcgcggttcggagtagtaggtcgttacgtattgtcgttagtttcgtacggtcgtcggcgttcgtaggaagttggtattcgtcgttagggagtttttggtgcggatgatggcgttaggtattgcgttgtagtcgtcgttgttcgggttcgggtagtttttttgggggtcgtcgttcgcgcgtagttttagttttagttttttttgaggtcgtttttgttgtagttgtcggcggaatttttttagtagttgttttacgttcgatagttgcgcgtgtagttcggatagcggcgtcgcgggcggtaaggtcgtacggtcgtttggtagttataggtagagtagtagtagttcgcgtagcgtttcgtgacgcggcggtagtcggcgttgcgagttcgcgtttttttgggcgacggaggttatggcgacgagagttaagggtagcgagtcgaggcggggttgagcgcgggaggaaggcggggacgcgggcgagcgcgggttttgggttttttttgcgcggtcgcggttggttttaggtttcggttttatagcgcggcgttttcgaattcggttgttttttcgaggtcgcgggcgtcggcgggaatcgtagtagcgggagatatagtcggtttagtcgggtatcgttttttgttttcgtcggagattgtttagcgttttgcgttttttcgtttcggtttgcggcgcgttgggtggcgacgagtcggtttcggcgttgattagtattaggtgtgtgcgaatagtggtcgcggcggggtggagttttggtgagtttcgttttttcgcgcggtttcgttttcgcgcgtttcgcgtcggtttttttagggttgggagagtaggtttcggggagggtagttttagaataattttgttttcgcgtcgttgtttagttagggtagg

SEQ ID NO: 40426 - DNA, 1174 bp, Artificial Sequence
  chemically treated genomic DNA (Homo sapiens) CpG-island No: 40426
cctaccctaactaaacaacgacgcgaaaacaaaattattctaaaactaccctccccgaaacctactctcccaaccctaaaaaaaccgacgcgaaacgcgcgaaaacgaaaccgcgcgaaaaaacgaaactcaccaaaactccaccccgccgcgaccactattcgcacacacctaatactaatcaacgccgaaaccgactcgtcgccacccaacgcgccgcaaaccgaaacgaaaaaacgcaaaacgctaaacaatctccgacgaaaacaaaaaacgatacccgactaaaccgactatatctcccgctactacgattcccgccgacgcccgcgacctcgaaaaaacaaccgaattcgaaaacgccgcgctataaaaccgaaacctaaaaccaaccgcgaccgcgcaaaaaaaacccaaaacccgcgctcgcccgcgtccccgccttcctcccgcgctcaaccccgcctcgactcgctacccttaactctcgtcgccataacctccgtcgcccaaaaaaacgcgaactcgcaacgccgactaccgccgcgtcacgaaacgctacgcgaactactactactctacctataactaccaaacgaccgtacgaccttaccgcccgcgacgccgctatccgaactacacgcgcaactatcgaacgtaaaacaactactaaaaaaattccgccgacaactacaacaaaaacgacctcaaaaaaaactaaaactaaaactacgcgcgaacgacgacccccaaaaaaactacccgaacccgaacaacgacgactacaacgcaatacctaacgccatcatccgcaccaaaaactccctaacgacgaataccaacttcctacgaacgccgacgaccgtacgaaactaacgacaatacgtaacgacctactactccgaaccgcgctactccgtaaccgtaataaaactaccccgacgccccgcgcccccgacaaccgtactcgactactacctcttcaactacacgacgcgcgaccgcaacgtctacaaattcgcgctacacaacgactcaacaactacaacctcaaccgcgcgccgaacgacgccgccctaaccaccgcgcgcgcctcgccccgacaaaataaacgcgcgactaaaaaaccgaccttaaccaaaacgctcgaaacccgcaacgccctcgccaaatt

SEQ ID NO: 40427 - DNA, 1174 bp, Artificial Sequence
  chemically treated genomic DNA (Homo sapiens) CpG-island No: 40427
tttgttttagttgggtagcggcgcgggagtaaagttgttttgaggttgtttttttcggggtttgtttttttagttttggaggagtcggcgcgagacgcgcgggggcggggtcgcgcgggggggcggggtttattaaggttttatttcgtcgcggttattgttcgtatatatttggtgttgattaacgtcgaggtcgattcgtcgttatttagcgcgtcgtaggtcggggcggagaggcgtagggcgttgggtagttttcggcgagggtaaggagcggtgttcggttgggtcggttatgtttttcgttattgcggttttcgtcggcgttcgcgatttcgggggagtagtcgggttcgggggcgtcgcgttgtgaggtcggggtttagagttagtcgcggtcgcgtaggaggggtttagggttcgcgttcgttcgcgttttcgtttttttttcgcgtttagtttcgtttcggttcgttgtttttggttttcgtcgttatggttttcgtcgtttaggagagcgcgggttcgtagcgtcggttatcgtcgcgttacggggcgttgcgcgggttgttattgttttgtttgtggttgttaagcggtcgtgcggttttgtcgttcgcggcgtcgttgttcgaattgtacgcgtagttgtcgggcgtggagtagttgttggaggagtttcgtcggtaattgtagtaggagcggttttaggaggagttggagttggagttgcgcgcgggcggcggtttttaggaggattgttcgggttcgggtagcggcggttatagcgtaatgtttgacgttattattcgtattaaggattttttggcggcgggtgttagttttttgcgggcgtcggcggtcgtgcggggttggcggtaatgcgtggcggtttgttgtttcgagtcgcgttgtttcgtggtcgtggtggagttgtttcggcgtttcgcgttttcggtagtcgtgttcggttgttatttttttaattgtacggcgcgcggtcgtaacgtttgtaagttcgcgttgtatagcggtttagtagttatagttttagtcgcgcgtcggacggcgtcgttttggttatcgcgcgcgtttcgtttcggtagggtaagcgcgcgattgaggggtcggttttggttagagcgttcgagattcgtagcgttttcgttaagtt

SEQ ID NO: 40428 - DNA, 1174 bp, Artificial Sequence
  chemically treated genomic DNA (Homo sapiens) CpG-island No: 40428
aacttaacgaaaacgctacgaatctcgaacgctctaaccaaaaccgacccctcaatcgcgcgcttaccctaccgaaacgaaacgcgcgcgataaccaaaacgacgccgtccgacgcgcgactaaaactataactactaaaccgctatacaacgcgaacttacaaacgttacgaccgcgcgccgtacaattaaaaaaataacaaccgaacacgactaccgaaaacgcgaaacgccgaaacaactccaccacgaccacgaaacaacgcgactcgaaacaacaaaccgccacgcattaccgccaaccccgcacgaccgccgacgcccgcaaaaaactaacacccgccgccaaaaaatccttaatacgaataataacgtcaaacattacgctataaccgccgctacccgaacccgaacaatcctcctaaaaaccgccgcccgcgcgcaactccaactccaactcctcctaaaaccgctcctactacaattaccgacgaaactcctccaacaactactccacgcccgacaactacgcgtacaattcgaacaacgacgccgcgaacgacaaaaccgcacgaccgcttaacaaccacaaacaaaacaataacaacccgcgcaacgccccgtaacgcgacgataaccgacgctacgaacccgcgctctcctaaacgacgaaaaccataacgacgaaaaccaaaaacaacgaaccgaaacgaaactaaacgcgaaaaaaaaacgaaaacgcgaacgaacgcgaaccctaaacccctcctacgcgaccgcgactaactctaaaccccgacctcacaacgcgacgcccccgaacccgactactcccccgaaatcgcgaacgccgacgaaaaccgcaataacgaaaaacataaccgacccaaccgaacaccgctccttaccctcgccgaaaactacccaacgccctacgcctctccgccccgacctacgacgcgctaaataacgacgaatcgacctcgacgttaatcaacaccaaatatatacgaacaataaccgcgacgaaataaaaccttaataaaccccgcccccccgcgcgaccccgcccccgcgcgtctcgcgccgactcctccaaaactaaaaaaacaaaccccgaaaaaaacaacctcaaaacaactttactcccgcgccgctacccaactaaaacaaa

SEQ ID NO: 40429 - DNA, 735 bp, Artificial Sequence
  chemically treated genomic DNA (Homo sapiens) CpG-island No: 40429
  unsure (334, 342)
atttagaacgtggtcgtttcgtagaacgacggggttttaaatggatttggcggtcgcgtttcgttggtatttcggttttgattgtcgtttttcggtttttatcgtagcgtcgagttgggtcgtcgatttacgtatttggttgtttgaggtaggtcgtacgtagttttaaattggttcgggttatttgggttatagtcgcggttttcgggagaaagcgttttttagtttcggaatagttaattttcggttttagttaggtatgagtttttaggcgagttttttaaatttaaggcggagtttcgtgcgttaattatcggtgggagatagggagggnggcgtgtntattttcgtttttcgttttcgttggtttcgaaagcggagtgcgaagtttttttaaatttaatcggcggcggagcggcggtgagggggcgtgtttgttcgggttttgtttatcgtttttttcgttttcgcgcggcgttcgaggcgttttttttattgacgttagtttttagggttagcgcggttttgttggcgcgggagttgggcggggttgtatttttgttttagggtgcggcgaaagttggttttgtcgggtatacgtgacggatgtttttttttttgggttcgaggttagcgcgcgcggtattgattgttttgtagcgcgtggttttttgtagatttttagattttgtcgtttaagtttttttttagtttatcgtttggtttcggttttga

SEQ ID NO: 40430 - DNA, 735 bp, Artificial Sequence
  chemically treated genomic DNA (Homo sapiens) CpG-island No: 40430
  unsure (394, 402)
tcaaaaccgaaaccaaacgataaactaaaaaaaaacttaaacgacaaaatctaaaaatctacaaaaaaccacgcgctacaaaacaatcaataccgcgcgcgctaacctcgaacccaaaaaaaaaaacatccgtcacgtatacccgacaaaaccaactttcgccgcaccctaaaacaaaaatacaaccccgcccaactcccgcgccaacaaaaccgcgctaaccctaaaaactaacgtcaataaaaaaaacgcctcgaacgccgcgcgaaaacgaaaaaaacgataaacaaaacccgaacaaacacgccccctcaccgccgctccgccgccgattaaatttaaaaaaacttcgcactccgctttcgaaaccaacgaaaacgaaaaacgaaaatanacacgccnccctccctatctcccaccgataattaacgcacgaaactccgccttaaatttaaaaaactcgcctaaaaactcatacctaactaaaaccgaaaattaactattccgaaactaaaaaacgctttctcccgaaaaccgcgactataacccaaataacccgaaccaatttaaaactacgtacgacctacctcaaacaaccaaatacgtaaatcgacgacccaactcgacgctacgataaaaaccgaaaaacgacaatcaaaaccgaaataccaacgaaacgcgaccgccaaatccatttaaaaccccgtcgttctacgaaacgaccacgttctaaat

SEQ ID NO: 40431 - DNA, 735 bp, Artificial Sequence
  chemically treated genomic DNA (Homo sapiens) CpG-island No: 40431
  unsure (394, 402)
ttaaagtcggagttaaacggtgggttgggaggggatttgagcggtagagtttgaggatttgtagagggttacgcgttgtaaggtagttagtgtcgcgcgcgttggtttcgggtttaggagaaggggtattcgttacgtgtattcggtagggttagttttcgtcgtattttggggtaggaatgtagtttcgtttagttttcgcgttagtaaaatcgcgttggttttggggattgacgttaatgaagggggcgtttcgggcgtcgcgcgggggcggagagggcggtgggtagggttcgggtagatacgtttttttatcgtcgtttcgtcgtcgattaggtttgaggaagtttcgtatttcgttttcgaggttagcggaggcggggggcggggatgnatacgttnttttttttgttttttatcgatgattggcgtacggaatttcgttttgggtttggaaggttcgtttgggagtttatatttggttagggtcgaggattggttgtttcggggttagggagcgttttttttcgggaatcgcggttgtgatttaagtggttcggattagtttggggttgcgtgcggtttgttttaagtaattaggtacgtaggtcggcggtttagttcggcgttgcggtgggagtcggagggcgatagttagagtcggggtgttagcgggacgcgatcgttagatttatttaggatttcgtcgttttgcgaagcggttacgttttgagt

SEQ ID NO: 40432 - DNA, 735 bp, Artificial Sequence
  chemically treated genomic DNA (Homo sapiens) CpG-island No: 40432
  unsure (334, 342)
actcaaaacgtaaccgcttcgcaaaacgacgaaatcctaaataaatctaacgatcgcgtcccgctaacaccccgactctaactatcgccctccgactcccaccgcaacgccgaactaaaccgccgacctacgtacctaattacttaaaacaaaccgcacgcaaccccaaactaatccgaaccacttaaatcacaaccgcgattcccgaaaaaaaacgctccctaaccccgaaacaaccaatcctcgaccctaaccaaatataaactcccaaacgaaccttccaaacccaaaacgaaattccgtacgccaatcatcgataaaaaacaaaaaaaanaacgtatncatccccgccccccgcctccgctaacctcgaaaacgaaatacgaaacttcctcaaacctaatcgacgacgaaacgacgataaaaaaacgtatctacccgaaccctacccaccgccctctccgcccccgcgcgacgcccgaaacgcccccttcattaacgtcaatccccaaaaccaacgcgattttactaacgcgaaaactaaacgaaactacattcctaccccaaaatacgacgaaaactaaccctaccgaatacacgtaacgaataccccttctcctaaacccgaaaccaacgcgcgcgacactaactaccttacaacgcgtaaccctctacaaatcctcaaactctaccgctcaaatcccctcccaacccaccgtttaactccgactttaa

SEQ ID NO: 40433 - DNA, 789 bp, Artificial Sequence
  chemically treated genomic DNA (Homo sapiens) CpG-island No: 40433
cggcggcggtttttattttcgtatttattttttgagggtttttgacgaagtagttttcgttggagttttggtagatgcgttcgggaaagatgtagcgttcgatggttagttcggtttgtcgtattatcgtttcgaatttaggatttttcgggaattcgtttcgttcgcggtgggtttgagcggcgtgggttgtcgtcgcggtttgagcggttagagtttgggtttgcgtcgttacggtttgggtttggttttgggtcgtcgcgtttcgggttcgatttaatagtggttgtcgttcgcggtcgtggttcggcgagttcggcggagaggggttcgagtcggtcgtcgtcgttattcggatcgcgttttcgggtatttgcggaaagtgagcgttcgagttcgacgggaaggtgtagttcgggggttgggttcgttcgggggatattagtgggttcgtttcgtttattttttagatagtcggtttcgggattcggcgcgttttatattattgcgttcgcggtcgcgattaattcgtgatattttttaggtttcggtcggttaattaggtcgcgacgtttttttggtttcgtttttaatttgttttgtttatttggttacgaataggtacggtttttcgcgcgcgaatagtagttaattagaatttgtttttacgtaatcgttgttttcgtattttttttttcgttattttttgtgaagattgcgtatgttttaggatttaattttgggttaggtacgttttttgtttttattatattagcgttacgtttagtt

SEQ ID NO: 40434 - DNA, 789 bp, Artificial Sequence
  chemically treated genomic DNA (Homo sapiens) CpG-island No: 40434
aactaaacgtaacgctaatataataaaaacaaaaaacgtacctaacccaaaattaaatcctaaaacatacgcaatcttcacaaaaaataacgaaaaaaaaaatacgaaaacaacgattacgtaaaaacaaattctaattaactactattcgcgcgcgaaaaaccgtacctattcgtaaccaaataaacaaaacaaattaaaaacgaaaccaaaaaaacgtcgcgacctaattaaccgaccgaaacctaaaaaatatcacgaattaatcgcgaccgcgaacgcaataatataaaacgcgccgaatcccgaaaccgactatctaaaaaataaacgaaacgaacccactaatatcccccgaacgaacccaacccccgaactacaccttcccgtcgaactcgaacgctcactttccgcaaatacccgaaaacgcgatccgaataacgacgacgaccgactcgaacccctctccgccgaactcgccgaaccacgaccgcgaacgacaaccactattaaatcgaacccgaaacgcgacgacccaaaaccaaacccaaaccgtaacgacgcaaacccaaactctaaccgctcaaaccgcgacgacaacccacgccgctcaaacccaccgcgaacgaaacgaattcccgaaaaatcctaaattcgaaacgataatacgacaaaccgaactaaccatcgaacgctacatctttcccgaacgcatctaccaaaactccaacgaaaactacttcgtcaaaaaccctcaaaaaataaatacgaaaataaaaaccgccgccg

SEQ ID NO: 40435 - DNA, 789 bp, Artificial Sequence
  chemically treated genomic DNA (Homo sapiens) CpG-island No: 40435
agttaagcgtggcgttggtatagtaggggtagggggcgtgtttgatttaaggttgggttttggagtatgcgtagtttttatagaaggtgacggggagaaaaatgcggaggtagcgattgcgtaggagtaggttttgattggttattgttcgcgcgcgaggggtcgtgtttattcgtagttaagtaaatagggtaggttagaggcggggttaaggaggcgtcgcgatttggttggtcggtcggggtttgggggatgttacggattggtcgcggtcgcgagcgtagtggtgtggagcgcgtcgggtttcggagtcggttgtttgagggatggacgagacgagtttattagtgtttttcgagcgggtttaattttcggattatattttttcgtcgggttcgggcgtttatttttcgtaggtgttcgggggcgcggttcgagtggcggcggcggtcggttcgggttttttttcgtcgggttcgtcgggttacgatcgcgagcggtagttattgttggatcgggttcggggcgcggcggtttagggttagatttaaatcgtggcggcgtaggtttaggttttggtcgtttaggtcgcggcggtagtttacgtcgtttaggtttatcgcgagcggaacgagttttcggaggattttgagttcgaggcggtggtgcggtaggtcgagttggttatcgagcgttgtatttttttcgagcgtatttattagggttttagcggaagttatttcgttaaggatttttagggggtgagtgcgggggtggggatcgtcgtcg

SEQ ID NO: 40436 - DNA, 789 bp, Artificial Sequence
  chemically treated genomic DNA (Homo sapiens) CpG-island No: 40436
cgacgacgatccccacccccgcactcaccccctaaaaatccttaacgaaataacttccgctaaaaccctaataaatacgctcgaaaaaaatacaacgctcgataaccaactcgacctaccgcaccaccgcctcgaactcaaaatcctccgaaaactcgttccgctcgcgataaacctaaacgacgtaaactaccgccgcgacctaaacgaccaaaacctaaacctacgccgccacgatttaaatctaaccctaaaccgccgcgccccgaacccgatccaacaataactaccgctcgcgatcgtaacccgacgaacccgacgaaaaaaaacccgaaccgaccgccgccgccactcgaaccgcgcccccgaacacctacgaaaaataaacgcccgaacccgacgaaaaaatataatccgaaaattaaacccgctcgaaaaacactaataaactcgtctcgtccatccctcaaacaaccgactccgaaacccgacgcgctccacaccactacgctcgcgaccgcgaccaatccgtaacatcccccaaaccccgaccgaccaaccaaatcgcgacgcctccttaaccccgcctctaacctaccctatttacttaactacgaataaacacgacccctcgcgcgcgaacaataaccaatcaaaacctactcctacgcaatcgctacctccgcatttttctccccgtcaccttctataaaaactacgcatactccaaaacccaaccttaaatcaaacacgccccctacccctactataccaacgccacgcttaact

SEQ ID NO: 40437 - DNA, 556 bp, Artificial Sequence
  chemically treated genomic DNA (Homo sapiens) CpG-island No: 40437
gaggtttcgtttcggggcggttcgtttgcgagtgtgtgttagtttttcggatcgtagtttgcgtttgtttcgggagacggcgcgttcggcgcggcggtcgggattttgggttgggattttgggcggcggcggcgttgtcgtcgggcgggagttgagcgttagggttttcgggcgcgggcgatagtggaaacgttggagggtagggagagggtgttagggcgtattcgcgcggggcggcggcgggggaagggattaaggaggttggttttcggggattttttcgtttcgatcggggtcgcggcgggcgcgggcggttttacgttattttttgtttgttttggtagcgacgttcgtagttatagagcgtcgaaagtaggtagaggtcgtggtagacgtcgtcgtagacggcggtcgttaggaaggcgtggtaggcgtaggggagcgggtaatttttgaggttgtagtagttgtggcgttgtatttggtcgtttatgatgtcggtggcggcgtcgtagagcgcggtcgttagtatatcgtgcgttacgttgattatgag

SEQ ID NO: 40438 - DNA, 556 bp, Artificial Sequence
  chemically treated genomic DNA (Homo sapiens) CpG-island No: 40438
ctcataatcaacgtaacgcacgatatactaacgaccgcgctctacgacgccgccaccgacatcataaacgaccaaatacaacgccacaactactacaacctcaaaaattacccgctcccctacgcctaccacgccttcctaacgaccgccgtctacgacgacgtctaccacgacctctacctactttcgacgctctataactacgaacgtcgctaccaaaacaaacaaaaaataacgtaaaaccgcccgcgcccgccgcgaccccgatcgaaacgaaaaaatccccgaaaaccaacctccttaatcccttcccccgccgccgccccgcgcgaatacgccctaacaccctctccctaccctccaacgtttccactatcgcccgcgcccgaaaaccctaacgctcaactcccgcccgacgacaacgccgccgccgcccaaaatcccaacccaaaatcccgaccgccgcgccgaacgcgccgtctcccgaaacaaacgcaaactacgatccgaaaaactaacacacactcgcaaacgaaccgccccgaaacgaaacctc

SEQ ID NO: 40439 - DNA, 556 bp, Artificial Sequence
  chemically treated genomic DNA (Homo sapiens) CpG-island No: 40439
tttatggttaacgtggcgtacgatgtgttggcggtcgcgttttacggcgtcgttatcggtattatgagcgattagatgtagcgttatagttattgtaattttaaggattattcgtttttttgcgtttattacgtttttttggcggtcgtcgtttgcggcggcgtttgttacggtttttatttgttttcggcgttttatggttgcgggcgtcgttgttagggtaagtaggaggtggcgtgaggtcgttcgcgttcgtcgcggtttcgatcggggcgggggaattttcggagattagtttttttaattttttttttcgtcgtcgtttcgcgcgggtgcgttttggtattttttttttgttttttagcgtttttattgtcgttcgcgttcgggaattttgacgtttagttttcgttcgacggtagcgtcgtcgtcgtttagaattttagtttagaatttcgatcgtcgcgtcggacgcgtcgtttttcgggataagcgtaggttgcgattcgaggggttgatatatattcgtagacgagtcgtttcgaggcgaaatttt

SEQ ID NO: 40440 - DNA, 556 bp, Artificial Sequence
  chemically treated genomic DNA (Homo sapiens) CpG-island No: 40440
aaaatttcgcctcgaaacgactcgtctacgaatatatatcaacccctcgaatcgcaacctacgcttatcccgaaaaacgacgcgtccgacgcgacgatcgaaattctaaactaaaattctaaacgacgacgacgctaccgtcgaacgaaaactaaacgtcaaaattcccgaacgcgaacgacaataaaaacgctaaaaaacaaaaaaaaaataccaaaacgcacccgcgcgaaacgacgacgaaaaaaaaaattaaaaaaactaatctccgaaaattcccccgccccgatcgaaaccgcgacgaacgcgaacgacctcacgccacctcctacttaccctaacaacgacgcccgcaaccataaaacgccgaaaacaaataaaaaccgtaacaaacgccgccgcaaacgacgaccgccaaaaaaacgtaataaacgcaaaaaaacgaataatccttaaaattacaataactataacgctacatctaatcgctcataataccgataacgacgccgtaaaacgcgaccgccaacacatcgtacgccacgttaaccataaa

SEQ ID NO: 40441 - DNA, 890 bp, Artificial Sequence
  chemically treated genomic DNA (Homo sapiens) CpG-island No: 40441
acgttttagggtagcgacgtcggttttattttagttacggttgttttaagtttttcggggtttttcgtcggttttattcgagttataagtttataggatttttcggagtttttcgtcgggacgtaagatttatcgttagaggttggtattttttagagaatagcgaagcgtatttcgagggtcgtcggtcggaagcgttttttagattcgttttttgtttttcggagtcggaagttgggtatttgtagttggttcggcgtattttattgatcgtttcgacgatgttacgcgcgttcggttgtttttttcggattttcgtagcgtttgtcgcggttttggttgcggcgttgttttcgtcgtttgcgcgttgtttttttttagagtcgagggattcggtggtttcgtcgtttagtttttatttcggtattaagattcgttacgaggatgttaatttcgtgttattgtcgggtttcgaggtttcgtggcgggattttgagttgttggaggggatttgtatttcggtgtagttggtcgtttttattcgttacggtattcgttattttacggttaaatagattcgtaagttgaggtagttgtacgggttgttgtaggttcgcgggtttagggatggcggggttagtagtatcggtagtcgcgatttgggtgtagcgttggtcgattggtttttgtggtacgcggattggatggacgggtagttagtagagaagggacggtaggatatgcgatagttggcgttgcgtttggtttcgtttttttcggttttttttagtcgtgagaattacggtcgtttgcggtttattattagttttaagtatcgttgtatggatagtagcgtcgtttttttgtaggggttgtggtagtattattat

SEQ ID NO: 40442 - DNA, 890 bp, Artificial Sequence
  chemically treated genomic DNA (Homo sapiens) CpG-island No: 40442
ataataatactaccacaacccctacaaaaaaacgacgctactatccatacaacgatacttaaaactaataataaaccgcaaacgaccgtaattctcacgactaaaaaaaaccgaaaaaaacgaaaccaaacgcaacgccaactatcgcatatcctaccgtcccttctctactaactacccgtccatccaatccgcgtaccacaaaaaccaatcgaccaacgctacacccaaatcgcgactaccgatactactaaccccgccatccctaaacccgcgaacctacaacaacccgtacaactacctcaacttacgaatctatttaaccgtaaaataacgaataccgtaacgaataaaaacgaccaactacaccgaaatacaaatcccctccaacaactcaaaatcccgccacgaaacctcgaaacccgacaataacacgaaattaacatcctcgtaacgaatcttaataccgaaataaaaactaaacgacgaaaccaccgaatccctcgactctaaaaaaaaacaacgcgcaaacgacgaaaacaacgccgcaaccaaaaccgcgacaaacgctacgaaaatccgaaaaaaacaaccgaacgcgcgtaacatcgtcgaaacgatcaataaaatacgccgaaccaactacaaatacccaacttccgactccgaaaaacaaaaaacgaatctaaaaaacgcttccgaccgacgaccctcgaaatacgcttcgctattctctaaaaaataccaacctctaacgataaatcttacgtcccgacgaaaaactccgaaaaatcctataaacttataactcgaataaaaccgacgaaaaaccccgaaaaacttaaaacaaccgtaactaaaataaaaccgacgtcgctaccctaaaacgt

SEQ ID NO: 40443 - DNA, 890 bp, Artificial Sequence
  chemically treated genomic DNA (Homo sapiens) CpG-island No: 40443
gtggtagtgttgttatagtttttgtaggaaggcggcgttgttatttatgtagcggtgtttggaattggtgatgagtcgtaggcggtcgtagtttttacggttgaaaagggtcgggaagagcgaggttagacgtagcgttagttgtcgtatattttgtcgttttttttttattagttgttcgtttatttagttcgcgtattataaaggttagtcggttagcgttgtatttaggtcgcggttgtcggtattattagtttcgttatttttggattcgcgggtttgtagtaattcgtgtagttgttttagtttgcggatttgtttgatcgtggggtagcgggtgtcgtggcgaatgagggcgattagttgtatcggggtgtaggttttttttagtagtttagggtttcgttacggagtttcggggttcgataatagtacggggttgatattttcgtagcgagttttggtgtcgaaataggggttgagcgacgaggttatcgggtttttcggttttagaagagagtagcgcgtaagcgacgagagtagcgtcgtagttagggtcgcggtaggcgttacggaggttcggaggaggtagtcgggcgcgcgtagtatcgtcgggacggttagtggagtgcgtcgagttagttgtagatgtttagttttcggtttcggagggtagggggcgggtttggagggcgttttcggtcggcggttttcgggatgcgtttcgttgttttttaggaggtattaatttttggcggtgggttttgcgtttcggcggaaagtttcgaggagttttgtagatttgtggttcgggtggagtcggcggaaaatttcgagaagtttgagatagtcgtggttgaggtggagtcggcgtcgttgttttggagcgt

SEQ ID NO: 40444 - DNA, 890 bp, Artificial Sequence
  chemically treated genomic DNA (Homo sapiens) CpG-island No: 40444
acgctccaaaacaacgacgccgactccacctcaaccacgactatctcaaacttctcgaaattttccgccgactccacccgaaccacaaatctacaaaactcctcgaaactttccgccgaaacgcaaaacccaccgccaaaaattaatacctcctaaaaaacaacgaaacgcatcccgaaaaccgccgaccgaaaacgccctccaaacccgccccctaccctccgaaaccgaaaactaaacatctacaactaactcgacgcactccactaaccgtcccgacgatactacgcgcgcccgactacctcctccgaacctccgtaacgcctaccgcgaccctaactacgacgctactctcgtcgcttacgcgctactctcttctaaaaccgaaaaacccgataacctcgtcgctcaacccctatttcgacaccaaaactcgctacgaaaatatcaaccccgtactattatcgaaccccgaaactccgtaacgaaaccctaaactactaaaaaaaacctacaccccgatacaactaatcgccctcattcgccacgacacccgctaccccacgatcaaacaaatccgcaaactaaaacaactacacgaattactacaaacccgcgaatccaaaaataacgaaactaataataccgacaaccgcgacctaaatacaacgctaaccgactaacctttataatacgcgaactaaataaacgaacaactaataaaaaaaaaacgacaaaatatacgacaactaacgctacgtctaacctcgctcttcccgacccttttcaaccgtaaaaactacgaccgcctacgactcatcaccaattccaaacaccgctacataaataacaacgccgccttcctacaaaaactataacaacactaccac

SEQ ID NO: 40445 - DNA, 554 bp, Artificial Sequence
  chemically treated genomic DNA (Homo sapiens) CpG-island No: 40445
gaattcgaggcgtttgcgtttttttcgtagggatttttacgttttatcgggtggggtttacgcggtcgtcgggagggggtaggaaatgtaatcgttcgcgagacgtagagttaaaaatttaaatgatcgcgggttttttcgtcgtttggggtttttcgcgtttttttcgattttacgtacgcgcgcgtgtttcgggaagttatcggggatagtgcgtagggcgtggtttgtttcgtcgggggttcggatcggtttttgcgttcgtagttttcggtagtcgtttagggaaggtcgtttttttcgcgaggtttgggtaggcgggaagggttttaggtcgcgcgcggtttcgcgtttgggagttttttttcggggtcgggttggggagcggttttacggtttttggattttgttttgtcgagaagtgttgggtataggagcgagtagtcggtttagcgggttagggcgtttttacgagagttttttgggaagtttttttttggaaaaattattaaggcggattgatttcgattagagagaaaaggggtttttgggaa

SEQ ID NO: 40446 - DNA, 554 bp, Artificial Sequence
  chemically treated genomic DNA (Homo sapiens) CpG-island No: 40446
ttcccaaaaaccccttttctctctaatcgaaatcaatccgccttaataatttttccaaaaaaaaacttcccaaaaaactctcgtaaaaacgccctaacccgctaaaccgactactcgctcctatacccaacacttctcgacaaaacaaaatccaaaaaccgtaaaaccgctccccaacccgaccccgaaaaaaaactcccaaacgcgaaaccgcgcgcgacctaaaacccttcccgcctacccaaacctcgcgaaaaaaacgaccttccctaaacgactaccgaaaactacgaacgcaaaaaccgatccgaacccccgacgaaacaaaccacgccctacgcactatccccgataacttcccgaaacacgcgcgcgtacgtaaaatcgaaaaaaacgcgaaaaaccccaaacgacgaaaaaacccgcgatcatttaaatttttaactctacgtctcgcgaacgattacatttcctaccccctcccgacgaccgcgtaaaccccacccgataaaacgtaaaaatccctacgaaaaaaacgcaaacgcctcgaattc

SEQ ID NO: 40447 - DNA, 554 bp, Artificial Sequence
  chemically treated genomic DNA (Homo sapiens) CpG-island No: 40447
tttttaggagttttttttttttttaatcgggattagttcgttttaatgatttttttaggaagaaattttttaggaggttttcgtaaaaacgttttggttcgttaagtcggttgttcgtttttgtgtttagtatttttcggtagggtaggatttagggatcgtgaagtcgttttttagttcggtttcgaaagggaatttttaagcgcggggtcgcgcgcggtttagggtttttttcgtttgtttaggtttcgcgaggggagcggttttttttaggcggttgtcgggagttgcgggcgtagaagtcgattcgggttttcggcgggataggttacgttttgcgtattgttttcggtggtttttcggggtacgcgcgcgtgcgtggggtcggggggggcgcgggggattttaggcggcgaggggattcgcggttatttgggtttttggttttgcgtttcgcggacggttgtattttttgttttttttcggcggtcgcgtgggttttattcggtggagcgtgggggtttttgcgggagggacgtaggcgtttcgggttt

SEQ ID NO: 40448 - DNA, 554 bp, Artificial Sequence
  chemically treated genomic DNA (Homo sapiens) CpG-island No: 40448
aaacccgaaacgcctacgtccctcccgcaaaaacccccacgctccaccgaataaaacccacgcgaccgccgaaaaaaaacaaaaaatacaaccgtccgcgaaacgcaaaaccaaaaacccaaataaccgcgaatcccctcgccgcctaaaatcccccgcgccccccccgaccccacgcacgcgcgcgtaccccgaaaaaccaccgaaaacaatacgcaaaacgtaacctatcccgccgaaaacccgaatcgacttctacgcccgcaactcccgacaaccgcctaaaaaaaaccgctcccctcgcgaaacctaaacaaacgaaaaaaaccctaaaccgcgcgcgaccccgcgcttaaaaattccctttcgaaaccgaactaaaaaacgacttcacgatccctaaatcctaccctaccgaaaaatactaaacacaaaaacgaacaaccgacttaacgaaccaaaacgtttttacgaaaacctcctaaaaaatttcttcctaaaaaaatcattaaaacgaactaatcccgattaaaaaaaaaaaaaactcctaaaaa

SEQ ID NO: 40449 - DNA, 549 bp, Artificial Sequence
  chemically treated genomic DNA (Homo sapiens) CpG-island No: 40449
tttttcgttattcgtcgtcgcgttttttcgattttgggttaaggatgtttcgagtcgtttcgttgtttcgatttgcgtcgtatttggtgagtagtgtcggagtagggataacgtttggttcgcgggtagcgcgggtcgttcgcgtttttttttttcgtttcggtcgtcgacgtcgcgggcgttcgtcgtcgcgttcgcgcgttttttcgtcgcggttttttgtcggcgtcgcgcgttcggtatcggttttcgggggcgcgtacgttcgttttcgtttcggcgtcggtcgcgcgttttatagtttacgttttttattttcgtttatatgcgtcgtcgtagtttcgtttcgattcgcgcggcgattgttttttttttcgtcgttttcgcgtttttcgattttagggatcgtagtcgagtttcgtttttaggtatacgcggaggacgttcgttcgttcgcgcgttttcggagcgattttttttatttattattatgttttatttaagttttttttataataaataaaggtatagttttattaatttgtataa

SEQ ID NO: 40450 - DNA, 549 bp, Artificial Sequence
  chemically treated genomic DNA (Homo sapiens) CpG-island No: 40450
ttatacaaattaataaaactatacctttatttattataaaaaaaacttaaataaaacataataataaataaaaaaaatcgctccgaaaacgcgcgaacgaacgaacgtcctccgcgtatacctaaaaacgaaactcgactacgatccctaaaatcgaaaaacgcgaaaacgacgaaaaaaaaaacaatcgccgcgcgaatcgaaacgaaactacgacgacgcatataaacgaaaataaaaaacgtaaactataaaacgcgcgaccgacgccgaaacgaaaacgaacgtacgcgcccccgaaaaccgataccgaacgcgcgacgccgacaaaaaaccgcgacgaaaaaacgcgcgaacgcgacgacgaacgcccgcgacgtcgacgaccgaaacgaaaaaaaaaaacgcgaacgacccgcgctacccgcgaaccaaacgttatccctactccgacactactcaccaaatacgacgcaaatcgaaacaacgaaacgactcgaaacatccttaacccaaaatcgaaaaaacgcgacgacgaataacgaaaaa

SEQ ID NO: 40451 - DNA, 549 bp, Artificial Sequence
  chemically treated genomic DNA (Homo sapiens) CpG-island No: 40451
ttgtgtaaattgatagagttgtatttttatttgttgtgggaggggtttgggtggggtatggtggtgggtggggggggtcgtttcgggggcgcgcgggcggacgggcgtttttcgcgtgtgtttgggggcgaggttcggttgcgatttttgggatcggggggcgcggggacgacggaggggggggtagtcgtcgcgcgggtcgaggcggggttgcggcggcgtatgtggacgggggtggggggcgtgggttgtggggcgcgcggtcggcgtcggggcgggggcgggcgtgcgcgttttcgggggtcggtgtcgggcgcgcggcgtcggtagggggtcgcggcgggggggcgcgcgggcgcggcggcgggcgttcgcggcgtcggcggtcggggcggggggggggggcgcggacggttcgcgttgttcgcgagttagacgttgtttttatttcggtattgtttattaggtgcggcgtaggtcgagatagcggagcggttcgaggtatttttggtttaggatcggaggggcgcggcggcgggtggcggggga

SEQ ID NO: 40452 - DNA, 549 bp, Artificial Sequence
  chemically treated genomic DNA (Homo sapiens) CpG-island No: 40452
tcccccgccacccgccgccgcgcccctccgatcctaaaccaaaaatacctcgaaccgctccgctatctcgacctacgccgcacctaataaacaataccgaaataaaaacaacgtctaactcgcgaacaacgcgaaccgtccgcgccccccccccccgccccgaccgccgacgccgcgaacgcccgccgccgcgcccgcgcgcccccccgccgcgaccccctaccgacgccgcgcgcccgacaccgacccccgaaaacgcgcacgcccgcccccgccccgacgccgaccgcgcgccccacaacccacgccccccacccccgtccacatacgccgccgcaaccccgcctcgacccgcgcgacgactacccccccctccgtcgtccccgcgccccccgatcccaaaaatcgcaaccgaacctcgcccccaaacacacgcgaaaaacgcccgtccgcccgcgcgcccccgaaacgaccccccccacccaccaccataccccacccaaacccctcccacaacaaataaaaatacaactctatcaatttacacaa

SEQ ID NO: 40453 - DNA, 502 bp, Artificial Sequence
  chemically treated genomic DNA (Homo sapiens) CpG-island No: 40453
cgcgtgatgtcgcggggtggttcggggcggtgatttcgtcgaagtggcgggttcgttttcggtgttttcggtttcggttgtttttatttcgtttcgtacgcgtttcgtttacggaaatgaattttatatttcggtaatttcggcgtcggtacggcgtataagcgaagagtttaattagagttttagtttcggtagttaggacggtcgcggtcgagcgattcgtttagtcggttttttattagtcgcgttcggcggtcgggggggtgcgacgtaagggttggttttgattcgtatttgtttgtacgagggagtcgatcgtttagtagtggttagagagtatgtgacgtttcgtttattcgtttttgtgttacgtgggtttcgtgacgtcgtttattcggttacggtttaaaagtagaggtatacgggttgcgttcggtggacgggtatttgtggggaaacggcgtggtcgggcgggcgagggcgggttttggttatcggggtt

SEQ ID NO: 40454 - DNA, 502 bp, Artificial Sequence
  chemically treated genomic DNA (Homo sapiens) CpG-island No: 40454
aaccccgataaccaaaacccgccctcgcccgcccgaccacgccgtttccccacaaatacccgtccaccgaacgcaacccgtatacctctacttttaaaccgtaaccgaataaacgacgtcacgaaacccacgtaacacaaaaacgaataaacgaaacgtcacatactctctaaccactactaaacgatcgactccctcgtacaaacaaatacgaatcaaaaccaacccttacgtcgcacccccccgaccgccgaacgcgactaataaaaaaccgactaaacgaatcgctcgaccgcgaccgtcctaactaccgaaactaaaactctaattaaactcttcgcttatacgccgtaccgacgccgaaattaccgaaatataaaattcatttccgtaaacgaaacgcgtacgaaacgaaataaaaacaaccgaaaccgaaaacaccgaaaacgaacccgccacttcgacgaaatcaccgccccgaaccaccccgcgacatcacgcg

SEQ ID NO: 40455 - DNA, 502 bp, Artificial Sequence
  chemically treated genomic DNA (Homo sapiens) CpG-island No: 40455
gatttcggtgattagggttcgttttcgttcgttcggttacgtcgtttttttatagatgttcgtttatcggacgtagttcgtgtgtttttgtttttggatcgtggtcgggtaaacggcgttacgggatttacgtgatatagggacgaatgaacgaaacgttatatgttttttggttattgttaggcggtcggttttttcgtgtaagtagatacgaattaaggttaatttttacgtcgtattttttcgatcgtcgggcgcggttggtggaggatcggttaagcgggtcgttcggtcgcggtcgttttagttgtcgaggttggggttttggttggatttttcgtttgtacgtcgtatcggcgtcgggattgtcgaggtgtgagatttattttcgtgggcggagcgcgtgcgggacgggataagggtagtcggggtcggagatatcggagacggattcgttatttcggcggggttatcgtttcggattatttcgcggtattacgcg

SEQ ID NO: 40456 - DNA, 502 bp, Artificial Sequence
  chemically treated genomic DNA (Homo sapiens) CpG-island No: 40456
cgcgtaataccgcgaaataatccgaaacgataaccccgccgaaataacgaatccgtctccgatatctccgaccccgactacccttatcccgtcccgcacgcgctccgcccacgaaaataaatctcacacctcgacaatcccgacgccgatacgacgtacaaacgaaaaatccaaccaaaaccccaacctcgacaactaaaacgaccgcgaccgaacgacccgcttaaccgatcctccaccaaccgcgcccgacgatcgaaaaaatacgacgtaaaaattaaccttaattcgtatctacttacacgaaaaaaccgaccgcctaacaataaccaaaaaacatataacgtttcgttcattcgtccctatatcacgtaaatcccgtaacgccgtttacccgaccacgatccaaaaacaaaaacacacgaactacgtccgataaacgaacatctataaaaaaacgacgtaaccgaacgaacgaaaacgaaccctaatcaccgaaatc

SEQ ID NO: 40457 - DNA, 642 bp, Artificial Sequence
  chemically treated genomic DNA (Homo sapiens) CpG-island No: 40457
acggaagcggtcgattaagtttttcgtttcggtttcggtttcggtttcgatttttattaagatttcggtttcggtttcggtttcggattcgtttcgagttttatgtagtttgcgttgtatttggtgaagaagttcgcgaagtcgttatttcgtcgagttcgggtcgaagttttcgtaggattttgtttcgcggcgggtaagggtatcggcggtttcgtcgggggtaggtgatcgcgggcgttttgatcgcggtttatttggaacgtgttgcgagagttgaagtgaatgttagaaaagtttaggcgcggtttcgtatttttattagttttttcggtcgaggtggtagggggcgcgtttttttcgggattttcggcgtcgatttttcgttgttttgagttttcgttattgttgtagttgttggcggggttgtttttcgagtcgttgttcgcgttttcgggtttttgggcgttcgcggttattaggtagtagtttcgtagcgggtttttaagcggagaggtttaatcggacgggtttttcgcgtcgttcgcgttttcgtcgttaggtttttttaggcgaaggcggtcgtaggggcggcggcggcgcgattttcggtcgtcggcgcgcgttagttcgcgagttttt

SEQ ID NO: 40458 - DNA, 642 bp, Artificial Sequence
  chemically treated genomic DNA (Homo sapiens) CpG-island No: 40458
aaaaactcgcgaactaacgcgcgccgacgaccgaaaatcgcgccgccgccgcccctacgaccgccttcgcctaaaaaaacctaacgacgaaaacgcgaacgacgcgaaaaacccgtccgattaaacctctccgcttaaaaacccgctacgaaactactacctaataaccgcgaacgcccaaaaacccgaaaacgcgaacaacgactcgaaaaacaaccccgccaacaactacaacaataacgaaaactcaaaacaacgaaaaatcgacgccgaaaatcccgaaaaaaacgcgccccctaccacctcgaccgaaaaaactaataaaaatacgaaaccgcgcctaaacttttctaacattcacttcaactctcgcaacacgttccaaataaaccgcgatcaaaacgcccgcgatcacctacccccgacgaaaccgccgatacccttacccgccgcgaaacaaaatcctacgaaaacttcgacccgaactcgacgaaataacgacttcgcgaacttcttcaccaaatacaacgcaaactacataaaactcgaaacgaatccgaaaccgaaaccgaaaccgaaatcttaataaaaatcgaaaccgaaaccgaaaccgaaacgaaaaacttaatcgaccgcttccgt

SEQ ID NO: 40459 - DNA, 642 bp, Artificial Sequence
  chemically treated genomic DNA (Homo sapiens) CpG-island No: 40459
agaggttcgcgggttggcgcgcgtcggcggtcgggagtcgcgtcgtcgtcgtttttacggtcgttttcgtttggaggggtttggcgacgaggacgcggacggcgcgggaagttcgttcgattgggttttttcgtttgaggattcgttgcggagttgttgtttggtggtcgcggacgtttaggagttcgagggcgcgggtagcgattcgggggatagtttcgttagtagttgtagtagtagcgaggatttagagtagcggggagtcggcgtcgggggtttcgaggagggcgcgttttttgttatttcggtcgagaggattaatgggggtgcggagtcgcgtttgggtttttttgatatttattttaattttcgtaatacgttttaggtgagtcgcggttagagcgttcgcgattatttgttttcggcggggtcgtcggtgtttttgttcgtcgcggagtagggttttgcgggggtttcggttcgggttcgacggagtggcggtttcgcggatttttttattaggtatagcgtaggttgtatgggattcggggcgggttcggggtcggggtcggagtcggggttttggtgggagtcggagtcggagtcggagtcggagcggagagtttggtcggtcgttttcgt

SEQ ID NO: 40460 - DNA, 642 bp, Artificial Sequence
  chemically treated genomic DNA (Homo sapiens) CpG-island No: 40460
acgaaaacgaccgaccaaactctccgctccgactccgactccgactccgactcccaccaaaaccccgactccgaccccgaccccgaacccgccccgaatcccatacaacctacgctatacctaataaaaaaatccgcgaaaccgccactccgtcgaacccgaaccgaaacccccgcaaaaccctactccgcgacgaacaaaaacaccgacgaccccgccgaaaacaaataatcgcgaacgctctaaccgcgactcacctaaaacgtattacgaaaattaaaataaatatcaaaaaaacccaaacgcgactccgcacccccattaatcctctcgaccgaaataacaaaaaacgcgccctcctcgaaacccccgacgccgactccccgctactctaaatcctcgctactactacaactactaacgaaactatcccccgaatcgctacccgcgccctcgaactcctaaacgtccgcgaccaccaaacaacaactccgcaacgaatcctcaaacgaaaaaacccaatcgaacgaacttcccgcgccgtccgcgtcctcgtcgccaaacccctccaaacgaaaacgaccgtaaaaacgacgacgacgcgactcccgaccgccgacgcgcgccaacccgcgaacctct

SEQ ID NO: 40461 - DNA, 626 bp, Artificial Sequence
  chemically treated genomic DNA (Homo sapiens) CpG-island No: 40461
gcgggggtcgtcggcgagattgagttcgggatagtttagagttttagcgttttagcgttttgtagttcgtttagagcgcgtagattatttttatgtttcgttcgtttttttgttatattcgtttttagttcggtttcgtcgtttttttatttcgtcgggattattgtagttttggcggtagcgcgcggatatgttttcggggcgtattcgtcgagtcgcgtttttgcgtagtggttttttttcgggttttaggttgcgcgattcgcgtttcggtggggcggggagcggattgggcggaggcgtcggcgaggttggggtcgggggtttagttggtaacgtcgggagagggaagcgtagcgcggaaaattttagtgttcggttttcgaaatgtatcggtttatttagtttcgttagtttcgtcggggattttgtttggtcggtaaagaggatttagcgcggggattcgttttaagtattgtggtttggttaggggcgaggggcgtagcggaggagggacgtttcgcggttatgtaatgtatcggttttttgtgtttttagttaaatcgttttaggattgtcggatttttttcgggaagagttatgatttttgatttcggtaagtcgag

SEQ ID NO: 40462 - DNA, 626 bp, Artificial Sequence
  chemically treated genomic DNA (Homo sapiens) CpG-island No: 40462
ctcgacttaccgaaatcaaaaatcataactcttcccgaaaaaaatccgacaatcctaaaacgatttaactaaaaacacaaaaaaccgatacattacataaccgcgaaacgtccctcctccgctacgcccctcgcccctaaccaaaccacaatacttaaaacgaatccccgcgctaaatcctctttaccgaccaaacaaaatccccgacgaaactaacgaaactaaataaaccgatacatttcgaaaaccgaacactaaaattttccgcgctacgcttccctctcccgacgttaccaactaaacccccgaccccaacctcgccgacgcctccgcccaatccgctccccgccccaccgaaacgcgaatcgcgcaacctaaaacccgaaaaaaaaccactacgcaaaaacgcgactcgacgaatacgccccgaaaacatatccgcgcgctaccgccaaaactacaataatcccgacgaaataaaaaaacgacgaaaccgaactaaaaacgaatataacaaaaaaacgaacgaaacataaaaataatctacgcgctctaaacgaactacaaaacgctaaaacgctaaaactctaaactatcccgaactcaatctcgccgacgacccccgc

SEQ ID NO: 40463 - DNA, 626 bp, Artificial Sequence
  chemically treated genomic DNA (Homo sapiens) CpG-island No: 40463
ttcggtttgtcgaggttaggggttatggtttttttcggggagggttcggtagttttagagcggtttggttggggatatagaaagtcggtgtattatataatcgcgagacgtttttttttcgttgcgtttttcgtttttagttaagttatagtatttagagcggattttcgcgttaaattttttttgtcggttaggtagagttttcggcggagttggcggggttgaatgagtcggtgtatttcgaaggtcgagtattgggatttttcgcgttacgtttttttttttcggcgttgttagttaggttttcggttttagtttcgtcggcgttttcgtttagttcgtttttcgttttatcgaagcgcggatcgcgtagtttggggttcgggaaggggttattgcgtagggacgcggttcggcgggtgcgtttcgggggtatgttcgcgcgttatcgttagggttgtagtggtttcggcgaggtgaggaggcggcggggtcgggttgggggcgggtgtggtaggagggcgggcggggtatgggggtggtttgcgcgttttgggcgggttgtagagcgttggagcgttggagttttgggttgtttcgggtttagtttcgtcggcggttttcgt

SEQ ID NO: 40464 - DNA, 626 bp, Artificial Sequence
  chemically treated genomic DNA (Homo sapiens) CpG-island No: 40464
acgaaaaccgccgacgaaactaaacccgaaacaacccaaaactccaacgctccaacgctctacaacccgcccaaaacgcgcaaaccacccccataccccgcccgccctcctaccacacccgcccccaacccgaccccgccgcctcctcacctcgccgaaaccactacaaccctaacgataacgcgcgaacatacccccgaaacgcacccgccgaaccgcgtccctacgcaataaccccttcccgaaccccaaactacgcgatccgcgcttcgataaaacgaaaaacgaactaaacgaaaacgccgacgaaactaaaaccgaaaacctaactaacaacgccgaaaaaaaaaaacgtaacgcgaaaaatcccaatactcgaccttcgaaatacaccgactcattcaaccccgccaactccgccgaaaactctacctaaccgacaaaaaaaatttaacgcgaaaatccgctctaaatactataacttaactaaaaacgaaaaacgcaacgaaaaaaaaacgtctcgcgattatataatacaccgactttctatatccccaaccaaaccgctctaaaactaccgaaccctccccgaaaaaaaccataacccctaacctcgacaaaccgaa

SEQ ID NO: 40465 - DNA, 505 bp, Artificial Sequence
  chemically treated genomic DNA (Homo sapiens) CpG-island No: 40465
tatttcgtttttttttttttttttttttcgtcgtttttttttttgtttttttttttttttttttcggtcgtcgtttttttttttttcgcgtttttcgttcgttttcgttcggtattttttttatttatttttttatttttatggcgtttttttttcgtttttcgcgtttcgtattcgtttcgattttttatttattttcgttggtttgttgtttgttcgtttgtcgataattttcgtaggtggtcgtgcggggttggttcgttcgtagtaatgggagtggaaaggttgcgtgtttcgtttgttaagtggcggagaggggggggtgtgagggtgtggagcggcggtcgttcgtttttcggtcgggggtcgttatatgtcgtttttttttttttatttttcgtgcgattattaaggacgcggacggcgcgtatttttttttttttttttggtgtaggggtttttttttaggttgatggatttagtgggttcgaagggtgggggggtt

SEQ ID NO: 40466 - DNA, 505 bp, Artificial Sequence
  chemically treated genomic DNA (Homo sapiens) CpG-island No: 40466
aacccccccacccttcgaacccactaaatccatcaacctaaaaaaaaacccctacaccaaaaaaaaaaaaaaaaatacgcgccgtccgcgtccttaataatcgcacgaaaaataaaaaaaaaaaaacgacatataacgacccccgaccgaaaaacgaacgaccgccgctccacaccctcacacccccccctctccgccacttaacaaacgaaacacgcaacctttccactcccattactacgaacgaaccaaccccgcacgaccacctacgaaaattatcgacaaacgaacaaacaacaaaccaacgaaaataaataaaaaatcgaaacgaatacgaaacgcgaaaaacgaaaaaaaaacgccataaaaataaaaaaataaataaaaaaaataccgaacgaaaacgaacgaaaaacgcgaaaaaaaaaaaaacgacgaccgaaaaaaaaaaaaaaaaaaacaaaaaaaaaaacgacgaaaaaaaaaaaaaaaaaaaaacgaaata

SEQ ID NO: 40467 - DNA, 505 bp, Artificial Sequence
  chemically treated genomic DNA (Homo sapiens) CpG-island No: 40467
ggtttttttatttttcgagtttattaaatttattagtttggggaagagtttttgtattaagaaaaggagagaagatacgcgtcgttcgcgtttttagtggtcgtacgagaagtgggggggagggggcgatatataacgattttcgatcgaaggacgaacggtcgtcgttttatatttttatattttttttttttcgttatttaataaacgaaatacgtaatttttttatttttattgttgcgggcgggttagtttcgtacgattatttacgaaaattgtcggtagacgagtaggtaataggttagcgagagtgaatagaaggtcggagcggatgcgggacgcgagagacgggaagggagcgttatgggagtggaggggtggatggaggagatgtcgggcggagacggacgagggacgcgggaagagaggaggcggcggtcgggggagggaggaaaaagagtaggagagagagcggcgaggagagagggaaaagaagggcggggtg

SEQ ID NO: 40468 - DNA, 505 bp, Artificial Sequence
  chemically treated genomic DNA (Homo sapiens) CpG-island No: 40468
caccccgcccttcttttccctctctcctcgccgctctctctcctactctttttcctccctcccccgaccgccgcctcctctcttcccgcgtccctcgtccgtctccgcccgacatctcctccatccacccctccactcccataacgctcccttcccgtctctcgcgtcccgcatccgctccgaccttctattcactctcgctaacctattacctactcgtctaccgacaattttcgtaaataatcgtacgaaactaacccgcccgcaacaataaaaataaaaaaattacgtatttcgtttattaaataacgaaaaaaaaaaaatataaaaatataaaacgacgaccgttcgtccttcgatcgaaaatcgttatatatcgccccctcccccccacttctcgtacgaccactaaaaacgcgaacgacgcgtatcttctctccttttcttaatacaaaaactcttccccaaactaataaatttaataaactcgaaaaataaaaaaacc

SEQ ID NO: 40469 - DNA, 701 bp, Artificial Sequence
  chemically treated genomic DNA (Homo sapiens) CpG-island No: 40469
ggttcgtgcgttaggaatttttgttttgttttcgcgtggtattttcgattttcggtcgtaggtagttgtattttttagtcgcgcgtttcgttttcgggcgttcggcgttttagtttcgattcgcgttcggtttcgtttcgtttagtgtgtttattttcggttcgtttcgtcgtttcgtcgttcggttttcgcggagtttcggagcgttattgcgcgggcgggttgatcgattagtcggtagttggtatcgggtgcgttggcgcgttagtggtttcgttttttagtcggtagtttcgcgcgttcggagttagcggtttaggcggcggcgtcgcgtaggggattcggagtaggcgggagggaagtagttaggcggggaggcggttgaggcggtagcggcggtagttagtcggtgtttcgatagttcggggcgtattttagtttcgtcgtttttagtttgggatttggggatcgggcgtttgtttagttcgcgttttagcgcggttatatggttttatttcgcgcgttgttgttttatttgttgtttttgtattgtgcgttttgcgtcgtcgcgggtagtcggattttaggtgcgtgcgggttgggcgcgcgggggttcgtggggttcggggtgtacgcggttagggtggtttaaggttgttttagttattcgggtagggtttttcgcgggtgggaggtagtat

SEQ ID NO: 40470 - DNA, 701 bp, Artificial Sequence
  chemically treated genomic DNA (Homo sapiens) CpG-island No: 40470
atactacctcccacccgcgaaaaaccctacccgaataactaaaacaaccttaaaccaccctaaccgcgtacaccccgaaccccacgaacccccgcgcgcccaacccgcacgcacctaaaatccgactacccgcgacgacgcaaaacgcacaatacaaaaacaacaaataaaacaacaacgcgcgaaataaaaccatataaccgcgctaaaacgcgaactaaacaaacgcccgatccccaaatcccaaactaaaaacgacgaaactaaaatacgccccgaactatcgaaacaccgactaactaccgccgctaccgcctcaaccgcctccccgcctaactacttccctcccgcctactccgaatcccctacgcgacgccgccgcctaaaccgctaactccgaacgcgcgaaactaccgactaaaaaacgaaaccactaacgcgccaacgcacccgataccaactaccgactaatcgatcaacccgcccgcgcaataacgctccgaaactccgcgaaaaccgaacgacgaaacgacgaaacgaaccgaaaataaacacactaaacgaaacgaaaccgaacgcgaatcgaaactaaaacgccgaacgcccgaaaacgaaacgcgcgactaaaaaatacaactacctacgaccgaaaatcgaaaataccacgcgaaaacaaaacaaaaattcctaacgcacgaacc

SEQ ID NO: 40471 - DNA, 701 bp, Artificial Sequence
  chemically treated genomic DNA (Homo sapiens) CpG-island No: 40471
atattgttttttattcgcggggaattttgttcgggtggttggggtaattttgggttattttgatcgcgtgtatttcggattttacgggttttcgcgcgtttaattcgtacgtatttggggttcggttgttcgcggcggcgtagagcgtatagtgtaaaggtagtaggtaggatagtagcgcgcggagtggagttatgtggtcgcgttgggacgcgggttgggtaagcgttcgatttttaagttttaggttgagggcggcgaggttagggtgcgtttcgggttgtcggagtatcggttggttgtcgtcgttgtcgttttagtcgttttttcgtttagttgtttttttttcgtttgtttcgggttttttgcgcggcgtcgtcgtttggatcgttggtttcgggcgcgcgaggttgtcggttggagagcggggttattgacgcgttagcgtattcggtgttaattgtcggttggtcggttagttcgttcgcgtagtgacgtttcgggatttcgcgggagtcgggcgacggggcggcgggacgggtcgggggtgggtatattgggcggggcggggtcgggcgcgggtcggagttggggcgtcgggcgttcgggggcggggcgcgcggttggggagtgtagttgtttgcggtcggggatcggaagtgttacgcggagatagagtaggggtttttggcgtacggatt

SEQ ID NO: 40472 - DNA, 701 bp, Artificial Sequence
  chemically treated genomic DNA (Homo sapiens) CpG-island No: 40472
aatccgtacgccaaaaacccctactctatctccgcgtaacacttccgatccccgaccgcaaacaactacactccccaaccgcgcgccccgcccccgaacgcccgacgccccaactccgacccgcgcccgaccccgccccgcccaatatacccacccccgacccgtcccgccgccccgtcgcccgactcccgcgaaatcccgaaacgtcactacgcgaacgaactaaccgaccaaccgacaattaacaccgaatacgctaacgcgtcaataaccccgctctccaaccgacaacctcgcgcgcccgaaaccaacgatccaaacgacgacgccgcgcaaaaaacccgaaacaaacgaaaaaaaaacaactaaacgaaaaaacgactaaaacgacaacgacgacaaccaaccgatactccgacaacccgaaacgcaccctaacctcgccgccctcaacctaaaacttaaaaatcgaacgcttacccaacccgcgtcccaacgcgaccacataactccactccgcgcgctactatcctacctactacctttacactatacgctctacgccgccgcgaacaaccgaaccccaaatacgtacgaattaaacgcgcgaaaacccgtaaaatccgaaatacacgcgatcaaaataacccaaaattaccccaaccacccgaacaaaattccccgcgaataaaaaacaatat

SEQ ID NO: 40473 - DNA, 510 bp, Artificial Sequence
  chemically treated genomic DNA (Homo sapiens) CpG-island No: 40473
tatagcgcgtttatttgatttatcgttatgtttagcgttacgcgtcgagagcgtatattattgtagtttcgggattacgaggtacgatagttttttcggcgagattattcgttggtatcgggtcgcggcgggcggcgggggtgggaagttggaggaggagcgttagtagtaattcgcgttgggaagaagtcggcgttgcgtacgcgttcggttcgttattgcgtacgcgttcgcggaagtggcggttttcgtgtgtaggttgagtttaggtgggcggggcgggaggcggaagggtcgcggtgcgtagtcgcgttaacggtttttcgtagcgggcgcgttgttagattttagtttggcggttgtattgttgggcgcgtcgttttcgtttgatttttgttggggacggttgttcgggtaggattttttacgattttttttcggttttttcgtcgttatagggaataaatttcgttcgaaatttattggatcgtttttagaaaggcgaaaaga

SEQ ID NO: 40474 - DNA, 510 bp, Artificial Sequence
  chemically treated genomic DNA (Homo sapiens) CpG-island No: 40474
tcttttcgcctttctaaaaacgatccaataaatttcgaacgaaatttattccctataacgacgaaaaaaccgaaaaaaaatcgtaaaaaatcctacccgaacaaccgtccccaacaaaaatcaaacgaaaacgacgcgcccaacaatacaaccgccaaactaaaatctaacaacgcgcccgctacgaaaaaccgttaacgcgactacgcaccgcgacccttccgcctcccgccccgcccacctaaactcaacctacacacgaaaaccgccacttccgcgaacgcgtacgcaataacgaaccgaacgcgtacgcaacgccgacttcttcccaacgcgaattactactaacgctcctcctccaacttcccacccccgccgcccgccgcgacccgataccaacgaataatctcgccgaaaaaactatcgtacctcgtaatcccgaaactacaataatatacgctctcgacgcgtaacgctaaacataacgataaatcaaataaacgcgctata

SEQ ID NO: 40475 - DNA, 510 bp, Artificial Sequence
  chemically treated genomic DNA (Homo sapiens) CpG-island No: 40475
ttttttcgtttttttaggagcggtttagtgagtttcgagcgagatttattttttgtgacgacggagaaatcgagaagggatcgtaaaggattttgttcgggtaatcgtttttagtagggattagacgagagcggcgcgtttagtaatgtagtcgttagattgaggtttgatagcgcgttcgttgcgaagggtcgttgacgcggttgcgtatcgcggttttttcgtttttcgtttcgtttatttaggtttaatttgtatacgggagtcgttattttcgcgggcgcgtgcgtagtggcgggtcgggcgcgtgcgtagcgtcggtttttttttagcgcgagttgttgttaacgttttttttttagttttttattttcgtcgttcgtcgcggttcggtattaacgggtggtttcgtcgagggagttgtcgtgtttcgtggtttcgggattgtagtggtgtgcgttttcggcgcgtggcgttaggtatggcgatggattaagtaaacgcgttgtg

SEQ ID NO: 40476 - DNA, 510 bp, Artificial Sequence
  chemically treated genomic DNA (Homo sapiens) CpG-island No: 40476
cacaacgcgtttacttaatccatcgccatacctaacgccacgcgccgaaaacgcacaccactacaatcccgaaaccacgaaacacgacaactccctcgacgaaaccacccgttaataccgaaccgcgacgaacgacgaaaataaaaaactaaaaaaaaaacgttaacaacaactcgcgctaaaaaaaaaccgacgctacgcacgcgcccgacccgccactacgcacgcgcccgcgaaaataacgactcccgtatacaaattaaacctaaataaacgaaacgaaaaacgaaaaaaccgcgatacgcaaccgcgtcaacgacccttcgcaacgaacgcgctatcaaacctcaatctaacgactacattactaaacgcgccgctctcgtctaatccctactaaaaacgattacccgaacaaaatcctttacgatcccttctcgatttctccgtcgtcacaaaaaataaatctcgctcgaaactcactaaaccgctcctaaaaaaacgaaaaaa

SEQ ID NO: 40477 - DNA, 503 bp, Artificial Sequence
  chemically treated genomic DNA (Homo sapiens) CpG-island No: 40477
tgcgggggtgcgtcgcgcgcggatgggttttcgaagtttggtgtttatgagtattgtttttttatttagttgtgtagtggaggggcgaaggtggtcggggtgtgtttagacgtgaggtggatcgacgtaagtcggtaggaggcgtatgttagtaatgtcggtggaatcgaggaggataaataagtgacgagtggggggtggggttgttggtgtagtgggggtgggtgtcggggaggggaaggagcggggggcggagggggagggggggtggggtgtgggggtgggggaggggaagggggtaagagggcgggcgaggcgcgttagcgagcgtggggtgagtagagaggcgtgttcgtaggttggaaatgtgaaacggtgtttaatgtcgttagtagcgttggaggtacgagaatgtgtatgttgggcggacggttgggagtgagggagggacgtcgtatacgattgtaggttattttgtttattgaggagaggttggtgagtaa

SEQ ID NO: 40478 - DNA, 503 bp, Artificial Sequence
  chemically treated genomic DNA (Homo sapiens) CpG-island No: 40478
ttactcaccaacctctcctcaataaacaaaataacctacaatcgtatacgacgtccctccctcactcccaaccgtccgcccaacatacacattctcgtacctccaacgctactaacgacattaaacaccgtttcacatttccaacctacgaacacgcctctctactcaccccacgctcgctaacgcgcctcgcccgccctcttacccccttcccctcccccacccccacaccccaccccccctccccctccgccccccgctccttcccctccccgacacccacccccactacaccaacaaccccaccccccactcgtcacttatttatcctcctcgattccaccgacattactaacatacgcctcctaccgacttacgtcgatccacctcacgtctaaacacaccccgaccaccttcgcccctccactacacaactaaataaaaaaacaatactcataaacaccaaacttcgaaaacccatccgcgcgcgacgcacccccgca

SEQ ID NO: 40479 - DNA, 503 bp, Artificial Sequence
  chemically treated genomic DNA (Homo sapiens) CpG-island No: 40479
ttatttattaatttttttttagtgagtaaaataatttatagtcgtatacggcgttttttttttatttttagtcgttcgtttaatatatatattttcgtgtttttaacgttattaacgatattgaatatcgttttatatttttagtttacgaatacgtttttttatttattttacgttcgttagcgcgtttcgttcgtttttttatttttttttttttttttatttttatattttatttttttttttttttcgtttttcgttttttttttttttcgatatttatttttattatattaataattttattttttattcgttatttgtttatttttttcgattttatcggtattattgatatacgttttttgtcgatttacgtcgatttattttacgtttaggtatatttcgattattttcgtttttttattatatagttaaatggagaggtaatatttatagatattaaatttcgggggtttattcgcgcgcgacgtattttcgta

SEQ ID NO: 40480 - DNA, 503 bp, Artificial Sequence
  chemically treated genomic DNA (Homo sapiens) CpG-island No: 40480
tacgaaaatacgtcgcgcgcgaataaacccccgaaatttaatatctataaatattacctctccatttaactatataataaaaaaacgaaaataatcgaaatatacctaaacgtaaaataaatcgacgtaaatcgacaaaaaacgtatatcaataataccgataaaatcgaaaaaaataaacaaataacgaataaaaaataaaattattaatataataaaaataaatatcgaaaaaaaaaaaaaacgaaaaacgaaaaaaaaaaaaaaataaaatataaaaataaaaaaaaaaaaaaaaataaaaaaacgaacgaaacgcgctaacgaacgtaaaataaataaaaaaacgtattcgtaaactaaaaatataaaacgatattcaatatcgttaataacgttaaaaacacgaaaatatatatattaaacgaacgactaaaaataaaaaaaaaacgccgtatacgactataaattattttactcactaaaaaaaaattaataaataa

SEQ ID NO: 40481 - DNA, 731 bp, Artificial Sequence
  chemically treated genomic DNA (Homo sapiens) CpG-island No: 40481
  unsure (404)
agagtggagaggatcggcgaggcgcgttagtcggagttatttttttttcggtcgttttttttttattttttttatatatatacgttcgttcgttcgtcggcgcgcgtatatttttcgcgtcggattcgtatttcggcgggcgttatatattcggtagttcgagtcgcggtagtcgtagcgggatggaggcggcgcgtacggagcgtttcgtaggtaggtcgggggcgtcgtttgttcggacggggtttttatttttgtcgacgtgggttttggtcggcgtcgagattatttgggacgcgataggcggtttcggacgttcggcggtttcggtttcgcggttatcggcgttgtttttattttcgtcgcgggtagtggttagttagtggtcggaggagttggcgttngcgcggagagtcgtcgtgttggggcgtcgggtcggattagagttgttgttttatttgggcggcggtagaagtcgtgagatgtatgtggaagtcggagggatattatcggtagcgagcggttgggttcgggtattttattttttgtaagtttggcggcgcgaggaggagtcgtcgggcgtagtttttaattatttaggaacgcggggacgtttgggttattgtttcggtcgatggttttagaggaagtcgtttttttgttaagggttttcgggaggaggtgaaggcgtcgcgggttggggggttttttttgaggattttcggttgttt

SEQ ID NO: 40482 - DNA, 731 bp, Artificial Sequence
  chemically treated genomic DNA (Homo sapiens) CpG-island No: 40482
  unsure (328)
aaacaaccgaaaatcctcaaaaaaaaccccccaacccgcgacgccttcacctcctcccgaaaacccttaacaaaaaaacgacttcctctaaaaccatcgaccgaaacaataacccaaacgtccccgcgttcctaaataattaaaaactacgcccgacgactcctcctcgcgccgccaaacttacaaaaaataaaatacccgaacccaaccgctcgctaccgataatatccctccgacttccacatacatctcacgacttctaccgccgcccaaataaaacaacaactctaatccgacccgacgccccaacacgacgactctccgcgcnaacgccaactcctccgaccactaactaaccactacccgcgacgaaaataaaaacaacgccgataaccgcgaaaccgaaaccgccgaacgtccgaaaccgcctatcgcgtcccaaataatctcgacgccgaccaaaacccacgtcgacaaaaataaaaaccccgtccgaacaaacgacgcccccgacctacctacgaaacgctccgtacgcgccgcctccatcccgctacgactaccgcgactcgaactaccgaatatataacgcccgccgaaatacgaatccgacgcgaaaaatatacgcgcgccgacgaacgaacgaacgtatatatataaaaaaaataaaaaaaaaacgaccgaaaaaaaaataactccgactaacgcgcctcgccgatcctctccactct

SEQ ID NO: 40483 - DNA, 731 bp, Artificial Sequence
  chemically treated genomic DNA (Homo sapiens) CpG-island No: 40483
  unsure (328)
gggtagtcggaggtttttaaaaaaaattttttagttcgcggcgtttttattttttttcgggaatttttagtaaggggacggttttttttggaattatcggtcggagtagtggtttaggcgttttcgcgtttttgggtgattgggggttgcgttcggcgattttttttcgcgtcgttaagtttgtaggaggtgggatgttcgggtttagtcgttcgttgtcggtaatgttttttcggtttttatatgtattttacggtttttgtcgtcgtttagatggggtagtagttttggttcggttcggcgttttagtacgacggtttttcgcgtngacgttagttttttcggttattggttggttattgttcgcggcgagagtggagataacgtcggtggtcgcgaagtcggggtcgtcgggcgttcgggatcgtttgtcgcgttttaagtgatttcggcgtcggttaggatttacgtcgataagagtaggagtttcgttcggataagcggcgttttcggtttgtttgcggggcgtttcgtgcgcgtcgtttttatttcgttgcggttatcgcggttcgggttgtcgagtgtgtggcgttcgtcgaggtgcgggttcggcgcggggggtgtgcgcgcgtcggcgagcgagcgagcgtgtgtgtgtagggggagtggggagggggcggtcgggaaggaggtggtttcggttggcgcgtttcgtcggttttttttatttt

SEQ ID NO: 40484 - DNA, 731 bp, Artificial Sequence
  chemically treated genomic DNA (Homo sapiens) CpG-island No: 40484
  unsure (404)
aaaataaaaaaaaccgacgaaacgcgccaaccgaaaccacctccttcccgaccgccccctccccactccccctacacacacacgctcgctcgctcgccgacgcgcgcacaccccccgcgccgaacccgcacctcgacgaacgccacacactcgacaacccgaaccgcgataaccgcaacgaaataaaaacgacgcgcacgaaacgccccgcaaacaaaccgaaaacgccgcttatccgaacgaaactcctactcttatcgacgtaaatcctaaccgacgccgaaatcacttaaaacgcgacaaacgatcccgaacgcccgacgaccccgacttcgcgaccaccgacgttatctccactctcgccgcgaacaataaccaaccaataaccgaaaaaactaacgtcnacgcgaaaaaccgtcgtactaaaacgccgaaccgaaccaaaactactaccccatctaaacgacgacaaaaaccgtaaaatacatataaaaaccgaaaaaacattaccgacaacgaacgactaaacccgaacatcccacctcctacaaacttaacgacgcgaaaaaaaatcgccgaacgcaacccccaatcacccaaaaacgcgaaaacgcctaaaccactactccgaccgataattccaaaaaaaaccgtccccttactaaaaattcccgaaaaaaaataaaaacgccgcgaactaaaaaattttttttaaaaacctccgactaccc

SEQ ID NO: 40485 - DNA, 566 bp, Artificial Sequence
  chemically treated genomic DNA (Homo sapiens) CpG-island No: 40485
tagttgtaaagacggatgtgtacggaacgcgggaaaacgttatgggcggagggggtaattgattggggagggcgattaagaacgggaaggaggagaggtttaagggtgaggtgtaagacgatcgtacgggagcgacgggagggtgcgcggggacgaacggggacgcggggtggtaggggaacgatcggggttgggggggtggaaaagtacgaagattcgggacgtgggggtggggtaagcggaggtcgcggtaaacggtaagttaggcgtgtacggcgtgggcgagaggtttagacgtgtggtaggggggtattttcgggacggtaatttgaggtatcggagattcggtcggggcggttggggataggtagaggtttgaacggatgtattgaaaagatgggcgtaagggcggaaggtttcgtcgggggttttggttttggggtcgtgtatgtttttaaacgttcgggcgcgatgggagtgtgtatgcgcggggagttggtgcgtttttttaaaagggtttgcggtttgaggagagggacggttaggtgtaggtttgtagattttat

SEQ ID NO: 40486 - DNA, 566 bp, Artificial Sequence
  chemically treated genomic DNA (Homo sapiens) CpG-island No: 40486
ataaaatctacaaacctacacctaaccgtccctctcctcaaaccgcaaacccttttaaaaaaacgcaccaactccccgcgcatacacactcccatcgcgcccgaacgtttaaaaacatacacgaccccaaaaccaaaacccccgacgaaaccttccgcccttacgcccatcttttcaatacatccgttcaaacctctacctatccccaaccgccccgaccgaatctccgatacctcaaattaccgtcccgaaaatacccccctaccacacgtctaaacctctcgcccacgccgtacacgcctaacttaccgtttaccgcgacctccgcttaccccacccccacgtcccgaatcttcgtacttttccacccccccaaccccgatcgttcccctaccaccccgcgtccccgttcgtccccgcgcaccctcccgtcgctcccgtacgatcgtcttacacctcacccttaaacctctcctccttcccgttcttaatcgccctccccaatcaattaccccctccgcccataacgttttcccgcgttccgtacacatccgtctttacaacta

SEQ ID NO: 40487 - DNA, 566 bp, Artificial Sequence
  chemically treated genomic DNA (Homo sapiens) CpG-island No: 40487
gtgggatttatagatttatatttgatcgtttttttttttaggtcgtaggtttttttgggggggcgtattagtttttcgcgtatatatatttttatcgcgttcgggcgtttaaagatatatacgattttaaggttaggattttcggcggaatttttcgtttttgcgtttatttttttagtatattcgtttagatttttatttgtttttaatcgtttcgatcggattttcgatgttttaggttatcgtttcgggggtatttttttattatacgtttgaatttttcgtttacgtcgtgtacgtttgatttatcgtttgtcgcggttttcgtttattttatttttacgtttcgagttttcgtatttttttatttttttagtttcgatcgtttttttgttatttcgcgttttcgttcgttttcgcgtattttttcgtcgttttcgtgcgatcgttttatattttatttttaaattttttttttttttcgtttttaatcgttttttttagttaattatttttttcgtttataacgttttttcgcgtttcgtatatattcgtttttgtaatta

SEQ ID NO: 40488 - DNA, 566 bp, Artificial Sequence
  chemically treated genomic DNA (Homo sapiens) CpG-island No: 40488
taattacaaaaacgaatatatacgaaacgcgaaaaaacgttataaacgaaaaaaataattaactaaaaaaaacgattaaaaacgaaaaaaaaaaaaaatttaaaaataaaatataaaacgatcgcacgaaaacgacgaaaaaatacgcgaaaacgaacgaaaacgcgaaataacaaaaaaacgatcgaaactaaaaaaataaaaaaatacgaaaactcgaaacgtaaaaataaaataaacgaaaaccgcgacaaacgataaatcaaacgtacacgacgtaaacgaaaaattcaaacgtataataaaaaaatacccccgaaacgataacctaaaacatcgaaaatccgatcgaaacgattaaaaacaaataaaaatctaaacgaatatactaaaaaaataaacgcaaaaacgaaaaattccgccgaaaatcctaaccttaaaatcgtatatatctttaaacgcccgaacgcgataaaaatatatatacgcgaaaaactaatacgcccccccaaaaaaacctacgacctaaaaaaaaaaacgatcaaatataaatctataaatcccac

SEQ ID NO: 40489 - DNA, 764 bp, Artificial Sequence
  chemically treated genomic DNA (Homo sapiens) CpG-island No: 40489
tgtaggacgcgttttttttttacgtcgtagggttgcggggcggcgattaggttttttcgaggggttgaagtttttttgggggtggttgagagcggtcgtatttttggtagtattttttttttcgaaaacgcgttttaaaagtagcggttgcgggcgtgggtatagttaattttagtttgcgtttattataagtcgggagggcgcggaattgcggttttttcgagacgcgttcgggtcgtcgtcgtagtattgtcgtagcgattttttcgttcgggttttcgcgagtaaacgggtaagtttcgttattacgtaggttatatattttacgagtaaaaggaaaaaatcgggtagataataaagtttaattcgcgggggtttaagcgagttggaagttgggggcgttggggttgtagtttaaggaggagcggcggggacgacgggatgcggggttgatgcgtttgggacgcggtaagttatatgttagttcgggtgttgatagcggggaggatattgggtacgcggcggcgtcggggaggcggtcggggtaagataggtttgaggcgggaggggagcggcggcgaggtttcgaggcgtcgcggtcggtcgtgatttttattttagtcggggcgttgtttcgttttttatcggtagggaagttgcgggtttcgtcggggttatttcggtcgttggttttcggagttaggaagcgtttttatatcgcgggcgagagggtcgggtgggttagggacgttcgattttttacg

SEQ ID NO: 40490 - DNA, 764 bp, Artificial Sequence
  chemically treated genomic DNA (Homo sapiens) CpG-island No: 40490
cgtaaaaaatcgaacgtccctaacccacccgaccctctcgcccgcgatataaaaacgcttcctaactccgaaaaccaacgaccgaaataaccccgacgaaacccgcaacttccctaccgataaaaaacgaaacaacgccccgactaaaataaaaatcacgaccgaccgcgacgcctcgaaacctcgccgccgctcccctcccgcctcaaacctatcttaccccgaccgcctccccgacgccgccgcgtacccaatatcctccccgctatcaacacccgaactaacatataacttaccgcgtcccaaacgcatcaaccccgcatcccgtcgtccccgccgctcctccttaaactacaaccccaacgcccccaacttccaactcgcttaaacccccgcgaattaaactttattatctacccgattttttccttttactcgtaaaatatataacctacgtaataacgaaacttacccgtttactcgcgaaaacccgaacgaaaaaatcgctacgacaatactacgacgacgacccgaacgcgtctcgaaaaaaccgcaattccgcgccctcccgacttataataaacgcaaactaaaattaactatacccacgcccgcaaccgctacttttaaaacgcgttttcgaaaaaaaaaatactaccaaaaatacgaccgctctcaaccacccccaaaaaaacttcaacccctcgaaaaaacctaatcgccgccccgcaaccctacgacgtaaaaaaaaaacgcgtcctaca

SEQ ID NO: 40491 - DNA, 764 bp, Artificial Sequence
  chemically treated genomic DNA (Homo sapiens) CpG-island No: 40491
cgtgaggagtcgggcgtttttggtttattcggttttttcgttcgcgatgtgggggcgttttttggtttcggaggttagcggtcgggatagtttcggcggagttcgtagtttttttgtcggtaaggaacgggatagcgtttcggttggggtgggggttacggtcgatcgcggcgtttcgggatttcgtcgtcgtttttttttcgttttaggtttgttttatttcggtcgttttttcgacgtcgtcgcgtgtttagtgtttttttcgttgttagtattcgggttgatatatggtttgtcgcgttttaggcgtattagtttcgtatttcgtcgttttcgtcgtttttttttgggttgtagttttagcgtttttaatttttagttcgtttgggttttcgcgggttgggttttattgtttgttcggttttttttttttattcgtggggtgtgtgatttgcgtgataacggggtttgttcgtttgttcgcggggattcgggcgggaaggtcgttgcgatagtgttgcggcggcggttcgggcgcgtttcggaggggtcgtagtttcgcgttttttcgatttatggtaggcgtaggttggggttggttgtgtttacgttcgtagtcgttatttttagggcgcgttttcgggagggaggatgttgttagagatgcggtcgtttttagttatttttaagggaattttagtttttcggaggaatttggtcgtcgtttcgtagttttgcggcgtaagaggagggcgcgttttgta

SEQ ID NO: 40492 - DNA, 764 bp, Artificial Sequence
  chemically treated genomic DNA (Homo sapiens) CpG-island No: 40492
tacaaaacgcgccctcctcttacgccgcaaaactacgaaacgacgaccaaattcctccgaaaaactaaaattcccttaaaaataactaaaaacgaccgcatctctaacaacatcctccctcccgaaaacgcgccctaaaaataacgactacgaacgtaaacacaaccaaccccaacctacgcctaccataaatcgaaaaaacgcgaaactacgacccctccgaaacgcgcccgaaccgccgccgcaacactatcgcaacgaccttcccgcccgaatccccgcgaacaaacgaacaaaccccgttatcacgcaaatcacacaccccacgaataaaaaaaaaaaaccgaacaaacaataaaacccaacccgcgaaaacccaaacgaactaaaaattaaaaacgctaaaactacaacccaaaaaaaaacgacgaaaacgacgaaatacgaaactaatacgcctaaaacgcgacaaaccatatatcaacccgaatactaacaacgaaaaaaacactaaacacgcgacgacgtcgaaaaaacgaccgaaataaaacaaacctaaaacgaaaaaaaaacgacgacgaaatcccgaaacgccgcgatcgaccgtaacccccaccccaaccgaaacgctatcccgttccttaccgacaaaaaaactacgaactccgccgaaactatcccgaccgctaacctccgaaaccaaaaaacgcccccacatcgcgaacgaaaaaaccgaataaaccaaaaacgcccgactcctcacg

SEQ ID NO: 40493 - DNA, 668 bp, Artificial Sequence
  chemically treated genomic DNA (Homo sapiens) CpG-island No: 40493
ggaaatgcgttttcgcggcgcgagtgggaggggtattttgatcgcgtttttggaggtttcgttagtttttcgatattcgggttttttgcgttttttcgtcgtaagtttgtatttttagcgagtttttttattattttagggtcgttttagtcgtttaaatttatcgtttcgggcgtagttttttgtttacgggattttcgcgttttttaagttttgtgtttttaattttcgggtatttatcgtttagtagcggtagtagtaggacgttgagtagaggtaatcggcggggtttggtcggggattttcgcgtagtttttatcgcggcgggtttaggaaaaggagttgagggcgtacggcgggcgcgtagattgcgtttcgcggcgggtataggaggcggagcgtatcggagcgcgggcgtcgtagtagtagtcgtagtcggagttcgatttcgaggcgtttcgaggcgtttcgagtcggagtcgcgcgcgtttagtattttcgagttttcgcgcgtcgtcgtcgtcgtcgttaagtttcgttttacgacgttttttttttttcggttttcgtacggcgtttcgttttttcgacgtttttttttcgtcgaggcggggaggagtttagtagggggaggggtttggagagggatggagaatagagagagtaag

SEQ ID NO: 40494 - DNA, 668 bp, Artificial Sequence
  chemically treated genomic DNA (Homo sapiens) CpG-island No: 40494
cttactctctctattctccatccctctccaaacccctccccctactaaactcctccccgcctcgacgaaaaaaaaacgtcgaaaaaacgaaacgccgtacgaaaaccgaaaaaaaaaaaacgtcgtaaaacgaaacttaacgacgacgacgacgacgcgcgaaaactcgaaaatactaaacgcgcgcgactccgactcgaaacgcctcgaaacgcctcgaaatcgaactccgactacgactactactacgacgcccgcgctccgatacgctccgcctcctatacccgccgcgaaacgcaatctacgcgcccgccgtacgccctcaactccttttcctaaacccgccgcgataaaaactacgcgaaaatccccgaccaaaccccgccgattacctctactcaacgtcctactactaccgctactaaacgataaatacccgaaaattaaaaacacaaaacttaaaaaacgcgaaaatcccgtaaacaaaaaactacgcccgaaacgataaatttaaacgactaaaacgaccctaaaataataaaaaaactcgctaaaaatacaaacttacgacgaaaaaacgcaaaaaacccgaatatcgaaaaactaacgaaacctccaaaaacgcgatcaaaatacccctcccactcgcgccgcgaaaacgcatttcc

SEQ ID NO: 40495 - DNA, 668 bp, Artificial Sequence
  chemically treated genomic DNA (Homo sapiens) CpG-island No: 40495
tttgttttttttattttttatttttttttagatttttttttttattgagttttttttcgtttcggcgaggagggggcgtcgagggggcggggcgtcgtgcgggggtcggaggggagggggcgtcgtggggcggggtttggcggcggcggcggcggcgcgcggggattcggaggtattgggcgcgcgcggtttcggttcgggacgtttcgggacgtttcggggtcgggtttcggttgcggttgttgttgcggcgttcgcgtttcggtgcgtttcgttttttgtgttcgtcgcggagcgtagtttgcgcgttcgtcgtgcgtttttagtttttttttttgagttcgtcgcgatgggagttgcgcggggattttcggttagatttcgtcggttgtttttgtttagcgttttgttgttgtcgttgttgggcggtgagtattcgagagttgggggtatagagtttgggaagcgcgggagtttcgtgggtaaaaggttgcgttcggggcggtgggtttgggcggttggaacggttttggagtagtggagaggttcgttgggggtgtaggtttgcggcggaagggcgtaaggagttcgggtgtcgggaggttggcgaagtttttagggacgcggttagggtattttttttattcgcgtcgcggggacgtattttt

SEQ ID NO: 40496 - DNA, 668 bp, Artificial Sequence
  chemically treated genomic DNA (Homo sapiens) CpG-island No: 40496
aaaaatacgtccccgcgacgcgaataaaaaaaataccctaaccgcgtccctaaaaacttcgccaacctcccgacacccgaactccttacgcccttccgccgcaaacctacacccccaacgaacctctccactactccaaaaccgttccaaccgcccaaacccaccgccccgaacgcaaccttttacccacgaaactcccgcgcttcccaaactctatacccccaactctcgaatactcaccgcccaacaacgacaacaacaaaacgctaaacaaaaacaaccgacgaaatctaaccgaaaatccccgcgcaactcccatcgcgacgaactcaaaaaaaaaaactaaaaacgcacgacgaacgcgcaaactacgctccgcgacgaacacaaaaaacgaaacgcaccgaaacgcgaacgccgcaacaacaaccgcaaccgaaacccgaccccgaaacgtcccgaaacgtcccgaaccgaaaccgcgcgcgcccaatacctccgaatccccgcgcgccgccgccgccgccgccaaaccccgccccacgacgccccctcccctccgacccccgcacgacgccccgccccctcgacgccccctcctcgccgaaacgaaaaaaaactcaataaaaaaaaaaatctaaaaaaaaataaaaaataaaaaaaacaaa

SEQ ID NO: 40497 - DNA, 568 bp, Artificial Sequence
  chemically treated genomic DNA (Homo sapiens) CpG-island No: 40497
aacgcgtgcgggtcgaattttttttttcgttttgttttaataatataggacgtcggggttcgcgtcgcgtattatttggatttttcgtcgattatgtttcggatcgaattttttacgcgtgttcggatcgatcggagtatatagttggcgattaaggtgggttcggaaattttttttttttcgtcgcggttttcgggtgtttttcgaatttcggtattcgcggtgtattttttgttttttcgtttgttttttgggcgttaaaatcgggcggagcggtggatcggcgagcggcgggacggggtgggtggggattgcgagcgagtgggtaggggtggggggagcggtagacgcgacggtgttgggatttcgggagggagcggagcggatttgggtttggtcgtttttaagtcggcgggatcgagtgttttaggtcgtttgaaagaaagttgtttcggtaagggacggagcgggaagagggaggtgtgtgtttcgcgggtgggggcggtggaagtttcggtatttttttttatttcgggttttatcggtttgggtttggcgtggcgatttt

SEQ ID NO: 40498 - DNA, 568 bp, Artificial Sequence
  chemically treated genomic DNA (Homo sapiens) CpG-island No: 40498
aaaatcgccacgccaaacccaaaccgataaaacccgaaataaaaaaaaataccgaaacttccaccgcccccacccgcgaaacacacacctccctcttcccgctccgtcccttaccgaaacaactttctttcaaacgacctaaaacactcgatcccgccgacttaaaaacgaccaaacccaaatccgctccgctccctcccgaaatcccaacaccgtcgcgtctaccgctccccccacccctacccactcgctcgcaatccccacccaccccgtcccgccgctcgccgatccaccgctccgcccgattttaacgcccaaaaaacaaacgaaaaaacaaaaaatacaccgcgaataccgaaattcgaaaaacacccgaaaaccgcgacgaaaaaaaaaaaatttccgaacccaccttaatcgccaactatatactccgatcgatccgaacacgcgtaaaaaattcgatccgaaacataatcgacgaaaaatccaaataatacgcgacgcgaaccccgacgtcctatattattaaaacaaaacgaaaaaaaaaattcgacccgcacgcgtt

SEQ ID NO: 40499 - DNA, 568 bp, Artificial Sequence
  chemically treated genomic DNA (Homo sapiens) CpG-island No: 40499
ggggtcgttacgttaagtttaagtcggtggggttcggggtgagaggaggtgtcggagtttttatcgtttttattcgcgagatatatattttttttttttcgtttcgttttttatcggagtaatttttttttaagcggtttaaagtattcggtttcgtcggtttggaggcgattaagtttaggttcgtttcgttttttttcgggattttagtatcgtcgcgtttgtcgttttttttatttttatttattcgttcgtagtttttatttatttcgtttcgtcgttcgtcgatttatcgtttcgttcgattttggcgtttagaaagtaggcggggagataggagatgtatcgcgggtgtcggggttcggggagtattcgaggatcgcggcgaaaggagaggggttttcgagtttattttgatcgttagttatgtgtttcggtcgattcgagtacgcgtgagggattcgattcgagatataatcggcgggggatttaggtagtacgcggcgcggatttcggcgttttgtattgttggggtaaggcggggggaggggttcggttcgtacgcgtt

SEQ ID NO: 40500 - DNA, 568 bp, Artificial Sequence
  chemically treated genomic DNA (Homo sapiens) CpG-island No: 40500
aacgcgtacgaaccgaacccctccccccgccttaccccaacaatacaaaacgccgaaatccgcgccgcgtactacctaaatcccccgccgattatatctcgaatcgaatccctcacgcgtactcgaatcgaccgaaacacataactaacgatcaaaataaactcgaaaacccctctcctttcgccgcgatcctcgaatactccccgaaccccgacacccgcgatacatctcctatctccccgcctactttctaaacgccaaaatcgaacgaaacgataaatcgacgaacgacgaaacgaaataaataaaaactacgaacgaataaataaaaataaaaaaaacgacaaacgcgacgatactaaaatcccgaaaaaaaacgaaacgaacctaaacttaatcgcctccaaaccgacgaaaccgaatactttaaaccgcttaaaaaaaaattactccgataaaaaacgaaacgaaaaaaaaaaaatatatatctcgcgaataaaaacgataaaaactccgacacctcctctcaccccgaaccccaccgacttaaacttaacgtaacgacccc

SEQ ID NO: 40501 - DNA, 551 bp, Artificial Sequence
  chemically treated genomic DNA (Homo sapiens) CpG-island No: 40501
gtttacgcgttttcgggtgttggtggttcgtaggcggcgcgcgtcgggcgtgttgtttttcgatttcgtttttttttttttttcgttcgttatatttttttttttttttttttttcgtttttcgttttttatttcgcggtagtttttttttttttcgatgtatcgtttgatttttcgtttttttttttcgagttttttcgtttattcgttgttcgtttttttttttaatagttcgtcgtttttagttgtgttataatatcgatttttcgttcgtcgaatcgcgcgtgtcgtttcgtttcgttttttcgttttacgttttatagtaatttatcgtcgtattttttttttgtttttttgacgtttttttttaggacgtttaattttaacgtggcggcgttgtttcgtttgattcgtttaatttttattttatttttttttacgtcggtcggtatcggcgcgtatttttttttttttaatttatacgtacgttatatatttatgcgtttattttatttttttatttttagttacgacgaaaatacgagaattgt

SEQ ID NO: 40502 - DNA, 551 bp, Artificial Sequence
  chemically treated genomic DNA (Homo sapiens) CpG-island No: 40502
acaattctcgtattttcgtcgtaactaaaaataaaaaaataaaataaacgcataaatatataacgtacgtataaattaaaaaaaaaaaaatacgcgccgataccgaccgacgtaaaaaaaaataaaataaaaattaaacgaatcaaacgaaacaacgccgccacgttaaaattaaacgtcctaaaaaaaaacgtcaaaaaaacaaaaaaaaaatacgacgataaattactataaaacgtaaaacgaaaaaacgaaacgaaacgacacgcgcgattcgacgaacgaaaaatcgatattataacacaactaaaaacgacgaactattaaaaaaaaaaacgaacaacgaataaacgaaaaaactcgaaaaaaaaaaacgaaaaatcaaacgatacatcgaaaaaaaaaaaaactaccgcgaaataaaaaacgaaaaacgaaaaaaaaaaaaaaaaaaaaatataacgaacgaaaaaaaaaaaaaaacgaaatcgaaaaacaacacgcccgacgcgcgccgcctacgaaccaccaacacccgaaaacgcgtaaac

SEQ ID NO: 40503 - DNA, 551 bp, Artificial Sequence
  chemically treated genomic DNA (Homo sapiens) CpG-island No: 40503
ataattttcgtgttttcgtcgtggttgggagtgggagagtagaatgggcgtatgggtgtgtggcgtgcgtgtgggttggggggaaaagggtgcgcgtcgatgtcggtcggcgtgagggggagtggggtgggagttaagcgagttaagcggagtaacgtcgttacgttggggttgagcgttttgggaggagacgttagaggaataagaagggagtgcggcgatgggttgttatggggcgtggagcgaggggacggggcggggcggtacgcgcggttcgacgagcggggggtcggtattgtgatataattgggggcggcgggttattggggagaggggcgggtaacgagtaaacggggggattcgagagaggggggcggggagttagacgatgtatcggggagaggagggattgtcgcggggtaggaagcgaggggcggggagggagggagggggggagtgtgacgggcgggggaagggggggagcgaggtcggagggtagtacgttcgacgcgcgtcgtttgcgggttattagtattcgggggcgcgtgagt

SEQ ID NO: 40504 - DNA, 551 bp, Artificial Sequence
  chemically treated genomic DNA (Homo sapiens) CpG-island No: 40504
actcacgcgcccccgaatactaataacccgcaaacgacgcgcgtcgaacgtactaccctccgacctcgctcccccccttcccccgcccgtcacactccccccctccctccctccccgcccctcgcttcctaccccgcgacaatccctcctctccccgatacatcgtctaactccccgcccccctctctcgaatccccccgtttactcgttacccgcccctctccccaataacccgccgcccccaattatatcacaataccgaccccccgctcgtcgaaccgcgcgtaccgccccgccccgtcccctcgctccacgccccataacaacccatcgccgcactcccttcttattcctctaacgtctcctcccaaaacgctcaaccccaacgtaacgacgttactccgcttaactcgcttaactcccaccccactccccctcacgccgaccgacatcgacgcgcacccttttccccccaacccacacgcacgccacacacccatacgcccattctactctcccactcccaaccacgacgaaaacacgaaaattat

SEQ ID NO: 40505 - DNA, 665 bp, Artificial Sequence
  chemically treated genomic DNA (Homo sapiens) CpG-island No: 40505
gcgcggaatagtaggaaagtatagaattaggcgggtcggcgcgagggcggagaggttgaggcgcgtttttataggtgtttgcggggcgggcgggttttttagaagtttagtaagtcgttgagtttcgcggagacgcgcggcggcgtcgttaagcgttacgcgtgcgagttatgcgggaaggtttatttttatcgcggtatattttagtagtataggcgtttgtatacgggcgagcggttttattagtgttttttttgcgataaggtttatatttggtttttcgattatcggaagtatattcgtatttatataggcgagaaattttattcgtgtttagattgcgggaaggttttcgtgcgtttttcggatttgcgtaaatattagcgtaatatgtatagtaataataagtttttttcgtgtttcgagtgcggtttgatttttaataagtcgttgtcgttgttgcgttattagcgtacgtatttgggcgttaagttttttcgttgtttcgtttgcgatcgggagttcgttgtggttagtcgtatggtggagtattagcgcgtgtattcgggcgagcggttttttttttgttttatttgcggtaagtgttttattaagttttttaatttgttcgagtattagacgttgtatatcggttagaggttttt

SEQ ID NO: 40506 - DNA, 665 bp, Artificial Sequence
  chemically treated genomic DNA (Homo sapiens) CpG-island No: 40506
aaaaacctctaaccgatatacaacgtctaatactcgaacaaattaaaaaacttaataaaacacttaccgcaaataaaacaaaaaaaaaaccgctcgcccgaatacacgcgctaatactccaccatacgactaaccacaacgaactcccgatcgcaaacgaaacaacgaaaaaacttaacgcccaaatacgtacgctaataacgcaacaacgacaacgacttattaaaaatcaaaccgcactcgaaacacgaaaaaaacttattattactatacatattacgctaatatttacgcaaatccgaaaaacgcacgaaaaccttcccgcaatctaaacacgaataaaatttctcgcctatataaatacgaatatacttccgataatcgaaaaaccaaatataaaccttatcgcaaaaaaaacactaataaaaccgctcgcccgtatacaaacgcctatactactaaaatataccgcgataaaaataaaccttcccgcataactcgcacgcgtaacgcttaacgacgccgccgcgcgtctccgcgaaactcaacgacttactaaacttctaaaaaacccgcccgccccgcaaacacctataaaaacgcgcctcaacctctccgccctcgcgccgacccgcctaattctatactttcctactattccgcgc

SEQ ID NO: 40507 - DNA, 665 bp, Artificial Sequence
  chemically treated genomic DNA (Homo sapiens) CpG-island No: 40507
aaaggtttttggtcggtgtgtagcgtttggtgttcggatagattggaggatttggtgaagtatttgtcgtaggtggggtaggggaagggtcgttcgttcgagtgtacgcgttggtgttttattatgcggttggttatagcgaattttcggtcgtaggcggggtagcggaagggtttggcgtttaggtgcgtgcgttggtggcgtagtagcgatagcggtttgttgaaggttaggtcgtattcggagtacgggaagggtttattgttgttgtgtatgttgcgttggtgtttgcgtaggttcgaagagcgtacgaaggttttttcgtagtttggatacgggtagggtttttcgtttgtgtgggtgcggatgtgttttcggtggtcggaggattaggtgtaggttttgtcgtagaaggagtattggtagggtcgttcgttcgtgtgtaggcgtttgtgttgttggagtgtgtcgcggtgggagtaggttttttcgtatagttcgtacgcgtagcgtttggcggcgtcgtcgcgcgttttcgcggggtttagcggtttgttgggtttttgaaaggttcgttcgtttcgtaggtatttgtagggacgcgttttagttttttcgttttcgcgtcggttcgtttggttttgtatttttttgttgtttcgcgt

SEQ ID NO: 40508 - DNA, 665 bp, Artificial Sequence
  chemically treated genomic DNA (Homo sapiens) CpG-island No: 40508
acgcgaaacaacaaaaaaatacaaaaccaaacgaaccgacgcgaaaacgaaaaaactaaaacgcgtccctacaaatacctacgaaacgaacgaacctttcaaaaacccaacaaaccgctaaaccccgcgaaaacgcgcgacgacgccgccaaacgctacgcgtacgaactatacgaaaaaacctactcccaccgcgacacactccaacaacacaaacgcctacacacgaacgaacgaccctaccaatactccttctacgacaaaacctacacctaatcctccgaccaccgaaaacacatccgcacccacacaaacgaaaaaccctacccgtatccaaactacgaaaaaaccttcgtacgctcttcgaacctacgcaaacaccaacgcaacatacacaacaacaataaacccttcccgtactccgaatacgacctaaccttcaacaaaccgctatcgctactacgccaccaacgcacgcacctaaacgccaaacccttccgctaccccgcctacgaccgaaaattcgctataaccaaccgcataataaaacaccaacgcgtacactcgaacgaacgacccttcccctaccccacctacgacaaatacttcaccaaatcctccaatctatccgaacaccaaacgctacacaccgaccaaaaaccttt

SEQ ID NO: 40509 - DNA, 626 bp, Artificial Sequence
  chemically treated genomic DNA (Homo sapiens) CpG-island No: 40509
gtgtcggtcggtttcgttatggagttaggtgtaggttatttcgacggttatcgcgcggggagtttaagttttcgttaggttttgtgcgacggaagcgtagtgatgttttttagtaaagaacgcggacgttgtatcgtgattaattttgtttttttggaggcgtcgttacggtttacgtttcgttcgcgttaagtgattgaggtttgtggtggagaaggacgtgtcgtgtcgttgggttttgagtcggagtggtcggtgggtgggatggaggcgattttggagtagtatttggaagatacgtgagtagtgcgcgttttttcggtttgttttgaggtcgcggcggaggaatttgagcggaacgaaaggcgcgagttgcgagtatcggttagggcgtttcggggacgtcgcgcgattttcgggatacgggatgagggggttaaattttatttaaggtcgtagggcggggcgggtgattcggaattaaaattttgtcgggtatcgtatatttttttttgagcgagtttttcgggtttaggttacgggttaaaattgtttatttcgttgttgaaatcgtttttacggttagggtggttttgcggaagttttagaaaacgggttgatttttg

SEQ ID NO: 40510 - DNA, 626 bp, Artificial Sequence
  chemically treated genomic DNA (Homo sapiens) CpG-island No: 40510
caaaaatcaacccgttttctaaaacttccgcaaaaccaccctaaccgtaaaaacgatttcaacaacgaaataaacaattttaacccgtaacctaaacccgaaaaactcgctcaaaaaaaaatatacgatacccgacaaaattttaattccgaatcacccgccccgccctacgaccttaaataaaatttaaccccctcatcccgtatcccgaaaatcgcgcgacgtccccgaaacgccctaaccgatactcgcaactcgcgcctttcgttccgctcaaattcctccgccgcgacctcaaaacaaaccgaaaaaacgcgcactactcacgtatcttccaaatactactccaaaatcgcctccatcccacccaccgaccactccgactcaaaacccaacgacacgacacgtccttctccaccacaaacctcaatcacttaacgcgaacgaaacgtaaaccgtaacgacgcctccaaaaaaacaaaattaatcacgatacaacgtccgcgttctttactaaaaaacatcactacgcttccgtcgcacaaaacctaacgaaaacttaaactccccgcgcgataaccgtcgaaataacctacacctaactccataacgaaaccgaccgacac

SEQ ID NO: 40511 - DNA, 626 bp, Artificial Sequence
  chemically treated genomic DNA (Homo sapiens) CpG-island No: 40511
taaaagttaattcgttttttaaaattttcgtagaattattttgatcgtaaagacgattttaataacgagataggtagttttggttcgtggtttgggttcgggagattcgtttaagagggaatgtgcggtgttcggtaggattttaatttcgggttattcgtttcgttttgcggttttgggtagagtttagtttttttatttcgtgtttcgggggtcgcgcgacgttttcgagacgttttggtcggtattcgtagttcgcgtttttcgtttcgtttaagttttttcgtcgcgattttaggataggtcgaagaggcgcgtattatttacgtgttttttaagtgttgttttaaggtcgtttttattttatttatcgattatttcggtttagaatttagcggtacggtacgtttttttttattataggttttagttatttgacgcgagcggggcgtggatcgtaacggcgtttttaaagggataaaattgattacggtgtaacgttcgcgttttttattggaaaatattattgcgttttcgtcgtatagagtttgacgaaggtttgggtttttcgcgcggtgatcgtcgaggtgatttgtatttggttttatggcggaatcggtcggtat

SEQ ID NO: 40512 - DNA, 626 bp, Artificial Sequence
  chemically treated genomic DNA (Homo sapiens) CpG-island No: 40512
ataccgaccgattccgccataaaaccaaatacaaatcacctcgacgatcaccgcgcgaaaaacccaaaccttcgtcaaactctatacgacgaaaacgcaataatattttccaataaaaaacgcgaacgttacaccgtaatcaattttatccctttaaaaacgccgttacgatccacgccccgctcgcgtcaaataactaaaacctataataaaaaaaaacgtaccgtaccgctaaattctaaaccgaaataatcgataaataaaataaaaacgaccttaaaacaacacttaaaaaacacgtaaataatacgcgcctcttcgacctatcctaaaatcgcgacgaaaaaacttaaacgaaacgaaaaacgcgaactacgaataccgaccaaaacgtctcgaaaacgtcgcgcgacccccgaaacacgaaataaaaaaactaaactctacccaaaaccgcaaaacgaaacgaataacccgaaattaaaatcctaccgaacaccgcacattccctcttaaacgaatctcccgaacccaaaccacgaaccaaaactacctatctcgttattaaaatcgtctttacgatcaaaataattctacgaaaattttaaaaaacgaattaactttta

SEQ ID NO: 40513 - DNA, 620 bp, Artificial Sequence
  chemically treated genomic DNA (Homo sapiens) CpG-island No: 40513
ggattcgcgcggggattcgggtaggttgtaaacgttggggagatgttataggagcgtttgtttttttagttttttttttttttcgtcgagggtttttggggtttagcgttttcggcgtttcggcgattttcgggttcgttttgtttttttttagttggggagttgagttcggttttgcgtttatcgtcgatttcggttatttttttttcgttgttcgttttaaaagcgtttgtttcgtttcgcggggcgatttttttttttcggttttggggttgaagattttgtgtggggtagttgcgttttcgggatagttttagtcgcggagcgtttagattagggtagtcggagtcgggttatacgtcgtacgtcgtcggggtcgtcgtatttgagtttagttttagttacgtcggaagcgcgggcggagcgtacgggttcggggagagtcgtttgcgttcgcgagggggatttaagtatttagggtggtggtcgagtttcgtttttcgttagcgggggcgaggatttgcgacgcgtatttttgtttggttcggtttttttagtattagttttacgtatattttatttttttagtttttcgtttttattttgttaatttttttgag

SEQ ID NO: 40514 - DNA, 620 bp, Artificial Sequence
  chemically treated genomic DNA (Homo sapiens) CpG-island No: 40514
ctcaaaaaaattaacaaaataaaaacgaaaaactaaaaaaataaaatatacgtaaaactaatactaaaaaaaccgaaccaaacaaaaatacgcgtcgcaaatcctcgcccccgctaacgaaaaacgaaactcgaccaccaccctaaatacttaaatccccctcgcgaacgcaaacgactctccccgaacccgtacgctccgcccgcgcttccgacgtaactaaaactaaactcaaatacgacgaccccgacgacgtacgacgtataacccgactccgactaccctaatctaaacgctccgcgactaaaactatcccgaaaacgcaactaccccacacaaaatcttcaaccccaaaaccgaaaaaaaaaaatcgccccgcgaaacgaaacaaacgcttttaaaacgaacaacgaaaaaaaaataaccgaaatcgacgataaacgcaaaaccgaactcaactccccaactaaaaaaaaacaaaacgaacccgaaaatcgccgaaacgccgaaaacgctaaaccccaaaaaccctcgacgaaaaaaaaaaaaaactaaaaaaacaaacgctcctataacatctccccaacgtttacaacctacccgaatccccgcgcgaatcc

SEQ ID NO: 40515 - DNA, 620 bp, Artificial Sequence
  chemically treated genomic DNA (Homo sapiens) CpG-island No: 40515
tttagggaagttggtagggtgagggcgaagaattgaggaagtagggtgtgcgtggggttggtgttgaggagatcgggttaggtaggggtgcgcgtcgtaggttttcgttttcgttggcgggaggcgggattcggttattattttaggtatttgggtttttttcgcgggcgtaggcgatttttttcggattcgtgcgtttcgttcgcgttttcggcgtgattggagttgggtttaggtgcggcggtttcggcggcgtgcggcgtatgattcgatttcggttgttttggtttgggcgtttcgcggttggggttgtttcgaaggcgtagttgttttatataggatttttaattttagggtcgaaagggagaagtcgtttcgcggggcgggataggcgtttttggagcgagtagcgaagggagagtggtcggggtcggcgatgggcgtagagtcgggtttagttttttagttgggaggggatagggcggattcggaggtcgtcgaaacgtcgggagcgttgaattttagagattttcggcgagagaaaggagaagttgggaaggtaggcgtttttgtggtatttttttagcgtttgtagtttattcgagttttcgcgcgggttt

SEQ ID NO: 40516 - DNA, 620 bp, Artificial Sequence
  chemically treated genomic DNA (Homo sapiens) CpG-island No: 40516
aaacccgcgcgaaaactcgaataaactacaaacgctaaaaaaataccacaaaaacgcctaccttcccaacttctcctttctctcgccgaaaatctctaaaattcaacgctcccgacgtttcgacgacctccgaatccgccctatcccctcccaactaaaaaactaaacccgactctacgcccatcgccgaccccgaccactctcccttcgctactcgctccaaaaacgcctatcccgccccgcgaaacgacttctccctttcgaccctaaaattaaaaatcctatataaaacaactacgccttcgaaacaaccccaaccgcgaaacgcccaaaccaaaacaaccgaaatcgaatcatacgccgcacgccgccgaaaccgccgcacctaaacccaactccaatcacgccgaaaacgcgaacgaaacgcacgaatccgaaaaaaatcgcctacgcccgcgaaaaaaacccaaatacctaaaataataaccgaatcccgcctcccgccaacgaaaacgaaaacctacgacgcgcacccctacctaacccgatctcctcaacaccaaccccacgcacaccctacttcctcaattcttcgccctcaccctaccaacttccctaaa

SEQ ID NO: 40517 - DNA, 564 bp, Artificial Sequence
  chemically treated genomic DNA (Homo sapiens) CpG-island No: 40517
tgttcggcgagatcgcgatgttcggggagatcgtaatgtttcgggggatcgtaatgtacggggagacggcgatgttcgggggtatcgcgatgttcggggggatcgcgatgttcggggagatcgcgttattcggggggacggcgatgttcgggggggattacgatgttcggagggatcgcgatgttggggtagaacgcgatgttcgggggtatcgcgtcggtgttattagaagttttttggtttgcggggtaagtagtagtcgtaggaattagattcggcggaaaggagtcgcggaggggaattgagtgtttttagtcgggtatgttcggcgagatcgcgatgttcggtgagatggtaatgttcggggagatcgcgattttcggggagatcgcgatgttcggggagatcgcgttgttcggagagagggcgatgttcggagaggtcgcgatgttcggggagattacgatgttcggggagatagtatcggtttttttagaaattttttggtttgaggggtaagtagtagtcgtaggaagcggattcggcggaaaggagttatcgagg

SEQ ID NO: 40518 - DNA, 564 bp, Artificial Sequence
  chemically treated genomic DNA (Homo sapiens) CpG-island No: 40518
cctcgataactcctttccgccgaatccgcttcctacgactactacttacccctcaaaccaaaaaatttctaaaaaaaccgatactatctccccgaacatcgtaatctccccgaacatcgcgacctctccgaacatcgccctctctccgaacaacgcgatctccccgaacatcgcgatctccccgaaaatcgcgatctccccgaacattaccatctcaccgaacatcgcgatctcgccgaacatacccgactaaaaacactcaattcccctccgcgactcctttccgccgaatctaattcctacgactactacttaccccgcaaaccaaaaaacttctaataacaccgacgcgatacccccgaacatcgcgttctaccccaacatcgcgatccctccgaacatcgtaatcccccccgaacatcgccgtccccccgaataacgcgatctccccgaacatcgcgatccccccgaacatcgcgatacccccgaacatcgccgtctccccgtacattacgatcccccgaaacattacgatctccccgaacatcgcgatctcgccgaaca

SEQ ID NO: 40519 - DNA, 564 bp, Artificial Sequence
  chemically treated genomic DNA (Homo sapiens) CpG-island No: 40519
tttcggtggttttttttcgtcgggttcgttttttgcggttgttgtttgttttttaggttaggaggtttttggaaggatcggtgttgttttttcgaatatcgtggttttttcgaatatcgcggttttttcgaatatcgtttttttttcgagtaacgcgattttttcgaatatcgcggttttttcgaaaatcgcgattttttcgaatattgttattttatcgaatatcgcgatttcgtcgaatatgttcggttgaaggtatttagttttttttcgcggttttttttcgtcgggtttgatttttgcggttgttgtttgtttcgtaggttaggaggtttttggtagtatcggcgcgatgttttcgaatatcgcgttttattttaatatcgcgattttttcgaatatcgtgatttttttcgaatatcgtcgttttttcgagtaacgcggttttttcgaatatcgcggttttttcgaatatcgcggtattttcgaatatcgtcgttttttcgtatattgcgatttttcgaaatattgcgattttttcgaatatcgcgatttcgtcgaata

SEQ ID NO: 40520 - DNA, 564 bp, Artificial Sequence
  chemically treated genomic DNA (Homo sapiens) CpG-island No: 40520
tattcgacgaaatcgcgatattcgaaaaaatcgcaatatttcgaaaaatcgcaatatacgaaaaaacgacgatattcgaaaataccgcgatattcgaaaaaaccgcgatattcgaaaaaaccgcgttactcgaaaaaacgacgatattcgaaaaaaatcacgatattcgaaaaaatcgcgatattaaaataaaacgcgatattcgaaaacatcgcgccgatactaccaaaaacctcctaacctacgaaacaaacaacaaccgcaaaaatcaaacccgacgaaaaaaaaccgcgaaaaaaaactaaataccttcaaccgaacatattcgacgaaatcgcgatattcgataaaataacaatattcgaaaaaatcgcgattttcgaaaaaaccgcgatattcgaaaaaatcgcgttactcgaaaaaaaaacgatattcgaaaaaaccgcgatattcgaaaaaaccacgatattcgaaaaaacaacaccgatccttccaaaaacctcctaacctaaaaaacaaacaacaaccgcaaaaaacgaacccgacgaaaaaaaaccaccgaaa

SEQ ID NO: 40521 - DNA, 864 bp, Artificial Sequence
  chemically treated genomic DNA (Homo sapiens) CpG-island No: 40521
attagtcgttttcgaagttttttacgatcgtattttattgttatttttttttgttggtgtcgtcgttgttgttgttgttgaatttgttttgtagcggtcgtcgtggttacgggcgtcgagttttttcgggaggagtttgagtcgttgttggagtcggggttgttatcggcgttatttcgggggttttggaagaaaattcgtgcgtcgtcgtcgttggtttcgtcggtcgtttcgttgttgttcgtcgttatcgatatgttttcgcgcgttcgagttttagtgcggttcggaggaggggcgggcggagcgcgttcggcgtcgttattattttcggttcggtagtcgtatgcgaagggtttttcggtatttgttttgcgtcgcgcgcgtttagtcgttcggttgttttgggagggcgggaggagtcgcggcgagagggaggagggcggggaggacgacggggcggggatcgtagttttaaagaagtcgtcgaggattttttcggtttagtttttagaggcgggatttggcgtttgcggtagagagggttcggggcgtgggagttttcgcggggcgggaaatgtgtgcgtttagatacgggaggtcgtcgatgtgtagatttcggaaggacgggcgtggggcggggtgttaggggatgtttttgcgcgggtgttcgtggtttttagtttcggagatagggatttacgtttttttcgtaatttcggagcgtaggaaacgcgtcgtttttcggggtttttatttggcgcggtttcgggtaggattcgtagcgaaggggatataggaaaggatcgcgtcgtaggtttttttaggaggtttttttagttttatcgttttttttgttggttg

SEQ ID NO: 40522 - DNA, 864 bp, Artificial Sequence
  chemically treated genomic DNA (Homo sapiens) CpG-island No: 40522
caaccaacaaaaaaaacgataaaactaaaaaaacctcctaaaaaaacctacgacgcgatcctttcctatatccccttcgctacgaatcctacccgaaaccgcgccaaataaaaaccccgaaaaacgacgcgtttcctacgctccgaaattacgaaaaaaacgtaaatccctatctccgaaactaaaaaccacgaacacccgcgcaaaaacatcccctaacaccccgccccacgcccgtccttccgaaatctacacatcgacgacctcccgtatctaaacgcacacatttcccgccccgcgaaaactcccacgccccgaaccctctctaccgcaaacgccaaatcccgcctctaaaaactaaaccgaaaaaatcctcgacgacttctttaaaactacgatccccgccccgtcgtcctccccgccctcctccctctcgccgcgactcctcccgccctcccaaaacaaccgaacgactaaacgcgcgcgacgcaaaacaaataccgaaaaacccttcgcatacgactaccgaaccgaaaataataacgacgccgaacgcgctccgcccgcccctcctccgaaccgcactaaaactcgaacgcgcgaaaacatatcgataacgacgaacaacaacgaaacgaccgacgaaaccaacgacgacgacgcacgaattttcttccaaaacccccgaaataacgccgataacaaccccgactccaacaacgactcaaactcctcccgaaaaaactcgacgcccgtaaccacgacgaccgctacaaaacaaattcaacaacaacaacaacgacgacaccaacaaaaaaaaataacaataaaatacgatcgtaaaaaacttcgaaaacgactaat

SEQ ID NO: 40523 - DNA, 864 bp, Artificial Sequence
  chemically treated genomic DNA (Homo sapiens) CpG-island No: 40523
tagttaatagaggagacggtggggttaggaaaattttttgggggagtttgcggcgcggtttttttttgtgtttttttcgttgcgggttttgttcggggtcgcgttaggtggaggtttcgagaggcggcgcgttttttgcgtttcgggattgcgggagaagcgtgagtttttgttttcgagattagaggttacggatattcgcgtaggagtattttttggtatttcgttttacgttcgttttttcggagtttatatatcggcgatttttcgtgtttaggcgtatatatttttcgtttcgcggagatttttacgtttcgggttttttttgtcgtaggcgttagatttcgtttttgggggttggatcgagagggttttcggcggtttttttaaggttgcggttttcgtttcgtcgtttttttcgtttttttttttttcgtcgcggtttttttcgtttttttagagtagtcgggcggttgggcgcgcgcggcgtagagtaggtgtcggggagtttttcgtatgcggttgtcgggtcggaggtggtagcggcgtcgggcgcgtttcgttcgtttttttttcgggtcgtattgaggttcgggcgcgcggggatatgtcggtggcgacgggtagtagcgagacggtcggcggggttagcggcggcggcgtacgggtttttttttaaagttttcggggtggcgtcggtggtagtttcggttttagtagcggtttaggtttttttcgggaggattcggcgttcgtggttacggcggtcgttgtagggtaggtttagtagtaatagtagcggcgatattagtagggaaaagtgatagtgaaatacgatcgtaaggagtttcggaagcggttggt

SEQ ID NO: 40524 - DNA, 864 bp, Artificial Sequence
  chemically treated genomic DNA (Homo sapiens) CpG-island No: 40524
accaaccgcttccgaaactccttacgatcgtatttcactatcacttttccctactaatatcgccgctactattactactaaacctaccctacaacgaccgccgtaaccacgaacgccgaatcctcccgaaaaaaacctaaaccgctactaaaaccgaaactaccaccgacgccaccccgaaaactttaaaaaaaaacccgtacgccgccgccgctaaccccgccgaccgtctcgctactacccgtcgccaccgacatatccccgcgcgcccgaacctcaatacgacccgaaaaaaaaacgaacgaaacgcgcccgacgccgctaccacctccgacccgacaaccgcatacgaaaaactccccgacacctactctacgccgcgcgcgcccaaccgcccgactactctaaaaaaacgaaaaaaaccgcgacgaaaaaaaaaaaaacgaaaaaaacgacgaaacgaaaaccgcaaccttaaaaaaaccgccgaaaaccctctcgatccaacccccaaaaacgaaatctaacgcctacgacaaaaaaaacccgaaacgtaaaaatctccgcgaaacgaaaaatatatacgcctaaacacgaaaaatcgccgatatataaactccgaaaaaacgaacgtaaaacgaaataccaaaaaatactcctacgcgaatatccgtaacctctaatctcgaaaacaaaaactcacgcttctcccgcaatcccgaaacgcaaaaaacgcgccgcctctcgaaacctccacctaacgcgaccccgaacaaaacccgcaacgaaaaaaacacaaaaaaaaaccgcgccgcaaactcccccaaaaaattttcctaaccccaccgtctcctctattaacta

SEQ ID NO: 40525 - DNA, 619 bp, Artificial Sequence
  chemically treated genomic DNA (Homo sapiens) CpG-island No: 40525
atatcgatcgtcgattcgtaggttagaagtaaaaggagttttttttcgattagaaatattcgatttcggtattttttattcggtcgcggtcgtttcgtcgtttttagtcgtagcgttcgttcgcgtttgtttcgttcggggttttaattttattgtattcggtttttcgcgttttttttcgtgtcgttttttcgtttttcgcgttttattcgttcgtcgttttttttaattttttttttttcgttcggattcgcgtcgtttttatattttcgtttcgcgcgtcgatatcgttttatttcgttttcgtttcgtagttttcgcgcgtatttcgtttcgtttttcgtatagtcgtcgttttcgttattttttttttttatttttttcgtatttcgcgggcgttttcgtagtttattttttttacgtcgttttcgcggttcgtgatacgttcgtttgcgtttcggttattttcgttcgtcgattatacgtaggaagagaagcgttattcgttcgttcgtcgtagaatttttttattttttttcgtttaatatttattattatttcgcgagagttcgtacgatttatcgttttttattgattatatttttttttttttttttat

SEQ ID NO: 40526 - DNA, 619 bp, Artificial Sequence
  chemically treated genomic DNA (Homo sapiens) CpG-island No: 40526
ataaaaaaaaaaaaaaaaatataatcaataaaaaacgataaatcgtacgaactctcgcgaaataataataaatattaaacgaaaaaaaataaaaaaattctacgacgaacgaacgaataacgcttctcttcctacgtataatcgacgaacgaaaataaccgaaacgcaaacgaacgtatcacgaaccgcgaaaacgacgtaaaaaaaataaactacgaaaacgcccgcgaaatacgaaaaaaataaaaaaaaaaaataacgaaaacgacgactatacgaaaaacgaaacgaaatacgcgcgaaaactacgaaacgaaaacgaaataaaacgatatcgacgcgcgaaacgaaaatataaaaacgacgcgaatccgaacgaaaaaaaaaaaattaaaaaaaacgacgaacgaataaaacgcgaaaaacgaaaaaacgacacgaaaaaaaacgcgaaaaaccgaatacaataaaattaaaaccccgaacgaaacaaacgcgaacgaacgctacgactaaaaacgacgaaacgaccgcgaccgaataaaaaataccgaaatcgaatatttctaatcgaaaaaaaactccttttacttctaacctacgaatcgacgatcgatat

SEQ ID NO: 40527 - DNA, 619 bp, Artificial Sequence
  chemically treated genomic DNA (Homo sapiens) CpG-island No: 40527
atgaggggggggagggggatgtggttaatgagggacggtgggtcgtgcgggttttcgcggggtggtggtgggtgttgggcggggggaggtgggggggttttgcggcgggcgggcgggtggcgtttttttttttgcgtgtggtcggcgggcgggggtgatcggggcgtaggcgggcgtattacgggtcgcgggggcggcgtggagggggtgggttgcggggacgttcgcggggtacggggggggtaggggggaaaggtggcgggggcggcggttgtgcggggggcggggcgggatacgcgcggggattgcggggcggaggcggggtggggcggtgtcggcgcgcggggcgggagtgtgggggcgacgcgggttcgggcgggggggggggggttggggggggcggcgggcggatggggcgcggggggcggggggacggtacgagggggggcgcggggggtcgagtgtagtggggttggggtttcgggcggggtaggcgcgggcgggcgttgcggttggggacggcggggcggtcgcggtcgggtggggggtatcggggtcggatgtttttggtcgggggggggttttttttgtttttgatttacgggtcggcggtcgatgt

SEQ ID NO: 40528 - DNA, 619 bp, Artificial Sequence
  chemically treated genomic DNA (Homo sapiens) CpG-island No: 40528
acatcgaccgccgacccgtaaatcaaaaacaaaaaaaacccccccccgaccaaaaacatccgaccccgataccccccacccgaccgcgaccgccccgccgtccccaaccgcaacgcccgcccgcgcctaccccgcccgaaaccccaaccccactacactcgaccccccgcgccccccctcgtaccgtccccccgccccccgcgccccatccgcccgccgccccccccaacccccccccccccgcccgaacccgcgtcgcccccacactcccgccccgcgcgccgacaccgccccaccccgcctccgccccgcaatccccgcgcgtatcccgccccgccccccgcacaaccgccgcccccgccacctttcccccctaccccccccgtaccccgcgaacgtccccgcaacccaccccctccacgccgcccccgcgacccgtaatacgcccgcctacgccccgatcacccccgcccgccgaccacacgcaaaaaaaaaaacgccacccgcccgcccgccgcaaaacccccccacctccccccgcccaacacccaccaccaccccgcgaaaacccgcacgacccaccgtccctcattaaccacatccccctcccccccctcat

SEQ ID NO: 40529 - DNA, 984 bp, Artificial Sequence
  chemically treated genomic DNA (Homo sapiens) CpG-island No: 40529
gggtgcgttgaattttgtttgtttttagaggtagtcgatcggttttcgtttttatcgattttttttggcggttagcgttttatacgcggtttgttcgtttgggagttagtatcgttttttttcgtcggtttttaaagggtcggggcgtttttatttcgttgacgatggtggagtgggtttgggcgtagcgttagtcgtcgcggtacggtataaggggagtcgagcggttggggaaggcggcgagtgggttcgcgtagttgagagcgttagtggcggaggcgttgtcgttggtcgtttttaggaggtagcgttggtagcggtcgcggcgttcggggggttttgggtcgcgggaggcgggcgtcgtgcggttttatttttttttcgggttttagtcgtagcgttcggttagcgtcgcggtatttggttcgcggtattagtagtggtcgggttgcgtgtttaggaagattacgtcgacgaagaggaaggcgaaggtgacgttcgttaggtatagtagtaaaaatacgcgtttttggaagcgttcgaattcgtttattcgttgtagcgtttcgtcgaaggagggtatggtgcgttcgtcgttcgtcgttcgtagttcgcgtttcggagtgattcgcggatttagtcggcggtttttttttatttcgtcgtttttttcgcgttattcgttttattcgttttggcgttgtgtcggtcgtagtcgttttttttgtttttcgcggttttcgtttttttttttcgggcgttcgtagtagtttcgggttataggtcgcgggagggacggtcgcgagtcggacgtattcggtcggggtgggcgcgcggtggggttcgggcggtgcggtttgattacgcgttagggattcggtcgggatcgcgagtgacgggcgtagttttcggtttggcgcggagttttttttggtttttgttagtagtttgttttgtagttagttttaggtcgggttttagaag

SEQ ID NO: 40530 - DNA, 984 bp, Artificial Sequence
  chemically treated genomic DNA (Homo sapiens) CpG-island No: 40530
cttctaaaacccgacctaaaactaactacaaaacaaactactaacaaaaaccaaaaaaaactccgcgccaaaccgaaaactacgcccgtcactcgcgatcccgaccgaatccctaacgcgtaatcaaaccgcaccgcccgaaccccaccgcgcgcccaccccgaccgaatacgtccgactcgcgaccgtccctcccgcgacctataacccgaaactactacgaacgcccgaaaaaaaaaaacgaaaaccgcgaaaaacaaaaaaaacgactacgaccgacacaacgccaaaacgaataaaacgaataacgcgaaaaaaacgacgaaataaaaaaaaaccgccgactaaatccgcgaatcactccgaaacgcgaactacgaacgacgaacgacgaacgcaccataccctccttcgacgaaacgctacaacgaataaacgaattcgaacgcttccaaaaacgcgtatttttactactatacctaacgaacgtcaccttcgccttcctcttcgtcgacgtaatcttcctaaacacgcaacccgaccactactaataccgcgaaccaaataccgcgacgctaaccgaacgctacgactaaaacccgaaaaaaaaataaaaccgcacgacgcccgcctcccgcgacccaaaaccccccgaacgccgcgaccgctaccaacgctacctcctaaaaacgaccaacgacaacgcctccgccactaacgctctcaactacgcgaacccactcgccgccttccccaaccgctcgactccccttataccgtaccgcgacgactaacgctacgcccaaacccactccaccatcgtcaacgaaataaaaacgccccgaccctttaaaaaccgacgaaaaaaaacgatactaactcccaaacgaacaaaccgcgtataaaacgctaaccgccaaaaaaaatcgataaaaacgaaaaccgatcgactacctctaaaaacaaacaaaattcaacgcaccc

SEQ ID NO: 40531 - DNA, 984 bp, Artificial Sequence
  chemically treated genomic DNA (Homo sapiens) CpG-island No: 40531
tttttggagttcgatttggggttgattgtagagtaggttgttggtagggattaaaaggagtttcgcgttaggtcggaggttgcgttcgttattcgcggtttcggtcgggtttttggcgcgtagttaggtcgtatcgttcgagttttatcgcgcgtttatttcggtcgggtgcgttcggttcgcggtcgtttttttcgcgatttgtggttcggggttgttgcgggcgttcggggaagagaggcgggggtcgcggggggtaggaggagcggttgcggtcggtatagcgttagggcgagtgaggcgggtggcgcgggggaggcggcggagtaaagagaggtcgtcggttgggttcgcgggttatttcgaggcgcgggttgcgggcggcgggcggcgggcgtattatgttttttttcgacgaggcgttgtagcgggtgggcgagttcgggcgtttttagaggcgcgtgtttttgttgttgtgtttgacgggcgttattttcgttttttttttcgtcggcgtggtttttttgggtacgtagttcgattattattggtgtcgcgggttaagtgtcgcggcgttggtcgagcgttgcggttggagttcggaggaggagtggaatcgtacggcgttcgtttttcgcggtttagagtttttcgagcgtcgcggtcgttgttagcgttattttttggaggcggttaacgatagcgttttcgttattagcgtttttagttgcgcggatttattcgtcgttttttttaatcgttcggttttttttgtgtcgtgtcgcggcggttggcgttacgtttaggtttattttattatcgttagcgaggtaagggcgtttcggttttttggaagtcggcgggagaggacgatgttggtttttaggcggataagtcgcgtgtgagacgttggtcgttaggggaggtcggtggagacggggatcggtcggttatttttggggatagataggatttagcgtattt

SEQ ID NO: 40532 - DNA, 984 bp, Artificial Sequence
  chemically treated genomic DNA (Homo sapiens) CpG-island No: 40532
aaatacgctaaatcctatctatccccaaaaataaccgaccgatccccgtctccaccgacctcccctaacgaccaacgtctcacacgcgacttatccgcctaaaaaccaacatcgtcctctcccgccgacttccaaaaaaccgaaacgcccttacctcgctaacgataataaaataaacctaaacgtaacgccaaccgccgcgacacgacacaaaaaaaaccgaacgattaaaaaaaacgacgaataaatccgcgcaactaaaaacgctaataacgaaaacgctatcgttaaccgcctccaaaaaataacgctaacaacgaccgcgacgctcgaaaaactctaaaccgcgaaaaacgaacgccgtacgattccactcctcctccgaactccaaccgcaacgctcgaccaacgccgcgacacttaacccgcgacaccaataataatcgaactacgtacccaaaaaaaccacgccgacgaaaaaaaaaacgaaaataacgcccgtcaaacacaacaacaaaaacacgcgcctctaaaaacgcccgaactcgcccacccgctacaacgcctcgtcgaaaaaaaacataatacgcccgccgcccgccgcccgcaacccgcgcctcgaaataacccgcgaacccaaccgacgacctctctttactccgccgcctcccccgcgccacccgcctcactcgccctaacgctataccgaccgcaaccgctcctcctaccccccgcgacccccgcctctcttccccgaacgcccgcaacaaccccgaaccacaaatcgcgaaaaaaacgaccgcgaaccgaacgcacccgaccgaaataaacgcgcgataaaactcgaacgatacgacctaactacgcgccaaaaacccgaccgaaaccgcgaataacgaacgcaacctccgacctaacgcgaaactccttttaatccctaccaacaacctactctacaatcaaccccaaatcgaactccaaaaa

SEQ ID NO: 40533 - DNA, 536 bp, Artificial Sequence
  chemically treated genomic DNA (Homo sapiens) CpG-island No: 40533
gggatagtagtgttgcgaaatgcgaggaagtcgcgggggagggagattcgtaatagtatataacgcgcggcgggacggagggcgttgggtgcggttagcggaagagggagggtggcggttgggcggtgcgcgtatgggcgcgcgagcgttttcgagttttatatgttttagagtgggtcgtgcggggggggagggcgtggtatcggggttagcggcgtggtgtttttttgggcgggcgtaagagaggacgtgcgggagcgcgcggggtggagtacgggcggggatgagtggtgggggcgggggagggggggcgcggcgcggggggttgggaggggtggaattatcgattgtagcgggcgtttttttattttggtgtcgggggttatgggattttcgataggggtgttagaaatgggatggtatttgaggcgggggggggggcgcgtttttattcgacgcgcggggtgttgttttcggtaggattatattttttttttaatattatcgtgtttttttattaaatttttttttataat

SEQ ID NO: 40534 - DNA, 536 bp, Artificial Sequence
  chemically treated genomic DNA (Homo sapiens) CpG-island No: 40534
attataaaaaaaaatttaataaaaaaacacgataatattaaaaaaaaaatataatcctaccgaaaacaacaccccgcgcgtcgaataaaaacgcgcccccccccccgcctcaaataccatcccatttctaacacccctatcgaaaatcccataacccccgacaccaaaataaaaaaacgcccgctacaatcgataattccacccctcccaaccccccgcgccgcgccccccctcccccgcccccaccactcatccccgcccgtactccaccccgcgcgctcccgcacgtcctctcttacgcccgcccaaaaaaacaccacgccgctaaccccgataccacgccctccccccccgcacgacccactctaaaacatataaaactcgaaaacgctcgcgcgcccatacgcgcaccgcccaaccgccaccctccctcttccgctaaccgcacccaacgccctccgtcccgccgcgcgttatatactattacgaatctccctcccccgcgacttcctcgcatttcgcaacactactatccc

SEQ ID NO: 40535 - DNA, 536 bp, Artificial Sequence
  chemically treated genomic DNA (Homo sapiens) CpG-island No: 40535
gttataagaagaaatttaataaaaaaatacgataatgttggggggggggtgtaattttatcgagagtaatatttcgcgcgtcgggtagaggcgcgttttttttttcgttttaaatattattttatttttaatatttttatcgagggttttatagttttcgatattaaggtggaaaagcgttcgttgtaatcgatgattttattttttttaatttttcgcgtcgcgttttttttttttcgtttttattatttattttcgttcgtgttttatttcgcgcgttttcgtacgtttttttttacgttcgtttaggaaggtattacgtcgttaatttcggtattacgtttttttttttcgtacggtttattttaaaatatatgaagttcggaggcgttcgcgcgtttatacgcgtatcgtttagtcgttattttttttttttcgttaatcgtatttagcgtttttcgtttcgtcgcgcgttatgtattattgcgggtttttttttttcgcgattttttcgtatttcgtagtattattgtttt

SEQ ID NO: 40536 - DNA, 536 bp, Artificial Sequence
  chemically treated genomic DNA (Homo sapiens) CpG-island No: 40536
aaaacaataatactacgaaatacgaaaaaatcgcgaaaaaaaaaaacccgcaataatacataacgcgcgacgaaacgaaaaacgctaaatacgattaacgaaaaaaaaaaaataacgactaaacgatacgcgtataaacgcgcgaacgcctccgaacttcatatattttaaaataaaccgtacgaaaaaaaaaaacgtaataccgaaattaacgacgtaataccttcctaaacgaacgtaaaaaaaaacgtacgaaaacgcgcgaaataaaacacgaacgaaaataaataataaaaacgaaaaaaaaaaaacgcgacgcgaaaaattaaaaaaaataaaatcatcgattacaacgaacgcttttccaccttaatatcgaaaactataaaaccctcgataaaaatattaaaaataaaataatatttaaaacgaaaaaaaaaacgcgcctctacccgacgcgcgaaatattactctcgataaaattacaccccccccccaacattatcgtatttttttattaaatttcttcttataac

SEQ ID NO: 40537 - DNA, 517 bp, Artificial Sequence
  chemically treated genomic DNA (Homo sapiens) CpG-island No: 40537
  unsure (69, 226, 363, 376, 408, 420, 438, 457, 467)
tcgttgcgcggttcggggcgtcgttcgtttcgttcgtcgtcgttttttcgtttcgcggtgcggggcgtngcgcgttcgcgcgtcgttgggttttcgtgttttcgttcggtttttttcgttcgttcggtttcgtcggtttcgcgtcgttcgtcgttttttcgtcgtttcgcgcgtcgtcgttcgtcggggtttgtcggtttcggtttcggcgcggttttgttcggtntttcgcgtgcgttcgtgtttgcgtcgcgtcgttttttttttttcgttcgcgcgcggcgcgggtcgcggttttcgcgtgtcgttcgttcgttcgttttttttcgtcgtcgttgggtttcgttttcgtcgggttttttnttttcggcgtttnttttttcgttttttttcgcgggtgtcgggcgnggtcgcgttttnttttcggtcgcggcgggngttcgcggttttgggtcgntcgttcgcgntttcggggttgttgttcgtcgcgcgttttttcgttcggcggcgcgcgcgt

SEQ ID NO: 40538 - DNA, 517 bp, Artificial Sequence
  chemically treated genomic DNA (Homo sapiens) CpG-island No: 40538
  unsure (51, 61, 80, 98, 110, 142, 155, 292, 449)
acgcgcgcgccgccgaacgaaaaaacgcgcgacgaacaacaaccccgaaancgcgaacgancgacccaaaaccgcgaacncccgccgcgaccgaaaanaaaacgcgaccncgcccgacacccgcgaaaaaaaacgaaaaaanaaacgccgaaaanaaaaaacccgacgaaaacgaaacccaacgacgacgaaaaaaaacgaacgaacgaacgacacgcgaaaaccgcgacccgcgccgcgcgcgaacgaaaaaaaaaaaacgacgcgacgcaaacacgaacgcacgcgaaanaccgaacaaaaccgcgccgaaaccgaaaccgacaaaccccgacgaacgacgacgcgcgaaacgacgaaaaaacgacgaacgacgcgaaaccgacgaaaccgaacgaacgaaaaaaaccgaacgaaaacacgaaaacccaacgacgcgcgaacgcgcnacgccccgcaccgcgaaacgaaaaaacgacgacgaacgaaacgaacgacgccccgaaccgcgcaacga

SEQ ID NO: 40539 - DNA, 517 bp, Artificial Sequence
  chemically treated genomic DNA (Homo sapiens) CpG-island No: 40539
  unsure (51, 61, 80, 98, 110, 142, 155, 292, 449)
acgcgcgcgtcgtcgggcgaggaggcgcgcggcgggtaataatttcgaggncgcgggcggncggtttaaagtcgcgggtnttcgtcgcggtcgggggnaagacgcggttncgttcgatattcgcgggggggggcgggggggnggacgtcgggaanaaggggttcggcgggggcggaatttaacgacggcgaaggagggcggacgggcggacggtacgcgaggatcgcggttcgcgtcgcgcgcgggcgaggggaagaaaacggcgcggcgtaaatacgaacgtacgcggaanatcgggtaagatcgcgtcgggatcggggtcgataaatttcggcgggcggcggcgcgcggggcgacgaaaagacgacgaacggcgcgggatcgacggggtcgggcgagcgggggggatcgggcggggatacggaggtttagcggcgcgcgggcgcgtngcgtttcgtatcgcggagcggagaagcggcggcgggcgaagcgggcgacgtttcggatcgcgtagcgg

SEQ ID NO: 40540 - DNA, 517 bp, Artificial Sequence
  chemically treated genomic DNA (Homo sapiens) CpG-island No: 40540
  unsure (69, 226, 363, 376, 408, 420, 438, 457, 467)
ccgctacgcgatccgaaacgtcgcccgcttcgcccgccgccgcttctccgctccgcgatacgaaacgcnacgcgcccgcgcgccgctaaacctccgtatccccgcccgatcccccccgctcgcccgaccccgtcgatcccgcgccgttcgtcgtcttttcgtcgccccgcgcgccgccgcccgccgaaatttatcgaccccgatcccgacgcgatcttacccgatnttccgcgtacgttcgtatttacgccgcgccgttttcttcccctcgcccgcgcgcgacgcgaaccgcgatcctcgcgtaccgtccgcccgtccgccctccttcgccgtcgttaaattccgcccccgccgaaccccttnttcccgacgtccncccccccgcccccccccgcgaatatcgaacgnaaccgcgtcttncccccgaccgcgacgaanacccgcgactttaaaccgnccgcccgcgncctcgaaattattacccgccgcgcgcctcctcgcccgacgacgcgcgcgt

SEQ ID NO: 40541 - DNA, 569 bp, Artificial Sequence
  chemically treated genomic DNA (Homo sapiens) CpG-island No: 40541
  unsure (50, 513)
aacggtgttcgatcgtacgtatataatttagatagtcggcgtgcggacgnttaattaagcggagtcgttacggacggtttacgcgtgtcgtcgttcggtttcgtgcgtgcggcgtgtattttttattttattttttttttttatttattcgttaatttttattattttttttcgtatttcgatatgcgtattcgcgttttattatttacgtaacgtttatcgttattttatttcgtcgggatcggtgcggacgatcgtttcgttttcgttatattttttttttattattataacgttcgttaatttattttttcgttttttcgttcgtaaatttacgtcgtttttttcgtttttattttcgttgtttttacgtatttttcggtttttttttatttcgtcgtaagtttttgatcgtttcggattcgtattttacgtcgcgtattcgtgcggtcgacggttcgttttttttttcgcgcgtttcgttcgtgagtcggggttcgggtagcgattcgntcgttgtgattcgtatttattgcgtcgtatatatacgttttttttcgttattattt

SEQ ID NO: 40542 - DNA, 569 bp, Artificial Sequence
  chemically treated genomic DNA (Homo sapiens) CpG-island No: 40542
  unsure (57, 520)
aaataataacgaaaaaaaacgtatatatacgacgcaataaatacgaatcacaacgancgaatcgctacccgaaccccgactcacgaacgaaacgcgcgaaaaaaaaaacgaaccgtcgaccgcacgaatacgcgacgtaaaatacgaatccgaaacgatcaaaaacttacgacgaaataaaaaaaaaccgaaaaatacgtaaaaacaacgaaaataaaaacgaaaaaaacgacgtaaatttacgaacgaaaaaacgaaaaaataaattaacgaacgttataataataaaaaaaaaatataacgaaaacgaaacgatcgtccgcaccgatcccgacgaaataaaataacgataaacgttacgtaaataataaaacgcgaatacgcatatcgaaatacgaaaaaaaataataaaaattaacgaataaataaaaaaaaaaaataaaataaaaaatacacgccgcacgcacgaaaccgaacgacgacacgcgtaaaccgtccgtaacgactccgcttaattaancgtccgcacgccgactatctaaattatatacgtacgatcgaacaccgtt

SEQ ID NO: 40543 - DNA, 569 bp, Artificial Sequence
  chemically treated genomic DNA (Homo sapiens) CpG-island No: 40543
  unsure (57, 520)
ggatggtgacgggggagagcgtatgtgtgcgacgtagtgggtgcgagttataacggncgggtcgttattcggatttcggtttacggacggggcgcgcgaaggaaggggcgagtcgtcgatcgtacggatacgcgacgtgaggtacgggttcggaacgattagaggtttacggcgaaatgagggagaatcggaaaatacgtgagggtaacgggaatgggggcgggagaggcggcgtgggtttgcggacggggagacgagagaatgggttgacgagcgttatgatgatggaggaagggtgtagcgagggcggaacggtcgttcgtatcggtttcgacgggatggagtgacgatagacgttgcgtaggtggtaggacgcgggtacgtatgtcgaggtacggaaggaggtgatagagattgacgggtgagtggggaaagggaatagggtgagaggtatacgtcgtacgtacggagtcgaacgacgatacgcgtgggtcgttcgtggcggtttcgtttaattggncgttcgtacgtcgattgtttgggttgtgtgcgtacgatcgaatatcgtt

SEQ ID NO: 40544 - DNA, 569 bp, Artificial Sequence
  chemically treated genomic DNA (Homo sapiens) CpG-island No: 40544
  unsure (50, 513)
aacgatattcgatcgtacgcacacaacccaaacaatcgacgtacgaacgnccaattaaacgaaaccgccacgaacgacccacgcgtatcgtcgttcgactccgtacgtacgacgtatacctctcaccctattccctttccccactcacccgtcaatctctatcacctccttccgtacctcgacatacgtacccgcgtcctaccacctacgcaacgtctatcgtcactccatcccgtcgaaaccgatacgaacgaccgttccgccctcgctacacccttcctccatcatcataacgctcgtcaacccattctctcgtctccccgtccgcaaacccacgccgcctctcccgcccccattcccgttaccctcacgtattttccgattctccctcatttcgccgtaaacctctaatcgttccgaacccgtacctcacgtcgcgtatccgtacgatcgacgactcgccccttccttcgcgcgccccgtccgtaaaccgaaatccgaataacgacccgnccgttataactcgcacccactacgtcgcacacatacgctctcccccgtcaccatcc

SEQ ID NO: 40545 - DNA, 968 bp, Artificial Sequence
  chemically treated genomic DNA (Homo sapiens) CpG-island No: 40545
cggggttcgtcggtaatttagtttagtatttttttttttttgcgtttcgcgtcgtttttcgtttttttatttttaagtttttcgtcgagggggaagtcgtttaatttttttttacggtttttgtttcgtcggtttttttttttagtcgattagtggggggtaaggcgaggtttttttaatttaacgaggtttgtggaatttcgtcgtgagagtttttcggtcggttttcgggacgtggggtgcggagaggtcgcgacgcggcgggatagggtaaggtttcggcgaggtgtcgttttaagacgtcgttcgcgttttcgttggggcgcgggttggggtcgttttgggtttcggcgtcgttcgggattggagggcgcgtagcgggtcggcggtttttcggtttttttattcgtttattcgggggcgtattggtatttttaggtttcggtcgcggaggagcgagtttttttcgtttcgtagcgcgatttcgattgggaagtcgcggtaggggtgatggaggagatatttttcgtttgggcggagggaagtcgtcgtatttcgggtagcggggaggggttcggcgttgcgcgagtagggttggttttgttcgatttgggatttttgttgggtaaagtgcggaataggacggggaggagggagcgattcgcgtcgggttaggcgagggcggattggaagtagcggggtttacgcgggagcgttttaaggttttagattataagtcgagttttatcgtttcggtgatgagttcgtattttttttttatttcggatcggttagattttttatttagttttttcggttttgttgatgattcgttgttgattaaaattgttttgggtttagagggtcgcgtacgtttggttattatagttttggggcgaaggaattgggttttatttagttaaattgtttcgcgatttatttttttttttttttttaatttgtatttt

SEQ ID NO: 40546 - DNA, 968 bp, Artificial Sequence
  chemically treated genomic DNA (Homo sapiens) CpG-island No: 40546
aaaatacaaattaaaaaaaaaaaaaaaaataaatcgcgaaacaatttaactaaataaaacccaattccttcgccccaaaactataataaccaaacgtacgcgaccctctaaacccaaaacaattttaatcaacaacgaatcatcaacaaaaccgaaaaaactaaataaaaaatctaaccgatccgaaataaaaaaaaaatacgaactcatcaccgaaacgataaaactcgacttataatctaaaaccttaaaacgctcccgcgtaaaccccgctacttccaatccgccctcgcctaacccgacgcgaatcgctccctcctccccgtcctattccgcactttacccaacaaaaatcccaaatcgaacaaaaccaaccctactcgcgcaacgccgaacccctccccgctacccgaaatacgacgacttccctccgcccaaacgaaaaatatctcctccatcacccctaccgcgacttcccaatcgaaatcgcgctacgaaacgaaaaaaactcgctcctccgcgaccgaaacctaaaaataccaatacgcccccgaataaacgaataaaaaaaccgaaaaaccgccgacccgctacgcgccctccaatcccgaacgacgccgaaacccaaaacgaccccaacccgcgccccaacgaaaacgcgaacgacgtcttaaaacgacacctcgccgaaaccttaccctatcccgccgcgtcgcgacctctccgcaccccacgtcccgaaaaccgaccgaaaaactctcacgacgaaattccacaaacctcgttaaattaaaaaaacctcgccttaccccccactaatcgactaaaaaaaaaaaccgacgaaacaaaaaccgtaaaaaaaaattaaacgacttccccctcgacgaaaaacttaaaaataaaaaaacgaaaaacgacgcgaaacgcaaaaaaaaaaaaatactaaactaaattaccgacgaaccccg

SEQ ID NO: 40547 - DNA, 968 bp, Artificial Sequence
  chemically treated genomic DNA (Homo sapiens) CpG-island No: 40547
gggatgtaggttgaggggaaggaagaaagtaaatcgcggggtagtttgattaagtgaaatttaattttttcgttttaaagttgtggtggttagacgtgcgcgattttttagatttaaaatagttttagttagtaacgggttattagtaggatcgagaagattgggtgggaggtttggtcggttcgaaatagggaagaggtgcgggtttattatcgaggcggtagggttcggtttatggtttagagttttgaggcgttttcgcgtgagtttcgttgtttttagttcgttttcgtttggttcggcgcgggtcgttttttttttttcgttttgtttcgtattttatttagtaggggttttaggtcgagtagggttaattttgttcgcgtagcgtcggattttttttcgttgttcggggtgcggcggttttttttcgtttaaacggggggtgttttttttattatttttgtcgcggttttttagtcggagtcgcgttgcggggcgagggaggttcgttttttcgcggtcggggtttgggggtgttagtgcgttttcgagtgagcgggtagggaagtcgaagagtcgtcgattcgttgcgcgttttttagtttcgggcggcgtcgggatttagagcggttttagttcgcgttttagcggggacgcgaacggcgttttgggacggtatttcgtcggggttttgttttgtttcgtcgcgtcgcggttttttcgtattttacgtttcgggagtcgatcgggagatttttacggcggagttttatagatttcgttaggttaaaggaatttcgttttgttttttattaatcggttagagagggaggtcggcgaaataaaagtcgtagaggaaaattaagcgatttttttttcggcggggaatttggaggtgggggagcggggagcggcgcggggcgtaaggagaaggaagtgttgagttgggttgtcgacgaatttcg

SEQ ID NO: 40548 - DNA, 968 bp, Artificial Sequence
  chemically treated genomic DNA (Homo sapiens) CpG-island No: 40548
cgaaattcgtcgacaacccaactcaacacttccttctccttacgccccgcgccgctccccgctcccccacctccaaattccccgccgaaaaaaaaatcgcttaattttcctctacgacttttatttcgccgacctccctctctaaccgattaataaaaaacaaaacgaaattcctttaacctaacgaaatctataaaactccgccgtaaaaatctcccgatcgactcccgaaacgtaaaatacgaaaaaaccgcgacgcgacgaaacaaaacaaaaccccgacgaaataccgtcccaaaacgccgttcgcgtccccgctaaaacgcgaactaaaaccgctctaaatcccgacgccgcccgaaactaaaaaacgcgcaacgaatcgacgactcttcgacttccctacccgctcactcgaaaacgcactaacacccccaaaccccgaccgcgaaaaaacgaacctccctcgccccgcaacgcgactccgactaaaaaaccgcgacaaaaataataaaaaaaacaccccccgtttaaacgaaaaaaaaccgccgcaccccgaacaacgaaaaaaaatccgacgctacgcgaacaaaattaaccctactcgacctaaaacccctactaaataaaatacgaaacaaaacgaaaaaaaaaaaacgacccgcgccgaaccaaacgaaaacgaactaaaaacaacgaaactcacgcgaaaacgcctcaaaactctaaaccataaaccgaaccctaccgcctcgataataaacccgcacctcttccctatttcgaaccgaccaaacctcccacccaatcttctcgatcctactaataacccgttactaactaaaactattttaaatctaaaaaatcgcgcacgtctaaccaccacaactttaaaacgaaaaaattaaatttcacttaatcaaactaccccgcgatttactttcttccttcccctcaacctacatccc

SEQ ID NO: 40549 - DNA, 566 bp, Artificial Sequence
  chemically treated genomic DNA (Homo sapiens) CpG-island No: 40549
tcgttagtcgttttcgtcggggatgtatttaggtattttttttcggatgcgtgagtggttcgttcgcggatacgttagtttcgtttcgcgagttcggttttttcgtttttttttcgtttacgttttgcgttttttttttattggttttatgtcgcgttttttcgtttaatcgtagcgtttagcgttagaatttgaattttcgttttcgtttgaattgggcgggcgcgtcgggttggaagaaggaagtggagggttgacgttgcgggcgggcgggcgggcgggaggattcgattcggtgggagtcgttagagtcgggcgttcggggacgtagtttgtagggttatcgggttttcgttagaggcggcggcgggagtagcggggattgtaggtcggggtgtagcgaacgtttttcgcgggttgcggttcggtgtgtgcggagcgtggcgggcgtagtttatcgggtcgaggtgagcgcggcgtcggttttttttgcggcggattttgggtgcgatttgacgagcggtggttcgataagtggttttgcgggtcggatcgttttaggtgag

SEQ ID NO: 40550 - DNA, 566 bp, Artificial Sequence
  chemically treated genomic DNA (Homo sapiens) CpG-island No: 40550
ctcacctaaaacgatccgacccgcaaaaccacttatcgaaccaccgctcgtcaaatcgcacccaaaatccgccgcaaaaaaaaccgacgccgcgctcacctcgacccgataaactacgcccgccacgctccgcacacaccgaaccgcaacccgcgaaaaacgttcgctacaccccgacctacaatccccgctactcccgccgccgcctctaacgaaaacccgataaccctacaaactacgtccccgaacgcccgactctaacgactcccaccgaatcgaatcctcccgcccgcccgcccgcccgcaacgtcaaccctccacttccttcttccaacccgacgcgcccgcccaattcaaacgaaaacgaaaattcaaattctaacgctaaacgctacgattaaacgaaaaaacgcgacataaaaccaataaaaaaaaaacgcaaaacgtaaacgaaaaaaaaacgaaaaaaccgaactcgcgaaacgaaactaacgtatccgcgaacgaaccactcacgcatccgaaaaaaaatacctaaatacatccccgacgaaaacgactaacga

SEQ ID NO: 40551 - DNA, 566 bp, Artificial Sequence
  chemically treated genomic DNA (Homo sapiens) CpG-island No: 40551
tttatttgggacgattcggttcgtaaggttatttgtcgaattatcgttcgttaagtcgtatttaaagttcgtcgtaggaggagtcggcgtcgcgtttatttcggttcggtaagttgcgttcgttacgtttcgtatatatcgggtcgtagttcgcggggggcgttcgttgtatttcggtttgtagttttcgttgttttcgtcgtcgtttttgacggggattcggtggttttataggttacgttttcgggcgttcggttttagcggtttttatcgagtcgagttttttcgttcgttcgttcgttcgtagcgttagttttttattttttttttttagttcggcgcgttcgtttaatttaaacgaaaacgaagatttaaattttggcgttaagcgttgcgattgaacgggaaagcgcggtatgggattaataggaagggagcgtagggcgtgggcggggagggggcggggaaatcgggttcgcggggcggggttggcgtgttcgcgggcgagttatttacgtattcggaggaaaatatttgggtgtattttcggcgagggcggttggcgg

SEQ ID NO: 40552 - DNA, 566 bp, Artificial Sequence
  chemically treated genomic DNA (Homo sapiens) CpG-island No: 40552
ccgccaaccgccctcgccgaaaatacacccaaatattttcctccgaatacgtaaataactcgcccgcgaacacgccaaccccgccccgcgaacccgatttccccgccccctccccgcccacgccctacgctcccttcctattaatcccataccgcgctttcccgttcaatcgcaacgcttaacgccaaaatttaaatcttcgttttcgtttaaattaaacgaacgcgccgaactaaaaaaaaaaaataaaaaactaacgctacgaacgaacgaacgaacgaaaaaactcgactcgataaaaaccgctaaaaccgaacgcccgaaaacgtaacctataaaaccaccgaatccccgtcaaaaacgacgacgaaaacaacgaaaactacaaaccgaaatacaacgaacgccccccgcgaactacgacccgatatatacgaaacgtaacgaacgcaacttaccgaaccgaaataaacgcgacgccgactcctcctacgacgaactttaaatacgacttaacgaacgataattcgacaaataaccttacgaaccgaatcgtcccaaataaa

SEQ ID NO: 40553 - DNA, 509 bp, Artificial Sequence
  chemically treated genomic DNA (Homo sapiens) CpG-island No: 40553
gtggagtttttttttttttttttttcgaggacgtaagggcgcgggggttttgattcgtcgttaggtggcgttacgggtttagttatcgcgttttagggtcgcgtgggtttcgtttttgtgatcgacgtgcgggggcgttgcggggcgtcggttggtgtcgcgggtcggggatataggttgggggcgttgtaggtggggcgggttgggggcgttgcggggggcgttgcggggggcgttgcgaggaggcgggttgggggtattgcggagggggcgttgcggagggggtattgcgggaattcgggtagggggcgcgggttggggtgcgggcgggaacgcgggttgtgggcgtttcggagggggcgtttcggaaggggcgttgcggggacgcgggttggggtcgttgcggaggggtcgttgcgtagggggcgcgggcgttcgagttttttttgtgggtttcgtcggcggtagttgacggtggagtttgggtttgcgaaggtgatttgattttt

SEQ ID NO: 40554 - DNA, 509 bp, Artificial Sequence
  chemically treated genomic DNA (Homo sapiens) CpG-island No: 40554
aaaaatcaaatcaccttcgcaaacccaaactccaccgtcaactaccgccgacgaaacccacaaaaaaaactcgaacgcccgcgccccctacgcaacgacccctccgcaacgaccccaacccgcgtccccgcaacgccccttccgaaacgccccctccgaaacgcccacaacccgcgttcccgcccgcaccccaacccgcgccccctacccgaattcccgcaataccccctccgcaacgccccctccgcaatacccccaacccgcctcctcgcaacgccccccgcaacgccccccgcaacgcccccaacccgccccacctacaacgcccccaacctatatccccgacccgcgacaccaaccgacgccccgcaacgcccccgcacgtcgatcacaaaaacgaaacccacgcgaccctaaaacgcgataactaaacccgtaacgccacctaacgacgaatcaaaacccccgcgcccttacgtcctcgaaaaaaaaaaaaaaaaaaactccac

SEQ ID NO: 40555 - DNA, 509 bp, Artificial Sequence
  chemically treated genomic DNA (Homo sapiens) CpG-island No: 40555
aaggattaggttattttcgtaggtttagattttatcgttagttgtcgtcgacggagtttatagaggaggttcgggcgttcgcgttttttgcgtagcggttttttcgtagcggttttagttcgcgttttcgtagcgtttttttcgaagcgtttttttcgaagcgtttatagttcgcgttttcgttcgtattttagttcgcgttttttgttcgggttttcgtagtgtttttttcgtagcgtttttttcgtagtgtttttagttcgttttttcgtagcgtttttcgtagcgtttttcgtagcgtttttagttcgttttatttgtagcgtttttagtttgtgttttcggttcgcgatattagtcggcgtttcgtagcgttttcgtacgtcggttataggagcggagtttacgcggttttggagcgcggtggttgggttcgtagcgttatttggcggcggattagggttttcgcgtttttgcgttttcggaagggggaggggaagggattttat

SEQ ID NO: 40556 - DNA, 509 bp, Artificial Sequence
  chemically treated genomic DNA (Homo sapiens) CpG-island No: 40556
ataaaatcccttcccctcccccttccgaaaacgcaaaaacgcgaaaaccctaatccgccgccaaataacgctacgaacccaaccaccgcgctccaaaaccgcgtaaactccgctcctataaccgacgtacgaaaacgctacgaaacgccgactaatatcgcgaaccgaaaacacaaactaaaaacgctacaaataaaacgaactaaaaacgctacgaaaaacgctacgaaaaacgctacgaaaaaacgaactaaaaacactacgaaaaaaacgctacgaaaaaaacactacgaaaacccgaacaaaaaacgcgaactaaaatacgaacgaaaacgcgaactataaacgcttcgaaaaaaacgcttcgaaaaaaacgctacgaaaacgcgaactaaaaccgctacgaaaaaaccgctacgcaaaaaacgcgaacgcccgaacctcctctataaactccgtcgacgacaactaacgataaaatctaaacctacgaaaataacctaatcctt

SEQ ID NO: 40557 - DNA, 1066 bp, Artificial Sequence
  chemically treated genomic DNA (Homo sapiens) CpG-island No: 40557
tagacggcggacgggaaggattttttttttgttgaagttgcgaagtttgtgtcgattttttattcgtggggttttcggggcgcggggtgcgggtgggttcggggtgttcgtatcggtcggggggaagggtacgcgggttatatttggggggtttgtttttagttagcgcgcgggttaggcggggtgggcgcgcgcgcgtgggggagttttcggtttttgttaggggcggggcgagattaaggcgtcgggtttgtggggaggagtgtaggcgcgcgcgagggcggggggcggttttacgtatcgtgggttttcggcgttgtcgttgcggtcggttcgaggtatcggagatagaatggttgtcggggcgtttttgatcgtcgggcgggcgaggcggggttgatcgtcgtttttttgatcgtttttttttacgttgggcgcgtttatttcggggcgttcgttcggttttcgtttttttgggcgcgcggcgttcggagtcgaggtagttggcgcgggtcgcgggcgaggcggggtcgcgcgcggggttttttttttttttcggttaggtttttttaggagcgtcgggcgtagtttgcgtttttcgtttttcgttttcggtcgggttcgggacgtcgcggttgtggggtcggttcgttaaggataaggtcgggagattgggtggcgatgttcgagtgcgattggaggtagtcgagcggaggcgacggcggttgggatttgttttttttgatcggggagcgggattcggacgggcgtcggtgaggaggaggagaagcggcggcggagaggttttttgcggtcggaattttttttaatagtatttttgtcggcgttcgcgagcgtagtttcgtcgggtaggggcgtcggggaagatggagattgggggtcgggttcgtattggtatttcgtagttagcggtttcgggggtgtggagggttcggtcggcgggcggcggcggcgggggcgtttttttttggttgttggacgggaatagttggttgttgtgttatggttttttttatttggcgttttacgcgtaggtgttttagtt

SEQ ID NO: 40558 - DNA, 1066 bp, Artificial Sequence
  chemically treated genomic DNA (Homo sapiens) CpG-island No: 40558
aactaaaacacctacgcgtaaaacgccaaataaaaaaaaccataacacaacaaccaactattcccgtccaacaaccaaaaaaaaacgcccccgccgccgccgcccgccgaccgaaccctccacacccccgaaaccgctaactacgaaataccaatacgaacccgacccccaatctccatcttccccgacgcccctacccgacgaaactacgctcgcgaacgccgacaaaaatactattaaaaaaaattccgaccgcaaaaaacctctccgccgccgcttctcctcctcctcaccgacgcccgtccgaatcccgctccccgatcaaaaaaaacaaatcccaaccgccgtcgcctccgctcgactacctccaatcgcactcgaacatcgccacccaatctcccgaccttatccttaacgaaccgaccccacaaccgcgacgtcccgaacccgaccgaaaacgaaaaacgaaaaacgcaaactacgcccgacgctcctaaaaaaacctaaccgaaaaaaaaaaaaaaccccgcgcgcgaccccgcctcgcccgcgacccgcgccaactacctcgactccgaacgccgcgcgcccaaaaaaacgaaaaccgaacgaacgccccgaaataaacgcgcccaacgtaaaaaaaaacgatcaaaaaaacgacgatcaaccccgcctcgcccgcccgacgatcaaaaacgccccgacaaccattctatctccgatacctcgaaccgaccgcaacgacaacgccgaaaacccacgatacgtaaaaccgccccccgccctcgcgcgcgcctacactcctccccacaaacccgacgccttaatctcgccccgcccctaacaaaaaccgaaaactcccccacgcgcgcgcgcccaccccgcctaacccgcgcgctaactaaaaacaaaccccccaaatataacccgcgtacccttccccccgaccgatacgaacaccccgaacccacccgcaccccgcgccccgaaaaccccacgaataaaaaatcgacacaaacttcgcaacttcaacaaaaaaaaaatccttcccgtccgccgtcta

SEQ ID NO: 40559 - DNA, 1066 bp, Artificial Sequence
  chemically treated genomic DNA (Homo sapiens) CpG-island No: 40559
gattgggatatttgcgcgtagagcgttaggtagaggaagttatagtatagtagttagttgttttcgtttagtagttaggaggaggcgttttcgtcgtcgtcgttcgtcggtcgagttttttatattttcggggtcgttggttgcggggtattagtgcgggttcggtttttagtttttatttttttcggcgtttttgttcggcgagattgcgttcgcgggcgtcgatagggatgttgttgaagggaatttcggtcgtagaaaattttttcgtcgtcgtttttttttttttttatcggcgttcgttcgagtttcgtttttcggttaggagggatagattttaatcgtcgtcgttttcgttcggttgtttttagtcgtattcgggtatcgttatttagtttttcgattttgtttttagcgggtcgattttatagtcgcggcgtttcggattcggtcggaggcggggagcgggaggcgtagattgcgttcggcgtttttgaggggatttgatcgggaggaggaggggatttcgcgcgcggtttcgtttcgttcgcggttcgcgttaattgtttcggtttcgagcgtcgcgcgtttaggagggcgggggtcgagcgggcgtttcgaagtgggcgcgtttaacgtggaagggggcgattaaggaggcggcggttagtttcgtttcgttcgttcggcggttaagggcgtttcggtagttattttgttttcggtgtttcgagtcggtcgtagcggtagcgtcgggagtttacgatgcgtggggtcgtttttcgttttcgcgcgcgtttatatttttttttataggttcggcgttttggtttcgtttcgtttttgatagggatcggggatttttttacgcgcgcgcgtttatttcgtttggttcgcgcgttgattggagataggttttttaggtgtggttcgcgtgttttttttttcggtcggtgcgggtatttcgggtttattcgtatttcgcgtttcgggagttttacgaatgagagatcgatataggtttcgtagttttagtagaaaagaagtttttttcgttcgtcgtttg

SEQ ID NO: 40560 - DNA, 1066 bp, Artificial Sequence
  chemically treated genomic DNA (Homo sapiens) CpG-island No: 40560
caaacgacgaacgaaaaaaacttcttttctactaaaactacgaaacctatatcgatctctcattcgtaaaactcccgaaacgcgaaatacgaataaacccgaaatacccgcaccgaccgaaaaaaaaaacacgcgaaccacacctaaaaaacctatctccaatcaacgcgcgaaccaaacgaaataaacgcgcgcgcgtaaaaaaatccccgatccctatcaaaaacgaaacgaaaccaaaacgccgaacctataaaaaaaaatataaacgcgcgcgaaaacgaaaaacgaccccacgcatcgtaaactcccgacgctaccgctacgaccgactcgaaacaccgaaaacaaaataactaccgaaacgcccttaaccgccgaacgaacgaaacgaaactaaccgccgcctccttaatcgcccccttccacgttaaacgcgcccacttcgaaacgcccgctcgacccccgccctcctaaacgcgcgacgctcgaaaccgaaacaattaacgcgaaccgcgaacgaaacgaaaccgcgcgcgaaatcccctcctcctcccgatcaaatcccctcaaaaacgccgaacgcaatctacgcctcccgctccccgcctccgaccgaatccgaaacgccgcgactataaaatcgacccgctaaaaacaaaatcgaaaaactaaataacgatacccgaatacgactaaaaacaaccgaacgaaaacgacgacgattaaaatctatccctcctaaccgaaaaacgaaactcgaacgaacgccgataaaaaaaaaaaaaaacgacgacgaaaaaattttctacgaccgaaattcccttcaacaacatccctatcgacgcccgcgaacgcaatctcgccgaacaaaaacgccgaaaaaaataaaaactaaaaaccgaacccgcactaataccccgcaaccaacgaccccgaaaatataaaaaactcgaccgacgaacgacgacgacgaaaacgcctcctcctaactactaaacgaaaacaactaactactatactataacttcctctacctaacgctctacgcgcaaatatcccaatc

SEQ ID NO: 40561 - DNA, 926 bp, Artificial Sequence
  chemically treated genomic DNA (Homo sapiens) CpG-island No: 40561
tcggagaacgtgttggagtcgttggggatggtagatacgggttttgattttacgttcgacgtgcgcgcgcgtttggtcgcgggtttttacgtgtagcgggcggtcggcgttattttatgatttgggtttggtatcggtcgtcgggttagattgtattttatttgcgtcgatttggttaagttggcgtggcgtttttggtgcggcgggtttcggcggtttttgcggtcgacgcggtaagacgttgttggcgtcgttgttggtttgttcgggcgtttatttcgttaacgagacgggtacgtcgtgggagttttacgcgtagcggggttatcgcgtggtgcgtaaggacggcgatttggacggttacgtcgttattttttcgttggtgttttcgttgcgtttgggtttggtgttgttgttggtagggttacggtcgttcgggttcgatttggtggcgcgggtttacgatgagtttttgttcgttttggagcgcgtttttcgggaggtcgagttcggttcggtttcgtcgtttatcgcgtattttttcgtcggttattttattttcgttaatttgattttttacgaggtgcgcgtcgggtcggcgggcgagttgcgtttgcgttagttcgggtcgcgcgtggaggcgttggtgtttttagcgtttcgtattttggcgttgcgttatttgtacggtcgcgttttttagttgtacgtggtttacgagtttttttgcgtattgttattcggcgacgcgtggttttcgttcgaggtttagtacgggtagttggttaatttttattttttggattattacgggttgttattcggtttcgacgtgttcggttttaatacgtatagagtgttgcggttgcggggtaagtcggtgtttaagatttagtgatttcgggttttgtttggattttttgttt

SEQ ID NO: 40562 - DNA, 926 bp, Artificial Sequence
  chemically treated genomic DNA (Homo sapiens) CpG-island No: 40562
aaacaaaaaatccaaacaaaacccgaaatcactaaatcttaaacaccgacttaccccgcaaccgcaacactctatacgtattaaaaccgaacacgtcgaaaccgaataacaacccgtaataatccaaaaaataaaaattaaccaactacccgtactaaacctcgaacgaaaaccacgcgtcgccgaataacaatacgcaaaaaaactcgtaaaccacgtacaactaaaaaacgcgaccgtacaaataacgcaacgccaaaatacgaaacgctaaaaacaccaacgcctccacgcgcgacccgaactaacgcaaacgcaactcgcccgccgacccgacgcgcacctcgtaaaaaatcaaattaacgaaaataaaataaccgacgaaaaaatacgcgataaacgacgaaaccgaaccgaactcgacctcccgaaaaacgcgctccaaaacgaacaaaaactcatcgtaaacccgcgccaccaaatcgaacccgaacgaccgtaaccctaccaacaacaacaccaaacccaaacgcaacgaaaacaccaacgaaaaaataacgacgtaaccgtccaaatcgccgtccttacgcaccacgcgataaccccgctacgcgtaaaactcccacgacgtacccgtctcgttaacgaaataaacgcccgaacaaaccaacaacgacgccaacaacgtcttaccgcgtcgaccgcaaaaaccgccgaaacccgccgcaccaaaaacgccacgccaacttaaccaaatcgacgcaaataaaatacaatctaacccgacgaccgataccaaacccaaatcataaaataacgccgaccgcccgctacacgtaaaaacccgcgaccaaacgcgcgcgcacgtcgaacgtaaaatcaaaacccgtatctaccatccccaacgactccaacacgttctccga

SEQ ID NO: 40563 - DNA, 926 bp, Artificial Sequence
  chemically treated genomic DNA (Homo sapiens) CpG-island No: 40563
ggatagggggtttaggtagagttcggggttattgggttttgaatatcggtttgtttcgtagtcgtagtattttgtacgtgttgaggtcgggtacgtcgaagtcgggtgatagttcgtggtgatttaaggggtagaagttgattagttgttcgtgttgggtttcgagcgagagttacgcgtcgtcgagtggtagtgcgtaggggaattcgtgggttacgtgtagttggaagacgcggtcgtgtaggtggcgtagcgttagggtgcggaacgttggaggtattagcgtttttacgcgcggttcgaattggcgtaggcgtagttcgttcgtcggttcggcgcgtatttcgtagaaggttaggttggcgaaggtgaagtagtcggcgaaggggtgcgcggtgggcggcggagtcgggtcgggttcggtttttcggagggcgcgttttagggcgggtaggagtttatcgtaggttcgcgttattaggtcgggttcgggcggtcgtggttttgttagtagtagtattaggtttagacgtagcgggggtattagcgagaaggtggcggcgtagtcgtttagatcgtcgtttttgcgtattacgcggtagtttcgttgcgcgtggaatttttacggcgtgttcgtttcgttggcgaagtaggcgttcgggtaggttagtagcggcgttagtagcgttttgtcgcgtcggtcgtaggagtcgtcggggttcgtcgtattaggagcgttacgttagtttggttaggtcggcgtaggtagagtataatttggttcgacggtcggtattaagtttaggttatagagtggcgtcggtcgttcgttgtacgtagaagttcgcggttaggcgcgcgcgtacgtcgggcgtgaggttaaagttcgtgtttgttatttttagcggttttagtacgtttttcga

SEQ ID NO: 40564 - DNA, 926 bp, Artificial Sequence
  chemically treated genomic DNA (Homo sapiens) CpG-island No: 40564
tcgaaaaacgtactaaaaccgctaaaaataacaaacacgaactttaacctcacgcccgacgtacgcgcgcgcctaaccgcgaacttctacgtacaacgaacgaccgacgccactctataacctaaacttaataccgaccgtcgaaccaaattatactctacctacgccgacctaaccaaactaacgtaacgctcctaatacgacgaaccccgacgactcctacgaccgacgcgacaaaacgctactaacgccgctactaacctacccgaacgcctacttcgccaacgaaacgaacacgccgtaaaaattccacgcgcaacgaaactaccgcgtaatacgcaaaaacgacgatctaaacgactacgccgccaccttctcgctaatacccccgctacgtctaaacctaatactactactaacaaaaccacgaccgcccgaacccgacctaataacgcgaacctacgataaactcctacccgccctaaaacgcgccctccgaaaaaccgaacccgacccgactccgccgcccaccgcgcaccccttcgccgactacttcaccttcgccaacctaaccttctacgaaatacgcgccgaaccgacgaacgaactacgcctacgccaattcgaaccgcgcgtaaaaacgctaatacctccaacgttccgcaccctaacgctacgccacctacacgaccgcgtcttccaactacacgtaacccacgaattcccctacgcactaccactcgacgacgcgtaactctcgctcgaaacccaacacgaacaactaatcaacttctaccccttaaatcaccacgaactatcacccgacttcgacgtacccgacctcaacacgtacaaaatactacgactacgaaacaaaccgatattcaaaacccaataaccccgaactctacctaaaccccctatcc

SEQ ID NO: 40565 - DNA, 662 bp, Artificial Sequence
  chemically treated genomic DNA (Homo sapiens) CpG-island No: 40565
cgcgcgggtgttagtggagaggtcgggagggttcggaagaaaaacgttcggtttattggagtcggagacgtagttatttatttagtagtagtagtttaagtttacggcgcgcgttttttttgtttcgacgaagttgtcgttcgattttcgcgttgatgcgttgcgattttttttttttcgcggataggtagtagtagtcggttatggtgcgtttagtttagtattcgacggggcgacgcggtttcgggtattcgaattttcggttcggtcgtttattcggttagtatgcgacgggtataggggtgtggaaagaaaagacgggggtcgatttgagttttggagtaagacgtttggattttcgaggtttaattttttttcgaaagtcggttttgaggcggggtgaatgtcgagcgttgggaacgttcgagtgtatttcggattcgggtttagttcgttttattttcgttttggggaggaggagggcgagtttataagttgggagcgttgttggttttgggaagatgcgcgcgttttttggtataggagtcggatagtagtcgggggcgtatacgagttggaacgtcggtgttttggggagagtaggattttttgggtttaggggtgtttttaggcggtaggtaggtacggagtgggttggaggt

SEQ ID NO: 40566 - DNA, 662 bp, Artificial Sequence
  chemically treated genomic DNA (Homo sapiens) CpG-island No: 40566
acctccaacccactccgtacctacctaccgcctaaaaacacccctaaacccaaaaaatcctactctccccaaaacaccgacgttccaactcgtatacgcccccgactactatccgactcctataccaaaaaacgcgcgcatcttcccaaaaccaacaacgctcccaacttataaactcgccctcctcctccccaaaacgaaaataaaacgaactaaacccgaatccgaaatacactcgaacgttcccaacgctcgacattcaccccgcctcaaaaccgactttcgaaaaaaaattaaacctcgaaaatccaaacgtcttactccaaaactcaaatcgacccccgtcttttctttccacacccctatacccgtcgcatactaaccgaataaacgaccgaaccgaaaattcgaatacccgaaaccgcgtcgccccgtcgaatactaaactaaacgcaccataaccgactactactacctatccgcgaaaaaaaaaaaatcgcaacgcatcaacgcgaaaatcgaacgacaacttcgtcgaaacaaaaaaaacgcgcgccgtaaacttaaactactactactaaataaataactacgtctccgactccaataaaccgaacgtttttcttccgaaccctcccgacctctccactaacacccgcgcg

SEQ ID NO: 40567 - DNA, 662 bp, Artificial Sequence
  chemically treated genomic DNA (Homo sapiens) CpG-island No: 40567
gtttttaatttatttcgtgtttatttgtcgtttggggatatttttaggtttaggagattttattttttttagagtatcgacgttttaattcgtatgcgttttcgattgttgttcggtttttgtgttaaggggcgcgcgtatttttttagggttagtaacgtttttaatttgtggattcgttttttttttttttagagcgagagtggggcgggttgagttcggattcggggtgtattcgagcgtttttagcgttcggtatttatttcgttttagagtcgattttcgaagggggattgagtttcggaggtttaggcgttttattttaaagtttaagtcggttttcgttttttttttttatatttttgtgttcgtcgtatgttggtcgggtgagcggtcgggtcgaggattcgggtgttcggggtcgcgtcgtttcgtcgggtattgagttgagcgtattatggtcggttgttgttgtttgttcgcggaggagaaggagtcgtagcgtattagcgcggagatcgagcgatagtttcgtcgggataagaaggacgcgcgtcgtgagtttaagttgttgttgttgggtgagtggttgcgttttcgattttagtgagtcgggcgtttttttttcgagttttttcggtttttttattggtattcgcgcg

SEQ ID NO: 40568 - DNA, 662 bp, Artificial Sequence
  chemically treated genomic DNA (Homo sapiens) CpG-island No: 40568
cgcgcgaataccaataaaaaaaccgaaaaaactcgaaaaaaaaacgcccgactcactaaaatcgaaaacgcaaccactcacccaacaacaacaacttaaactcacgacgcgcgtccttcttatcccgacgaaactatcgctcgatctccgcgctaatacgctacgactccttctcctccgcgaacaaacaacaacaaccgaccataatacgctcaactcaatacccgacgaaacgacgcgaccccgaacacccgaatcctcgacccgaccgctcacccgaccaacatacgacgaacacaaaaatataaaaaaaaaaaacgaaaaccgacttaaactttaaaataaaacgcctaaacctccgaaactcaatcccccttcgaaaatcgactctaaaacgaaataaataccgaacgctaaaaacgctcgaatacaccccgaatccgaactcaacccgccccactctcgctctaaaaaaaaaaaaaacgaatccacaaattaaaaacgttactaaccctaaaaaaatacgcgcgccccttaacacaaaaaccgaacaacaatcgaaaacgcatacgaattaaaacgtcgatactctaaaaaaaataaaatctcctaaacctaaaaatatccccaaacgacaaataaacacgaaataaattaaaaac

SEQ ID NO: 40569 - DNA, 750 bp, Artificial Sequence
  chemically treated genomic DNA (Homo sapiens) CpG-island No: 40569
ttggttcgcgcgtggaggacggagtttagtatggattcgtgtaggagttcgtagtttatttattcgtttacgatggtatttatttgtttcggtaattttatagtttttattggtttcggtaggacgtgtattcggttttttagttcgttgaatcgtattatttttcgggtttgttgttagatggcgttggtttttatcgcgtatacgcgtcgggtttcggtttgggtatagaagatgtttagaatgtcggtgttcgcgtttacgtttagtatcgttttgtttcgtagtgttgtttagtttcgaaggatatttaggcggtaggtatcggtgcggacgcggttcgcgattattttttcgtggatcgaaacgttcgagtagtattcgtagtatagttggtttcgttttcgtttagtttttcggggtcgttttagggtcgtttttcgtttcgcgttatttttttttttagtttttttttttttttcgtcgtcgtttttcgatttaagttttttttttttgggttgcgatattttggtcgttttgttcggttttcggcgggcgtagcgcggtacggcgcgggttatagaaaacgggggtttttgggatttgaagtgcgcgttcgttttttttatttttgtaggggtcgttcggtcggcggcgcggaaggttttttgtgtttgtttacgggagttgttttgtattgtttttttggtgttttggtatttttttttttatttacgacgtttatatttt

SEQ ID NO: 40570 - DNA, 750 bp, Artificial Sequence
  chemically treated genomic DNA (Homo sapiens) CpG-island No: 40570
aaaatataaacgtcgtaaataaaaaaaaaaataccaaaacaccaaaaaaacaatacaaaacaactcccgtaaacaaacacaaaaaaccttccgcgccgccgaccgaacgacccctacaaaaataaaaaaaacgaacgcgcacttcaaatcccaaaaacccccgttttctataacccgcgccgtaccgcgctacgcccgccgaaaaccgaacaaaacgaccaaaatatcgcaacccaaaaaaaaaaaacttaaatcgaaaaacgacgacgaaaaaaaaaaaaaaactaaaaaaaaaaataacgcgaaacgaaaaacgaccctaaaacgaccccgaaaaactaaacgaaaacgaaaccaactatactacgaatactactcgaacgtttcgatccacgaaaaaataatcgcgaaccgcgtccgcaccgatacctaccgcctaaatatccttcgaaactaaacaacactacgaaacaaaacgatactaaacgtaaacgcgaacaccgacattctaaacatcttctatacccaaaccgaaacccgacgcgtatacgcgataaaaaccaacgccatctaacaacaaacccgaaaaataatacgattcaacgaactaaaaaaccgaatacacgtcctaccgaaaccaataaaaactataaaattaccgaaacaaataaataccatcgtaaacgaataaataaactacgaactcctacacgaatccatactaaactccgtcctccacgcgcgaaccaa

SEQ ID NO: 40571 - DNA, 750 bp, Artificial Sequence
  chemically treated genomic DNA (Homo sapiens) CpG-island No: 40571
agaatgtgggcgtcgtgggtgggaaaagggatgttaggatattagaagagtaatataaaatagttttcgtgagtaggtataggagatttttcgcgtcgtcggtcgggcgatttttgtagaagtaggaaggacgagcgcgtattttaagttttagaagttttcgttttttgtagttcgcgtcgtgtcgcgttacgttcgtcgggagtcgggtagagcggttaagatgtcgtagtttaagaaaagaaagtttgagtcggggggcggcggcgaaggaggggagggaattgaagaggaagatggcgcggagcgggaggcggttttggagcgatttcggaggattaagcgggaacgggattagttgtattacgagtgttattcggacgtttcggtttacgaggagatgatcgcggatcgcgttcgtatcgatgtttatcgtttgggtatttttcggaattgggtagtattgcgaggtaagacggtattggacgtgggcgcgggtatcggtattttgagtattttttgtgtttaggtcggggttcggcgcgtgtacgcggtagaggttagcgttatttggtaataggttcgggaggtggtgcggtttaacgggttggaggatcgggtgtacgttttgtcgggattagtggagattgtagagttgtcggaataggtggatgttatcgtgagcgagtggatgggttacggatttttgtacgagtttatgttgagtttcgttttttacgcgcgaattaa

SEQ ID NO: 40572 - DNA, 750 bp, Artificial Sequence
  chemically treated genomic DNA (Homo sapiens) CpG-island No: 40572
ttaattcgcgcgtaaaaaacgaaactcaacataaactcgtacaaaaatccgtaacccatccactcgctcacgataacatccacctattccgacaactctacaatctccactaatcccgacaaaacgtacacccgatcctccaacccgttaaaccgcaccacctcccgaacctattaccaaataacgctaacctctaccgcgtacacgcgccgaaccccgacctaaacacaaaaaatactcaaaataccgatacccgcgcccacgtccaataccgtcttacctcgcaatactacccaattccgaaaaatacccaaacgataaacatcgatacgaacgcgatccgcgatcatctcctcgtaaaccgaaacgtccgaataacactcgtaatacaactaatcccgttcccgcttaatcctccgaaatcgctccaaaaccgcctcccgctccgcgccatcttcctcttcaattccctcccctccttcgccgccgccccccgactcaaactttcttttcttaaactacgacatcttaaccgctctacccgactcccgacgaacgtaacgcgacacgacgcgaactacaaaaaacgaaaacttctaaaacttaaaatacgcgctcgtccttcctacttctacaaaaatcgcccgaccgacgacgcgaaaaatctcctatacctactcacgaaaactattttatattactcttctaatatcctaacatcccttttcccacccacgacgcccacattct

SEQ ID NO: 40573 - DNA, 654 bp, Artificial Sequence
  chemically treated genomic DNA (Homo sapiens) CpG-island No: 40573
gttttcgattcgggtcgtagtttacgtttcgcgtttttttttgcgcgtcgttttgtttttttttagtttcgtttttagtttcgttcgggcgtttagagggtaaatgaggggcggcggggtggcgggtggggggtagacgcggaattttttagcgcgggggttttggtttattttgtaatcgggtagtttttttttgtttacggagagaaaggggaaatggaaaagtcggggaggcggtggttggcgttcgttgcgtcgtttttgggtaggtttagacgtcgtgagttaggggtagagtagggcggtttgagcgtgcgggcgacgcgggttttattcgttcgtttcgttttggattgcgcgttacgttttggggttcggcgttttggtttttgtttttgtcgttgtcgtcgtcggattttagtggttcggcgtgttcggtttttataggtttgtagttagtatcgtatcgaattttcggggggtcgcggttggagcgttcgttcggtatgggaagcgtaaagttcgtaggtaatttagggttgggggttttcggcgtgtttttcgggtcgcgtttcgtttgggtgtttcggggatttttatgtagaaatggagggtgtttttagtagaggggaaaattttggcgtgggaagaggt

SEQ ID NO: 40574 - DNA, 654 bp, Artificial Sequence
  chemically treated genomic DNA (Homo sapiens) CpG-island No: 40574
acctcttcccacgccaaaattttcccctctactaaaaacaccctccatttctacataaaaatccccgaaacacccaaacgaaacgcgacccgaaaaacacgccgaaaacccccaaccctaaattacctacgaactttacgcttcccataccgaacgaacgctccaaccgcgaccccccgaaaattcgatacgatactaactacaaacctataaaaaccgaacacgccgaaccactaaaatccgacgacgacaacgacaaaaacaaaaaccaaaacgccgaaccccaaaacgtaacgcgcaatccaaaacgaaacgaacgaataaaacccgcgtcgcccgcacgctcaaaccgccctactctacccctaactcacgacgtctaaacctacccaaaaacgacgcaacgaacgccaaccaccgcctccccgacttttccatttcccctttctctccgtaaacaaaaaaaaactacccgattacaaaataaaccaaaacccccgcgctaaaaaattccgcgtctaccccccacccgccaccccgccgcccctcatttaccctctaaacgcccgaacgaaactaaaaacgaaactaaaaaaaaacaaaacgacgcgcaaaaaaaaacgcgaaacgtaaactacgacccgaatcgaaaac

SEQ ID NO: 40575 - DNA, 654 bp, Artificial Sequence
  chemically treated genomic DNA (Homo sapiens) CpG-island No: 40575
atttttttttacgttagagtttttttttttgttgggggtattttttatttttgtatgggaattttcggggtatttaggcgggacgcgattcgaaagatacgtcggagatttttaattttggattatttgcgggttttgcgttttttatgtcgggcgagcgttttagtcgcggtttttcgaaggttcggtgcgatgttggttgtaggtttgtgggagtcgagtacgtcgggttattgggattcggcggcggtagcggtagaagtaggaattagggcgtcggattttagagcgtggcgcgtagtttagagcggagcggacgagtgagattcgcgtcgttcgtacgtttagatcgttttgttttgtttttgatttacggcgtttgagtttgtttaggggcggcgtagcggacgttagttatcgttttttcgatttttttatttttttttttttttcgtaaatagaaagagattgttcggttgtagggtaagttagagttttcgcgttgggaaatttcgcgtttgttttttattcgttatttcgtcgttttttatttgttttttgggcgttcgggcggagttggaggcgggattagggaggagtagagcggcgcgtagggaggagcgcggaacgtgagttgcggttcgaatcgagagt

SEQ ID NO: 40576 - DNA, 654 bp, Artificial Sequence
  chemically treated genomic DNA (Homo sapiens) CpG-island No: 40576
actctcgattcgaaccgcaactcacgttccgcgctcctccctacgcgccgctctactcctccctaatcccgcctccaactccgcccgaacgcccaaaaaacaaataaaaaacgacgaaataacgaataaaaaacaaacgcgaaatttcccaacgcgaaaactctaacttaccctacaaccgaacaatctctttctatttacgaaaaaaaaaaaaaaataaaaaaatcgaaaaaacgataactaacgtccgctacgccgcccctaaacaaactcaaacgccgtaaatcaaaaacaaaacaaaacgatctaaacgtacgaacgacgcgaatctcactcgtccgctccgctctaaactacgcgccacgctctaaaatccgacgccctaattcctacttctaccgctaccgccgccgaatcccaataacccgacgtactcgactcccacaaacctacaaccaacatcgcaccgaaccttcgaaaaaccgcgactaaaacgctcgcccgacataaaaaacgcaaaacccgcaaataatccaaaattaaaaatctccgacgtatctttcgaatcgcgtcccgcctaaataccccgaaaattcccatacaaaaataaaaaatacccccaacaaaaaaaaaaactctaacgtaaaaaaaaat

SEQ ID NO: 40577 - DNA, 525 bp, Artificial Sequence
  chemically treated genomic DNA (Homo sapiens) CpG-island No: 40577
gaggtcgtcgtcggttatatttacgaggtttttagggcgtcggcggcgagatttcggtcggttagggggtcgggttgtggttgaggtgggacgagttagggtcggggaggagatacggcgttaaaagagggtagttgcgggttcggtaggattttcgtcgtcgatttattttatttatttcgcgtcgtttatttttcgttgtttacgtcgcgttttatatcgcgggttttagagtttgaggaaagtaacggggtaggcgcggattagggcgggttttattgcgtttgcggaagcgggcggggaggggcgggtcgacgtttattgcgtttgcggaaaggggcggggtaggtataggtttgcgggtgttatttattgcgtttgcggaaaggggcggggcgggcgcgggttggcgggcggtgtttattgcgtttgcggaaaggggcggggtaggcgcgagaagggagtcgagttgggggcggcgtttagggcggggtggcgggcggagtttattgcgtttgtgcgagg

SEQ ID NO: 40578 - DNA, 525 bp, Artificial Sequence
  chemically treated genomic DNA (Homo sapiens) CpG-island No: 40578
cctcgcacaaacgcaataaactccgcccgccaccccgccctaaacgccgcccccaactcgactcccttctcgcgcctaccccgcccctttccgcaaacgcaataaacaccgcccgccaacccgcgcccgccccgcccctttccgcaaacgcaataaataacacccgcaaacctatacctaccccgcccctttccgcaaacgcaataaacgtcgacccgcccctccccgcccgcttccgcaaacgcaataaaacccgccctaatccgcgcctaccccgttactttcctcaaactctaaaacccgcgatataaaacgcgacgtaaacaacgaaaaataaacgacgcgaaataaataaaataaatcgacgacgaaaatcctaccgaacccgcaactaccctcttttaacgccgtatctcctccccgaccctaactcgtcccacctcaaccacaacccgaccccctaaccgaccgaaatctcgccgccgacgccctaaaaacctcgtaaatataaccgacgacgacctc

SEQ ID NO: 40579 - DNA, 525 bp, Artificial Sequence
  chemically treated genomic DNA (Homo sapiens) CpG-island No: 40579
tttcgtataggcgtagtaggtttcgttcgttatttcgttttggacgtcgtttttagttcggtttttttttcgcgtttgtttcgttttttttcgtaggcgtagtaggtatcgttcgttagttcgcgttcgtttcgttttttttcgtaggcgtagtaggtggtattcgtaggtttgtgtttgtttcgttttttttcgtaggcgtagtgagcgtcgattcgttttttttcgttcgttttcgtaggcgtagtaggattcgttttggttcgcgtttgtttcgttgttttttttaggttttaaggttcgcggtgtggagcgcggcgtaggtagcggggagtgggcggcgcggggtgggtggagtgggtcggcggcggggattttgtcgagttcgtagttgtttttttttagcgtcgtgtttttttttcggttttggttcgttttattttagttatagttcggttttttggtcggtcgaggtttcgtcgtcggcgttttggggatttcgtgggtgtggtcggcggcgatttt

SEQ ID NO: 40580 - DNA, 525 bp, Artificial Sequence
  chemically treated genomic DNA (Homo sapiens) CpG-island No: 40580
aaaatcgccgccgaccacacccacgaaatccccaaaacgccgacgacgaaacctcgaccgaccaaaaaaccgaactataactaaaataaaacgaaccaaaaccgaaaaaaaaacacgacgctaaaaaaaaacaactacgaactcgacaaaatccccgccgccgacccactccacccaccccgcgccgcccactccccgctacctacgccgcgctccacaccgcgaaccttaaaacctaaaaaaaacaacgaaacaaacgcgaaccaaaacgaatcctactacgcctacgaaaacgaacgaaaaaaaacgaatcgacgctcactacgcctacgaaaaaaaacgaaacaaacacaaacctacgaataccacctactacgcctacgaaaaaaaacgaaacgaacgcgaactaacgaacgatacctactacgcctacgaaaaaaaacgaaacaaacgcgaaaaaaaaaccgaactaaaaacgacgtccaaaacgaaataacgaacgaaacctactacgcctatacgaaa

SEQ ID NO: 40581 - DNA, 649 bp, Artificial Sequence
  chemically treated genomic DNA (Homo sapiens) CpG-island No: 40581
ttggaagtcggtttagtgcggagatcgcgatcggaggagcgtagaacgttttttttagcgttttgggtttcgtaggtataatttttaaattagcggcgaaattcgagtttcgtcgtttttcggggagggagcgtggtcgtttagtcgagttttttttttggtttcgttcgtttttgcgtcgcgaggtcgtttggtgagttttagggttttgtggttttttagtcgtcggcgttttcgggtgttttttggtcgcggtaggaacggagttgggcgtttagacggcgtcggggtcgtttttgtgttttcgttcggtggtcggagtcgtagttttgttttttttttattggggtagcgtttgtttttttcgcggtcggatcgcgtcggagttttaggttttaggtagttcgggtcgtagttgttatggagaagttcggcgcgtatttggggtgttcggtaggagtttcggtcgtttcgcgtttttttttttatttacgattgtggtcggcggcggtttttgtttttcggataaagttggagatgttgttgcggagtcggttttgggatttgtttttttttttggtttcggggttcgtagtcgtcggggttcggaagggtttttcggggcgtttttttaggagcggtggttagg

SEQ ID NO: 40582 - DNA, 649 bp, Artificial Sequence
  chemically treated genomic DNA (Homo sapiens) CpG-island No: 40582
cctaaccaccgctcctaaaaaaacgccccgaaaaacccttccgaaccccgacgactacgaaccccgaaaccaaaaaaaaaaacaaatcccaaaaccgactccgcaacaacatctccaactttatccgaaaaacaaaaaccgccgccgaccacaatcgtaaataaaaaaaaaaacgcgaaacgaccgaaactcctaccgaacaccccaaatacgcgccgaacttctccataacaactacgacccgaactacctaaaacctaaaactccgacgcgatccgaccgcgaaaaaaacaaacgctaccccaataaaaaaaaaacaaaactacgactccgaccaccgaacgaaaacacaaaaacgaccccgacgccgtctaaacgcccaactccgttcctaccgcgaccaaaaaacacccgaaaacgccgacgactaaaaaaccacaaaaccctaaaactcaccaaacgacctcgcgacgcaaaaacgaacgaaaccaaaaaaaaaactcgactaaacgaccacgctccctccccgaaaaacgacgaaactcgaatttcgccgctaatttaaaaattatacctacgaaacccaaaacgctaaaaaaaacgttctacgctcctccgatcgcgatctccgcactaaaccgacttccaa

SEQ ID NO: 40583 - DNA, 649 bp, Artificial Sequence
  chemically treated genomic DNA (Homo sapiens) CpG-island No: 40583
tttggttatcgtttttgagggaacgtttcggggagttttttcgggtttcgacggttgcgggtttcggagttaagagaagaagtaggttttagggtcgatttcgtagtagtatttttagttttgttcgggaagtagaggtcgtcgtcggttatagtcgtgggtgagaagaagggcgcgaggcggtcggggtttttgtcgggtattttaagtacgcgtcgggtttttttatgatagttgcggttcgggttgtttggggtttgggatttcggcgcggttcggtcgcgagaaaggtaggcgttgttttagtggggaaggggtaaggttgcggtttcggttatcgggcgggggtatagaaacgatttcggcgtcgtttgagcgtttagtttcgtttttgtcgcggttaaaagatattcgagagcgtcggcggttgggggattatagggttttggaatttattaggcggtttcgcggcgtaaaagcgggcggagttagagaaggggttcggttaggcggttacgtttttttttcggagggcggcgggattcggatttcgtcgttggtttaaaaattgtgtttgcggagtttaggacgttgggaggagcgttttgcgttttttcggtcgcggttttcgtattaaatcgatttttag

SEQ ID NO: 40584 - DNA, 649 bp, Artificial Sequence
  chemically treated genomic DNA (Homo sapiens) CpG-island No: 40584
ctaaaaatcgatttaatacgaaaaccgcgaccgaaaaaacgcaaaacgctcctcccaacgtcctaaactccgcaaacacaatttttaaaccaacgacgaaatccgaatcccgccgccctccgaaaaaaaaacgtaaccgcctaaccgaaccccttctctaactccgcccgcttttacgccgcgaaaccgcctaataaattccaaaaccctataatcccccaaccgccgacgctctcgaatatcttttaaccgcgacaaaaacgaaactaaacgctcaaacgacgccgaaatcgtttctatacccccgcccgataaccgaaaccgcaaccttaccccttccccactaaaacaacgcctacctttctcgcgaccgaaccgcgccgaaatcccaaaccccaaacaacccgaaccgcaactatcataaaaaaacccgacgcgtacttaaaatacccgacaaaaaccccgaccgcctcgcgcccttcttctcacccacgactataaccgacgacgacctctacttcccgaacaaaactaaaaatactactacgaaatcgaccctaaaacctacttcttctcttaactccgaaacccgcaaccgtcgaaacccgaaaaaactccccgaaacgttccctcaaaaacgataaccaaa

SEQ ID NO: 40585 - DNA, 594 bp, Artificial Sequence
  chemically treated genomic DNA (Homo sapiens) CpG-island No: 40585
  unsure (174, 190)
ggacgtcggaggattgcgttgtagatgtaagtgtgcggaagagcgtcgttgaattaagcggagttcgggcgcgttggatttttagtattggcgcggtcgcgttattaaaatatcgtagtgaagatttagtttttatgagaagagatcgcgcgatataatcggttgtttttaatntgcgcgcgcgttcgtngtagcgaagtaattcgacgatagtacgatgttagtcgtcgacgggacgtggttcggattcgtttttcgttattcgcgttatcgcgtttcggttcgcgtgaatagtcggcggtttatacgtatacgtttgtcgagcgtcgtgtcgcgtaaagttcgtgatcggtgcgatgatgtaattttcgacgcggttgtggcgtgttaggtgttaagagcgggttatagtcgtattttcgcgtattatgtggtggcggcgagttgtcgcgggtttcgaagtcgagtcgtcgcgcgcgacgggatttcggcggagtatttcgagatacgtcgaataatgtcgaagcgataagtcggaacggtgtcgtttagtcgggattcggggacgtatgtgtcgcgtcgcgcgtttttttt

SEQ ID NO: 40586 - DNA, 594 bp, Artificial Sequence
  chemically treated genomic DNA (Homo sapiens) CpG-island No: 40586
  unsure (405, 421)
aaaaaaaacgcgcgacgcgacacatacgtccccgaatcccgactaaacgacaccgttccgacttatcgcttcgacattattcgacgtatctcgaaatactccgccgaaatcccgtcgcgcgcgacgactcgacttcgaaacccgcgacaactcgccgccaccacataatacgcgaaaatacgactataacccgctcttaacacctaacacgccacaaccgcgtcgaaaattacatcatcgcaccgatcacgaactttacgcgacacgacgctcgacaaacgtatacgtataaaccgccgactattcacgcgaaccgaaacgcgataacgcgaataacgaaaaacgaatccgaaccacgtcccgtcgacgactaacatcgtactatcgtcgaattacttcgctacnacgaacgcgcgcgcanattaaaaacaaccgattatatcgcgcgatctcttctcataaaaactaaatcttcactacgatattttaataacgcgaccgcgccaatactaaaaatccaacgcgcccgaactccgcttaattcaacgacgctcttccgcacacttacatctacaacgcaatcctccgacgtcc

SEQ ID NO: 40587 - DNA, 594 bp, Artificial Sequence
  chemically treated genomic DNA (Homo sapiens) CpG-island No: 40587
  unsure (405, 421)
gggggggacgcgcggcgcgatatatgcgttttcgagtttcggttgggcggtatcgtttcgatttatcgtttcggtattgttcggcgtatttcggggtatttcgtcgggatttcgtcgcgcgcggcggttcgatttcgggattcgcgataattcgtcgttattatatgatacgcggggatgcggttataattcgtttttaatatttggtacgttatagtcgcgtcggggattgtattatcgtatcggttacgggttttacgcggtacggcgttcgataagcgtgtgcgtgtagatcgtcggttgtttacgcgggtcggggcgcggtggcgcggataacggggggcgaattcgggttacgtttcgtcggcgattagtatcgtgttatcgtcgaattgtttcgttatngcgggcgcgcgcgtanattaggaatagtcggttatgtcgcgcggtttttttttatgggagttggatttttattgcgatgttttggtggcgcggtcgcgttaatattaggaatttagcgcgttcgggtttcgtttggtttaacgacgttttttcgtatatttgtatttgtagcgtaatttttcggcgttt

SEQ ID NO: 40588 - DNA, 594 bp, Artificial Sequence
  chemically treated genomic DNA (Homo sapiens) CpG-island No: 40588
  unsure (174, 190)
aaacgccgaaaaattacgctacaaatacaaatatacgaaaaaacgtcgttaaaccaaacgaaacccgaacgcgctaaattcctaatattaacgcgaccgcgccaccaaaacatcgcaataaaaatccaactcccataaaaaaaaaccgcgcgacataaccgactattcctaatntacgcgcgcgcccgcnataacgaaacaattcgacgataacacgatactaatcgccgacgaaacgtaacccgaattcgccccccgttatccgcgccaccgcgccccgacccgcgtaaacaaccgacgatctacacgcacacgcttatcgaacgccgtaccgcgtaaaacccgtaaccgatacgataatacaatccccgacgcgactataacgtaccaaatattaaaaacgaattataaccgcatccccgcgtatcatataataacgacgaattatcgcgaatcccgaaatcgaaccgccgcgcgcgacgaaatcccgacgaaataccccgaaatacgccgaacaataccgaaacgataaatcgaaacgataccgcccaaccgaaactcgaaaacgcatatatcgcgccgcgcgtccccccc

SEQ ID NO: 40589 - DNA, 709 bp, Artificial Sequence
  chemically treated genomic DNA (Homo sapiens) CpG-island No: 40589
ttgcgtgataaaggtggagattaaggatttgaacgataatgcgtttagtttttcggtagtatagatcgagttggagatttcggaggtagttagttttggtacgcgtatttcgttggatagcgtttacgatttagatttaggaagttttggcgtgtagatttacgagtttacgtttaacgagttgttcggtttggagattaagacgcgcggcgacggttttcgttttgtcgaattcgtggtggaaaagagtttggatcgcgagacgtagtcgtattatagttttcgaattattgcgttagacggtggcgattcgtcgcgtttgggtatcgttggttttagtattaaggtgatcgattttaatgataataattcggtgtttagcgagtttatttacgcggtgagcgtgttagaaaattcgttttttaatatattcgttattcgttttaacgttagcgatttagacgagggtattaacggttaggtggtttattttttttatggttacgttaacgatcgtacgcgcgagtttttttagatcgattcgtatagtggtttggttattgttattggcgttttagattacgaagaggggtacgtgtacgaattggacgtgtaggttaaggatttggggtttaattttatttcggtatattgtaaggttatcgttagcgtgttggatattaatgataattcgtcggttattaatttg

SEQ ID NO: 40590 - DNA, 709 bp, Artificial Sequence
  chemically treated genomic DNA (Homo sapiens) CpG-island No: 40590
caaattaataaccgacgaattatcattaatatccaacacgctaacgataaccttacaatataccgaaataaaattaaaccccaaatccttaacctacacgtccaattcgtacacgtacccctcttcgtaatctaaaacgccaataacaataaccaaaccactatacgaatcgatctaaaaaaactcgcgcgtacgatcgttaacgtaaccataaaaaaaataaaccacctaaccgttaataccctcgtctaaatcgctaacgttaaaacgaataacgaatatattaaaaaacgaattttctaacacgctcaccgcgtaaataaactcgctaaacaccgaattattatcattaaaatcgatcaccttaatactaaaaccaacgatacccaaacgcgacgaatcgccaccgtctaacgcaataattcgaaaactataatacgactacgtctcgcgatccaaactcttttccaccacgaattcgacaaaacgaaaaccgtcgccgcgcgtcttaatctccaaaccgaacaactcgttaaacgtaaactcgtaaatctacacgccaaaacttcctaaatctaaatcgtaaacgctatccaacgaaatacgcgtaccaaaactaactacctccgaaatctccaactcgatctatactaccgaaaaactaaacgcattatcgttcaaatccttaatctccacctttatcacgcaa

SEQ ID NO: 40591 - DNA, 709 bp, Artificial Sequence
  chemically treated genomic DNA (Homo sapiens) CpG-island No: 40591
taggttgatgatcggcggattgttattggtgtttagtacgttgacggtgattttgtagtgtgtcgggatggaattgggttttaagtttttagtttgtacgtttagttcgtatacgtgttttttttcgtagtttaaagcgttagtgatagtgattaggttattgtgcgggtcgatttgaaagagttcgcgcgtgcggtcgttgacgtagttatagaaggagtagattatttggtcgttggtgttttcgtttggatcgttggcgttgaggcggatgacgggtgtgttgggaggcgagttttttggtacgtttatcgcgtaggtggattcgttaaatatcgggttgttgttattggagtcggttattttgatattaaggttaacggtgtttaggcgcggcgggtcgttatcgtttagcgtagtgattcggaagttgtagtgcgattgcgtttcgcggtttaggtttttttttattacgagttcggtaaagcgggagtcgtcgtcgcgcgttttgatttttaggtcgaatagttcgttgggcgtgagttcgtaagtttgtacgttaaagttttttgagtttggatcgtaagcgttgtttagcgggatgcgcgtgttagggttggttgttttcgagatttttagttcgatttgtgttgtcgggaaattgggcgtattgtcgtttaggtttttgatttttatttttattacgtag

SEQ ID NO: 40592 - DNA, 709 bp, Artificial Sequence
  chemically treated genomic DNA (Homo sapiens) CpG-island No: 40592
ctacgtaataaaaataaaaatcaaaaacctaaacgacaatacgcccaatttcccgacaacacaaatcgaactaaaaatctcgaaaacaaccaaccctaacacgcgcatcccgctaaacaacgcttacgatccaaactcaaaaaactttaacgtacaaacttacgaactcacgcccaacgaactattcgacctaaaaatcaaaacgcgcgacgacgactcccgctttaccgaactcgtaataaaaaaaaacctaaaccgcgaaacgcaatcgcactacaacttccgaatcactacgctaaacgataacgacccgccgcgcctaaacaccgttaaccttaatatcaaaataaccgactccaataacaacaacccgatatttaacgaatccacctacgcgataaacgtaccaaaaaactcgcctcccaacacacccgtcatccgcctcaacgccaacgatccaaacgaaaacaccaacgaccaaataatctactccttctataactacgtcaacgaccgcacgcgcgaactctttcaaatcgacccgcacaataacctaatcactatcactaacgctttaaactacgaaaaaaaacacgtatacgaactaaacgtacaaactaaaaacttaaaacccaattccatcccgacacactacaaaatcaccgtcaacgtactaaacaccaataacaatccgccgatcatcaaccta

SEQ ID NO: 40593 - DNA, 552 bp, Artificial Sequence
  chemically treated genomic DNA (Homo sapiens) CpG-island No: 40593
agcgacggcggtagagaaagcgtgggagcgacgtttttgttttggacgtcgacgtgtttacgtcgaggtcgcgtttagattcggaggcggggtcgttacgtggggtagcgtgggtcgttgttttggaaacgtagagcgcgcgttttaggtaaaggttgttacgtttaggatagggtttttacggtggaggaaaggatttttgcgggatattacgttgtgcgttaaaaagtcgggcggtttcggagttagagtagcggttttgcggcgtaggcggcgggtcggggtagttttgaagtcgggattcggttcgaagggtgagtattagttcgttttcggtgggcgtcgtttttaatgttaagttttagggtagtcgtttggattcgtttggcgagcgcggagtgagcggcgtaggaggagtttttttaggtttcggaagaaagtcggtttttgtttcgcgcggttagcgatatttagagcgagattgtttgggtttgggaggaggtaggtagcgaatttaatttgtatagtggggttttgtgtgcgtttttagtg

SEQ ID NO: 40594 - DNA, 552 bp, Artificial Sequence
  chemically treated genomic DNA (Homo sapiens) CpG-island No: 40594
cactaaaaacgcacacaaaaccccactatacaaattaaattcgctacctacctcctcccaaacccaaacaatctcgctctaaatatcgctaaccgcgcgaaacaaaaaccgactttcttccgaaacctaaaaaaactcctcctacgccgctcactccgcgctcgccaaacgaatccaaacgactaccctaaaacttaacattaaaaacgacgcccaccgaaaacgaactaatactcacccttcgaaccgaatcccgacttcaaaactaccccgacccgccgcctacgccgcaaaaccgctactctaactccgaaaccgcccgactttttaacgcacaacgtaatatcccgcaaaaatcctttcctccaccgtaaaaaccctatcctaaacgtaacaacctttacctaaaacgcgcgctctacgtttccaaaacaacgacccacgctaccccacgtaacgaccccgcctccgaatctaaacgcgacctcgacgtaaacacgtcgacgtccaaaacaaaaacgtcgctcccacgctttctctaccgccgtcgct

SEQ ID NO: 40595 - DNA, 552 bp, Artificial Sequence
  chemically treated genomic DNA (Homo sapiens) CpG-island No: 40595
tattgagagcgtatataagattttattgtataagttgggttcgttgtttgtttttttttaggtttaaataatttcgttttgagtgtcgttggtcgcgcggagtaggggtcggttttttttcgggatttaggggagttttttttgcgtcgtttatttcgcgttcgttaaacgggtttaagcgattgttttggaatttgatattgaaggcggcgtttatcggagacgagttggtgtttatttttcgggtcggatttcggttttaaggttgtttcgattcgtcgtttgcgtcgtagagtcgttgttttggtttcgaagtcgttcggttttttggcgtatagcgtggtatttcgtagaagtttttttttttatcgtgagaattttgttttgggcgtagtagtttttatttggagcgcgcgttttgcgtttttaaggtagcggtttacgttgttttacgtgacggtttcgttttcgggtttgggcgcggtttcgacgtgggtacgtcggcgtttagagtaagagcgtcgtttttacgttttttttgtcgtcgtcgtt

SEQ ID NO: 40596 - DNA, 552 bp, Artificial Sequence
  chemically treated genomic DNA (Homo sapiens) CpG-island No: 40596
aacgacgacgacaaaaaaaacgtaaaaacgacgctcttactctaaacgccgacgtacccacgtcgaaaccgcgcccaaacccgaaaacgaaaccgtcacgtaaaacaacgtaaaccgctaccttaaaaacgcaaaacgcgcgctccaaataaaaactactacgcccaaaacaaaattctcacgataaaaaaaaaaacttctacgaaataccacgctatacgccaaaaaaccgaacgacttcgaaaccaaaacaacgactctacgacgcaaacgacgaatcgaaacaaccttaaaaccgaaatccgacccgaaaaataaacaccaactcgtctccgataaacgccgccttcaatatcaaattccaaaacaatcgcttaaacccgtttaacgaacgcgaaataaacgacgcaaaaaaaactcccctaaatcccgaaaaaaaaccgacccctactccgcgcgaccaacgacactcaaaacgaaattatttaaacctaaaaaaaaacaaacaacgaacccaacttatacaataaaatcttatatacgctctcaata

SEQ ID NO: 40597 - DNA, 508 bp, Artificial Sequence
  chemically treated genomic DNA (Homo sapiens) CpG-island No: 40597
gtttttttcgtgtttagtttttacggttattttcgtcgacgacgtcgtcgtcgtagggtttttttcgttttcgtttttgtagtcgcggtttttcggcggaagttttttattttttgtggttttcgtagcggtcgtcgagattttcgcgttggtcgcggtttcgcggagaagtttcggggcgtcgcgcgcgttattgagtatgttcggatcgttcgcgtagattcgttggtttcgtcggcgtgttattcgcgtcgttagtgggagggtatagttgggtgggaggagatggaaaagtaaggtaagttcgggggagttgtttaggttgttaatttgtcgagtgggcggtcgtaaaaggcgcgcggggggcgggaatgattcgtttttgattggttttttttgtgtgcgcgagtttcgcgtaggtacgagttagtgcgtttttttattatatagagatagaggttgataagggatggggttcgagtttttagaatatttgaggataggtcgt

SEQ ID NO: 40598 - DNA, 508 bp, Artificial Sequence
  chemically treated genomic DNA (Homo sapiens) CpG-island No: 40598
acgacctatcctcaaatattctaaaaactcgaaccccatcccttatcaacctctatctctatataataaaaaaacgcactaactcgtacctacgcgaaactcgcgcacacaaaaaaaaccaatcaaaaacgaatcattcccgccccccgcgcgccttttacgaccgcccactcgacaaattaacaacctaaacaactcccccgaacttaccttacttttccatctcctcccacccaactataccctcccactaacgacgcgaataacacgccgacgaaaccaacgaatctacgcgaacgatccgaacatactcaataacgcgcgcgacgccccgaaacttctccgcgaaaccgcgaccaacgcgaaaatctcgacgaccgctacgaaaaccacaaaaaataaaaaacttccgccgaaaaaccgcgactacaaaaacgaaaacgaaaaaaaccctacgacgacgacgtcgtcgacgaaaataaccgtaaaaactaaacacgaaaaaaac

SEQ ID NO: 40599 - DNA, 508 bp, Artificial Sequence
  chemically treated genomic DNA (Homo sapiens) CpG-island No: 40599
gcgatttgtttttaggtgttttaggaattcgggttttattttttgttagtttttgtttttgtgtggtgagaaggcgtattggttcgtgtttgcgcgaaattcgcgtatatagaaaagattaattaaggacgggttattttcgtttttcgcgcgttttttgcgatcgtttattcgataggttgataatttagatagttttttcggatttgttttatttttttatttttttttatttagttatatttttttattggcggcgcggatggtacgtcggcggagttagcgagtttgcgcgagcggttcgagtatgtttaatagcgcgcgcggcgtttcggagttttttcgcggaatcgcgattaacgcggaggtttcggcggtcgttgcgggagttataggaagtgaagagttttcgtcgggagatcgcggttgtaggaacggaggcggaaggggttttgcggcgacgacgtcgtcgacgggggtggtcgtgggagttgagtacggagaagat

SEQ ID NO: 40600 - DNA, 508 bp, Artificial Sequence
  chemically treated genomic DNA (Homo sapiens) CpG-island No: 40600
atcttctccgtactcaactcccacgaccacccccgtcgacgacgtcgtcgccgcaaaaccccttccgcctccgttcctacaaccgcgatctcccgacgaaaactcttcacttcctataactcccgcaacgaccgccgaaacctccgcgttaatcgcgattccgcgaaaaaactccgaaacgccgcgcgcgctattaaacatactcgaaccgctcgcgcaaactcgctaactccgccgacgtaccatccgcgccgccaataaaaaaatataactaaataaaaaaaaataaaaaaataaaacaaatccgaaaaaactatctaaattatcaacctatcgaataaacgatcgcaaaaaacgcgcgaaaaacgaaaataacccgtccttaattaatcttttctatatacgcgaatttcgcgcaaacacgaaccaatacgccttctcaccacacaaaaacaaaaactaacaaaaaataaaacccgaattcctaaaacacctaaaaacaaatcgc

SEQ ID NO: 40601 - DNA, 517 bp, Artificial Sequence
  chemically treated genomic DNA (Homo sapiens) CpG-island No: 40601
  unsure (44)
tttttttcgtttttggtgtttttgtgttgttcgcgcggttttgnggcggggtcggcgtttcgtcgcggtcgggtgtttttcgtggcgtcgggcgttggttcgggttcgttcgtcggcggtggttcgttttcgtgggtcgcgcgcgggtttcggcgttcgtttggttcgtttgcggtcgcgttttcgcgttttgcgtttgttttttttcggtcgttgtttcgttttgttttgtttcgttttatcgtttgtcgtttattcgcgcgcggtcgcgttggcggtgttcgtgtttttatcgtttcgttcgtttttttttgtgggtgtttgtgtcgttaggtatcgttgttgttttgttgtttcgtttcgcgttggtttcggtcggtgttgtgatgatcgtaacgttcgttcgcgttcgttggttttagcgcgttcgaacgttcgttggatcggtgtggcgttcgtcgttttttcgtcgtgttcgttattacgcgcgcgtggtcgtttgtattggcgtatgcgt

SEQ ID NO: 40602 - DNA, 517 bp, Artificial Sequence
  chemically treated genomic DNA (Homo sapiens) CpG-island No: 40602
  unsure (474)
acgcatacgccaatacaaacgaccacgcgcgcgtaataacgaacacgacgaaaaaacgacgaacgccacaccgatccaacgaacgttcgaacgcgctaaaaccaacgaacgcgaacgaacgttacgatcatcacaacaccgaccgaaaccaacgcgaaacgaaacaacaaaacaacaacgatacctaacgacacaaacacccacaaaaaaaaacgaacgaaacgataaaaacacgaacaccgccaacgcgaccgcgcgcgaataaacgacaaacgataaaacgaaacaaaacaaaacgaaacaacgaccgaaaaaaaacaaacgcaaaacgcgaaaacgcgaccgcaaacgaaccaaacgaacgccgaaacccgcgcgcgacccacgaaaacgaaccaccgccgacgaacgaacccgaaccaacgcccgacgccacgaaaaacacccgaccgcgacgaaacgccgaccccgccncaaaaccgcgcgaacaacacaaaaacaccaaaaacgaaaaaaa

SEQ ID NO: 40603 - DNA, 517 bp, Artificial Sequence
  chemically treated genomic DNA (Homo sapiens) CpG-island No: 40603
  unsure (474)
acgtatacgttagtgtagacggttacgcgcgcgtgatggcggatacgacgagaaaacggcgggcgttatatcgatttagcgggcgttcgggcgcgttgaggttaacggacgcgagcgggcgttacgattattataatatcggtcgaagttaacgcgaagcggaatagtaagatagtaacggtgtttagcgatatagatatttataagagaagacgaacgaaacggtaggaatacggatatcgttagcgcggtcgcgcgcgagtgggcgataggcggtaaggcgaggtaggataagacggggtaacgatcggaagagggtaggcgtaagacgcgaaaacgcggtcgtaggcgggttaggcgggcgtcgggattcgcgcgcggtttacggaggcggattatcgtcggcgagcgggttcggattagcgttcggcgttacgagagatattcgatcgcggcgggacgtcgatttcgttntaaagtcgcgcgagtagtataaaaatattaggggcgggaggaa

SEQ ID NO: 40604 - DNA, 517 bp, Artificial Sequence
  chemically treated genomic DNA (Homo sapiens) CpG-island No: 40604
  unsure (44)
ttcctcccgcccctaatatttttatactactcgcgcgactttanaacgaaatcgacgtcccgccgcgatcgaatatctctcgtaacgccgaacgctaatccgaacccgctcgccgacgataatccgcctccgtaaaccgcgcgcgaatcccgacgcccgcctaacccgcctacgaccgcgttttcgcgtcttacgcctaccctcttccgatcgttaccccgtcttatcctacctcgccttaccgcctatcgcccactcgcgcgcgaccgcgctaacgatatccgtattcctaccgtttcgttcgtcttctcttataaatatctatatcgctaaacaccgttactatcttactattccgcttcgcgttaacttcgaccgatattataataatcgtaacgcccgctcgcgtccgttaacctcaacgcgcccgaacgcccgctaaatcgatataacgcccgccgttttctcgtcgtatccgccatcacgcgcgcgtaaccgtctacactaacgtatacgt

SEQ ID NO: 40605 - DNA, 1092 bp, Artificial Sequence
  chemically treated genomic DNA (Homo sapiens) CpG-island No: 40605
ggcggaatcgttcgggcggaattaacgggttgtcgcggggggtggggttacggtttttttttttttgtttttagtggaacggtttcggcggaattaacgggttacggggatgtattacgcgtatcgtcgttttttttttttgtttgtagtggaacggttcgggcggaattaacgtgcggtcgttcggagtattcggcgcgtcgtgttttttttcgtgtggttgtattgtaacggttcgggttggattattaggcggtagcggagaggtatttaaaagtttcgtgttattttagattttaaaaaaaaaaaaaaaattgcgtgtttttattttcgtcggtttgtagtggaagggttcgagtagaattaacgggggaggggacgttgagcgcgtcgtgttttttttttcgtttgtttggagtagaacggttcgggcggaattaacgggtagtcgcgggggcgttgtgggtcgcggcgcgttttttcggtttcgtggttttggggtattgaggagcggcgttcgcggggtagcgaggagttcgatgtagggttttgcgcgttattttcggtttcgcgggcgtttcgtgaagtttatttggattcgttagcgttgtgttattttttagtgtcgagtttcgagttgttttcgcggtttcgcgttcggtttttttatcgcgcgttttttaggtttcgttcgttagcgtttttttgttgtgaaggcgtcggggtttagcgttatgtttgcggcggagattgtattaggttttcggtgggttttgcgtgcggggtgttttgttcggtgatcggtgttgggtgttgcgtgttcggtgttcggtgttgggtgttgggtgtcggtattgatgttgagtgtgcgggcgttcggggtttttttgttcggattcgtttttgggggtttttttttatggttggcgttgtgcgcggaaaacgttggtggggtttttttagttggttttaagcgtttttacgttcgggagtttacggcgatttttacgttttgaagtttgggaacgcggtgtgcgtggtcgtaaaaagaataataataataaaaaaatataaaataaaatacgtaaaaaa

SEQ ID NO: 40606 - DNA, 1092 bp, Artificial Sequence
  chemically treated genomic DNA (Homo sapiens) CpG-island No: 40606
ttttttacgtattttattttatatttttttattattattattctttttacgaccacgcacaccgcgttcccaaacttcaaaacgtaaaaatcgccgtaaactcccgaacgtaaaaacgcttaaaaccaactaaaaaaaccccaccaacgttttccgcgcacaacgccaaccataaaaaaaaacccccaaaaacgaatccgaacaaaaaaaccccgaacgcccgcacactcaacatcaataccgacacccaacacccaacaccgaacaccgaacacgcaacacccaacaccgatcaccgaacaaaacaccccgcacgcaaaacccaccgaaaacctaatacaatctccgccgcaaacataacgctaaaccccgacgccttcacaacaaaaaaacgctaacgaacgaaacctaaaaaacgcgcgataaaaaaaccgaacgcgaaaccgcgaaaacaactcgaaactcgacactaaaaaataacacaacgctaacgaatccaaataaacttcacgaaacgcccgcgaaaccgaaaataacgcgcaaaaccctacatcgaactcctcgctaccccgcgaacgccgctcctcaataccccaaaaccacgaaaccgaaaaaacgcgccgcgacccacaacgcccccgcgactacccgttaattccgcccgaaccgttctactccaaacaaacgaaaaaaaaaacacgacgcgctcaacgtcccctcccccgttaattctactcgaacccttccactacaaaccgacgaaaataaaaacacgcaattttttttttttttttaaaatctaaaataacacgaaacttttaaatacctctccgctaccgcctaataatccaacccgaaccgttacaatacaaccacacgaaaaaaaacacgacgcgccgaatactccgaacgaccgcacgttaattccgcccgaaccgttccactacaaacaaaaaaaaaaaacgacgatacgcgtaatacatccccgtaacccgttaattccgccgaaaccgttccactaaaaacaaaaaaaaaaaaaccgtaaccccaccccccgcgacaacccgttaattccgcccgaacgattccgcc

SEQ ID NO: 40607 - DNA, 1092 bp, Artificial Sequence
  chemically treated genomic DNA (Homo sapiens) CpG-island No: 40607
ttttttgcgtgttttgttttgtgtttttttgttgttgttgttttttttgcggttacgtatatcgcgtttttaggttttagggcgtgggggtcgtcgtggattttcggacgtgaaaacgtttaaagttagttgggaaaattttattagcgtttttcgcgtatagcgttagttataggaaaggatttttaggagcgaattcgggtagggaaatttcggacgttcgtatatttagtattagtatcggtatttagtatttagtatcgagtatcgagtacgtagtatttagtatcgattatcgagtagagtatttcgtacgtagaatttatcgagagtttgatgtagttttcgtcgtaggtatagcgttaggtttcggcgtttttataataaagggacgttggcgggcggggtttgagaggcgcgcggtggaggggtcgggcgcgaggtcgcggagatagttcggagttcggtattggggagtggtatagcgttggcggatttaggtgggttttacggggcgttcgcgggatcggaaatgacgcgtagaattttgtatcgggtttttcgttgtttcgcgggcgtcgttttttagtgttttagagttacggagtcggggaaacgcgtcgcggtttataacgttttcgcggttgttcgttggtttcgttcgggtcgttttattttaggtagacgggaggagaaatacggcgcgtttagcgttttttttttcgttggttttgttcgggtttttttattgtaggtcgacgggggtggaaatacgtagttttttttttttttttaaggtttagggtaatacggggtttttaagtgttttttcgttgtcgtttggtggtttagttcgggtcgttgtagtgtagttatacggggagggatacggcgcgtcgagtgtttcgggcggtcgtacgttggtttcgttcgggtcgttttattgtaggtagagggagaggacgacggtgcgcgtagtgtattttcgtggttcgttggtttcgtcggggtcgttttattgaaggtagaaggggggggatcgtggttttatttttcgcggtagttcgttggtttcgttcgggcggtttcgtt

SEQ ID NO: 40608 - DNA, 1092 bp, Artificial Sequence
  chemically treated genomic DNA (Homo sapiens) CpG-island No: 40608
aacgaaaccgcccgaacgaaaccaacgaactaccgcgaaaaataaaaccacgatccccccccttctaccttcaataaaacgaccccgacgaaaccaacgaaccacgaaaatacactacgcgcaccgtcgtcctctccctctacctacaataaaacgacccgaacgaaaccaacgtacgaccgcccgaaacactcgacgcgccgtatccctccccgtataactacactacaacgacccgaactaaaccaccaaacgacaacgaaaaaacacttaaaaaccccgtattaccctaaaccttaaaaaaaaaaaaaaaactacgtatttccacccccgtcgacctacaataaaaaaacccgaacaaaaccaacgaaaaaaaaaacgctaaacgcgccgtatttctcctcccgtctacctaaaataaaacgacccgaacgaaaccaacgaacaaccgcgaaaacgttataaaccgcgacgcgtttccccgactccgtaactctaaaacactaaaaaacgacgcccgcgaaacaacgaaaaacccgatacaaaattctacgcgtcatttccgatcccgcgaacgccccgtaaaacccacctaaatccgccaacgctataccactccccaataccgaactccgaactatctccgcgacctcgcgcccgacccctccaccgcgcgcctctcaaaccccgcccgccaacgtccctttattataaaaacgccgaaacctaacgctatacctacgacgaaaactacatcaaactctcgataaattctacgtacgaaatactctactcgataatcgatactaaatactacgtactcgatactcgatactaaatactaaataccgatactaatactaaatatacgaacgtccgaaatttccctacccgaattcgctcctaaaaatcctttcctataactaacgctatacgcgaaaaacgctaataaaattttcccaactaactttaaacgttttcacgtccgaaaatccacgacgacccccacgccctaaaacctaaaaacgcgatatacgtaaccgcaaaaaaaacaacaacaacaaaaaaacacaaaacaaaacacgcaaaaaa

SEQ ID NO: 40609 - DNA, 670 bp, Artificial Sequence
  chemically treated genomic DNA (Homo sapiens) CpG-island No: 40609
ggatttttttcgttttagttttttgggtacgtcggtttgggtatttttatttattatagagttcgtagtatgtagttttttgaggacgttgttgttcgtcgtttgggttttttcgttttttttagcgcgtggtcgttaatttatattgacgtttcggttagggttttcgttcgcgttcgttatttgaggtttcgcgatcgggtcgtcgggtcgtacgtagtagattaggtagagcggggtgcgcgtcgttcgtgttaggtagtagagttcgtaacggaaatttttgatgtagttaagcgagtttaggatgattacgtcgtggcgatttaggcgtcgttttacggaggttcgtagagttttacgtaatgtttttttacgggtagaatcgtcgtatatcgttgggttttttgcgtttaggatagttgcgtcgtttattacgtatatcgcgcggttttcggtagttagcgttacgcgtaattttttagtacgtcggtttttgtcgttgtacggtagttcgtaaaatattacgagcggtatttttttagggagcgattattggtaatcgcgttgcgttaattttcgggttgtacgtattttcgacgtaagtcggaagtgtaaattgttttttttgttttttttgatttttatagatttttttgtttttatggaa

SEQ ID NO: 40610 - DNA, 670 bp, Artificial Sequence
  chemically treated genomic DNA (Homo sapiens) CpG-island No: 40610
ttccataaaaacaaaaaaatctataaaaatcaaaaaaaacaaaaaaaacaatttacacttccgacttacgtcgaaaatacgtacaacccgaaaattaacgcaacgcgattaccaataatcgctccctaaaaaaataccgctcgtaatattttacgaactaccgtacaacgacaaaaaccgacgtactaaaaaattacgcgtaacgctaactaccgaaaaccgcgcgatatacgtaataaacgacgcaactatcctaaacgcaaaaaacccaacgatatacgacgattctacccgtaaaaaaacattacgtaaaactctacgaacctccgtaaaacgacgcctaaatcgccacgacgtaatcatcctaaactcgcttaactacatcaaaaatttccgttacgaactctactacctaacacgaacgacgcgcaccccgctctacctaatctactacgtacgacccgacgacccgatcgcgaaacctcaaataacgaacgcgaacgaaaaccctaaccgaaacgtcaatataaattaacgaccacgcgctaaaaaaaacgaaaaaacccaaacgacgaacaacaacgtcctcaaaaaactacatactacgaactctataataaataaaaatacccaaaccgacgtacccaaaaaactaaaacgaaaaaaatcc

SEQ ID NO: 40611 - DNA, 670 bp, Artificial Sequence
  chemically treated genomic DNA (Homo sapiens) CpG-island No: 40611
ttttatagaaataagagggtttgtaaaagttaagggagataggaagagtagtttgtattttcggtttacgtcggagatgcgtataattcggaagttggcgtagcgcggttgttaatggtcgttttttgagaggatgtcgttcgtggtgttttgcgggttgtcgtatagcggtaagagtcggcgtgttgaagagttgcgcgtggcgttggttgtcgagggtcgcgcggtgtacgtggtggacgacgtagttgttttgggcgtagaggatttagcggtgtacggcgattttgttcgtgagaaggtattgcgtggagttttgcgagttttcgtggaacggcgtttgagtcgttacgacgtggttattttggattcgtttaattatattaaaggttttcgttacgagttttattgtttggtacgggcggcgcgtatttcgttttgtttggtttattgcgtacggttcggcggttcgatcgcgggattttaggtggcgggcgcgaacgagaattttggtcggaacgttagtgtgagttggcggttacgcgttgaggaggacgggagagtttaggcggcgggtagtagcgtttttagggaattgtatattgcggattttgtagtaaatggaagtgtttaggtcgacgtatttaaggaattggagcgagaagaattt

SEQ ID NO: 40612 - DNA, 670 bp, Artificial Sequence
  chemically treated genomic DNA (Homo sapiens) CpG-island No: 40612
aaattcttctcgctccaattccttaaatacgtcgacctaaacacttccatttactacaaaatccgcaatatacaattccctaaaaacgctactacccgccgcctaaactctcccgtcctcctcaacgcgtaaccgccaactcacactaacgttccgaccaaaattctcgttcgcgcccgccacctaaaatcccgcgatcgaaccgccgaaccgtacgcaataaaccaaacaaaacgaaatacgcgccgcccgtaccaaacaataaaactcgtaacgaaaacctttaatataattaaacgaatccaaaataaccacgtcgtaacgactcaaacgccgttccacgaaaactcgcaaaactccacgcaataccttctcacgaacaaaatcgccgtacaccgctaaatcctctacgcccaaaacaactacgtcgtccaccacgtacaccgcgcgaccctcgacaaccaacgccacgcgcaactcttcaacacgccgactcttaccgctatacgacaacccgcaaaacaccacgaacgacatcctctcaaaaaacgaccattaacaaccgcgctacgccaacttccgaattatacgcatctccgacgtaaaccgaaaatacaaactactcttcctatctcccttaacttttacaaaccctcttatttctataaaa

SEQ ID NO: 40613 - DNA, 666 bp, Artificial Sequence
  chemically treated genomic DNA (Homo sapiens) CpG-island No: 40613
ggttcgtagtttaatttattcgcgttttttgggtcgaatcggttcgtagtcgagtttttcgtttaggcggattcgaattaggtgcgttcgtagtatatttttttttcgttatcgtttatttttcgtattttatcgttttcgaaatttatttagcgtagataattgaatattcggggttttgggggttacgttttttagtatattttttttttttttcgttaagggtagaaatagacgtattttttagaaaagtaattttttttgcgttatcgtcgtttttgtcggtcgttatttttttttttttacgtcgttttttttttaatttatggtttatatcgtcgtcgtgttcgtcgggatgaggggtcgcgtcggaggagggtagacgtcgtagggttgcgggtttcgggtttagtcgttaggcgggttgcgtttttacgtttagacgggtttatataaaggtaggttaggcgcgttcgggtttgttcgcgggttggcgggtagcgaggttcgcggttcgagttttttaggttttttcgggggaacgcgatcggcgacgacgacgacggcgtttttcgggttcggtttttttcggtttacgattttttatttatcgtttatttaggttgtttgagaaattttttttagtcgtgggtttttaagaaagga

SEQ ID NO: 40614 - DNA, 666 bp, Artificial Sequence
  chemically treated genomic DNA (Homo sapiens) CpG-island No: 40614
tcctttcttaaaaacccacgactaaaaaaaatttctcaaacaacctaaataaacgataaataaaaaatcgtaaaccgaaaaaaaccgaacccgaaaaacgccgtcgtcgtcgtcgccgatcgcgttcccccgaaaaaacctaaaaaactcgaaccgcgaacctcgctacccgccaacccgcgaacaaacccgaacgcgcctaacctacctttatataaacccgtctaaacgtaaaaacgcaacccgcctaacgactaaacccgaaacccgcaaccctacgacgtctaccctcctccgacgcgacccctcatcccgacgaacacgacgacgatataaaccataaattaaaaaaaaaacgacgtaaaaaaaaaaaaataacgaccgacaaaaacgacgataacgcaaaaaaaattacttttctaaaaaatacgtctatttctacccttaacgaaaaaaaaaaaaaatatactaaaaaacgtaacccccaaaaccccgaatattcaattatctacgctaaataaatttcgaaaacgataaaatacgaaaaataaacgataacgaaaaaaaaatatactacgaacgcacctaattcgaatccgcctaaacgaaaaactcgactacgaaccgattcgacccaaaaaacgcgaataaattaaactacgaacc

SEQ ID NO: 40615 - DNA, 666 bp, Artificial Sequence
  chemically treated genomic DNA (Homo sapiens) CpG-island No: 40615
tttttttttgggaatttacggttgggggaagttttttaggtagtttgggtgggcggtggatggggagtcgtgggtcgagaggaatcgggttcgggaagcgtcgtcgtcgtcgtcgtcggtcgcgttttttcggagaggtttgagaagttcgggtcgcgggtttcgttgttcgttagttcgcggataggttcgggcgcgtttggtttgtttttgtataggttcgtttgaacgtgggagcgtagttcgtttgacggttgagttcgaggttcgtaattttgcggcgtttattttttttcggcgcggttttttatttcggcgagtacggcggcggtgtgggttatggattaagaaggaggcggcgtgggaggaggaagatggcggtcggtaagagcggcggtagcgtaggggagattatttttttggaaggtacgtttgtttttgtttttgacggggagaagggagggtatattggaaaacgtggtttttagaatttcggatatttagttatttgcgttgggtgggtttcgggggcggtgaagtacgagggatgagcgatgacggggagggagtgtgttgcgagcgtatttggttcgagttcgtttaggcgaggggttcggttgcgagtcggttcggtttagggggcgcgggtggattgagttacgagtt

SEQ ID NO: 40616 - DNA, 666 bp, Artificial Sequence
  chemically treated genomic DNA (Homo sapiens) CpG-island No: 40616
aactcgtaactcaatccacccgcgccccctaaaccgaaccgactcgcaaccgaacccctcgcctaaacgaactcgaaccaaatacgctcgcaacacactccctccccgtcatcgctcatccctcgtacttcaccgcccccgaaacccacccaacgcaaataactaaatatccgaaattctaaaaaccacgttttccaatataccctcccttctccccgtcaaaaacaaaaacaaacgtaccttccaaaaaaataatctcccctacgctaccgccgctcttaccgaccgccatcttcctcctcccacgccgcctccttcttaatccataacccacaccgccgccgtactcgccgaaataaaaaaccgcgccgaaaaaaaataaacgccgcaaaattacgaacctcgaactcaaccgtcaaacgaactacgctcccacgttcaaacgaacctatacaaaaacaaaccaaacgcgcccgaacctatccgcgaactaacgaacaacgaaacccgcgacccgaacttctcaaacctctccgaaaaaacgcgaccgacgacgacgacgacgacgcttcccgaacccgattcctctcgacccacgactccccatccaccgcccacccaaactacctaaaaaacttcccccaaccgtaaattcccaaaaaaaaa

SEQ ID NO: 40617 - DNA, 523 bp, Artificial Sequence
  chemically treated genomic DNA (Homo sapiens) CpG-island No: 40617
ttttaggtcgtaaaatggtcgtattcgtcgcgtcggagcggcgaggtttttgcgatcgttaggcgtttttaggtttttagttcgttttgtagtcgtcgtcgttacggtcgttcgtttatttcgtttaggcgtgaatgtattagcggaggtttttgcgattgtttatgtggataggggtgggttttttttgttatcgtttcgcgtcggtcgttatagtagttttagtcgtcgtcgttgtcgttttttttttacgggcgttggagttgtcgttcggttttcgttttcgtttcgacgtcgtcgtttttagcgcggtttttttttagtagttcggattcggttcgcgggtagagttggttgcggcgtcgtatcgagttttgatttgtgggcgttcgtcgttcgggttttcggtagggtaggttttttacggcgcgggttcggtttagatacgttatatttaaaatttttatcgtttaggggggggtggtagatttggcgtgtgcgatgggtttgtttttttggtatt

SEQ ID NO: 40618 - DNA, 523 bp, Artificial Sequence
  chemically treated genomic DNA (Homo sapiens) CpG-island No: 40618
aataccaaaaaaacaaacccatcgcacacgccaaatctaccacccccccctaaacgataaaaattttaaatataacgtatctaaaccgaacccgcgccgtaaaaaacctaccctaccgaaaacccgaacgacgaacgcccacaaatcaaaactcgatacgacgccgcaaccaactctacccgcgaaccgaatccgaactactaaaaaaaaaccgcgctaaaaacgacgacgtcgaaacgaaaacgaaaaccgaacgacaactccaacgcccgtaaaaaaaaaacgacaacgacgacgactaaaactactataacgaccgacgcgaaacgataacaaaaaaaacccacccctatccacataaacaatcgcaaaaacctccgctaatacattcacgcctaaacgaaataaacgaacgaccgtaacgacgacgactacaaaacgaactaaaaacctaaaaacgcctaacgatcgcaaaaacctcgccgctccgacgcgacgaatacgaccattttacgacctaaaa

SEQ ID NO: 40619 - DNA, 523 bp, Artificial Sequence
  chemically treated genomic DNA (Homo sapiens) CpG-island No: 40619
ggtgttagaggagtaaatttatcgtatacgttaggtttgttatttttttttgggcggtggggattttggatgtaacgtgtttaggtcgagttcgcgtcgtgaaaggtttattttgtcgaaagttcgggcggcgggcgtttataagttagggttcggtgcggcgtcgtagttagttttgttcgcgagtcgagttcgggttgttgagggggagtcgcgttgggggcggcggcgtcggggcgggggcgggagtcgggcggtagttttagcgttcgtgggggaggagcggtagcggcggcggttggagttgttgtggcgatcgacgcgaggcggtggtagaggagatttatttttgtttatatggatagtcgtaaaggttttcgttgatgtatttacgtttgggcggggtgggcggacggtcgtagcggcggcggttgtagaacgagttaggggtttgggggcgtttgacggtcgtagagatttcgtcgtttcggcgcggcgggtgcggttattttacggtttggga

SEQ ID NO: 40620 - DNA, 523 bp, Artificial Sequence
  chemically treated genomic DNA (Homo sapiens) CpG-island No: 40620
tcccaaaccgtaaaataaccgcacccgccgcgccgaaacgacgaaatctctacgaccgtcaaacgcccccaaacccctaactcgttctacaaccgccgccgctacgaccgtccgcccaccccgcccaaacgtaaatacatcaacgaaaacctttacgactatccatataaacaaaaataaatctcctctaccaccgcctcgcgtcgatcgccacaacaactccaaccgccgccgctaccgctcctcccccacgaacgctaaaactaccgcccgactcccgcccccgccccgacgccgccgcccccaacgcgactccccctcaacaacccgaactcgactcgcgaacaaaactaactacgacgccgcaccgaaccctaacttataaacgcccgccgcccgaactttcgacaaaataaacctttcacgacgcgaactcgacctaaacacgttacatccaaaatccccaccgcccaaaaaaaaataacaaacctaacgtatacgataaatttactcctctaacacc

SEQ ID NO: 40621 - DNA, 538 bp, Artificial Sequence
  chemically treated genomic DNA (Homo sapiens) CpG-island No: 40621
gggcggagtttggtaatttggggattattaataggatgtttagtcggaggtggttttgcgcgtgacgtaacggtgttcggaggtagggggcgtaggggtcgggttgttcggcgttttagtttagtagcgacgttgcgggttttgggcgttaggagagtttttcggagtcgatttttttgttggttgttttgtgatcgtttttcggttttgtttttttggtcgaagtgttcgttgtcgggcgcgggttttaggtaacggtggtgttttcgcgttttttttcgtttttcgattgggtttatcggttttagttcgcggggaagggagaagcggtggcggtagtagtttcggtcggtttttgttttgggttgtgttgcgaagaaggtaaggttcggcgattgtaggggagttgggtaggggagggcgggaaagttatcgttaggcgttcgggttacgggtagttttttaaattttgtacgttggtttggtgtttcgtaaatttcgtggtattttttaagttagtagtaaagaaagttagtaa

SEQ ID NO: 40622 - DNA, 538 bp, Artificial Sequence
  chemically treated genomic DNA (Homo sapiens) CpG-island No: 40622
ttactaactttctttactactaacttaaaaaataccacgaaatttacgaaacaccaaaccaacgtacaaaatttaaaaaactacccgtaacccgaacgcctaacgataactttcccgccctcccctacccaactcccctacaatcgccgaaccttaccttcttcgcaacacaacccaaaacaaaaaccgaccgaaactactaccgccaccgcttctcccttccccgcgaactaaaaccgataaacccaatcgaaaaacgaaaaaaaacgcgaaaacaccaccgttacctaaaacccgcgcccgacaacgaacacttcgaccaaaaaaacaaaaccgaaaaacgatcacaaaacaaccaacaaaaaaatcgactccgaaaaactctcctaacgcccaaaacccgcaacgtcgctactaaactaaaacgccgaacaacccgacccctacgccccctacctccgaacaccgttacgtcacgcgcaaaaccacctccgactaaacatcctattaataatccccaaattaccaaactccgccc

SEQ ID NO: 40623 - DNA, 538 bp, Artificial Sequence
  chemically treated genomic DNA (Homo sapiens) CpG-island No: 40623
ttgttaattttttttattattgatttgagagatgttacgagatttgcggaatattaaattagcgtgtagggtttaaaaggttgttcgtgattcgggcgtttgacggtaattttttcgtttttttttatttaatttttttgtagtcgtcgagttttgtttttttcgtagtatagtttaggataagggtcggtcggagttgttgtcgttatcgtttttttttttttcgcgggttgaggtcggtggatttaatcgggaagcgaggagaggcgcgggagtattatcgttatttgaggttcgcgttcggtagcgggtatttcggttaagaggatagagtcggaaagcggttatagagtagttagtaggaaggtcgatttcggaaagtttttttggcgtttagggttcgtaacgtcgttgttaagttaaagcgtcggatagttcggtttttacgttttttgttttcgagtatcgttgcgttacgcgtagggttattttcggttgagtattttattggtggtttttaggttgttaggtttcgttt

SEQ ID NO: 40624 - DNA, 538 bp, Artificial Sequence
  chemically treated genomic DNA (Homo sapiens) CpG-island No: 40624
aaacgaaacctaacaacctaaaaaccaccaataaaatactcaaccgaaaataaccctacgcgtaacgcaacgatactcgaaaacaaaaaacgtaaaaaccgaactatccgacgctttaacttaacaacgacgttacgaaccctaaacgccaaaaaaactttccgaaatcgaccttcctactaactactctataaccgctttccgactctatcctcttaaccgaaatacccgctaccgaacgcgaacctcaaataacgataatactcccgcgcctctcctcgcttcccgattaaatccaccgacctcaacccgcgaaaaaaaaaaaaacgataacgacaacaactccgaccgacccttatcctaaactatactacgaaaaaaacaaaactcgacgactacaaaaaaattaaataaaaaaaaacgaaaaaattaccgtcaaacgcccgaatcacgaacaaccttttaaaccctacacgctaatttaatattccgcaaatctcgtaacatctctcaaatcaataataaaaaaaattaacaa

SEQ ID NO: 40625 - DNA, 1424 bp, Artificial Sequence
  chemically treated genomic DNA (Homo sapiens) CpG-island No: 40625
cggtttcgcgttttcgttttacgtttcggagtcgtttagtcgcggttttttagtttcggtcgcgttttagttttaacggtttcgcgttcgttcgtcgtaggtggtcgtgagggaggtgttatagtttcggttgtttacgatagatacgggcgttttagcgcgcgtacgttcggcgtcgttgcgtcgttttcgttttttcggcgtgcgcgcgttcggcgggtcggcgggggcggggagggggcggagtcgtcggcggcggggttgaggcgttgaggcggtcgtggcggcggcggcggcggcggcggtagcggcggttaagcggttaggttggcggtcggggtttcgggtcgcgcgaggttacggttacgtcgcgtcgttgcgtataattaacgaggtagagcgtcgttcggcgcgagattgcggtcgaagcgtggggcgcgcgtgcggaggattaggcgcggcgcggttgcggttgaggtgagggcggcgcggggtcgcggcggttcgggcgggcgcgggtttcggatttcgcggtggcggcgtttatgtaagcgtcgggtagggattggtggtggggtcggagttgcgggtcgtttcgggagcggagggcgttcgcggagaagcgagggtgtcgcggtatcgtttcgtatttatttttttgggtcgttcgtttgtttcggcgttcggttttcggaggaagttgcgttcgggcggtttcgcgttttttttcgagggcgtcgagttcgcgtgggatgcgtcgcgttgcgtcgcggggagggtaggtgcgtcgggacgaggttgcgttttggggatcgagattgcgttttggggaggggacggtgtgttttggagatcggaggttgcgttggggacgaggttgcgttcggggattagaggttgtttcgggtataaggttgcgtcggggaacgggaggttgcgttggtaataaggttgcgtttggggacggtaggttatgtttttggggagacgtttcgttcggtatgggacgttgcgtcgggggacggtaggttgcgttcgggatgaggttgggttcgggtaggggaggttgttttgggaggggacgttgtgttacgggagtggagattgcgttggggacgagtttgcgttttggacggttttgcgtgttttttcgagggcgtagtgttcgcgcgggatgttttgcgtcgcgggcggttcgggttagggaagtttttgcgggtgtcgggcgtttgtagcgatcgggagtaatttggggtagttgggggttcgaggtgatttttgacgtgtttatattagaaggaaaattattgcgtggtggatgggtgcgagggaaggtgttagattgggttgtggacgttgaaacgtgttggagtttcgatttatacgttggaaaatttaatttaaaacgtgtttttgtttaggtt

SEQ ID NO: 40626 - DNA, 1424 bp, Artificial Sequence
  chemically treated genomic DNA (Homo sapiens) CpG-island No: 40626
aacctaaacaaaaacacgttttaaattaaattttccaacgtataaatcgaaactccaacacgtttcaacgtccacaacccaatctaacaccttccctcgcacccatccaccacgcaataattttccttctaatataaacacgtcaaaaatcacctcgaacccccaactaccccaaattactcccgatcgctacaaacgcccgacacccgcaaaaacttccctaacccgaaccgcccgcgacgcaaaacatcccgcgcgaacactacgccctcgaaaaaacacgcaaaaccgtccaaaacgcaaactcgtccccaacgcaatctccactcccgtaacacaacgtcccctcccaaaacaacctcccctacccgaacccaacctcatcccgaacgcaacctaccgtcccccgacgcaacgtcccataccgaacgaaacgtctccccaaaaacataacctaccgtccccaaacgcaaccttattaccaacgcaacctcccgttccccgacgcaaccttatacccgaaacaacctctaatccccgaacgcaacctcgtccccaacgcaacctccgatctccaaaacacaccgtcccctccccaaaacgcaatctcgatccccaaaacgcaacctcgtcccgacgcacctaccctccccgcgacgcaacgcgacgcatcccacgcgaactcgacgccctcgaaaaaaaacgcgaaaccgcccgaacgcaacttcctccgaaaaccgaacgccgaaacaaacgaacgacccaaaaaaataaatacgaaacgataccgcgacaccctcgcttctccgcgaacgccctccgctcccgaaacgacccgcaactccgaccccaccaccaatccctacccgacgcttacataaacgccgccaccgcgaaatccgaaacccgcgcccgcccgaaccgccgcgaccccgcgccgccctcacctcaaccgcaaccgcgccgcgcctaatcctccgcacgcgcgccccacgcttcgaccgcaatctcgcgccgaacgacgctctacctcgttaattatacgcaacgacgcgacgtaaccgtaacctcgcgcgacccgaaaccccgaccgccaacctaaccgcttaaccgccgctaccgccgccgccgccgccgccgccacgaccgcctcaacgcctcaaccccgccgccgacgactccgccccctccccgcccccgccgacccgccgaacgcgcgcacgccgaaaaaacgaaaacgacgcaacgacgccgaacgtacgcgcgctaaaacgcccgtatctatcgtaaacaaccgaaactataacacctccctcacgaccacctacgacgaacgaacgcgaaaccgttaaaactaaaacgcgaccgaaactaaaaaaccgcgactaaacgactccgaaacgtaaaacgaaaacgcgaaaccg

SEQ ID NO: 40627 - DNA, 1424 bp, Artificial Sequence
  chemically treated genomic DNA (Homo sapiens) CpG-island No: 40627
aatttggataggaatacgttttaggttaggttttttagcgtgtaaatcgggattttaatacgttttagcgtttatagtttaatttgatattttttttcgtatttatttattacgtaataattttttttttgatgtgaatacgttaaaagttatttcgggtttttaattgttttagattgttttcgatcgttgtagacgttcggtattcgtaggaatttttttggttcgggtcgttcgcggcgtagagtatttcgcgcggatattgcgttttcggaaggatacgtaggatcgtttagggcgtagattcgtttttaacgtagtttttattttcgtggtatagcgtttttttttaaggtagttttttttgttcgggtttagttttatttcgggcgtagtttgtcgtttttcggcgtagcgttttatgtcgggcggagcgtttttttagggatatagtttatcgtttttaggcgtagttttgttgttaacgtagtttttcgtttttcggcgtaattttgtattcggggtagtttttggttttcgggcgtagtttcgtttttagcgtagttttcgatttttagggtatatcgttttttttttaaaacgtagtttcggtttttagggcgtagtttcgtttcggcgtatttgtttttttcgcggcgtagcgcggcgtattttacgcggattcggcgttttcgggaggggacgcggggtcgttcgggcgtagtttttttcgggagtcgagcgtcggagtagacgggcgatttaggagggtgggtgcgaggcggtgtcgcggtattttcgttttttcgcgggcgtttttcgttttcgggacggttcgtagtttcggttttattattagtttttgttcggcgtttatataaacgtcgttatcgcggggttcggagttcgcgttcgttcgagtcgtcgcggtttcgcgtcgtttttattttagtcgtagtcgcgtcgcgtttggtttttcgtacgcgcgttttacgtttcggtcgtagtttcgcgtcgggcggcgttttgtttcgttggttgtgcgtagcggcgcggcgtggtcgtggtttcgcgcggttcggagtttcggtcgttaatttggtcgtttggtcgtcgttgtcgtcgtcgtcgtcgtcgtcgttacggtcgttttagcgttttagtttcgtcgtcggcggtttcgtttttttttcgttttcgtcggttcgtcgggcgcgcgtacgtcgagggggcgggggcggcgtagcgacgtcggacgtgcgcgcgttggggcgttcgtgtttgtcgtgggtagtcggagttgtggtattttttttacgattatttgcggcggacgggcgcggggtcgttggggttggagcgcggtcggagttgagagatcgcggttgggcggtttcggagcgtggggcgagagcgcgggatcg

SEQ ID NO: 40628 - DNA, 1424 bp, Artificial Sequence
  chemically treated genomic DNA (Homo sapiens) CpG-island No: 40628
cgatcccgcgctctcgccccacgctccgaaaccgcccaaccgcgatctctcaactccgaccgcgctccaaccccaacgaccccgcgcccgtccgccgcaaataatcgtaaaaaaaataccacaactccgactacccacgacaaacacgaacgccccaacgcgcgcacgtccgacgtcgctacgccgcccccgccccctcgacgtacgcgcgcccgacgaaccgacgaaaacgaaaaaaaaacgaaaccgccgacgacgaaactaaaacgctaaaacgaccgtaacgacgacgacgacgacgacgacaacgacgaccaaacgaccaaattaacgaccgaaactccgaaccgcgcgaaaccacgaccacgccgcgccgctacgcacaaccaacgaaacaaaacgccgcccgacgcgaaactacgaccgaaacgtaaaacgcgcgtacgaaaaaccaaacgcgacgcgactacgactaaaataaaaacgacgcgaaaccgcgacgactcgaacgaacgcgaactccgaaccccgcgataacgacgtttatataaacgccgaacaaaaactaataataaaaccgaaactacgaaccgtcccgaaaacgaaaaacgcccgcgaaaaaacgaaaataccgcgacaccgcctcgcacccaccctcctaaatcgcccgtctactccgacgctcgactcccgaaaaaaactacgcccgaacgaccccgcgtcccctcccgaaaacgccgaatccgcgtaaaatacgccgcgctacgccgcgaaaaaaacaaatacgccgaaacgaaactacgccctaaaaaccgaaactacgttttaaaaaaaaaacgatataccctaaaaatcgaaaactacgctaaaaacgaaactacgcccgaaaaccaaaaactaccccgaatacaaaattacgccgaaaaacgaaaaactacgttaacaacaaaactacgcctaaaaacgataaactatatccctaaaaaaacgctccgcccgacataaaacgctacgccgaaaaacgacaaactacgcccgaaataaaactaaacccgaacaaaaaaaactaccttaaaaaaaaacgctataccacgaaaataaaaactacgttaaaaacgaatctacgccctaaacgatcctacgtatccttccgaaaacgcaatatccgcgcgaaatactctacgccgcgaacgacccgaaccaaaaaaattcctacgaataccgaacgtctacaacgatcgaaaacaatctaaaacaattaaaaacccgaaataacttttaacgtattcacatcaaaaaaaaaattattacgtaataaataaatacgaaaaaaaatatcaaattaaactataaacgctaaaacgtattaaaatcccgatttacacgctaaaaaacctaacctaaaacgtattcctatccaaatt

SEQ ID NO: 40629 - DNA, 915 bp, Artificial Sequence
  chemically treated genomic DNA (Homo sapiens) CpG-island No: 40629
tcgatgggtgtatgttcgatagtggtgtgtgcgtttatcgggtgtgtgttcgacggtgtgtgcgttcgatgggtgtgtgtgttcgatagtggtgtgtgcgttcgatgggtgtgtgtgttcgatagtggtgtgtgcgttcgtcgggtgtgcgttcgacgggggtgtgtgttcgatagtggtgtgtgcgttcgacgggggtgtgtgttcgatagtggtgtgtgcgttcgacgggggtgtgtgttcgatagtggtgtgtgcgttcgacgggggtgtgtgttcgattggtgtgtgcgttcgacgggtgtgtgtgttcgatagtggtgtgtgcgttcgatgggtgtgtgtgttcgatagtggtgtgtgcgttcgtcgggtgtgtgttcgatagtggtgtgtgttcgatagtggtgtgtgcgttcgacgggggtgtgtgttcgatagtggtgtgtgcgttcgttgggtgtgtgtttaatagtggtgtgtgcgttcgatgggtgtgtgtgttcgatagtggtgtgtgcgttcgtcgggtgtgtgttcgatagtggtgtgtgttcgatagtggtgtgtgttcgatagtggtgtgtgtattcgacgggggtatgtgttcgatagtggtgtgtgcgttcgtcgggtgtgtgttcgatagtggtgtgtgcgttcgacgggggtgtgtgttcgatagtggtgtgtgcgttcgacgggggtgtgtgttcgatagtggtgtgtgcgttcgatgggtgtgtgtgttcgatagtggtgtgtgcgttcgacgggtgtgtgcgtttgataggagtgtgtttgatatgggtgtgtgagcgttcggtaggggtacgtatattcggggtgtgtgtgtttgacgtgtgtgtgtgtttgatatgggtgtgtgtatttggtagaggtgtgtgcgtttag
